United States Patent Application Publication US 2007/0214517 A1 - sequence listing, part 47

SEQ ID NO: 58258 - protein, 162 aa, Glycine max
  peptide (1)..(162): Ceres Seq. ID no. 12608508
  misc_feature (1)..(130): Homolog of NCBI NO: 21313210 NR Description: RIKEN cDNA 2310042M24 [Mus musculus]
  misc_feature (1)..(130): Homolog of NCBI NO: 27700999 NR Description: similar to CGI-31 protein [Homo sapiens] [Rattus
  misc_feature (1)..(130): Homolog of NCBI NO: 26344562 NR Description: unnamed protein product [Mus musculus]
  misc_feature (1)..(130): Homolog of NCBI NO: 31234890 NR Description: ENSANGP00000011893 [Anopheles gambiae]
  misc_feature (1)..(127): Homolog of NCBI NO: 39591530 NR Description: Hypothetical protein CBG17959 [Caenorhabditis
  misc_feature (1)..(130): Homolog of NCBI NO: 7705726 NR Description: CGI-31 protein [Homo sapiens]
  misc_feature (1)..(130): Homolog of NCBI NO: 20130157 NR Description: CG11007-PA [Drosophila melanogaster]
  misc_feature (1)..(127): Homolog of NCBI NO: 17552500 NR Description: Putative endoplasmic reticulum protein of ancient
  misc_feature (1)..(160): Homolog of NCBI NO: 34903644 NR Description: B1015E06.5 [Oryza sativa (japonica
  misc_feature (1)..(161): Homolog of NCBI NO: 15239121 NR Description: putative protein; protein id: At5g11640.1
MDRRLAVWYILVFLVIHMLTQQPPFQGLGTSSKLTPLQLESLLTEGTTTRLWLVEFRSSYSPACIRSSQQFPELSITYSSKNLSFGIVDLGLFPNAAERFGISLSGSMGQLPTFILFENAAEVARFPELDFEAAYFHPKITKGLLSRHFELDRHLLEYVSGK

SEQ ID NO: 58259 - DNA, 1554 bp, Glycine max
  misc_feature (1)..(1554): Ceres Seq. ID no. 15171156
gtatcttccatttgaaaacagcattgtgttgttacctacccccattcattcactcaccaacaccaaacaaacaagtccctgctggtggcggacactccgagggcctctcccctcttcctctccacagtataaaacccaaaactcacacaacccgacccatcacgcaagacaaaagcgcgctcttgtgttccgtttccgtttgtttctgttttctttctctttcagatctcgaaaaatgcagagcgcggctttcactttctctccctctctccctctccgcaacccttcccctaactattggaggagaccttctctctccctccgtctctcggccaaacacggcaacagcaacagcgatgacgtgaactccaatggcgtttcttcaactttcttcactcgccgatcttggactcttcctccttcctcttccttcaagttcaggcctctccctccccgcgccgccgaaagcgccgttcccgaaagtgcgcccgtcgaaaacccgctcttcaaaactctcgaactcggcgccttgtttggcctctggtacctcttcaacatctacttcaacatctacaacaaacaggtgttgaaggcgtttcattacccggtaactgtgactgttgttcagtttgctgttgggactgtgctcgtggcatttatgtggggtttgaatctctataagaggcctaaactcagtggtgctatgcttggagcgattttgccgctggctgcagtgcatactttggggaaccttttcactaatatgagtcttggaaaggtggctgtgtctttcactcacactatcaaagccatggagcctttcttttcagtggtcctttctgccatgttccttggagagtttcctacaccgtgggtggttgattctcttgtgcctattgttggtggagttgcactggcatctgttacagaggcctctttcaattgggctggattttggagtgcaatggcatccaatgtgacaaatcaatctcgtaatgttcttagcaaaaaggccatggttaataaagaggattctatggacaacattactctcttctctatcataacagtaatgtccttcttcttgttagcacctgtggctatcttcatggagggtgtcaaatttactcctgcttacttgcaatctgctggggtgaatgttagacaactttacatcagatctcttcttgctgcactctgtttccatgcgtatcaacaagtttcttatatgatattgcaaagggtatcacctgttacccactccgtgggcaactgtgtgaagcgggttgtggtcattgtgagctctgtcatcttcttccaaacacctgtctcacctgtgaatgcttttggaactgctatagctcttgctggcgttttcctctattcaagggtgaagcgtattaaggcaaagccaaaaacagcttaattttcaattgtaaaattttgttagttgcatcacggaagccaaatagttgcaatctgcaattctgaatttctttgtaggcgagatagggaatttgaagattatctttattgatccttacattttccttt

SEQ ID NO: 58260 - protein, 474 aa, Glycine max
  peptide (1)..(474): Ceres Seq. ID no. 15171157
  misc_feature (183)..(308): Pfam Name: Integral membrane protein DUF6 Pfam Description: Integral membrane protein DUF6
  misc_feature (165)..(474): Homolog of NCBI NO: 29647427 NR Description: putative phosphoenolpyruvate/phosphate
  misc_feature (83)..(474): Homolog of NCBI NO: 13991929 NR Description: phosphoenolpyruvate/phosphate translocator [Oryza
  misc_feature (155)..(474): Homolog of NCBI NO: 9295275 NR Description: phosphoenolpyruvate/phosphate translocator
  misc_feature (79)..(474): Homolog of NCBI NO: 7546829 NR Description: phosphate/phosphoenolpyruvate translocator
  misc_feature (79)..(474): Homolog of NCBI NO: 1778141 NR Description: phosphate/phosphoenolpyruvate translocator
  misc_feature (79)..(474): Homolog of NCBI NO: 21554233 NR Description: phosphate/phosphoenolpyruvate translocator
  misc_feature (79)..(474): Homolog of NCBI NO: 15242801 NR Description: triose phosphate/phosphate translocator, putative
  misc_feature (79)..(474): Homolog of NCBI NO: 7489170 NR Description: phosphate/phosphoenolpyruvate translocator
  misc_feature (79)..(474): Homolog of NCBI NO: 1706110 NR Description: Triose phosphate/phosphate translocator,
  misc_feature (79)..(473): Homolog of NCBI NO: 7489171 NR Description: phosphate/phosphoenolpyruvate translocator
YLPFENSIVLLPTPIHSLTNTKQTSPCWWRTLRGPLPSSSPQYKTQNSHNPTHHARQKRALVFRFRLFLFSFSFRSRKMQSAAFTFSPSLPLRNPSPNYWRRPSLSLRLSAKHGNSNSDDVNSNGVSSTFFTRRSWTLPPSSSFKFRPLPPRAAESAVPESAPVENPLFKTLELGALFGLWYLFNIYFNIYNKQVLKAFHYPVTVTVVQFAVGTVLVAFMWGLNLYKRPKLSGAMLGAILPLAAVHTLGNLFTNMSLGKVAVSFTHTIKAMEPFFSVVLSAMFLGEFPTPWVVDSLVPIVGGVALASVTEASFNWAGFWSAMASNVTNQSRNVLSKKAMVNKEDSMDNITLFSIITVMSFFLLAPVAIFMEGVKFTPAYLQSAGVNVRQLYIRSLLAALCFHAYQQVSYMILQRVSPVTHSVGNCVKRVVVIVSSVIFFQTPVSPVNAFGTAIALAGVFLYSRVKRIKAKPKTA

SEQ ID NO: 58261 - protein, 396 aa, Glycine max
  peptide (1)..(396): Ceres Seq. ID no. 15171158
  misc_feature (105)..(230): Pfam Name: Integral membrane protein DUF6 Pfam Description: Integral membrane protein DUF6
  misc_feature (87)..(396): Homolog of NCBI NO: 29647427 NR Description: putative phosphoenolpyruvate/phosphate
  misc_feature (5)..(396): Homolog of NCBI NO: 13991929 NR Description: phosphoenolpyruvate/phosphate translocator [Oryza
  misc_feature (77)..(396): Homolog of NCBI NO: 9295275 NR Description: phosphoenolpyruvate/phosphate translocator
  misc_feature (1)..(396): Homolog of NCBI NO: 7546829 NR Description: phosphate/phosphoenolpyruvate translocator
  misc_feature (1)..(396): Homolog of NCBI NO: 1778141 NR Description: phosphate/phosphoenolpyruvate translocator
  misc_feature (1)..(396): Homolog of NCBI NO: 21554233 NR Description: phosphate/phosphoenolpyruvate translocator
  misc_feature (1)..(396): Homolog of NCBI NO: 15242801 NR Description: triose phosphate/phosphate translocator, putative
  misc_feature (1)..(396): Homolog of NCBI NO: 7489170 NR Description: phosphate/phosphoenolpyruvate translocator
  misc_feature (1)..(396): Homolog of NCBI NO: 1706110 NR Description: Triose phosphate/phosphate translocator,
  misc_feature (1)..(395): Homolog of NCBI NO: 7489171 NR Description: phosphate/phosphoenolpyruvate translocator
MQSAAFTFSPSLPLRNPSPNYWRRPSLSLRLSAKHGNSNSDDVNSNGVSSTFFTRRSWTLPPSSSFKFRPLPPRAAESAVPESAPVENPLFKTLELGALFGLWYLFNIYFNIYNKQVLKAFHYPVTVTVVQFAVGTVLVAFMWGLNLYKRPKLSGAMLGAILPLAAVHTLGNLFTNMSLGKVAVSFTHTIKAMEPFFSVVLSAMFLGEFPTPWVVDSLVPIVGGVALASVTEASFNWAGFWSAMASNVTNQSRNVLSKKAMVNKEDSMDNITLFSIITVMSFFLLAPVAIFMEGVKFTPAYLQSAGVNVRQLYIRSLLAALCFHAYQQVSYMILQRVSPVTHSVGNCVKRVVVIVSSVIFFQTPVSPVNAFGTAIALAGVFLYSRVKRIKAKPKTA

SEQ ID NO: 58262 - protein, 255 aa, Glycine max
  peptide (1)..(255): Ceres Seq. ID no. 15171159
  misc_feature (1)..(89): Pfam Name: Integral membrane protein DUF6 Pfam Description: Integral membrane protein DUF6
  misc_feature (1)..(255): Homolog of NCBI NO: 29647427 NR Description: putative phosphoenolpyruvate/phosphate
  misc_feature (1)..(255): Homolog of NCBI NO: 13991929 NR Description: phosphoenolpyruvate/phosphate translocator [Oryza
  misc_feature (1)..(255): Homolog of NCBI NO: 9295275 NR Description: phosphoenolpyruvate/phosphate translocator
  misc_feature (1)..(255): Homolog of NCBI NO: 7546829 NR Description: phosphate/phosphoenolpyruvate translocator
  misc_feature (1)..(255): Homolog of NCBI NO: 1778141 NR Description: phosphate/phosphoenolpyruvate translocator
  misc_feature (1)..(255): Homolog of NCBI NO: 21554233 NR Description: phosphate/phosphoenolpyruvate translocator
  misc_feature (1)..(255): Homolog of NCBI NO: 15242801 NR Description: triose phosphate/phosphate translocator, putative
  misc_feature (1)..(255): Homolog of NCBI NO: 7489170 NR Description: phosphate/phosphoenolpyruvate translocator
  misc_feature (1)..(255): Homolog of NCBI NO: 1706110 NR Description: Triose phosphate/phosphate translocator,
  misc_feature (1)..(254): Homolog of NCBI NO: 7489171 NR Description: phosphate/phosphoenolpyruvate translocator
MWGLNLYKRPKLSGAMLGAILPLAAVHTLGNLFTNMSLGKVAVSFTHTIKAMEPFFSVVLSAMFLGEFPTPWVVDSLVPIVGGVALASVTEASFNWAGFWSAMASNVTNQSRNVLSKKAMVNKEDSMDNITLFSIITVMSFFLLAPVAIFMEGVKFTPAYLQSAGVNVRQLYIRSLLAALCFHAYQQVSYMILQRVSPVTHSVGNCVKRVVVIVSSVIFFQTPVSPVNAFGTAIALAGVFLYSRVKRIKAKPKTA

SEQ ID NO: 58263 - DNA, 1292 bp, Glycine max
  misc_feature (1)..(1292): Ceres Seq. ID no. 14316440
acatactcatcaggacagattcaagggagatggatgatgaaattgaaaggttcatcaaagtatggatttcagcaatcttatgtctatgttattgttattacatagcttcaagaataccaaagggcttcttgagacttctctccctccttccaattctctacctcttcatcacccttcccttgaaactctcttcacccaccttagttggatacacttccttcttcatttcttggcttggcactttcaagctcttccttttctccttcaaccaaggccctcttgccctatcacccccaaacattgttcaattcatctccattgcttcccttcccatcacccccaaacaaaacccatcaaccaatgaaaaaaacaccaccaacaaacccaaatggcttttgttcctaaaagttcttatttttgtaatgatcttaggtgtttataactacaaagaaaccttgcatcctgatttcttgttagtcatttattgctgccacgtgtaccttgccttagagcttatgttagtccttgttggagccactgttcaaaccctttttggttttgagatagaacctcaattcaacgaaccctacctttgtacatctcttcaagacttttggggtcgtagatggaacctcacggttactcatattctacggcccaccgtatacgaccctatacgccgtatgtctacgagttttgtcggccccttgtgtgccacgtcagctgccatgttggccacgttccttgtgtccgggcttgtgcacgagttattatattattaccttacacgtgtgcctcccacgtgggaggttacgtgtttttttgtgcttcacggtgtgtgtatggtagtggaggtggctgtgaagaaggtggctctccgtcgtgggtggcagctgcaccgtgctgtgtcggggccgctcgtggtggcgcttttggcggtcaccgcgaattggctgttttttcctcaactgttgaggaatggtttggataggaagtccattgaggagtatgctattttggtggattttgttaagtcaaagttaccatttaagaatgtttaacttgctagggcgaacattgttaaaggatatgattgtgagccaaaagtaatgttcactctaaggactaaggatacttaaacattacgtatgtttaacgtgttagggtgcaaaggggctcattttttacttataaaaaataatataactattaaataagacatgttaattttggaaaacaatgagtgtgatcacccaataataaacatctgaagatgtgcaattcaaaagtct

SEQ ID NO: 58264 - protein, 352 aa, Glycine max
  peptide (1)..(352): Ceres Seq. ID no. 14316441
  misc_feature (59)..(325): Pfam Name: MBOAT family Pfam Description: MBOAT family
  misc_feature (10)..(347): Homolog of NCBI NO: 15240495 NR Description: long-chain-alcohol O-fatty-acyltransferase (wax
  misc_feature (9)..(347): Homolog of NCBI NO: 11362836 NR Description: wax synthase [imported] - Simmondsia chinensis
  misc_feature (10)..(346): Homolog of NCBI NO: 15240497 NR Description: long-chain-alcohol O-fatty-acyltransferase (wax
  misc_feature (10)..(344): Homolog of NCBI NO: 15240496 NR Description: long-chain-alcohol O-fatty-acyltransferase (wax
  misc_feature (10)..(346): Homolog of NCBI NO: 15240498 NR Description: long-chain-alcohol O-fatty-acyltransferase (wax
  misc_feature (10)..(344): Homolog of NCBI NO: 15240499 NR Description: long-chain-alcohol O-fatty-acyltransferase (wax
  misc_feature (10)..(348): Homolog of NCBI NO: 27728718 NR Description: wax synthase isoform 3 [Vitis vinifera]
  misc_feature (10)..(344): Homolog of NCBI NO: 15240500 NR Description: long-chain-alcohol O-fatty-acyltransferase (wax
  misc_feature (11)..(346): Homolog of NCBI NO: 27728716 NR Description: wax synthase isoform 2 [Vitis vinifera]
  misc_feature (11)..(346): Homolog of NCBI NO: 27728714 NR Description: wax synthase isoform 1 [Vitis vinifera]
ILIRTDSREMDDEIERFIKVWISAILCLCYCYYIASRIPKGFLRLLSLLPILYLFITLPLKLSSPTLVGYTSFFISWLGTFKLFLFSFNQGPLALSPPNIVQFISIASLPITPKQNPSTNEKNTTNKPKWLLFLKVLIFVMILGVYNYKETLHPDFLLVIYCCHVYLALELMLVLVGATVQTLFGFEIEPQFNEPYLCTSLQDFWGRRWNLTVTHILRPTVYDPIRRMSTSFVGPLCATSAAMLATFLVSGLVHELLYYYLTRVPPTWEVTCFFVLHGVCMVVEVAVKKVALRRGWQLHRAVSGPLVVALLAVTANWLFFPQLLRNGLDRKSIEEYAILVDFVKSKLPFKNV

SEQ ID NO: 58265 - protein, 343 aa, Glycine max
  peptide (1)..(343): Ceres Seq. ID no. 14316442
  misc_feature (50)..(316): Pfam Name: MBOAT family Pfam Description: MBOAT family
  misc_feature (1)..(338): Homolog of NCBI NO: 15240495 NR Description: long-chain-alcohol O-fatty-acyltransferase (wax
  misc_feature (1)..(338): Homolog of NCBI NO: 11362836 NR Description: wax synthase [imported] - Simmondsia chinensis
  misc_feature (1)..(337): Homolog of NCBI NO: 15240497 NR Description: long-chain-alcohol O-fatty-acyltransferase (wax
  misc_feature (1)..(335): Homolog of NCBI NO: 15240496 NR Description: long-chain-alcohol O-fatty-acyltransferase (wax
  misc_feature (1)..(337): Homolog of NCBI NO: 15240498 NR Description: long-chain-alcohol O-fatty-acyltransferase (wax
  misc_feature (1)..(335): Homolog of NCBI NO: 15240499 NR Description: long-chain-alcohol O-fatty-acyltransferase (wax
  misc_feature (1)..(339): Homolog of NCBI NO: 27728718 NR Description: wax synthase isoform 3 [Vitis vinifera]
  misc_feature (1)..(335): Homolog of NCBI NO: 15240500 NR Description: long-chain-alcohol O-fatty-acyltransferase (wax
  misc_feature (2)..(337): Homolog of NCBI NO: 27728716 NR Description: wax synthase isoform 2 [Vitis vinifera]
  misc_feature (2)..(337): Homolog of NCBI NO: 27728714 NR Description: wax synthase isoform 1 [Vitis vinifera]
MDDEIERFIKVWISAILCLCYCYYIASRIPKGFLRLLSLLPILYLFITLPLKLSSPTLVGYTSFFISWLGTFKLFLFSFNQGPLALSPPNIVQFISIASLPITPKQNPSTNEKNTTNKPKWLLFLKVLIFVMILGVYNYKETLHPDFLLVIYCCHVYLALELMLVLVGATVQTLFGFEIEPQFNEPYLCTSLQDFWGRRWNLTVTHILRPTVYDPIRRMSTSFVGPLCATSAAMLATFLVSGLVHELLYYYLTRVPPTWEVTCFFVLHGVCMVVEVAVKKVALRRGWQLHRAVSGPLVVALLAVTANWLFFPQLLRNGLDRKSIEEYAILVDFVKSKLPFKNV

SEQ ID NO: 58266 - protein, 212 aa, Glycine max
  peptide (1)..(212): Ceres Seq. ID no. 14316443
  misc_feature (1)..(185): Pfam Name: MBOAT family Pfam Description: MBOAT family
  misc_feature (1)..(207): Homolog of NCBI NO: 15240495 NR Description: long-chain-alcohol O-fatty-acyltransferase (wax
  misc_feature (1)..(207): Homolog of NCBI NO: 11362836 NR Description: wax synthase [imported] - Simmondsia chinensis
  misc_feature (1)..(206): Homolog of NCBI NO: 15240497 NR Description: long-chain-alcohol O-fatty-acyltransferase (wax
  misc_feature (1)..(204): Homolog of NCBI NO: 15240496 NR Description: long-chain-alcohol O-fatty-acyltransferase (wax
  misc_feature (1)..(206): Homolog of NCBI NO: 15240498 NR Description: long-chain-alcohol O-fatty-acyltransferase (wax
  misc_feature (1)..(204): Homolog of NCBI NO: 15240499 NR Description: long-chain-alcohol O-fatty-acyltransferase (wax
  misc_feature (1)..(208): Homolog of NCBI NO: 27728718 NR Description: wax synthase isoform 3 [Vitis vinifera]
  misc_feature (1)..(204): Homolog of NCBI NO: 15240500 NR Description: long-chain-alcohol O-fatty-acyltransferase (wax
  misc_feature (1)..(206): Homolog of NCBI NO: 27728716 NR Description: wax synthase isoform 2 [Vitis vinifera]
  misc_feature (1)..(206): Homolog of NCBI NO: 27728714 NR Description: wax synthase isoform 1 [Vitis vinifera]
MILGVYNYKETLHPDFLLVIYCCHVYLALELMLVLVGATVQTLFGFEIEPQFNEPYLCTSLQDFWGRRWNLTVTHILRPTVYDPIRRMSTSFVGPLCATSAAMLATFLVSGLVHELLYYYLTRVPPTWEVTCFFVLHGVCMVVEVAVKKVALRRGWQLHRAVSGPLVVALLAVTANWLFFPQLLRNGLDRKSIEEYAILVDFVKSKLPFKNV

SEQ ID NO: 58267 - DNA, 1619 bp, Glycine max
  misc_feature (1)..(1619): Ceres Seq. ID no. 14316522
aacaacaaaaaaaagtaaacagaaaaggggttaagcgaggaagactgtgtagaaactagaaaccctagagagagagagagatgagaagaactcttctgagaaatgctactctctacactcgcaaccttctccatcactcggcccctgcattcgacgcttcaactcgtccccaactcagactcttctgctccaatgaaacccccccaccggttccccaaatcgacgacgttgacaacaaagagctgaaagcgcagatcgagagctacttcaagggcgacgagcaggtgcttccgtcgatcatggagacgattctgaagcggaagctgtcgggaaagcacgaggacaccgacgacgagctcatggaggagctccgcatgcgccccctggacgacgttgacgaccgggacttcgagtctgacttcgagaacattcacgataccgacgaggagatcgacgatttgtacaacgccagggacgtggtgatgaagaggatggtgaaggacgagtacttcaacatggatgataaaaagtgggatgacattgttgaggacgggatcaagcacgggcttcttagggacaccaaggagtgcgaggagattctcgaggatatgctcagctgggacaaactcctacctgatgagataaaacagaaggtggaagtaaaatttaatgagctaggggacatgtgtgaaagaggtgaacttgaacctgaagaagcttatgaacagtttaagaagtttgaggatgagattgtggcagaatacctggacaaaatggaaaaggaggaggctccacagtttgatgatactactgtgccggataagaaaaaggacttggatgatccaccgggtgaaggtccaattctgcgctggcaaacccgggtagtctttgctcctggtggtgatgcttggcatccaaagaacaggaaagtaaaactgtctgttactgtgaaggagctagggctttcaaaataccaatttcgccgtctcagggaattggttggaaaacgttatcatccagggagagatgagcttacaataactagtgagaggtttgaacatcgagaagaaaacagaaaggactgcttaaggacccttctccatctcattgaggaggcagggaaagctaataaactagtagatgatgctcgatcctcatacgtaaaagagaggcttcgtgccaatccagctttcatggagaggctgcatgccaagtcaatgaggttgcgagaatctaatcaggttcctgcttgaggttttcagatctgatgtatgaattattgaaattcacctgccataattttttattgctccctggttttttgtatgagtcttatcttgggttccagctgcagaaaacaacctccctgcttagagggtaaggcctcatacatctgatccttcctagaccccacaactgcaggggagactcatgcaccggggtacctcttagtcatatctttcgtatttagtgcttgaataatggataattttttttacctcttgttagatattgtatgctagttgactcaaatgttacatttttgtggagtaacattgatcatagaaaaggccggatgatccccaactgaagcaatggatttcaacattttatattat

SEQ ID NO: 58268 - protein, 390 aa, Glycine max
  peptide (1)..(390): Ceres Seq. ID no. 14316523
  misc_feature (1)..(127): Homolog of NCBI NO: 15219546 NR Description: hypothetical protein [Arabidopsis thaliana]
  misc_feature (47)..(390): Homolog of NCBI NO: 18415698 NR Description: expressed protein [Arabidopsis thaliana]
  misc_feature (47)..(390): Homolog of NCBI NO: 7485722 NR Description: hypothetical protein F18E5.80 - Arabidopsis
  misc_feature (47)..(390): Homolog of NCBI NO: 18401816 NR Description: expressed protein [Arabidopsis thaliana]
MRRTLLRNATLYTRNLLHHSAPAFDASTRPQLRLFCSNETPPPVPQIDDVDNKELKAQIESYFKGDEQVLPSIMETILKRKLSGKHEDTDDELMEELRMRPLDDVDDRDFESDFENIHDTDEEIDDLYNARDVVMKRMVKDEYFNMDDKKWDDIVEDGIKHGLLRDTKECEEILEDMLSWDKLLPDEIKQKVEVKFNELGDMCERGELEPEEAYEQFKKFEDEIVAEYLDKMEKEEAPQFDDTTVPDKKKDLDDPPGEGPILRWQTRVVFAPGGDAWHPKNRKVKLSVTVKELGLSKYQFRRLRELVGKRYHPGRDELTITSERFEHREENRKDCLRTLLHLIEEAGKANKLVDDARSSYVKERLRANPAFMERLHAKSMRLRESNQVPA

SEQ ID NO: 58269 - protein, 317 aa, Glycine max
  peptide (1)..(317): Ceres Seq. ID no. 14316524
  misc_feature (1)..(54): Homolog of NCBI NO: 15219546 NR Description: hypothetical protein [Arabidopsis thaliana]
  misc_feature (1)..(317): Homolog of NCBI NO: 18415698 NR Description: expressed protein [Arabidopsis thaliana]
  misc_feature (1)..(317): Homolog of NCBI NO: 7485722 NR Description: hypothetical protein F18E5.80 - Arabidopsis
  misc_feature (1)..(317): Homolog of NCBI NO: 18401816 NR Description: expressed protein [Arabidopsis thaliana]
METILKRKLSGKHEDTDDELMEELRMRPLDDVDDRDFESDFENIHDTDEEIDDLYNARDVVMKRMVKDEYFNMDDKKWDDIVEDGIKHGLLRDTKECEEILEDMLSWDKLLPDEIKQKVEVKFNELGDMCERGELEPEEAYEQFKKFEDEIVAEYLDKMEKEEAPQFDDTTVPDKKKDLDDPPGEGPILRWQTRVVFAPGGDAWHPKNRKVKLSVTVKELGLSKYQFRRLRELVGKRYHPGRDELTITSERFEHREENRKDCLRTLLHLIEEAGKANKLVDDARSSYVKERLRANPAFMERLHAKSMRLRESNQVPA

SEQ ID NO: 58270 - protein, 297 aa, Glycine max
  peptide (1)..(297): Ceres Seq. ID no. 14316525
  misc_feature (1)..(34): Homolog of NCBI NO: 15219546 NR Description: hypothetical protein [Arabidopsis thaliana]
  misc_feature (1)..(297): Homolog of NCBI NO: 18415698 NR Description: expressed protein [Arabidopsis thaliana]
  misc_feature (1)..(297): Homolog of NCBI NO: 7485722 NR Description: hypothetical protein F18E5.80 - Arabidopsis
  misc_feature (1)..(297): Homolog of NCBI NO: 18401816 NR Description: expressed protein [Arabidopsis thaliana]
MEELRMRPLDDVDDRDFESDFENIHDTDEEIDDLYNARDVVMKRMVKDEYFNMDDKKWDDIVEDGIKHGLLRDTKECEEILEDMLSWDKLLPDEIKQKVEVKFNELGDMCERGELEPEEAYEQFKKFEDEIVAEYLDKMEKEEAPQFDDTTVPDKKKDLDDPPGEGPILRWQTRVVFAPGGDAWHPKNRKVKLSVTVKELGLSKYQFRRLRELVGKRYHPGRDELTITSERFEHREENRKDCLRTLLHLIEEAGKANKLVDDARSSYVKERLRANPAFMERLHAKSMRLRESNQVPA

SEQ ID NO: 58271 - DNA, 1131 bp, Glycine max
  misc_feature (1)..(1131): Ceres Seq. ID no. 15226789
gaagggatccgtttcacggttattctgatcctttttcactctccaaaaccctaaatccctctcaattgccatgaaccctccacccaccaccagcttccccctgaagggcgaatgcggcaactgcagctcgaaggagcggcgcctcctccaccggctctggatgcgcggcatgaaccgccacctgtgcacatcctgcgtcctccgcctccatccctcctccttctgcccctcctgcttcgacttcttcgaccagcctctctccgtcacctcctccgccttcgcccaccgcttcgtctcatgcaccaaatgctcctccctcactcacctctcctgcctcccttcccctcctccttcccccttcctctgtcccccttgctcccaacaaaccttctccttcttcccagattctaccgctccattagataaacgccgcgccatcatcctcctctgcgcctgcaagatcgcggcggcatccgtctccaaatccctcgccctcgccaggaccagagtcgaacgcaccgtccgcgaggccgccctggcgagaaagagggccagggatgctcttgaccattgctccatcgtcgacaagatcaagcgcctcggacttgaaggcaccttcgaggcttcaaacagcaagtacttgggaatgaatcataatcataacaatgttgtgagtaataaaaaagaagagctcaatggcttcgggggaggtcagggtaaggttaaaactgaggcgatgtccttgactccccctgtcaacaaaaatgggaacaaccacgccaaattgccgaatcgagtagcgtagttcatgttgcctctactaacattttgctctggaaaaaccattcggatttatcaaggtagaggaagagagtgagtgtgttctagagttttgcagtggaattctgagtaagaacacattttatttgttttgggatttttttttcctcaaagcatacggctgattcgtttcattatccactccattattcccttgtaaagcctccgtagtattgtgattatgcgactctatttcattttaagtgccccgcctgtaattacgtcatgcacattttttgttgttccctttgtcagtatcatcatatgttagtccaaaaaaaaaaaaaaaaa

SEQ ID NO: 58272 - protein, 244 aa, Glycine max
  peptide (1)..(244): Ceres Seq. ID no. 15226790
  misc_feature (14)..(165): Homolog of NCBI NO: 15229050 NR Description: hypothetical protein [Arabidopsis thaliana]
  misc_feature (3)..(207): Homolog of NCBI NO: 34904592 NR Description: B1008C01.29 [Oryza sativa (japonica
  misc_feature (15)..(172): Homolog of NCBI NO: 18391032 NR Description: expressed protein [Arabidopsis thaliana]
MNPPPTTSFPLKGECGNCSSKERRLLHRLWMRGMNRHLCTSCVLRLHPSSFCPSCFDFFDQPLSVTSSAFAHRFVSCTKCSSLTHLSCLPSPPPSPFLCPPCSQQTFSFFPDSTAPLDKRRAIILLCACKIAAASVSKSLALARTRVERTVREAALARKRARDALDHCSIVDKIKRLGLEGTFEASNSKYLGMNHNHNNVVSNKKEELNGFGGGQGKVKTEAMSLTPPVNKNGNNHAKLPNRVA

SEQ ID NO: 58273 - protein, 214 aa, Glycine max
  peptide (1)..(214): Ceres Seq. ID no. 15226791
  misc_feature (1)..(135): Homolog of NCBI NO: 15229050 NR Description: hypothetical protein [Arabidopsis thaliana]
  misc_feature (1)..(177): Homolog of NCBI NO: 34904592 NR Description: B1008C01.29 [Oryza sativa (japonica
  misc_feature (1)..(142): Homolog of NCBI NO: 18391032 NR Description: expressed protein [Arabidopsis thaliana]
MRGMNRHLCTSCVLRLHPSSFCPSCFDFFDQPLSVTSSAFAHRFVSCTKCSSLTHLSCLPSPPPSPFLCPPCSQQTFSFFPDSTAPLDKRRAIILLCACKIAAASVSKSLALARTRVERTVREAALARKRARDALDHCSIVDKIKRLGLEGTFEASNSKYLGMNHNHNNVVSNKKEELNGFGGGQGKVKTEAMSLTPPVNKNGNNHAKLPNRVA

SEQ ID NO: 58274 - protein, 211 aa, Glycine max
  peptide (1)..(211): Ceres Seq. ID no. 15226792
  misc_feature (1)..(132): Homolog of NCBI NO: 15229050 NR Description: hypothetical protein [Arabidopsis thaliana]
  misc_feature (1)..(174): Homolog of NCBI NO: 34904592 NR Description: B1008C01.29 [Oryza sativa (japonica
  misc_feature (1)..(139): Homolog of NCBI NO: 18391032 NR Description: expressed protein [Arabidopsis thaliana]
MNRHLCTSCVLRLHPSSFCPSCFDFFDQPLSVTSSAFAHRFVSCTKCSSLTHLSCLPSPPPSPFLCPPCSQQTFSFFPDSTAPLDKRRAIILLCACKIAAASVSKSLALARTRVERTVREAALARKRARDALDHCSIVDKIKRLGLEGTFEASNSKYLGMNHNHNNVVSNKKEELNGFGGGQGKVKTEAMSLTPPVNKNGNNHAKLPNRVA

SEQ ID NO: 58275 - DNA, 851 bp, Glycine max
  misc_feature (1)..(851): Ceres Seq. ID no. 15225453
acactttttgtgacactaagtcattccattgtgacttttctacctcaaagatccaaagaaacacattgagcacttaaattaatattctctcatttgatcaccaacattggtgggggaatatcatggcaccaagaagaattgagatgctgctgagcatgtcccttgtaatggttctttggggtgtcacattggctcaatctgatcaatcaagtagttgcaccaatgtgttcataagtcttgctccatgccttgactatgttacaggaaatgcctctatcccttcttcttcttgttgctctcaacttgcctttgtggtacggtcacagccactgtgcctatgtgaggttgttaatggtggtgcttcatctattgctgcaagtttcaacatcaatcagactagggctttggcactccctactgcttgcaatgttcagacacctcctattacctcctgcagtgcctcggcttcttcctcacaaggtgtttctgtttcctactttccaaattccccttcaggaattggatctagcactgtttcatcaacgatcggaggcagtagaagtgtcggtgcctcatatcatggaaattcaagttcaacaaaattgccatgttctttgcttgtcatcatgtttttccttgcaacgactttgactttcaccttcaagaccatgacctagacaacgtcgttgcacatttttttaaactttgttattatcttctactgcttcgagcatactcacttactggtatcatttgtcctttatccttattaaaaaacttaggattaaaatttcccctgtatatttcatgtacatttttatttctctgtttcttctattgatggctaagac

SEQ ID NO: 58276 - protein, 184 aa, Glycine max
  peptide (1)..(184): Ceres Seq. ID no. 15225454
  misc_feature (32)..(111): Pfam Name: Protease inhibitor/seed storage/LTP family Pfam Description: Protease inhibitor/seed storage/LTP family
  misc_feature (1)..(168): Homolog of NCBI NO: 28269454 NR Description: putative protease inhibitor
  misc_feature (1)..(138): Homolog of NCBI NO: 18414320 NR Description: protease inhibitor/seed storage/lipid transfer
  misc_feature (1)..(138): Homolog of NCBI NO: 21592722 NR Description: unknown [Arabidopsis thaliana]
  misc_feature (14)..(145): Homolog of NCBI NO: 25553602 NR Description: protease inhibitor-like protein
  misc_feature (15)..(161): Homolog of NCBI NO: 25553595 NR Description: protease inhibitor-like protein
  misc_feature (1)..(180): Homolog of NCBI NO: 18407534 NR Description: protease inhibitor/seed storage/lipid transfer
  misc_feature (9)..(180): Homolog of NCBI NO: 21554014 NR Description: unknown [Arabidopsis thaliana]
  misc_feature (6)..(180): Homolog of NCBI NO: 24417478 NR Description: unknown [Arabidopsis thaliana]
  misc_feature (1)..(180): Homolog of NCBI NO: 21592774 NR Description: unknown [Arabidopsis thaliana]
  misc_feature (5)..(180): Homolog of NCBI NO: 18403453 NR Description: protease inhibitor/seed storage/lipid transfer
MAPRRIEMLLSMSLVMVLWGVTLAQSDQSSSCTNVFISLAPCLDYVTGNASIPSSSCCSQLAFVVRSQPLCLCEVVNGGASSIAASFNINQTRALALPTACNVQTPPITSCSASASSSQGVSVSYFPNSPSGIGSSTVSSTIGGSRSVGASYHGNSSSTKLPCSLLVIMFFLATTLTFTFKTMT

SEQ ID NO: 58277 - protein, 177 aa, Glycine max
  peptide (1)..(177): Ceres Seq. ID no. 15225455
  misc_feature (25)..(104): Pfam Name: Protease inhibitor/seed storage/LTP family Pfam Description: Protease inhibitor/seed storage/LTP family
  misc_feature (1)..(161): Homolog of NCBI NO: 28269454 NR Description: putative protease inhibitor
  misc_feature (1)..(131): Homolog of NCBI NO: 18414320 NR Description: protease inhibitor/seed storage/lipid transfer
  misc_feature (1)..(131): Homolog of NCBI NO: 21592722 NR Description: unknown [Arabidopsis thaliana]
  misc_feature (7)..(138): Homolog of NCBI NO: 25553602 NR Description: protease inhibitor-like protein
  misc_feature (8)..(154): Homolog of NCBI NO: 25553595 NR Description: protease inhibitor-like protein
  misc_feature (1)..(173): Homolog of NCBI NO: 18407534 NR Description: protease inhibitor/seed storage/lipid transfer
  misc_feature (2)..(173): Homolog of NCBI NO: 21554014 NR Description: unknown [Arabidopsis thaliana]
  misc_feature (1)..(173): Homolog of NCBI NO: 24417478 NR Description: unknown [Arabidopsis thaliana]
  misc_feature (1)..(173): Homolog of NCBI NO: 21592774 NR Description: unknown [Arabidopsis thaliana]
  misc_feature (1)..(173): Homolog of NCBI NO: 18403453 NR Description: protease inhibitor/seed storage/lipid transfer
MLLSMSLVMVLWGVTLAQSDQSSSCTNVFISLAPCLDYVTGNASIPSSSCCSQLAFVVRSQPLCLCEVVNGGASSIAASFNINQTRALALPTACNVQTPPITSCSASASSSQGVSVSYFPNSPSGIGSSTVSSTIGGSRSVGASYHGNSSSTKLPCSLLVIMFFLATTLTFTFKTMT

SEQ ID NO: 58278 - protein, 173 aa, Glycine max
  peptide (1)..(173): Ceres Seq. ID no. 15225456
  misc_feature (21)..(100): Pfam Name: Protease inhibitor/seed storage/LTP family Pfam Description: Protease inhibitor/seed storage/LTP family
  misc_feature (1)..(157): Homolog of NCBI NO: 28269454 NR Description: putative protease inhibitor
  misc_feature (1)..(127): Homolog of NCBI NO: 18414320 NR Description: protease inhibitor/seed storage/lipid transfer
  misc_feature (1)..(127): Homolog of NCBI NO: 21592722 NR Description: unknown [Arabidopsis thaliana]
  misc_feature (3)..(134): Homolog of NCBI NO: 25553602 NR Description: protease inhibitor-like protein
  misc_feature (4)..(150): Homolog of NCBI NO: 25553595 NR Description: protease inhibitor-like protein
  misc_feature (1)..(169): Homolog of NCBI NO: 18407534 NR Description: protease inhibitor/seed storage/lipid transfer
  misc_feature (1)..(169): Homolog of NCBI NO: 21554014 NR Description: unknown [Arabidopsis thaliana]
  misc_feature (1)..(169): Homolog of NCBI NO: 24417478 NR Description: unknown [Arabidopsis thaliana]
  misc_feature (1)..(169): Homolog of NCBI NO: 21592774 NR Description: unknown [Arabidopsis thaliana]
  misc_feature (1)..(169): Homolog of NCBI NO: 18403453 NR Description: protease inhibitor/seed storage/lipid transfer
MSLVMVLWGVTLAQSDQSSSCTNVFISLAPCLDYVTGNASIPSSSCCSQLAFVVRSQPLCLCEVVNGGASSIAASFNINQTRALALPTACNVQTPPITSCSASASSSQGVSVSYFPNSPSGIGSSTVSSTIGGSRSVGASYHGNSSSTKLPCSLLVIMFFLATTLTFTFKTMT

SEQ ID NO: 58279 - DNA, 814 bp, Glycine max
  misc_feature (1)..(814): Ceres Seq. ID no. 13504026
ataccaaacttaaaattggagaagacgaaacaatttagaaaagaaaaatgaaaatagtagaaaagaaggcattaggttaagagtgaaggcagtgagcgaaagagagcatagtaatacttactgagtgcttacagttgctgcgtcgcaaggtaccggcggcgacggagaactatcttctcaattttcgatcactgcattggttctgttgtcaagggttttgttcttcctgacttgcatacttgatggcttcaaagttgcagaagttgcaggccacagcatctcaagcgtctcaatttgtatgcagtcgtggaactaactactacaagcaattgctggaacagaacaagcaacacattcaggagcctcctacagcagagaaatgcaacctgttggcaaagcaattgttttacactcgccttgctagtattccgagtcgtaatgagtccttttggaaggaacttgattatgccaagaatttgtggaagaacaggaaagagctaaaggttgaagatgcaggaattgctgctttgtttggcctcgaatgctttgcatggttttgcgctggtgagattgttggcagaggatttactttcaccggttactatgtctgataataaccacttggaaagtgtagattttatcagggctaaacactcctaaagccaactgctctggtcatttatacattgtgtggattatggcattctgcatggcaatttttgttatgataagcctcaataaccccttgtagttgaaagcgggatgaaccttgtgatgttctcttattatgttggaaagctagtgatggtactcc

SEQ ID NO: 58280 - protein, 122 aa, Glycine max
  peptide (1)..(122): Ceres Seq. ID no. 13504027
  misc_feature (8)..(121): Pfam Name: Mitochondrial ATP synthase g subunit Pfam Description: Mitochondrial ATP synthase g subunit
  misc_feature (1)..(122): Homolog of NCBI NO: 34912342 NR Description: P0518F01.5 [Oryza sativa (japonica
  misc_feature (1)..(121): Homolog of NCBI NO: 15224821 NR Description: copia-related retroelement pol polyprotein
  misc_feature (1)..(121): Homolog of NCBI NO: 15236143 NR Description: expressed protein [Arabidopsis thaliana]
  misc_feature (1)..(121): Homolog of NCBI NO: 15233603 NR Description: expressed protein [Arabidopsis thaliana]
MASKLQKLQATASQASQFVCSRGTNYYKQLLEQNKQHIQEPPTAEKCNLLAKQLFYTRLASIPSRNESFWKELDYAKNLWKNRKELKVEDAGIAALFGLECFAWFCAGEIVGRGFTFTGYYV

SEQ ID NO: 58281 - DNA, 877 bp, Glycine max
  misc_feature (1)..(877): Ceres Seq. ID no. 15168318
atcactgctcattactcaatcttcttacactcctaataagtgtttttcatttcacaaacaccctaatctatctataacaacaatggcatcagatcgaggtgtttttttgaacaaaagctggggtgttggtggaagagaaatgaaggacagagattttgatgaagaagatgtgtggagtgtagcaaatgatgatagtggcaaagaaaccacaagggcatgcaaggaatcttgtggttcttcttcttcttcttctgcatggcgtttacctgctgctccaagaaagattccaagggctaataataatgctaatcccctacctgcagcttctgatgctccattggttaaaggatcctcatcagcacctatggacatccctgactggtcaaagatttatggtaagagttgcaagaaagggtcaacagcagatgatggtgcaagcaacaagggtggtgatgatgatgatgatgacgacgatgacatggttcctccacatgaatggattgctaggaagcttgcaaggagccagatttcatctttctctgtgtgtgaagggatggggaggacactcaaaggaagagatcttagtaaggtgaggaatgctattttgaccaaaactggcttcatagagtagtggttaatttaagagatttaattaggttggttgaataatgttaatgagttattgtaaatcttgtgagtttgattcctacttggatgtactaatgtaagctacttggatgtcttcatgtaagcttcaaattttggcatcattagtagccataccacaatcaaatcatccattattgttttactcgggtcccatgcaatcgtttttgttttgattattctcactataatatatagtagtttattagtg

SEQ ID NO: 58282 - protein, 209 aa, Glycine max
  peptide (1)..(209): Ceres Seq. ID no. 15168319
  misc_feature (49)..(209): Pfam Name: Protein of unknown function, DUF584 Pfam Description: Protein of unknown function, DUF584
  misc_feature (79)..(209): Homolog of NCBI NO: 21594619 NR Description: unknown [Arabidopsis thaliana]
  misc_feature (42)..(207): Homolog of NCBI NO: 30685620 NR Description: expressed protein [Arabidopsis thaliana]
  misc_feature (42)..(207): Homolog of NCBI NO: 7487828 NR Description: hypothetical protein T8O5.140 - Arabidopsis
  misc_feature (76)..(209): Homolog of NCBI NO: 18400614 NR Description: expressed protein [Arabidopsis thaliana]
  misc_feature (97)..(207): Homolog of NCBI NO: 15239410 NR Description: expressed protein [Arabidopsis thaliana]
  misc_feature (98)..(207): Homolog of NCBI NO: 15234679 NR Description: hypothetical protein [Arabidopsis thaliana]
  misc_feature (98)..(207): Homolog of NCBI NO: 7487830 NR Description: hypothetical protein T8O5.180 - Arabidopsis
  misc_feature (49)..(209): Homolog of NCBI NO: 26452217 NR Description: unknown protein [Arabidopsis thaliana]
  misc_feature (49)..(209): Homolog of NCBI NO: 25354620 NR Description: hypothetical protein AT4g04630 [imported] -
  misc_feature (49)..(209): Homolog of NCBI NO: 18412629 NR Description: expressed protein [Arabidopsis thaliana]
SLLITQSSYTPNKCFSFHKHPNLSITTMASDRGVFLNKSWGVGGREMKDRDFDEEDVWSVANDDSGKETTRACKESCGSSSSSSAWRLPAAPRKIPRANNNANPLPAASDAPLVKGSSSAPMDIPDWSKIYGKSCKKGSTADDGASNKGGDDDDDDDDDMVPPHEWIARKLARSQISSFSVCEGMGRTLKGRDLSKVRNAILTKTGFIE

SEQ ID NO: 58283 - protein, 182 aa, Glycine max
  peptide (1)..(182): Ceres Seq. ID no. 15168320
  misc_feature (22)..(182): Pfam Name: Protein of unknown function, DUF584 Pfam Description: Protein of unknown function, DUF584
  misc_feature (52)..(182): Homolog of NCBI NO: 21594619 NR Description: unknown [Arabidopsis thaliana]
  misc_feature (15)..(180): Homolog of NCBI NO: 30685620 NR Description: expressed protein [Arabidopsis thaliana]
  misc_feature (15)..(180): Homolog of NCBI NO: 7487828 NR Description: hypothetical protein T8O5.140 - Arabidopsis
  misc_feature (49)..(182): Homolog of NCBI NO: 18400614 NR Description: expressed protein [Arabidopsis thaliana]
  misc_feature (70)..(180): Homolog of NCBI NO: 15239410 NR Description: expressed protein [Arabidopsis thaliana]
  misc_feature (71)..(180): Homolog of NCBI NO: 15234679 NR Description: hypothetical protein [Arabidopsis thaliana]
  misc_feature (71)..(180): Homolog of NCBI NO: 7487830 NR Description: hypothetical protein T8O5.180 - Arabidopsis
  misc_feature (22)..(182): Homolog of NCBI NO: 26452217 NR Description: unknown protein [Arabidopsis thaliana]
  misc_feature (22)..(182): Homolog of NCBI NO: 25354620 NR Description: hypothetical protein AT4g04630 [imported] -
  misc_feature (22)..(182): Homolog of NCBI NO: 18412629 NR Description: expressed protein [Arabidopsis thaliana]
MASDRGVFLNKSWGVGGREMKDRDFDEEDVWSVANDDSGKETTRACKESCGSSSSSSAWRLPAAPRKIPRANNNANPLPAASDAPLVKGSSSAPMDIPDWSKIYGKSCKKGSTADDGASNKGGDDDDDDDDDMVPPHEWIARKLARSQISSFSVCEGMGRTLKGRDLSKVRNAILTKTGFIE

SEQ ID NO: 58284 - protein, 163 aa, Glycine max
  peptide (1)..(163): Ceres Seq. ID no. 15168321
  misc_feature (3)..(163): Pfam Name: Protein of unknown function, DUF584 Pfam Description: Protein of unknown function, DUF584
  misc_feature (33)..(163): Homolog of NCBI NO: 21594619 NR Description: unknown [Arabidopsis thaliana]
  misc_feature (1)..(161): Homolog of NCBI NO: 30685620 NR Description: expressed protein [Arabidopsis thaliana]
  misc_feature (1)..(161): Homolog of NCBI NO: 7487828 NR Description: hypothetical protein T8O5.140 - Arabidopsis
  misc_feature (30)..(163): Homolog of NCBI NO: 18400614 NR Description: expressed protein [Arabidopsis thaliana]
  misc_feature (51)..(161): Homolog of NCBI NO: 15239410 NR Description: expressed protein [Arabidopsis thaliana]
  misc_feature (52)..(161): Homolog of NCBI NO: 15234679 NR Description: hypothetical protein [Arabidopsis thaliana]
  misc_feature (52)..(161): Homolog of NCBI NO: 7487830 NR Description: hypothetical protein T8O5.180 - Arabidopsis
  misc_feature (3)..(163): Homolog of NCBI NO: 26452217 NR Description: unknown protein [Arabidopsis thaliana]
  misc_feature (3)..(163): Homolog of NCBI NO: 25354620 NR Description: hypothetical protein AT4g04630 [imported] -
  misc_feature (3)..(163): Homolog of NCBI NO: 18412629 NR Description: expressed protein [Arabidopsis thaliana]
MKDRDFDEEDVWSVANDDSGKETTRACKESCGSSSSSSAWRLPAAPRKIPRANNNANPLPAASDAPLVKGSSSAPMDIPDWSKIYGKSCKKGSTADDGASNKGGDDDDDDDDDMVPPHEWIARKLARSQISSFSVCEGMGRTLKGRDLSKVRNAILTKTGFIE

SEQ ID NO: 58285 - DNA, 1224 bp, Glycine max
  misc_feature (1)..(1224): Ceres Seq. ID no. 14316497
aaaagtgagaagctttcgcttgttttggtgttccagttccacttagagccatgacagacatctccaagtcccttctctttacctttaccatcatcatcagctttggcttgtgcattctttatgcatctgcagaactccagagatttgcacactcttccaaacatgatggtgctcttagcttcttggtgcttggtgactagggaagaagaggtgcttacaaccaatcactagttgctttccagatgggaaaggttggagagaagcttgatatcgactttgtagtttccactggagacaacttctatgacaatggactgactagtgaccatgacaacgcgtttcaagaatcattcactaaaatttacacagcaaaaagcttgcaaaatcagtggtacagcgtgttaggcaaccacgactataggggtgatgcagaggcccaattgagcccggtccttagagaaattgatagcagatggctttgcttaaggtcctttattgtagattcagagctggttgagattttctttgtagacaccactccttttgttgacgagtacttcactgaaccaccggaacacaagtatgattggcggggcattggcccacaaaaatcttatatttctaacttactcaaggacctagaattggcactgaggggatcaacagcaaaatggaggattgttgttggtcaccatgccattagaagtgttgggcatcatggtgatactcaagaactcataaatcggcctctccctatccttcaggcaaataacgttcacttttacatgaacgggcatgatcattgtcttgagcacattagtgacacggagagccccattcagttcctgactagcggggcagggtcaaaggcttggagaggagacattgaaggaatgaaccgaagaggcgtaaatttcttctatgatggacaaggcttcgtgtcagtgaaattgactcagacggatgccaccattgagttctatgatgtttttggcaacgttttgcacagattgacttcttcaaaacagctacattcttccatgtaaagtttagagctagatactagacattgagattaaatagaccaatccaaattggttgatgaaatttcaaactaatccttgatgtcatgcttgagtatgtacgagaaatgaaaatatgaatgaaggattcttcactgtgattcattcaccgcagtgatgaattgctgtttaaaaagaaaac

SEQ ID NO: 58286 - protein, 267 aa, Glycine max
  peptide (1)..(267): Ceres Seq. ID no. 14316498
  misc_feature (1)..(189): Pfam Name: Calcineurin-like phosphoesterase Pfam Description: Calcineurin-like phosphoesterase
  misc_feature (1)..(247): Homolog of NCBI NO: 7331193 NR Description: putative purple acid phosphatase precursor
  misc_feature (1)..(267): Homolog of NCBI NO: 21536860 NR Description: acid phosphatase type 5 [Arabidopsis thaliana]
  misc_feature (1)..(267): Homolog of NCBI NO: 18401643 NR Description: calcineurin-like phosphoesterase family
  misc_feature (1)..(267): Homolog of NCBI NO: 39918795 NR Description: putative acid phosphatase [Lupinus luteus]
MGKVGEKLDIDFVVSTGDNFYDNGLTSDHDNAFQESFTKIYTAKSLQNQWYSVLGNHDYRGDAEAQLSPVLREIDSRWLCLRSFIVDSELVEIFFVDTTPFVDEYFTEPPEHKYDWRGIGPQKSYISNLLKDLELALRGSTAKWRIVVGHHAIRSVGHHGDTQELINRPLPILQANNVHFYMNGHDHCLEHISDTESPIQFLTSGAGSKAWRGDIEGMNRRGVNFFYDGQGFVSVKLTQTDATIEFYDVFGNVLHRLTSSKQLHSSM

SEQ ID NO: 58287 - DNA, 942 bp, Glycine max
  misc_feature (1)..(942): Ceres Seq. ID no. 15177207
aacaaattaaaacaaaacagtctccatttgactacaaaacagtctccatttgacacagtcctagtggtgtactacttattatggccacaccagcatccatcactaatgtcactgtggagttccttcaattccccgcactggtgacacctcctggctctaccaaatcctatttccttggcggcgcaggggtgagagggttgaatattcaagaagaatttgtgaagttcacgggaataggtgtttatttggaagacaaggccgtgtcatcactcgctgccaaatggaagggcaagagtgcagctgaattgctcgattcccttgacttctacagagatatcatcaaaggcccctttgagaagttaattcgagggtcaaagttaagaacattggatggtcgtgaatacgtaaggaaggtatcagagaactgtgtggcacatatgcaatctgttgggacttacagtgatgaggaggaaaaagctattgaggaatttagaaatgctttcaaggatcaaaatttcccaccaggctccactgttttctacaaacaatcacccactggaacattggggcttagtttctcgaaagatgagacaataccagaacatgagcatgcagtgatagacaacaagccactttcggaggcagtgctggagactatgatcggagagattcctgtttcccctgctttgaaagagagtttggctacaaggtttcatcagttcttcaaagagttagaggccaatcccaacattgaaaactgagagttgcagcagttgccaactatctttagaagaccttggaaacaagaagaagaacagcaaaaatttgaagagacatctaaataatgtaacccccccccccccccccctccccgcagttatgtgtgcactttggtggatttgtaccccatttaataaacgagcaaaccagttattgctaatc

SEQ ID NO: 58288 - protein, 226 aa, Glycine max
  peptide (1)..(226): Ceres Seq. ID no. 15177208
  misc_feature (5)..(210): Pfam Name: Chalcone-flavanone isomerase Pfam Description: Chalcone-flavanone isomerase
  misc_feature (2)..(210): Homolog of NCBI NO: 5921724 NR Description: CHALCONE--FLAVONONE ISOMERASE (CHALCONE
  misc_feature (1)..(210): Homolog of NCBI NO: 3041652 NR Description: CHALCONE--FLAVONONE ISOMERASE (CHALCONE
MATPASITNVTVEFLQFPALVTPPGSTKSYFLGGAGVRGLNIQEEFVKFTGIGVYLEDKAVSSLAAKWKGKSAAELLDSLDFYRDIIKGPFEKLIRGSKLRTLDGREYVRKVSENCVAHMQSVGTYSDEEEKAIEEFRNAFKDQNFPPGSTVFYKQSPTGTLGLSFSKDETIPEHEHAVIDNKPLSEAVLETMIGEIPVSPALKESLATRFHQFFKELEANPNIEN

SEQ ID NO: 58289 - DNA, 912 bp, Glycine max
  misc_feature (1)..(912): Ceres Seq. ID no. 12608745
acccccactttttctagtaataatagtactacattatctagtgttcgagagagagagagttcatagttcaatgctcagttcttcttcggcttcgtttttgaggcagttaagtgcaaaaaaggagggttggaaagagagatactataatagtggtagtggtggctggggaatgagctttggagggtgtgaggcaagtgtgaaactaatggaagggtttaacatgcaggggaatgtggggaggaagagggtgatggtggtggttgatgacacctcacattccaagcatgcaatgttgtgggcactcactcatgttgccaacaagggtgattcccttgactcttcttcacgttgtgcctcctcacaggggtcctgaatcttcttgctccacttatcttgtcaattatcttgggtcactttgcaaagattgcaagccctggggtggaagtggaagcgctcttaaatccaaggaccaaaactggccactgtaatgagccaagtaaagaagctggaggtctctgtcctggtactgggccaaaagaagccatcttctcttttaagctgtctttgtggaagcagcggaagcagtagtacagaggagtttgtggagcattgcatcaataaagcagagtgcttgacaattggagtgaggaagagaagccagggcacgaatggataccttgtcagcactagatggcagaagaacttctggcttttggcttagattgaaagtttagttgctgctagttcagatcttagaggggataaatggggaaatggtaaaattaaccttagtatttgcaacatcatctataatctgagtaaaaataatcatctatatcaccctgtaactagttctaactatatcgtgtactaatgtcactatgagtaaaaataatcaaattgtccatgctc

SEQ ID NO: 58290 - protein, 123 aa, Glycine max
  peptide (1)..(123): Ceres Seq. ID no. 12608746
  misc_feature (63)..(123): Homolog of NCBI NO: 15228516 NR Description: hypothetical protein; protein id: At3g03290.1
  misc_feature (39)..(123): Homolog of NCBI NO: 15237955 NR Description: putative protein; protein id: At5g17390.1
  misc_feature (81)..(111): Homolog of NCBI NO: 21592322 NR Description: unknown [Arabidopsis thaliana]
  misc_feature (81)..(111): Homolog of NCBI NO: 18409190 NR Description: expressed protein
  misc_feature (28)..(123): Homolog of NCBI NO: 15219439 NR Description: hypothetical protein
  misc_feature (34)..(111): Homolog of NCBI NO: 34907308 NR Description: hypothetical protein~similar to Arabidopsis
PPLFLVIIVLHYLVFERERVHSSMLSSSSASFLRQLSAKKEGWKERYYNSGSGGWGMSFGGCEASVKLMEGFNMQGNVGRKRVMVVVDDTSHSKHAMLWALTHVANKGDSLDSSSRCASSQGS

SEQ ID NO: 58291 - protein, 100 aa, Glycine max
  peptide (1)..(100): Ceres Seq. ID no. 12608747
  misc_feature (40)..(100): Homolog of NCBI NO: 15228516 NR Description: hypothetical protein; protein id: At3g03290.1
  misc_feature (16)..(100): Homolog of NCBI NO: 15237955 NR Description: putative protein; protein id: At5g17390.1
  misc_feature (58)..(88): Homolog of NCBI NO: 21592322 NR Description: unknown [Arabidopsis thaliana]
  misc_feature (58)..(88): Homolog of NCBI NO: 18409190 NR Description: expressed protein
  misc_feature (5)..(100): Homolog of NCBI NO: 15219439 NR Description: hypothetical protein
  misc_feature (11)..(88): Homolog of NCBI NO: 34907308 NR Description: hypothetical protein~similar to Arabidopsis
MLSSSSASFLRQLSAKKEGWKERYYNSGSGGWGMSFGGCEASVKLMEGFNMQGNVGRKRVMVVVDDTSHSKHAMLWALTHVANKGDSLDSSSRCASSQGS

SEQ ID NO: 58292 - protein, 77 aa, Glycine max
  peptide (1)..(77): Ceres Seq. ID no. 12608748
  misc_feature (1)..(54): Pfam Name: Universal stress protein family Pfam Description: Universal stress protein family
  misc_feature (1)..(77): Homolog of NCBI NO: 37535148 NR Description: unknown protein [Oryza sativa (japonica
  misc_feature (1)..(77): Homolog of NCBI NO: 15228516 NR Description: hypothetical protein; protein id: At3g03290.1
  misc_feature (1)..(77): Homolog of NCBI NO: 15237955 NR Description: putative protein; protein id: At5g17390.1
  misc_feature (1)..(77): Homolog of NCBI NO: 21592322 NR Description: unknown [Arabidopsis thaliana]
  misc_feature (1)..(77): Homolog of NCBI NO: 18409190 NR Description: expressed protein
  misc_feature (1)..(77): Homolog of NCBI NO: 15219439 NR Description: hypothetical protein
  misc_feature (1)..(77): Homolog of NCBI NO: 34907308 NR Description: hypothetical protein~similar to Arabidopsis
MSQVKKLEVSVLVLGQKKPSSLLSCLCGSSGSSSTEEFVEHCINKAECLTIGVRKRSQGTNGYLVSTRWQKNFWLLA

SEQ ID NO: 58293 - DNA, 758 bp, Glycine max
  misc_feature (1)..(758): Ceres Seq. ID no. 13503305
agcagaagaaaacgaaactctcaaaccaagcgaaactatgggcatataactgagagaagaatatatcaatatcatctccaaatacgacgtcgttcaggttggggttttagcacaagatgtcgctgcgaataaaggcggtagtagataagtttgtccaagagttgcaggaagcgttggatgctgatattcaggataggatcatgaaggacagagaaatgcaaagttacattgaggagcgggaacgagaggttgctgagcgtgaagctgcttggaaggctgatctttctcgtcgtgaggcagaaattgctcgtcaagaagcaaggctgaagatggagagagacaatctagagaaagagaaaagtgtcttaatgggaactgcatcaaatcaagataaccaagatggagctcttgaaattacagtaagtggtgaaaagtaccgttgcctcagatttgccaaggcaaaaaaataaggctttgctggggtgacaaaaaggaaaagtatgattttgacttctctcccccagggctagtgctgtcgaggaatcacctgaaatgccaagctcagtttaagtacttctaggattaattattgaaatttaactgtttagttgtggtttataattcctgttagatttgagttaagtgtcatgacttcctcaattaaatttttatttcattcttttctgtgatggtgttgatgctgtttgctgaaattatgtttccgggtaaattatttatgacattagctaaatttagtt

SEQ ID NO: 58294 - protein, 117 aa, Glycine max
  peptide (1)..(117): Ceres Seq. ID no. 13503306
  misc_feature (1)..(115): Homolog of NCBI NO: 25371273 NR Description: hypothetical protein At2g17350 [imported] -
  misc_feature (1)..(117): Homolog of NCBI NO: 18398390 NR Description: expressed protein [Arabidopsis thaliana]
MSLRIKAVVDKFVQELQEALDADIQDRIMKDREMQSYIEEREREVAEREAAWKADLSRREAEIARQEARLKMERDNLEKEKSVLMGTASNQDNQDGALEITVSGEKYRCLRFAKAKK

SEQ ID NO: 58295 - protein, 89 aa, Glycine max
  peptide (1)..(89): Ceres Seq. ID no. 13503307
  misc_feature (1)..(87): Homolog of NCBI NO: 25371273 NR Description: hypothetical protein At2g17350 [imported] -
  misc_feature (1)..(89): Homolog of NCBI NO: 18398390 NR Description: expressed protein [Arabidopsis thaliana]
MKDREMQSYIEEREREVAEREAAWKADLSRREAEIARQEARLKMERDNLEKEKSVLMGTASNQDNQDGALEITVSGEKYRCLRFAKAKK

SEQ ID NO: 58296 - protein, 84 aa, Glycine max
  peptide (1)..(84): Ceres Seq. ID no. 13503308
  misc_feature (1)..(82): Homolog of NCBI NO: 25371273 NR Description: hypothetical protein At2g17350 [imported] -
  misc_feature (1)..(84): Homolog of NCBI NO: 18398390 NR Description: expressed protein [Arabidopsis thaliana]
MQSYIEEREREVAEREAAWKADLSRREAEIARQEARLKMERDNLEKEKSVLMGTASNQDNQDGALEITVSGEKYRCLRFAKAKK

SEQ ID NO: 58297 - DNA, 772 bp, Glycine max
  misc_feature (1)..(772): Ceres Seq. ID no. 12583723
ataataaaccccaaaacaaagttcttctctctctctctctctctctctctcgtgaatcatcacttcgttttccccactttcaacaccgctcatcttctcttctcttttctctgctaatcatggcaaccttgtctactatgaaagtttcccctcattgcacattacaaactgcaagcaaaaatccatccattgttgccaccatagtgaagtgtccttcttctttaaggtctgtgaagagcgtttccagatctttcggcttgaagtcggcctcttcatttagagtcactgccatggcttcttacaaggttaagctgattggcccagatggaacagagaacgagttcgaagccactgacgatacttacatcttagatgcagcagagagtgctggagttgaacttccttactcatgccgagctggagcatgctccacctgtgctgggaagattgtttctggttctgtggaccagtccgatggctcattcctcgatgacaaccaactgaaggaaggctttgttcttacctgtgtctcctatccaactgcagactgtgtaattgaaactcacaaggaaggagatctctactgagcaatgctggccttgaagttgggaactgggaatttaaggtagactttgcaactagtttacttgtgctgctttagaatcaaattttcttttttgattattagtgatttggtgtattgaatttttgtttgtgcagcaagcactgtgatcttaattaataagacgataagcaccttcggttggctttc

SEQ ID NO: 58298 - protein, 194 aa, Glycine max
  peptide (1)..(194): Ceres Seq. ID no. 12583724
  misc_feature (107)..(181): Pfam Name: 2Fe-2S iron-sulfur cluster binding domain Pfam Description: 2Fe-2S iron-sulfur cluster binding domain
  misc_feature (78)..(194): Homolog of NCBI NO: 3023750 NR Description: Ferredoxin VI, chloroplast precursor (Fd VI)
  misc_feature (43)..(194): Homolog of NCBI NO: 19569591 NR Description: ferredoxin precursor [Triticum aestivum]
  misc_feature (100)..(194): Homolog of NCBI NO: 6688560 NR Description: putative ferredoxin [Lycopersicon esculentum]
  misc_feature (43)..(194): Homolog of NCBI NO: 6970498 NR Description: non-photosynthetic ferredoxin [Ipomoea nil]
  misc_feature (73)..(194): Homolog of NCBI NO: 15225888 NR Description: putative ferredoxin
  misc_feature (59)..(194): Homolog of NCBI NO: 7430754 NR Description: ferredoxin [2Fe-2S], root - rice
  misc_feature (43)..(194): Homolog of NCBI NO: 40714664 NR Description: putative ferredoxin [Oryza sativa (japonica
  misc_feature (43)..(194): Homolog of NCBI NO: 119958 NR Description: Ferredoxin III, chloroplast precursor (Fd III)
  misc_feature (43)..(194): Homolog of NCBI NO: 13182955 NR Description: ferredoxin [Impatiens balsamina]
  misc_feature (43)..(193): Homolog of NCBI NO: 2129915 NR Description: ferredoxin
NKPQNKVLLSLSLSLSRESSLRFPHFQHRSSSLLFSLLIMATLSTMKVSPHCTLQTASKNPSIVATIVKCPSSLRSVKSVSRSFGLKSASSFRVTAMASYKVKLIGPDGTENEFEATDDTYILDAAESAGVELPYSCRAGACSTCAGKIVSGSVDQSDGSFLDDNQLKEGFVLTCVSYPTADCVIETHKEGDLY

SEQ ID NO: 58299 - protein, 155 aa, Glycine max
  peptide (1)..(155): Ceres Seq. ID no. 12583725
  misc_feature (68)..(142): Pfam Name: 2Fe-2S iron-sulfur cluster binding domain Pfam Description: 2Fe-2S iron-sulfur cluster binding domain
  misc_feature (39)..(155): Homolog of NCBI NO: 3023750 NR Description: Ferredoxin VI, chloroplast precursor (Fd VI)
  misc_feature (4)..(155): Homolog of NCBI NO: 19569591 NR Description: ferredoxin precursor [Triticum aestivum]
  misc_feature (61)..(155): Homolog of NCBI NO: 6688560 NR Description: putative ferredoxin [Lycopersicon esculentum]
  misc_feature (4)..(155): Homolog of NCBI NO: 6970498 NR Description: non-photosynthetic ferredoxin [Ipomoea nil]
  misc_feature (34)..(155): Homolog of NCBI NO: 15225888 NR Description: putative ferredoxin
  misc_feature (20)..(155): Homolog of NCBI NO: 7430754 NR Description: ferredoxin [2Fe-2S], root - rice
  misc_feature (4)..(155): Homolog of NCBI NO: 40714664 NR Description: putative ferredoxin [Oryza sativa (japonica
  misc_feature (4)..(155): Homolog of NCBI NO: 119958 NR Description: Ferredoxin III, chloroplast precursor (Fd III)
  misc_feature (4)..(155): Homolog of NCBI NO: 13182955 NR Description: ferredoxin [Impatiens balsamina]
  misc_feature (4)..(154): Homolog of NCBI NO: 2129915 NR Description: ferredoxin
MATLSTMKVSPHCTLQTASKNPSIVATIVKCPSSLRSVKSVSRSFGLKSASSFRVTAMASYKVKLIGPDGTENEFEATDDTYILDAAESAGVELPYSCRAGACSTCAGKIVSGSVDQSDGSFLDDNQLKEGFVLTCVSYPTADCVIETHKEGDLY

SEQ ID NO: 58300 - protein, 149 aa, Glycine max
  peptide (1)..(149): Ceres Seq. ID no. 12583726
  misc_feature (62)..(136): Pfam Name: 2Fe-2S iron-sulfur cluster binding domain Pfam Description: 2Fe-2S iron-sulfur cluster binding domain
  misc_feature (33)..(149): Homolog of NCBI NO: 3023750 NR Description: Ferredoxin VI, chloroplast precursor (Fd VI)
  misc_feature (1)..(149): Homolog of NCBI NO: 19569591 NR Description: ferredoxin precursor [Triticum aestivum]
  misc_feature (55)..(149): Homolog of NCBI NO: 6688560 NR Description: putative ferredoxin [Lycopersicon esculentum]
  misc_feature (1)..(149): Homolog of NCBI NO: 6970498 NR Description: non-photosynthetic ferredoxin [Ipomoea nil]
  misc_feature (28)..(149): Homolog of NCBI NO: 15225888 NR Description: putative ferredoxin
  misc_feature (14)..(149): Homolog of NCBI NO: 7430754 NR Description: ferredoxin [2Fe-2S], root - rice
  misc_feature (1)..(149): Homolog of NCBI NO: 40714664 NR Description: putative ferredoxin [Oryza sativa (japonica
  misc_feature (1)..(149): Homolog of NCBI NO: 119958 NR Description: Ferredoxin III, chloroplast precursor (Fd III)
  misc_feature (1)..(149): Homolog of NCBI NO: 13182955 NR Description: ferredoxin [Impatiens balsamina]
  misc_feature (1)..(148): Homolog of NCBI NO: 2129915 NR Description: ferredoxin
MKVSPHCTLQTASKNPSIVATIVKCPSSLRSVKSVSRSFGLKSASSFRVTAMASYKVKLIGPDGTENEFEATDDTYILDAAESAGVELPYSCRAGACSTCAGKIVSGSVDQSDGSFLDDNQLKEGFVLTCVSYPTADCVIETHKEGDLY

SEQ ID NO: 58301 - DNA, 1103 bp, Glycine max
  misc_feature (1)..(1103): Ceres Seq. ID no. 14314867
aatctctgtgctgcttcgtctatccctcccaccgtcctcggctccccggggatcccgccgtcgccgccgccggcccgcgttggtgccgccctggctctttcaacttggaagggctgccaccaccgcctcctccctccgcgccagtccccgcaagcgctcctcggcacccctcctcctgccgtcggatcccctcaccgtagcatctgattggcagtggacagggcaagatgtctggcggcaatcctgcaggtgtggataacactttccgtaggaaatttgacaaggaggagtacttggagcgagctcgacagagagagcgggatgagaaggatgaagcccggagaggcaaggacaggggccctcctgtgcaaagacagcctttgaagcatagggattatgaagttgatcttgagtctcgtcttggtaaaacccaggtggtaaccccaatcgcacctttgagtcagcaggctggatactactgttcagtatgtgagtgtgttgttaaagattcagccaactatttggatcatataaatggcaagaagcatcagagagcattgggcatgtctatgcgtgttgaaagggcgtcactcgaacaggttcaaaaacggtttgaggcacttaagaagaggaaggacccagccagcttcagtgaacaagatttggatgagagaatatggaagcagcagcaagaggaggaggagaagaagcgtcaacgcagagaaaagaagaaagaaaagaagaaagagcaggctggccagaatgaacctgaggacattgaccctgatgttgctgctatgatgggcttcggcgggttcggcacctcttcaaagaagtgaaaattgctgcttcaggtggcgccattccgttggtctgtggctgctgaagacgtcgccgcggctccgtgcacctggatctcagcaaaggccagacacagctctgatgcagtgttgcgagtagtgtactggagccttgttgcaaccgctacctgataatgtcagcgaaacgatacttaatgctggaacaattcagcttctgtaatcggtgaccggtgatcatttgagaagcatttcatctttgagaaatgagatgactaattcgtc

SEQ ID NO: 58302 - protein, 203 aa, Glycine max
  peptide (1)..(203): Ceres Seq. ID no. 14314868
  misc_feature (83)..(107): Pfam Name: Zinc finger, C2H2 type Pfam Description: Zinc finger, C2H2 type
  misc_feature (2)..(202): Homolog of NCBI NO: 17557051 NR Description: putative nuclear protein, with 2 coiled coil-4
  misc_feature (1)..(202): Homolog of NCBI NO: 39581678 NR Description: Hypothetical protein CBG00030 [Caenorhabditis
  misc_feature (14)..(197): Homolog of NCBI NO: 31216822 NR Description: ENSANGP00000020597 [Anopheles gambiae]
  misc_feature (14)..(202): Homolog of NCBI NO: 21355873 NR Description: CG11586-PA [Drosophila melanogaster]
  misc_feature (13)..(202): Homolog of NCBI NO: 34878791 NR Description: similar to histidyl-tRNA synthetase-like [Rattus
  misc_feature (2)..(202): Homolog of NCBI NO: 13385046 NR Description: RIKEN cDNA 2610510D14 [Mus musculus]
  misc_feature (1)..(202): Homolog of NCBI NO: 37595334 NR Description: z2610510D14Rik [Danio rerio]
  misc_feature (2)..(172): Homolog of NCBI NO: 6714389 NR Description: hypothetical protein [Arabidopsis thaliana]
  misc_feature (2)..(202): Homolog of NCBI NO: 18397358 NR Description: expressed protein [Arabidopsis thaliana]
  misc_feature (5)..(202): Homolog of NCBI NO: 34897240 NR Description: unknown protein [Oryza sativa (japonica
MSGGNPAGVDNTFRRKFDKEEYLERARQRERDEKDEARRGKDRGPPVQRQPLKHRDYEVDLESRLGKTQVVTPIAPLSQQAGYYCSVCECVVKDSANYLDHINGKKHQRALGMSMRVERASLEQVQKRFEALKKRKDPASFSEQDLDERIWKQQQEEEEKKRQRREKKKEKKKEQAGQNEPEDIDPDVAAMMGFGGFGTSSKK

SEQ ID NO: 58303 - DNA, 1016 bp, Glycine max
  misc_feature (1)..(1016): Ceres Seq. ID no. 15168868
aacacttgttgttgttagggttttcataattcctgaaacaggggaaggaaatggcctcacaacaacacatcgagaagatgcagctccgccagaacttccgcaatctctggcactctgatcttttgagtacaattcaagctgacaccccttattgttgcttttctctgtggtgtgcaccgtgtgtatcatatctactccgcaaacgagctctttacgatgatatgtcaagatacacatgttgtgctggttacatgccctgcagtggtcggtgtggagaaagtaaatgtcctgaactctgccttggtgcggaggttgtctgctgttttggaaattcagtggcctcaactcgatttctgttacaagatgaatttaatattcaaactacgcaatgtgataattgcattattgctttcatgtttgtccttcaacaacttgcctgcatattttctattattgctttaattgtgggaaatagtgaaattcgacaggcttctcaattgctatcttgtttggctgactttgtctactgcacggtgtgtgcttgcatgcagactcagcataagattgaaatggacaaacgcgatgggaaatttggaccccaatcagtaatgggtgttccccctgttcaacaaatgtcacgctttgatcaggcagtccccccttttgttgggtattgaccacaaccagcatatggacagggctatggttattcacatgcctaagacccttctcatcctcccaactagcctgcccatcatcatcatcatcatcatcatcatccaccagcatatagctacttttggtgatttttttcataagaatgctttaggttgggttgcatttccatcaagtcatacatgtgtggtaaaattagtcagattgattatcaagttgcgtttcccttatacaagacaaacatattataccttgtctagttttatgtatactttgatgtcatattgtcattagactcattactgttcagcccgtggctatatttactttttttcttatgc

SEQ ID NO: 58304 - protein, 208 aa, Glycine max
  peptide (1)..(208): Ceres Seq. ID no. 15168869
  misc_feature (172)..(208): Homolog of NCBI NO: 7485554 NR Description: hypothetical protein F16G20.180 - Arabidopsis
  misc_feature (2)..(44): Homolog of NCBI NO: 25446695 NR Description: Unknown protein [Oryza sativa (japonica
  misc_feature (63)..(208): Homolog of NCBI NO: 25446695 NR Description: Unknown protein [Oryza sativa (japonica
  misc_feature (4)..(161): Homolog of NCBI NO: 7485553 NR Description: hypothetical protein F16G20.170 - Arabidopsis
  misc_feature (3)..(200): Homolog of NCBI NO: 15238071 NR Description: hypothetical protein [Arabidopsis thaliana]
  misc_feature (2)..(208): Homolog of NCBI NO: 37536436 NR Description: hypothetical protein [Oryza sativa (japonica
  misc_feature (10)..(208): Homolog of NCBI NO: 21554542 NR Description: unknown [Arabidopsis thaliana]
  misc_feature (2)..(208): Homolog of NCBI NO: 15222552 NR Description: proline-rich protein family [Arabidopsis
  misc_feature (4)..(208): Homolog of NCBI NO: 22328885 NR Description: proline-rich protein family [Arabidopsis
MASQQHIEKMQLRQNFRNLWHSDLLSTIQADTPYCCFSLWCAPCVSYLLRKRALYDDMSRYTCCAGYMPCSGRCGESKCPELCLGAEVVCCFGNSVASTRFLLQDEFNIQTTQCDNCIIAFMFVLQQLACIFSIIALIVGNSEIRQASQLLSCLADFVYCTVCACMQTQHKIEMDKRDGKFGPQSVMGVPPVQQMSRFDQAVPPFVGY

SEQ ID NO: 58305 - protein, 199 aa, Glycine max
  peptide (1)..(199): Ceres Seq. ID no. 15168870
  misc_feature (163)..(199): Homolog of NCBI NO: 7485554 NR Description: hypothetical protein F16G20.180 - Arabidopsis
  misc_feature (1)..(35): Homolog of NCBI NO: 25446695 NR Description: Unknown protein [Oryza sativa (japonica
  misc_feature (54)..(199): Homolog of NCBI NO: 25446695 NR Description: Unknown protein [Oryza sativa (japonica
  misc_feature (1)..(152): Homolog of NCBI NO: 7485553 NR Description: hypothetical protein F16G20.170 - Arabidopsis
  misc_feature (1)..(191): Homolog of NCBI NO: 15238071 NR Description: hypothetical protein [Arabidopsis thaliana]
  misc_feature (1)..(199): Homolog of NCBI NO: 37536436 NR Description: hypothetical protein [Oryza sativa (japonica
  misc_feature (1)..(199): Homolog of NCBI NO: 21554542 NR Description: unknown [Arabidopsis thaliana]
  misc_feature (1)..(199): Homolog of NCBI NO: 15222552 NR Description: proline-rich protein family [Arabidopsis
  misc_feature (1)..(199): Homolog of NCBI NO: 22328885 NR Description: proline-rich protein family [Arabidopsis
MQLRQNFRNLWHSDLLSTIQADTPYCCFSLWCAPCVSYLLRKRALYDDMSRYTCCAGYMPCSGRCGESKCPELCLGAEVVCCFGNSVASTRFLLQDEFNIQTTQCDNCIIAFMFVLQQLACIFSIIALIVGNSEIRQASQLLSCLADFVYCTVCACMQTQHKIEMDKRDGKFGPQSVMGVPPVQQMSRFDQAVPPFVGY

SEQ ID NO: 58306 - protein, 151 aa, Glycine max
  peptide (1)..(151): Ceres Seq. ID no. 15168871
  misc_feature (115)..(151): Homolog of NCBI NO: 7485554 NR Description: hypothetical protein F16G20.180 - Arabidopsis
  misc_feature (6)..(151): Homolog of NCBI NO: 25446695 NR Description: Unknown protein [Oryza sativa (japonica
  misc_feature (1)..(104): Homolog of NCBI NO: 7485553 NR Description: hypothetical protein F16G20.170 - Arabidopsis
  misc_feature (1)..(143): Homolog of NCBI NO: 15238071 NR Description: hypothetical protein [Arabidopsis thaliana]
  misc_feature (1)..(151): Homolog of NCBI NO: 37536436 NR Description: hypothetical protein [Oryza sativa (japonica
  misc_feature (1)..(151): Homolog of NCBI NO: 21554542 NR Description: unknown [Arabidopsis thaliana]
  misc_feature (1)..(151): Homolog of NCBI NO: 15222552 NR Description: proline-rich protein family [Arabidopsis
  misc_feature (1)..(151): Homolog of NCBI NO: 22328885 NR Description: proline-rich protein family [Arabidopsis
MSRYTCCAGYMPCSGRCGESKCPELCLGAEVVCCFGNSVASTRFLLQDEFNIQTTQCDNCIIAFMFVLQQLACIFSIIALIVGNSEIRQASQLLSCLADFVYCTVCACMQTQHKIEMDKRDGKFGPQSVMGVPPVQQMSRFDQAVPPFVGY

SEQ ID NO: 58307 - DNA, 1033 bp, Glycine max
  misc_feature (1)..(1033): Ceres Seq. ID no. 14311392
aaaaatcattcattcattgaatcccccaaaccgccatttcctttgggtttatggagtgagcgtggaagaggaaagagcaagcagcaacagctcgtggcggttccgattatttattaagatcaatgttgcatgcagtatctgcccctagcttttgtttaagctatcccgggaaccttcattatcctccttcttcatttcaaaaaacatgtttttctgttcgttgttcggtttcacagacaaaaaatggagctaaagtggaatatactccttggctcattgttggcttgggcaatcctggtaacaaataccatggcaccaggcacaatgttggatttgaaataattgatagcctttctcgagcagaagggattcagatgaacacaatacagtcaaaggccctcattggaataggttctattggtgaagtaccgattttgctggcaaagccccaaacatacatgaatttcagtggggaatcggttgggccacttgctgcatattatcaagtacccttgcgtcatattctactagtttttgatgagacaagccttccaaatggtgttttaaggcttcaacctaaaggcggacatggacatcacaatggattgaaaaatgtaatgggccatttggatggttgcagtgcttttcctcgacttgcagtcggaattggaaatcctcctggaactatggatttaagagcttatcttctacaaaaattcagtgtagaggaacgaaagcagattgacgcttcattggagcaagcagttgcagcagtaaggaccgtagtactcaatggttttgaccagcatgtcaatagattcaatttaggacaaaaatacaagtaccataaagtttaaaatgaaccgccaagatgaaattggtggttacattgttgtgtatgttagcagatagcagttatacttcacaaacttgtcatgactagtgcatttttttgtaaagcacaccagtggtcatattctagctctggcagatagttgtttcattgtgagaaatactagttgttgaattgttg

SEQ ID NO: 58308 - protein, 244 aa, Glycine max
  peptide (1)..(244): Ceres Seq. ID no. 14311393
  misc_feature (9)..(234): Homolog of NCBI NO: 26453108 NR Description: unknown protein [Arabidopsis thaliana]
  misc_feature (9)..(234): Homolog of NCBI NO: 30685853 NR Description: expressed protein [Arabidopsis thaliana]
  misc_feature (47)..(243): Homolog of NCBI NO: 30687503 NR Description: expressed protein [Arabidopsis thaliana]
  misc_feature (45)..(242): Homolog of NCBI NO: 40889732 NR Description: Chain A, Structure Of The Chloroplast Group Ii
  misc_feature (45)..(244): Homolog of NCBI NO: 40889731 NR Description: Chain A, Structure Of The Group Ii Intron
  misc_feature (45)..(244): Homolog of NCBI NO: 40889730 NR Description: Chain A, Crystal Structure Of The Chloroplast
  misc_feature (30)..(244): Homolog of NCBI NO: 6752919 NR Description: CRS2 [Zea mays]
  misc_feature (1)..(244): Homolog of NCBI NO: 26451849 NR Description: putative CRS2 [Arabidopsis thaliana]
  misc_feature (1)..(244): Homolog of NCBI NO: 15240875 NR Description: CRS2 -related protein [Arabidopsis thaliana]
  misc_feature (11)..(244): Homolog of NCBI NO: 15237280 NR Description: CRS2-related protein [Arabidopsis thaliana]
MLHAVSAPSFCLSYPGNLHYPPSSFQKTCFSVRCSVSQTKNGAKVEYTPWLIVGLGNPGNKYHGTRHNVGFEIIDSLSRAEGIQMNTIQSKALIGIGSIGEVPILLAKPQTYMNFSGESVGPLAAYYQVPLRHILLVFDETSLPNGVLRLQPKGGHGHHNGLKNVMGHLDGCSAFPRLAVGIGNPPGTMDLRAYLLQKFSVEERKQIDASLEQAVAAVRTVVLNGFDQHVNRFNLGQKYKYHKV

SEQ ID NO: 58309 - protein, 160 aa, Glycine max
  peptide (1)..(160): Ceres Seq. ID no. 14311394
  misc_feature (1)..(150): Homolog of NCBI NO: 26453108 NR Description: unknown protein [Arabidopsis thaliana]
  misc_feature (1)..(150): Homolog of NCBI NO: 30685853 NR Description: expressed protein [Arabidopsis thaliana]
  misc_feature (1)..(159): Homolog of NCBI NO: 30687503 NR Description: expressed protein [Arabidopsis thaliana]
  misc_feature (1)..(158): Homolog of NCBI NO: 40889732 NR Description: Chain A, Structure Of The Chloroplast Group Ii
  misc_feature (1)..(160): Homolog of NCBI NO: 40889731 NR Description: Chain A, Structure Of The Group Ii Intron
  misc_feature (1)..(160): Homolog of NCBI NO: 40889730 NR Description: Chain A, Crystal Structure Of The Chloroplast
  misc_feature (1)..(160): Homolog of NCBI NO: 6752919 NR Description: CRS2 [Zea mays]
  misc_feature (1)..(160): Homolog of NCBI NO: 26451849 NR Description: putative CRS2 [Arabidopsis thaliana]
  misc_feature (1)..(160): Homolog of NCBI NO: 15240875 NR Description: CRS2 -related protein [Arabidopsis thaliana]
  misc_feature (1)..(160): Homolog of NCBI NO: 15237280 NR Description: CRS2-related protein [Arabidopsis thaliana]
MNTIQSKALIGIGSIGEVPILLAKPQTYMNFSGESVGPLAAYYQVPLRHILLVFDETSLPNGVLRLQPKGGHGHHNGLKNVMGHLDGCSAFPRLAVGIGNPPGTMDLRAYLLQKFSVEERKQIDASLEQAVAAVRTVVLNGFDQHVNRFNLGQKYKYHKV

SEQ ID NO: 58310 - protein, 132 aa, Glycine max
  peptide (1)..(132): Ceres Seq. ID no. 14311395
  misc_feature (1)..(122): Homolog of NCBI NO: 26453108 NR Description: unknown protein [Arabidopsis thaliana]
  misc_feature (1)..(122): Homolog of NCBI NO: 30685853 NR Description: expressed protein [Arabidopsis thaliana]
  misc_feature (1)..(131): Homolog of NCBI NO: 30687503 NR Description: expressed protein [Arabidopsis thaliana]
  misc_feature (1)..(130): Homolog of NCBI NO: 40889732 NR Description: Chain A, Structure Of The Chloroplast Group Ii
  misc_feature (1)..(132): Homolog of NCBI NO: 40889731 NR Description: Chain A, Structure Of The Group Ii Intron
  misc_feature (1)..(132): Homolog of NCBI NO: 40889730 NR Description: Chain A, Crystal Structure Of The Chloroplast
  misc_feature (1)..(132): Homolog of NCBI NO: 6752919 NR Description: CRS2 [Zea mays]
  misc_feature (1)..(132): Homolog of NCBI NO: 26451849 NR Description: putative CRS2 [Arabidopsis thaliana]
  misc_feature (1)..(132): Homolog of NCBI NO: 15240875 NR Description: CRS2 -related protein [Arabidopsis thaliana]
  misc_feature (1)..(132): Homolog of NCBI NO: 15237280 NR Description: CRS2-related protein [Arabidopsis thaliana]
MNFSGESVGPLAAYYQVPLRHILLVFDETSLPNGVLRLQPKGGHGHHNGLKNVMGHLDGCSAFPRLAVGIGNPPGTMDLRAYLLQKFSVEERKQIDASLEQAVAAVRTVVLNGFDQHVNRFNLGQKYKYHKV

SEQ ID NO: 58311 - DNA, 736 bp, Glycine max
  misc_feature (1)..(736): Ceres Seq. ID no. 13638466
atgtgtcttaggtgaattactcaagagggctcgacaatcccacaaagtagaaaaagaggttatgttatggcgggcaaaggtgttagttcggtggctaaggcggtagcagaatatcagtatccttggcgtgagaagttggggaaatataaggatgagcttgccaagggtgtgtggggatactggagctggggggcatggaagccgctgagtatcagtgctcggcatcgtgctagaattcgcaaggaagtcctccttgctggggaagattggccctacgatcctgaaaggaaggagatgaagaccaggaggaaaggacacaaatgtgataggatttctgccgaaaagcgcgcaaacacagcgaagttgatggagaagatgccccagatgttgctggattacaagaagagaaggtggcagaagaagatgaaggaggaagacaagggaaaactttgattttgctcctcctctaatttttgcaaggttcagcataaactgtgcctttgagaaatggagtatttaattatgccatgttacacctgtttgtgggcctaatggattattaactttggttatgcttttcaatccttaataacccctttcgagagtatggccttgtgagtatcaggggggaaagggctttactacaatggaaattactgttatgtggttttgtttttatgtatatgcttggatgagtgcttgtcggtactgacaattgcttatttgtgccaagggc

SEQ ID NO: 58312 - protein, 128 aa, Glycine max
  peptide (1)..(128): Ceres Seq. ID no. 13638467
  misc_feature (1)..(127): Homolog of NCBI NO: 18415817 NR Description: expressed protein [Arabidopsis thaliana]
MAGKGVSSVAKAVAEYQYPWREKLGKYKDELAKGVWGYWSWGAWKPLSISARHRARIRKEVLLAGEDWPYDPERKEMKTRRKGHKCDRISAEKRANTAKLMEKMPQMLLDYKKRRWQKKMKEEDKGKL

SEQ ID NO: 58313 - DNA, 601 bp, Glycine max
  misc_feature (1)..(601): Ceres Seq. ID no. 12608730
aacaaattaaactctccactttccacacaaacctaagaagaagcacttgtcaagatgccctcttctgctcatgctcatgctcatggcctcatcatcatctctctcattttggtgtctatttttttacccaatgtgaatctggcaaatggtggtgcaacttccatgcaaatgatgatgatgatgaatgagagcagaaggaaattgggaagcttccagatatgtgcactatgcaactgctgtggtggagccaaagggatctgcttgccctctccatgttgctatgccatcaattgcaacattcccaatagaccttttggcttttgttccttcacccctaaaacctgtaattgctttgaatgccatctttaatgttttctcttgtaaatgtccagttgagaatattggacttaataataatttttcacctttcaatcaacatactaatgaattcaggtgtttaatttggtggggttggaatagaggacagttaagccttagctacaaacctgctagtatatctgtaataggttttgctgtttgtttcataatggataatgtatcaatgcatgagccttggtatgtgtattgttctctctttttc

SEQ ID NO: 58314 - protein, 139 aa, Glycine max
  peptide (1)..(139): Ceres Seq. ID no. 12608731
MRAEGNWEASRYVHYATAVVEPKGSACPLHVAMPSIATFPIDLLAFVPSPLKPVIALNAIFNVFSCKCPVENIGLNNNFSPFNQHTNEFRCLIWWGWNRGQLSLSYKPASISVIGFAVCFIMDNVSMHEPWYVYCSLFF

SEQ ID NO: 58315 - protein, 107 aa, Glycine max
  peptide (1)..(107): Ceres Seq. ID no. 12608732
MPSIATFPIDLLAFVPSPLKPVIALNAIFNVFSCKCPVENIGLNNNFSPFNQHTNEFRCLIWWGWNRGQLSLSYKPASISVIGFAVCFIMDNVSMHEPWYVYCSLFF

SEQ ID NO: 58316 - protein, 104 aa, Glycine max
  peptide (1)..(104): Ceres Seq. ID no. 12608733
  misc_feature (10)..(104): Homolog of NCBI NO: 18412619 NR Description: Expressed protein
  misc_feature (41)..(104): Homolog of NCBI NO: 34906984 NR Description: P0413C03.15 [Oryza sativa (japonica
  misc_feature (12)..(104): Homolog of NCBI NO: 21593890 NR Description: unknown [Arabidopsis thaliana]
  misc_feature (12)..(104): Homolog of NCBI NO: 21954063 NR Description: unknown protein [Arabidopsis thaliana]
  misc_feature (12)..(104): Homolog of NCBI NO: 18408246 NR Description: Expressed protein
MPSSAHAHAHGLIIISLILVSIFLPNVNLANGGATSMQMMMMMNESRRKLGSFQICALCNCCGGAKGICLPSPCCYAINCNIPNRPFGFCSFTPKTCNCFECHL

SEQ ID NO: 58317 - DNA, 968 bp, Glycine max
  misc_feature (1)..(968): Ceres Seq. ID no. 15175597
atcctcgaaaatgatgaatgaagcggcttgtgaaccctaattagttgtcggtgtttgttggaagagcacatctctgttttcttcgtcatcttcccctcccctccccaaccagagatgcgccccgcaacacatatgtactaaagctttcaactttcagcatcctttcagatgttagcgaaaacccataacaaaggggatggatctaagtccctggctaagatactggcaaaatggaaagaatataatgcccagattgattccagcagtgatgcggataagccagttcgcaaagttcctgccaagggatcgaagaaggggtgcatgaaaggtaaagggggccctgagaactcgcggtgtaactacagaggtgttaggcaaaggacttggggaaagtgggttgctgaaatccgagagccaaacagaggcaataggctttggctaggtactttccccactgccattggagctgcccttgcatatgatgaagcggccagggcaatgtacggttcctgtgcccgtctcaactttcccaatgtttcagtttccagtttctctgaagaatcttccaaagattctccggttgcgaatcattgtggttcgtcaatggcagtgtctgcaaacgagtccatgatttcaccaagtaactcgggggtaggtgcagaagatgatgttgatatggagcccatttccttatccttaactgtaaagcatgagaatggggaaggtgaatcggggataagttcttcccctccttccccatgatgtacattgggacatggctaaattttttagcgcatgtacttgttaatggttagcttaggtttaatcatatttgatcctggagattagctgttgtaaaactaaaatgaactccgttgcaaaaatggtcatttcttttggccacctaatttgcatggatatcctgtctatttttaactcattaggtgtgagtcatacttacctttgcc

SEQ ID NO: 58318 - protein, 197 aa, Glycine max
  peptide (1)..(197): Ceres Seq. ID no. 15175598
  misc_feature (63)..(126): Pfam Name: AP2 domain Pfam Description: AP2 domain
  misc_feature (10)..(164): Homolog of NCBI NO: 27960760 NR Description: dehydration-responsive AP2 domain transcriptional
  misc_feature (1)..(164): Homolog of NCBI NO: 30313898 NR Description: AP2 transcriptional activator DRF1.1 [Hordeum
  misc_feature (4)..(157): Homolog of NCBI NO: 34896106 NR Description: putative AP2-domain DNA-binding protein
  misc_feature (4)..(157): Homolog of NCBI NO: 25989383 NR Description: DREB1 [Oryza sativa]
  misc_feature (4)..(157): Homolog of NCBI NO: 22594971 NR Description: DRE binding protein 2 [Oryza sativa]
  misc_feature (11)..(183): Homolog of NCBI NO: 15228427 NR Description: DRE binding protein (DREB2B) [Arabidopsis
  misc_feature (4)..(182): Homolog of NCBI NO: 38099059 NR Description: dehydration-responsive element binding protein 2
  misc_feature (4)..(134): Homolog of NCBI NO: 15239107 NR Description: DRE binding protein (DREB2A) [Arabidopsis
  misc_feature (4)..(142): Homolog of NCBI NO: 25992100 NR Description: dehydration responsive element binding protein
  misc_feature (10)..(166): Homolog of NCBI NO: 8346773 NR Description: AP2-domain DNA-binding protein [Catharanthus
MLAKTHNKGDGSKSLAKILAKWKEYNAQIDSSSDADKPVRKVPAKGSKKGCMKGKGGPENSRCNYRGVRQRTWGKWVAEIREPNRGNRLWLGTFPTAIGAALAYDEAARAMYGSCARLNFPNVSVSSFSEESSKDSPVANHCGSSMAVSANESMISPSNSGVGAEDDVDMEPISLSLTVKHENGEGESGISSSPPSP

SEQ ID NO: 58319 - protein, 146 aa, Glycine max
  peptide (1)..(146): Ceres Seq. ID no. 15175599
  misc_feature (12)..(75): Pfam Name: AP2 domain Pfam Description: AP2 domain
  misc_feature (1)..(113): Homolog of NCBI NO: 27960760 NR Description: dehydration-responsive AP2 domain transcriptional
  misc_feature (1)..(113): Homolog of NCBI NO: 30313898 NR Description: AP2 transcriptional activator DRF1.1 [Hordeum
  misc_feature (1)..(106): Homolog of NCBI NO: 34896106 NR Description: putative AP2-domain DNA-binding protein
  misc_feature (1)..(106): Homolog of NCBI NO: 25989383 NR Description: DREB1 [Oryza sativa]
  misc_feature (1)..(106): Homolog of NCBI NO: 22594971 NR Description: DRE binding protein 2 [Oryza sativa]
  misc_feature (1)..(132): Homolog of NCBI NO: 15228427 NR Description: DRE binding protein (DREB2B) [Arabidopsis
  misc_feature (1)..(131): Homolog of NCBI NO: 38099059 NR Description: dehydration-responsive element binding protein 2
  misc_feature (1)..(83): Homolog of NCBI NO: 15239107 NR Description: DRE binding protein (DREB2A) [Arabidopsis
  misc_feature (1)..(91): Homolog of NCBI NO: 25992100 NR Description: dehydration responsive element binding protein
  misc_feature (1)..(115): Homolog of NCBI NO: 8346773 NR Description: AP2-domain DNA-binding protein [Catharanthus
MKGKGGPENSRCNYRGVRQRTWGKWVAEIREPNRGNRLWLGTFPTAIGAALAYDEAARAMYGSCARLNFPNVSVSSFSEESSKDSPVANHCGSSMAVSANESMISPSNSGVGAEDDVDMEPISLSLTVKHENGEGESGISSSPPSP

SEQ ID NO: 58320 - DNA, 1258 bp, Glycine max
  misc_feature (1)..(1258): Ceres Seq. ID no. 14314869
aaacacagttaaagacgcacaagaaaacatctcgctcaacaccaccaacacttcggatctacgtttccactctccgaacatcaaaaaaggaaagaaaaaccgatttacagcgacaacaacgaacgaacgatttctcgaagcgctctcaaaatggcgcgtgcaccctttacttcattccccttcgtcctcattacccttctctcaattctccacctttcgcactgcaagaccctcaagcgtgacgttaaggctttgaacgagatcaaggcttcgcttgggtggagagtggtgtatgcgtgggtcgatgatgatccatgtggagatggggatcttcctccttggtctggtgtcacgtgttccactgtcggtgattatcgtgttgttaccgagcttgaggtgtatgcggtgtcgattgttggaccttttcccactgctgttaccagcttgttggatcttacacggcttgatcttcacaataacaagctgacagggcctattcctcctcaaattggacggttgaagcgccttaaaatattaaatttgaggtggaacaaactacaggatgcaattcctccaaaaattggcgagcttaaaagtttaacacatctgtacctaagcttcaacaatttcaagggagaaattccgaaggagctagcaaatcttcaagaccttcgctatctttatctccatgaaaaccgtttaactggaagaataccaccagaattgggcacactgcaaaatcttcggcacttggatgctggtaacaatcatttagtaggtaccataagggaactcattcgtattgaaggttgctttcctgcactacgcaatctgtatctaaacaataattattttactggaggaatgcctgcacagcttgctaacttaaccagtcttgagatcttgtacctatcctacaacaaaatgtcaggagttataccatcttccgttgctcgtattcctaaattgacatacttgtacttggatcacaatcagttttcagggagaattcctgaacccttttacaagcatccatttttgaaagaaatgtacattgagggaaatgcattccggcccggtgtcaatcccattggcttccataaagtgcttgaagtttctgatggagacttccttgtttaatgaaagctctaaatatttataattttttctcttcaggaagtgcacttgtataattattgaaacaattgttcctctaattatctcaatgaaatagccaaataggtaatccaattttgtc

SEQ ID NO: 58321 - protein, 329 aa, Glycine max
  peptide (1)..(329): Ceres Seq. ID no. 14314870
  misc_feature (101)..(124): Pfam Name: Leucine Rich Repeat Pfam Description: Leucine Rich Repeat
  misc_feature (65)..(316): Homolog of NCBI NO: 7488988 NR Description: disease resistance protein Hcr2-5D - tomato
  misc_feature (65)..(307): Homolog of NCBI NO: 15219699 NR Description: leucine-rich repeat transmembrane protein kinase,
  misc_feature (65)..(328): Homolog of NCBI NO: 3894383 NR Description: disease resistance protein [Lycopersicon
  misc_feature (65)..(305): Homolog of NCBI NO: 3894387 NR Description: Hcr2-0B [Lycopersicon esculentum]
  misc_feature (12)..(307): Homolog of NCBI NO: 15240186 NR Description: leucine rich repeat protein family [Arabidopsis
  misc_feature (130)..(329): Homolog of NCBI NO: 15240186 NR Description: leucine rich repeat protein family [Arabidopsis
  misc_feature (13)..(329): Homolog of NCBI NO: 25402771 NR Description: protein F16A14.12 [imported] - Arabidopsis
  misc_feature (13)..(329): Homolog of NCBI NO: 15222979 NR Description: leucine rich repeat protein family [Arabidopsis
  misc_feature (12)..(329): Homolog of NCBI NO: 9757845 NR Description: leucine-rich repeat disease resistance
  misc_feature (4)..(329): Homolog of NCBI NO: 14626935 NR Description: leucine-rich repeat resistance protein-like
MARAPFTSFPFVLITLLSILHLSHCKTLKRDVKALNEIKASLGWRVVYAWVDDDPCGDGDLPPWSGVTCSTVGDYRVVTELEVYAVSIVGPFPTAVTSLLDLTRLDLHNNKLTGPIPPQIGRLKRLKILNLRWNKLQDAIPPKIGELKSLTHLYLSFNNFKGEIPKELANLQDLRYLYLHENRLTGRIPPELGTLQNLRHLDAGNNHLVGTIRELIRIEGCFPALRNLYLNNNYFTGGMPAQLANLTSLEILYLSYNKMSGVIPSSVARIPKLTYLYLDHNQFSGRIPEPFYKHPFLKEMYIEGNAFRPGVNPIGFHKVLEVSDGDFLV

SEQ ID NO: 58322 - DNA, 1260 bp, Glycine max
  misc_feature (1)..(1260): Ceres Seq. ID no. 15171501
aaaccttcatgctgagtttcttatttgttgcgtggcaacgcaatgatgatgatgatgatggggttggtgtcttccagagttgtgttcttgtttgttgtttcgattttcgtgatttgggctcaggtggtggatttagcagaaggtggtgctgttcgaaattacattagttgggaagatttgcaggtgaatgaacaaaggttggccgtgaagtcgtcccataaccaggttcgagttataactgttaaccagaatggtgggggacattccaaaactgttcaaggtgctgtgaatatggttcctgataataacagacaaagggtcaaaattttcatttttccaggaatttacagagaaaaagtgcgtgtgcctgtgaccaagccttatgtatcatttatagggaaaagaaatcgaacagcaagtcctataattacttggaacagtaaatcatctgacaaaggcccaaatggcacagcattgggcacctatgcttcagcaacagtgggagtggactcagattatttctgtgcaactgggatcacttttgagaactcagtgattgcatcggctggtggaaaagggatgcaaggagtggcactgagggtaagcagtccaaaagcaatgttctatcgagtgaggattaagggaacacaggacactctcttggacagcacaggaaatcattacttcttaaagtgtcgcatcataggaaaagttgattttatctgtggcagcgcaaaatcactctatgagaagtgtcgtcttcagtcaatagctgagaactatggagcaatagcagcacatcatagggattcaccaacagacgacacaggtttttcttttgtaagttgcagtattagaggatctggcagtgtgtaccttggcagagcatgggggaactactcaagaattatatactccaaatgtaatatggatggcattattaatcctcaagggtggtcagactggaatcattcacataggaagaagactgcagtgtttgctgagtatcaatgcaagggaagaggagcagatagaagacatagggtgccttggtcaaaatcattcagctatccggaagcaagtcctttcctttacaagagcttcatagatggagaccagtggctcagactgtagcattatgatgcaccgattacatgacaattattcattattaatttatatgcttgtttattactatgttacatatcccccaaacgatcattttgatgcttactctttatcttgcaagggatgtttttt

SEQ ID NO: 58323 - protein, 363 aa, Glycine max
  peptide (1)..(363): Ceres Seq. ID no. 15171502
  misc_feature (64)..(358): Pfam Name: Pectinesterase Pfam Description: Pectinesterase
  misc_feature (63)..(361): Homolog of NCBI NO: 15240781 NR Description: pectinesterase family [Arabidopsis thaliana]
  misc_feature (64)..(362): Homolog of NCBI NO: 27754550 NR Description: putative pectinesterase family protein
  misc_feature (64)..(362): Homolog of NCBI NO: 15228023 NR Description: pectinesterase family [Arabidopsis thaliana]
  misc_feature (54)..(361): Homolog of NCBI NO: 9758483 NR Description: pectin methylesterase-like protein [Arabidopsis
  misc_feature (40)..(363): Homolog of NCBI NO: 15241163 NR Description: pectinesterase family [Arabidopsis thaliana]
  misc_feature (65)..(363): Homolog of NCBI NO: 34909402 NR Description: putative pectin methylesterase
  misc_feature (6)..(361): Homolog of NCBI NO: 9758778 NR Description: pectin methylesterase-like [Arabidopsis thaliana]
  misc_feature (62)..(361): Homolog of NCBI NO: 38345478 NR Description: OSJNBa0010H02.16 [Oryza sativa (japonica
  misc_feature (6)..(361): Homolog of NCBI NO: 15238111 NR Description: pectinesterase family [Arabidopsis thaliana]
  misc_feature (22)..(363): Homolog of NCBI NO: 15240544 NR Description: pectinesterase family [Arabidopsis thaliana]
MMMMMMGLVSSRVVFLFVVSIFVIWAQVVDLAEGGAVRNYISWEDLQVNEQRLAVKSSHNQVRVITVNQNGGGHSKTVQGAVNMVPDNNRQRVKIFIFPGIYREKVRVPVTKPYVSFIGKRNRTASPIITWNSKSSDKGPNGTALGTYASATVGVDSDYFCATGITFENSVIASAGGKGMQGVALRVSSPKAMFYRVRIKGTQDTLLDSTGNHYFLKCRIIGKVDFICGSAKSLYEKCRLQSIAENYGAIAAHHRDSPTDDTGFSFVSCSIRGSGSVYLGRAWGNYSRIIYSKCNMDGIINPQGWSDWNHSHRKKTAVFAEYQCKGRGADRRHRVPWSKSFSYPEASPFLYKSFIDGDQWLRL

SEQ ID NO: 58324 - protein, 362 aa, Glycine max
  peptide (1)..(362): Ceres Seq. ID no. 15171503
  misc_feature (63)..(357): Pfam Name: Pectinesterase Pfam Description: Pectinesterase
  misc_feature (62)..(360): Homolog of NCBI NO: 15240781 NR Description: pectinesterase family [Arabidopsis thaliana]
  misc_feature (63)..(361): Homolog of NCBI NO: 27754550 NR Description: putative pectinesterase family protein
  misc_feature (63)..(361): Homolog of NCBI NO: 15228023 NR Description: pectinesterase family [Arabidopsis thaliana]
  misc_feature (53)..(360): Homolog of NCBI NO: 9758483 NR Description: pectin methylesterase-like protein [Arabidopsis
  misc_feature (39)..(362): Homolog of NCBI NO: 15241163 NR Description: pectinesterase family [Arabidopsis thaliana]
  misc_feature (64)..(362): Homolog of NCBI NO: 34909402 NR Description: putative pectin methylesterase
  misc_feature (5)..(360): Homolog of NCBI NO: 9758778 NR Description: pectin methylesterase-like [Arabidopsis thaliana]
  misc_feature (61)..(360): Homolog of NCBI NO: 38345478 NR Description: OSJNBa0010H02.16 [Oryza sativa (japonica
  misc_feature (5)..(360): Homolog of NCBI NO: 15238111 NR Description: pectinesterase family [Arabidopsis thaliana]
  misc_feature (21)..(362): Homolog of NCBI NO: 15240544 NR Description: pectinesterase family [Arabidopsis thaliana]
MMMMMGLVSSRVVFLFVVSIFVIWAQVVDLAEGGAVRNYISWEDLQVNEQRLAVKSSHNQVRVITVNQNGGGHSKTVQGAVNMVPDNNRQRVKIFIFPGIYREKVRVPVTKPYVSFIGKRNRTASPIITWNSKSSDKGPNGTALGTYASATVGVDSDYFCATGITFENSVIASAGGKGMQGVALRVSSPKAMFYRVRIKGTQDTLLDSTGNHYFLKCRIIGKVDFICGSAKSLYEKCRLQSIAENYGAIAAHHRDSPTDDTGFSFVSCSIRGSGSVYLGRAWGNYSRIIYSKCNMDGIINPQGWSDWNHSHRKKTAVFAEYQCKGRGADRRHRVPWSKSFSYPEASPFLYKSFIDGDQWLRL

SEQ ID NO: 58325 - protein, 361 aa, Glycine max
  peptide (1)..(361): Ceres Seq. ID no. 15171504
  misc_feature (62)..(356): Pfam Name: Pectinesterase Pfam Description: Pectinesterase
  misc_feature (61)..(359): Homolog of NCBI NO: 15240781 NR Description: pectinesterase family [Arabidopsis thaliana]
  misc_feature (62)..(360): Homolog of NCBI NO: 27754550 NR Description: putative pectinesterase family protein
  misc_feature (62)..(360): Homolog of NCBI NO: 15228023 NR Description: pectinesterase family [Arabidopsis thaliana]
  misc_feature (52)..(359): Homolog of NCBI NO: 9758483 NR Description: pectin methylesterase-like protein [Arabidopsis
  misc_feature (38)..(361): Homolog of NCBI NO: 15241163 NR Description: pectinesterase family [Arabidopsis thaliana]
  misc_feature (63)..(361): Homolog of NCBI NO: 34909402 NR Description: putative pectin methylesterase
  misc_feature (4)..(359): Homolog of NCBI NO: 9758778 NR Description: pectin methylesterase-like [Arabidopsis thaliana]
  misc_feature (60)..(359): Homolog of NCBI NO: 38345478 NR Description: OSJNBa0010H02.16 [Oryza sativa (japonica
  misc_feature (4)..(359): Homolog of NCBI NO: 15238111 NR Description: pectinesterase family [Arabidopsis thaliana]
  misc_feature (20)..(361): Homolog of NCBI NO: 15240544 NR Description: pectinesterase family [Arabidopsis thaliana]
MMMMGLVSSRVVFLFVVSIFVIWAQVVDLAEGGAVRNYISWEDLQVNEQRLAVKSSHNQVRVITVNQNGGGHSKTVQGAVNMVPDNNRQRVKIFIFPGIYREKVRVPVTKPYVSFIGKRNRTASPIITWNSKSSDKGPNGTALGTYASATVGVDSDYFCATGITFENSVIASAGGKGMQGVALRVSSPKAMFYRVRIKGTQDTLLDSTGNHYFLKCRIIGKVDFICGSAKSLYEKCRLQSIAENYGAIAAHHRDSPTDDTGFSFVSCSIRGSGSVYLGRAWGNYSRIIYSKCNMDGIINPQGWSDWNHSHRKKTAVFAEYQCKGRGADRRHRVPWSKSFSYPEASPFLYKSFIDGDQWLRL

SEQ ID NO: 58326 - DNA, 1258 bp, Glycine max
  misc_feature (1)..(1258): Ceres Seq. ID no. 15170698
aaaaagacgatgatgtcgtcgcagaatgagaataggtcgttggaggaagctggaccctccggctcctccgatggaggggtaggagtgaattggctctgcatgagccctaagcgagatcacaaccccgaaaactatgacgaccttcaattcgagttcaatcctaatctcttcgcctctctcgagcactatttgcctcctcatatgctcaacctctcacgcgatgttaagcttcactacatcaggaacattcttcttcgctatttgcctgagaatgaccgcaactggattcaaaagctgagggaatacaggctaaagatcatattgaattatccatcgttgcataaggagatatttactatggatgctgagaactttttcgtaccatcatttctcagagcaattaaagaaaacacagaagcgaattttagaagtataatggctgaaccttgtaaaggagtttatacatttgaaatgcttcaaccgcaattttgtaaaaaactgatgtctgaggtggatcattttgaaagatgggtccatggtaccaaactcaaaatcatgcgtcctaatgcaatgaataaaaataaacatggtgttatccttgatgattttgcctttgaagccatgcttgacagatttatgtgtgatttcatacgtcctatatctcaagttttctaccctgaacttggtggatcctcattggactctcaccatggttttgttgttgaatatggaattaataaggatgtggaacttggcttacatgaggatgaggcagaagtcaccttaaatgtttgcttgggaaaagaattttctggtggagaactgttcttccagggtgttcgatgtgatgcacatgtaacatcaaatgcgcaaccagaggaggccttcaattattcccatgttccaggacacgcaattcttcatcctggtcgtaaccggcatggtgctagacctacaacatctgggaatcggatgaatttaattctctggtgtagaagttcggtgtttagagagttgaaaagatatcagagagatttttatagctggtgtggagaatgcaaacagaagaaggcggagagagtgtgtttgtcagttatggccaccaaacaggaattactgaagagcgaaatataattggcctcgtgaactttcacatgcaaattatgtttgtatagtttattcccaccattgaacttcttttctgtttctagattatggattatttttaacaaaatgaaatatattgaagttgcaagtc

SEQ ID NO: 58327 - protein, 377 aa, Glycine max
  peptide (1)..(377): Ceres Seq. ID no. 15170699
  misc_feature (234)..(333): Pfam Name: 2OG-Fe(II) oxygenase superfamily Pfam Description: 2OG-Fe(II) oxygenase superfamily
  misc_feature (68)..(193): Homolog of NCBI NO: 15221938 NR Description: expressed protein [Arabidopsis thaliana]
  misc_feature (223)..(376): Homolog of NCBI NO: 15221938 NR Description: expressed protein [Arabidopsis thaliana]
  misc_feature (36)..(374): Homolog of NCBI NO: 15221946 NR Description: expressed protein [Arabidopsis thaliana]
  misc_feature (32)..(374): Homolog of NCBI NO: 15239932 NR Description: expressed protein [Arabidopsis thaliana]
  misc_feature (223)..(374): Homolog of NCBI NO: 25518648 NR Description: hypothetical protein F19G10.9 [imported] -
  misc_feature (6)..(224): Homolog of NCBI NO: 25518648 NR Description: hypothetical protein F19G10.9 [imported] -
  misc_feature (14)..(374): Homolog of NCBI NO: 34914494 NR Description: B1080D07.28 [Oryza sativa (japonica
  misc_feature (32)..(374): Homolog of NCBI NO: 18401806 NR Description: oxidoreductase, 2OG-Fe(II) oxygenase family
  misc_feature (223)..(374): Homolog of NCBI NO: 15219973 NR Description: oxidoreductase, 2OG-Fe(II) oxygenase family
  misc_feature (6)..(224): Homolog of NCBI NO: 15219973 NR Description: oxidoreductase, 2OG-Fe(II) oxygenase family
KKTMMSSQNENRSLEEAGPSGSSDGGVGVNWLCMSPKRDHNPENYDDLQFEFNPNLFASLEHYLPPHMLNLSRDVKLHYIRNILLRYLPENDRNWIQKLREYRLKIILNYPSLHKEIFTMDAENFFVPSFLRAIKENTEANFRSIMAEPCKGVYTFEMLQPQFCKKLMSEVDHFERWVHGTKLKIMRPNAMNKNKHGVILDDFAFEAMLDRFMCDFIRPISQVFYPELGGSSLDSHHGFVVEYGINKDVELGLHEDEAEVTLNVCLGKEFSGGELFFQGVRCDAHVTSNAQPEEAFNYSHVPGHAILHPGRNRHGARPTTSGNRMNLILWCRSSVFRELKRYQRDFYSWCGECKQKKAERVCLSVMATKQELLKSEI

SEQ ID NO: 58328 - protein, 374 aa, Glycine max
  peptide (1)..(374): Ceres Seq. ID no. 15170700
  misc_feature (231)..(330): Pfam Name: 2OG-Fe(II) oxygenase superfamily Pfam Description: 2OG-Fe(II) oxygenase superfamily
  misc_feature (65)..(190): Homolog of NCBI NO: 15221938 NR Description: expressed protein [Arabidopsis thaliana]
  misc_feature (220)..(373): Homolog of NCBI NO: 15221938 NR Description: expressed protein [Arabidopsis thaliana]
  misc_feature (33)..(371): Homolog of NCBI NO: 15221946 NR Description: expressed protein [Arabidopsis thaliana]
  misc_feature (29)..(371): Homolog of NCBI NO: 15239932 NR Description: expressed protein [Arabidopsis thaliana]
  misc_feature (220)..(371): Homolog of NCBI NO: 25518648 NR Description: hypothetical protein F19G10.9 [imported] -
  misc_feature (3)..(221): Homolog of NCBI NO: 25518648 NR Description: hypothetical protein F19G10.9 [imported] -
  misc_feature (11)..(371): Homolog of NCBI NO: 34914494 NR Description: B1080D07.28 [Oryza sativa (japonica
  misc_feature (29)..(371): Homolog of NCBI NO: 18401806 NR Description: oxidoreductase, 2OG-Fe(II) oxygenase family
  misc_feature (220)..(371): Homolog of NCBI NO: 15219973 NR Description: oxidoreductase, 2OG-Fe(II) oxygenase family
  misc_feature (3)..(221): Homolog of NCBI NO: 15219973 NR Description: oxidoreductase, 2OG-Fe(II) oxygenase family
MMSSQNENRSLEEAGPSGSSDGGVGVNWLCMSPKRDHNPENYDDLQFEFNPNLFASLEHYLPPHMLNLSRDVKLHYIRNILLRYLPENDRNWIQKLREYRLKIILNYPSLHKEIFTMDAENFFVPSFLRAIKENTEANFRSIMAEPCKGVYTFEMLQPQFCKKLMSEVDHFERWVHGTKLKIMRPNAMNKNKHGVILDDFAFEAMLDRFMCDFIRPISQVFYPELGGSSLDSHHGFVVEYGINKDVELGLHEDEAEVTLNVCLGKEFSGGELFFQGVRCDAHVTSNAQPEEAFNYSHVPGHAILHPGRNRHGARPTTSGNRMNLILWCRSSVFRELKRYQRDFYSWCGECKQKKAERVCLSVMATKQELLKSEI

SEQ ID NO: 58329 - protein, 373 aa, Glycine max
  peptide (1)..(373): Ceres Seq. ID no. 15170701
  misc_feature (230)..(329): Pfam Name: 2OG-Fe(II) oxygenase superfamily Pfam Description: 2OG-Fe(II) oxygenase superfamily
  misc_feature (64)..(189): Homolog of NCBI NO: 15221938 NR Description: expressed protein [Arabidopsis thaliana]
  misc_feature (219)..(372): Homolog of NCBI NO: 15221938 NR Description: expressed protein [Arabidopsis thaliana]
  misc_feature (32)..(370): Homolog of NCBI NO: 15221946 NR Description: expressed protein [Arabidopsis thaliana]
  misc_feature (28)..(370): Homolog of NCBI NO: 15239932 NR Description: expressed protein [Arabidopsis thaliana]
  misc_feature (219)..(370): Homolog of NCBI NO: 25518648 NR Description: hypothetical protein F19G10.9 [imported] -
  misc_feature (2)..(220): Homolog of NCBI NO: 25518648 NR Description: hypothetical protein F19G10.9 [imported] -
  misc_feature (10)..(370): Homolog of NCBI NO: 34914494 NR Description: B1080D07.28 [Oryza sativa (japonica
  misc_feature (28)..(370): Homolog of NCBI NO: 18401806 NR Description: oxidoreductase, 2OG-Fe(II) oxygenase family
  misc_feature (219)..(370): Homolog of NCBI NO: 15219973 NR Description: oxidoreductase, 2OG-Fe(II) oxygenase family
  misc_feature (2)..(220): Homolog of NCBI NO: 15219973 NR Description: oxidoreductase, 2OG-Fe(II) oxygenase family
MSSQNENRSLEEAGPSGSSDGGVGVNWLCMSPKRDHNPENYDDLQFEFNPNLFASLEHYLPPHMLNLSRDVKLHYIRNILLRYLPENDRNWIQKLREYRLKIILNYPSLHKEIFTMDAENFFVPSFLRAIKENTEANFRSIMAEPCKGVYTFEMLQPQFCKKLMSEVDHFERWVHGTKLKIMRPNAMNKNKHGVILDDFAFEAMLDRFMCDFIRPISQVFYPELGGSSLDSHHGFVVEYGINKDVELGLHEDEAEVTLNVCLGKEFSGGELFFQGVRCDAHVTSNAQPEEAFNYSHVPGHAILHPGRNRHGARPTTSGNRMNLILWCRSSVFRELKRYQRDFYSWCGECKQKKAERVCLSVMATKQELLKSEI

SEQ ID NO: 58330 - DNA, 1226 bp, Glycine max
  misc_feature (1)..(1226): Ceres Seq. ID no. 15178228
agtaaagaaaaaaaaagaagagaaaaccctattcactctgaaagtggcgaagatgagtttgggaaccgcggaggaggaatcgggttccgaaatccacatcccggcggaaatcgactggcacatgctggacaagtcaaaattcttcttcctgggtgcggccttattctccggcgtctcatgcgcactctatcccatggtggtgttgaagacgcggcaacaagtttcctcctcacgtttctcctgcctcaacatctcctgcgccattctccgccacgagggattccgcggcttctacaagggcttccccacctccctcatgggcaccatccccgcgcgtgccctctacatggcctccctcgagttcaccaagaccaacgttggcaccgctttcgtccaattcggcttctccgaaacctccgccgttgcggctgccaacgccgccgcgggcgtcacctccgccatggcggcgcagctcgtgtggacccccatcgacgtcgtgagtcagcggctcatggttcaggggagtggtgggagcaaaaccgtgctcgccaatctcaattctgaaaattacagaaacgggtttgatgcttttaggaaaattctgtgtgccgatggagcgagagggttttatagagggtttgggatttctatattgacttatgcgccttcaaatgctgtttggtggacttcttattctatggttcatagactcatttggggtgcttttggttcttacttggggaataataatttggggggagggtttaggcctgattcgaaggcaatggtggcggttcaagggttgagtgcggttatggcaagtggggtatctgcaattgtgacaatgccgcttgataccattaaaacgaggttgcaggtgttggatcttgaagagaatgggagaagaaggcctttgacttttgttcagacggtgaggaatttggtgaaggaaggtggtttggttgcttgttacagaggattgggtcccagatgggcttccatgtccatgtctgccacaactatgattactacatatgaatttttgaaacgaatgtctaccaagagtcaagaggatttcacttcatcataggccaggcagtgaaacattgttaggaattaggagcaacaatcaacttgtttctttgcttggatttttctctgtcagttgtactagtctagtctacctcatcggacactaaatacaatatgatgatgagagattgtac

SEQ ID NO: 58331 - protein, 362 aa, Glycine max
  peptide (1)..(362): Ceres Seq. ID no. 15178229
  misc_feature (190)..(354): Homolog of NCBI NO: 37534064 NR Description: putative Tricarboxylate transport protein,
  misc_feature (31)..(357): Homolog of NCBI NO: 12061241 NR Description: 36I5.1 [Oryza sativa (japonica cultivar-group)]
  misc_feature (22)..(243): Homolog of NCBI NO: 37534064 NR Description: putative Tricarboxylate transport protein,
  misc_feature (36)..(351): Homolog of NCBI NO: 21553961 NR Description: putative mitochondrial carrier protein
  misc_feature (36)..(351): Homolog of NCBI NO: 18417739 NR Description: mitochondrial carrier protein family [Arabidopsis
  misc_feature (36)..(357): Homolog of NCBI NO: 21326111 NR Description: putative mitochondrial carrier protein [Sorghum
  misc_feature (27)..(357): Homolog of NCBI NO: 7486721 NR Description: hypothetical protein F9D12.12 - Arabidopsis
  misc_feature (18)..(357): Homolog of NCBI NO: 15239622 NR Description: mitochondrial carrier protein family [Arabidopsis
  misc_feature (18)..(357): Homolog of NCBI NO: 21594326 NR Description: mitochondrial carrier-like protein [Arabidopsis
  misc_feature (18)..(361): Homolog of NCBI NO: 18410193 NR Description: mitochondrial carrier protein family [Arabidopsis
VKKKKEEKTLFTLKVAKMSLGTAEEESGSEIHIPAEIDWHMLDKSKFFFLGAALFSGVSCALYPMVVLKTRQQVSSSRFSCLNISCAILRHEGFRGFYKGFPTSLMGTIPARALYMASLEFTKTNVGTAFVQFGFSETSAVAAANAAAGVTSAMAAQLVWTPIDVVSQRLMVQGSGGSKTVLANLNSENYRNGFDAFRKILCADGARGFYRGFGISILTYAPSNAVWWTSYSMVHRLIWGAFGSYLGNNNLGGGFRPDSKAMVAVQGLSAVMASGVSAIVTMPLDTIKTRLQVLDLEENGRRRPLTFVQTVRNLVKEGGLVACYRGLGPRWASMSMSATTMITTYEFLKRMSTKSQEDFTSS

SEQ ID NO: 58332 - protein, 345 aa, Glycine max
  peptide (1)..(345): Ceres Seq. ID no. 15178230
  misc_feature (173)..(337): Homolog of NCBI NO: 37534064 NR Description: putative Tricarboxylate transport protein,
  misc_feature (14)..(340): Homolog of NCBI NO: 12061241 NR Description: 36I5.1 [Oryza sativa (japonica cultivar-group)]
  misc_feature (5)..(226): Homolog of NCBI NO: 37534064 NR Description: putative Tricarboxylate transport protein,
  misc_feature (19)..(334): Homolog of NCBI NO: 21553961 NR Description: putative mitochondrial carrier protein
  misc_feature (19)..(334): Homolog of NCBI NO: 18417739 NR Description: mitochondrial carrier protein family [Arabidopsis
  misc_feature (19)..(340): Homolog of NCBI NO: 21326111 NR Description: putative mitochondrial carrier protein [Sorghum
  misc_feature (10)..(340): Homolog of NCBI NO: 7486721 NR Description: hypothetical protein F9D12.12 - Arabidopsis
  misc_feature (1)..(340): Homolog of NCBI NO: 15239622 NR Description: mitochondrial carrier protein family [Arabidopsis
  misc_feature (1)..(340): Homolog of NCBI NO: 21594326 NR Description: mitochondrial carrier-like protein [Arabidopsis
  misc_feature (1)..(344): Homolog of NCBI NO: 18410193 NR Description: mitochondrial carrier protein family [Arabidopsis
MSLGTAEEESGSEIHIPAEIDWHMLDKSKFFFLGAALFSGVSCALYPMVVLKTRQQVSSSRFSCLNISCAILRHEGFRGFYKGFPTSLMGTIPARALYMASLEFTKTNVGTAFVQFGFSETSAVAAANAAAGVTSAMAAQLVWTPIDVVSQRLMVQGSGGSKTVLANLNSENYRNGFDAFRKILCADGARGFYRGFGISILTYAPSNAVWWTSYSMVHRLIWGAFGSYLGNNNLGGGFRPDSKAMVAVQGLSAVMASGVSAIVTMPLDTIKTRLQVLDLEENGRRRPLTFVQTVRNLVKEGGLVACYRGLGPRWASMSMSATTMITTYEFLKRMSTKSQEDFTSS

SEQ ID NO: 58333 - protein, 322 aa, Glycine max
  peptide (1)..(322): Ceres Seq. ID no. 15178231
  misc_feature (150)..(314): Homolog of NCBI NO: 37534064 NR Description: putative Tricarboxylate transport protein,
  misc_feature (1)..(317): Homolog of NCBI NO: 12061241 NR Description: 36I5.1 [Oryza sativa (japonica cultivar-group)]
  misc_feature (1)..(203): Homolog of NCBI NO: 37534064 NR Description: putative Tricarboxylate transport protein,
  misc_feature (1)..(311): Homolog of NCBI NO: 21553961 NR Description: putative mitochondrial carrier protein
  misc_feature (1)..(311): Homolog of NCBI NO: 18417739 NR Description: mitochondrial carrier protein family [Arabidopsis
  misc_feature (1)..(317): Homolog of NCBI NO: 21326111 NR Description: putative mitochondrial carrier protein [Sorghum
  misc_feature (1)..(317): Homolog of NCBI NO: 7486721 NR Description: hypothetical protein F9D12.12 - Arabidopsis
  misc_feature (1)..(317): Homolog of NCBI NO: 15239622 NR Description: mitochondrial carrier protein family [Arabidopsis
  misc_feature (1)..(317): Homolog of NCBI NO: 21594326 NR Description: mitochondrial carrier-like protein [Arabidopsis
  misc_feature (1)..(321): Homolog of NCBI NO: 18410193 NR Description: mitochondrial carrier protein family [Arabidopsis
MLDKSKFFFLGAALFSGVSCALYPMVVLKTRQQVSSSRFSCLNISCAILRHEGFRGFYKGFPTSLMGTIPARALYMASLEFTKTNVGTAFVQFGFSETSAVAAANAAAGVTSAMAAQLVWTPIDVVSQRLMVQGSGGSKTVLANLNSENYRNGFDAFRKILCADGARGFYRGFGISILTYAPSNAVWWTSYSMVHRLIWGAFGSYLGNNNLGGGFRPDSKAMVAVQGLSAVMASGVSAIVTMPLDTIKTRLQVLDLEENGRRRPLTFVQTVRNLVKEGGLVACYRGLGPRWASMSMSATTMITTYEFLKRMSTKSQEDFTSS

SEQ ID NO: 58334 - DNA, 2100 bp, Glycine max
  misc_feature (1)..(2100): Ceres Seq. ID no. 15176685
ttttttctggtgattggaaacattttttttttttgaggaagataataatgggagcggtttgttcggctggtatggtggagaaaaatggtgaacttggagggaagagtttggggttttctgggaagcttaagaaggaaaatagctttgtgaatcggagagaagctttttcagattcaaggtctaatagtggtcatgatagaaagaaaaagaagcatgatactgggttttcccgtgaacttggtctatcgattccttcacctgggggaaaacaggtgaaccagaggggttcttttctgggaaaagcaggtgagagagcagtggaagttctggacacaattggaagtggcatgccaaagttaaacactaatactgggtttgtctctggcacaacttttagagggaataagatatcaatactggcattcgaagtagctaatacaataaccaaaggagcaattttgtttcaatcacttgctgaagaaaacattcagttccttaaaaatgaggttttacaatcggagggggttcagctattggtatcgaatgatgtggagaagttaataactcttgctgaggctgacaaaagggaagaactcaatgtcttctcaagggaagtaattaggtttggaaatatgtgtaaagatccacagtggcacaacctagacagatatttctcaagattagactttgatgtcctggatgacaaacgatatcaggaagatgcagaaaagacgatgcaggagtttaccagcctagttcggaatactgctgaattataccatgagttaaatgcttatgaacgttttgaacaagattatctgcaaaagattaaggaaatggagtccttaaatcttcctctaaaaggggagagtatcacaatgtttcaaagtgagctaaagcaccaaagaaagcttgtgaggagcttgaaaaagaagtctctttggtccagaactttggaagagatagttgaaaagcttgtagatattgttacctatatacatcaagcaatttatgagttcgctggaaatcatggtacagctgcaaccaagcacagtgagggttctgaaagactaggagaagctggtcttgcactgcactatgctaacatcatcaatcagataaatatggttgcatctcgcccaactgctcttcctccaaacaccagagacacattgtatcatggtttgcccaacaatattaaggctgctcttccatcccagttgcaaaccattggtgacatgaaagagctctccatcactcggatcaaagctgaaatggataagattcttcagtggcttgcaccacttgctacaaatacagtcaaagcacatcaaggtttcggatgggttggtgaatgggcaaacgcaagtaatgactttggtgataacacctccaaagaaagtaacctgattcgcctggagacactttattacgctgataagaggaagatagatgtttacatcattgaattgttggcatggcttcaccatttgattagctctgtaaaatctagacagaataccttgagaccaatgcctacaacacggtctcctccaaaaggactcgaacttcagtctaagatgcgacagtttttaattctatctgtggatagtagcaacaagccgttgggaactcaaatttctcatgaggataggagactattggaggaggttattgcaaggagaaagagtccaggacttagcaaaagtgaggatcttggtttggccaagaaaagacacgtcaaacatttgcaagtgaccaaaagtgctgggagttcacctgccaaggaattcttcggtacaagacaagtctttaaccaccaaaactataacgttttggatattatggatgggttgggttactgaaatcttcatctacactcaattgtggttctcacttgtcacctctcagctctgtttttctgctagaattcttactagcccagtctttcttaaggataatattcaacattcatttctatacatagctctagttatgtatatatctatataaacgactaacgccagattcttttaactttataaattaattttgtacaggggatgaaggaaatagttgaattccatttctataaaaaag

SEQ ID NO: 58335 - protein, 620 aa, Glycine max
  peptide (1)..(620): Ceres Seq. ID no. 15176686
  misc_feature (356)..(441): Pfam Name: Protein of unknown function (DUF668) Pfam Description: Protein of unknown function (DUF668)
  misc_feature (348)..(528): Homolog of NCBI NO: 15228977 NR Description: hypothetical protein [Arabidopsis thaliana]
  misc_feature (136)..(349): Homolog of NCBI NO: 15228977 NR Description: hypothetical protein [Arabidopsis thaliana]
  misc_feature (113)..(616): Homolog of NCBI NO: 34908726 NR Description: P0491F11.23 [Oryza sativa (japonica
  misc_feature (84)..(499): Homolog of NCBI NO: 38345368 NR Description: OSJNBa0088K19.7 [Oryza sativa (japonica
  misc_feature (53)..(195): Homolog of NCBI NO: 25403424 NR Description: protein F23M19.3 [imported] - Arabidopsis
  misc_feature (234)..(593): Homolog of NCBI NO: 25403424 NR Description: protein F23M19.3 [imported] - Arabidopsis
  misc_feature (90)..(589): Homolog of NCBI NO: 30682523 NR Description: expressed protein [Arabidopsis thaliana]
  misc_feature (16)..(441): Homolog of NCBI NO: 25513510 NR Description: T5I8.21 protein - Arabidopsis thaliana
  misc_feature (53)..(593): Homolog of NCBI NO: 15218580 NR Description: expressed protein [Arabidopsis thaliana]
  misc_feature (16)..(620): Homolog of NCBI NO: 18397646 NR Description: expressed protein [Arabidopsis thaliana]
FSGDWKHFFFLRKIIMGAVCSAGMVEKNGELGGKSLGFSGKLKKENSFVNRREAFSDSRSNSGHDRKKKKHDTGFSRELGLSIPSPGGKQVNQRGSFLGKAGERAVEVLDTIGSGMPKLNTNTGFVSGTTFRGNKISILAFEVANTITKGAILFQSLAEENIQFLKNEVLQSEGVQLLVSNDVEKLITLAEADKREELNVFSREVIRFGNMCKDPQWHNLDRYFSRLDFDVLDDKRYQEDAEKTMQEFTSLVRNTAELYHELNAYERFEQDYLQKIKEMESLNLPLKGESITMFQSELKHQRKLVRSLKKKSLWSRTLEEIVEKLVDIVTYIHQAIYEFAGNHGTAATKHSEGSERLGEAGLALHYANIINQINMVASRPTALPPNTRDTLYHGLPNNIKAALPSQLQTIGDMKELSITRIKAEMDKILQWLAPLATNTVKAHQGFGWVGEWANASNDFGDNTSKESNLIRLETLYYADKRKIDVYIIELLAWLHHLISSVKSRQNTLRPMPTTRSPPKGLELQSKMRQFLILSVDSSNKPLGTQISHEDRRLLEEVIARRKSPGLSKSEDLGLAKKRHVKHLQVTKSAGSSPAKEFFGTRQVFNHQNYNVLDIMDGLGY

SEQ ID NO: 58336 - protein, 605 aa, Glycine max
  peptide (1)..(605): Ceres Seq. ID no. 15176687
  misc_feature (341)..(426): Pfam Name: Protein of unknown function (DUF668) Pfam Description: Protein of unknown function (DUF668)
  misc_feature (333)..(513): Homolog of NCBI NO: 15228977 NR Description: hypothetical protein [Arabidopsis thaliana]
  misc_feature (121)..(334): Homolog of NCBI NO: 15228977 NR Description: hypothetical protein [Arabidopsis thaliana]
  misc_feature (98)..(601): Homolog of NCBI NO: 34908726 NR Description: P0491F11.23 [Oryza sativa (japonica
  misc_feature (69)..(484): Homolog of NCBI NO: 38345368 NR Description: OSJNBa0088K19.7 [Oryza sativa (japonica
  misc_feature (38)..(180): Homolog of NCBI NO: 25403424 NR Description: protein F23M19.3 [imported] - Arabidopsis
  misc_feature (219)..(578): Homolog of NCBI NO: 25403424 NR Description: protein F23M19.3 [imported] - Arabidopsis
  misc_feature (75)..(574): Homolog of NCBI NO: 30682523 NR Description: expressed protein [Arabidopsis thaliana]
  misc_feature (1)..(426): Homolog of NCBI NO: 25513510 NR Description: T5I8.21 protein - Arabidopsis thaliana
  misc_feature (38)..(578): Homolog of NCBI NO: 15218580 NR Description: expressed protein [Arabidopsis thaliana]
  misc_feature (1)..(605): Homolog of NCBI NO: 18397646 NR Description: expressed protein [Arabidopsis thaliana]
MGAVCSAGMVEKNGELGGKSLGFSGKLKKENSFVNRREAFSDSRSNSGHDRKKKKHDTGFSRELGLSIPSPGGKQVNQRGSFLGKAGERAVEVLDTIGSGMPKLNTNTGFVSGTTFRGNKISILAFEVANTITKGAILFQSLAEENIQFLKNEVLQSEGVQLLVSNDVEKLITLAEADKREELNVFSREVIRFGNMCKDPQWHNLDRYFSRLDFDVLDDKRYQEDAEKTMQEFTSLVRNTAELYHELNAYERFEQDYLQKIKEMESLNLPLKGESITMFQSELKHQRKLVRSLKKKSLWSRTLEEIVEKLVDIVTYIHQAIYEFAGNHGTAATKHSEGSERLGEAGLALHYANIINQINMVASRPTALPPNTRDTLYHGLPNNIKAALPSQLQTIGDMKELSITRIKAEMDKILQWLAPLATNTVKAHQGFGWVGEWANASNDFGDNTSKESNLIRLETLYYADKRKIDVYIIELLAWLHHLISSVKSRQNTLRPMPTTRSPPKGLELQSKMRQFLILSVDSSNKPLGTQISHEDRRLLEEVIARRKSPGLSKSEDLGLAKKRHVKHLQVTKSAGSSPAKEFFGTRQVFNHQNYNVLDIMDGLGY

SEQ ID NO: 58337 - protein, 597 aa, Glycine max
  peptide (1)..(597): Ceres Seq. ID no. 15176688
  misc_feature (333)..(418): Pfam Name: Protein of unknown function (DUF668) Pfam Description: Protein of unknown function (DUF668)
  misc_feature (325)..(505): Homolog of NCBI NO: 15228977 NR Description: hypothetical protein [Arabidopsis thaliana]
  misc_feature (113)..(326): Homolog of NCBI NO: 15228977 NR Description: hypothetical protein [Arabidopsis thaliana]
  misc_feature (90)..(593): Homolog of NCBI NO: 34908726 NR Description: P0491F11.23 [Oryza sativa (japonica
  misc_feature (61)..(476): Homolog of NCBI NO: 38345368 NR Description: OSJNBa0088K19.7 [Oryza sativa (japonica
  misc_feature (30)..(172): Homolog of NCBI NO: 25403424 NR Description: protein F23M19.3 [imported] - Arabidopsis
  misc_feature (211)..(570): Homolog of NCBI NO: 25403424 NR Description: protein F23M19.3 [imported] - Arabidopsis
  misc_feature (67)..(566): Homolog of NCBI NO: 30682523 NR Description: expressed protein [Arabidopsis thaliana]
  misc_feature (1)..(418): Homolog of NCBI NO: 25513510 NR Description: T5I8.21 protein - Arabidopsis thaliana
  misc_feature (30)..(570): Homolog of NCBI NO: 15218580 NR Description: expressed protein [Arabidopsis thaliana]
  misc_feature (1)..(597): Homolog of NCBI NO: 18397646 NR Description: expressed protein [Arabidopsis thaliana]
MVEKNGELGGKSLGFSGKLKKENSFVNRREAFSDSRSNSGHDRKKKKHDTGFSRELGLSIPSPGGKQVNQRGSFLGKAGERAVEVLDTIGSGMPKLNTNTGFVSGTTFRGNKISILAFEVANTITKGAILFQSLAEENIQFLKNEVLQSEGVQLLVSNDVEKLITLAEADKREELNVFSREVIRFGNMCKDPQWHNLDRYFSRLDFDVLDDKRYQEDAEKTMQEFTSLVRNTAELYHELNAYERFEQDYLQKIKEMESLNLPLKGESITMFQSELKHQRKLVRSLKKKSLWSRTLEEIVEKLVDIVTYIHQAIYEFAGNHGTAATKHSEGSERLGEAGLALHYANIINQINMVASRPTALPPNTRDTLYHGLPNNIKAALPSQLQTIGDMKELSITRIKAEMDKILQWLAPLATNTVKAHQGFGWVGEWANASNDFGDNTSKESNLIRLETLYYADKRKIDVYIIELLAWLHHLISSVKSRQNTLRPMPTTRSPPKGLELQSKMRQFLILSVDSSNKPLGTQISHEDRRLLEEVIARRKSPGLSKSEDLGLAKKRHVKHLQVTKSAGSSPAKEFFGTRQVFNHQNYNVLDIMDGLGY

SEQ ID NO: 58338 - DNA, 1118 bp, Glycine max
  misc_feature (1)..(1118): Ceres Seq. ID no. 14315080
actggaaattatgcttccaatatggaaaattttagacagcattctgcaactgtcacttctgctcctggtggtttgttatctactgcacctactgtgcaaataccatctgcctctcattcaacttcatcgatatcaggcttcccccttgactctcttgaaacagccaagagtggcaatcaagtcattaatcttgttaagccttctactttttttgcatcaacgtcttcatcttcactgttagttccacctatttattcatctgtgccgcctagtgcagttgttcatcattccctgaatgtgccacgccaatacggcactccagtacttcaacccttccctccccctaatcctcctctttctcttacccctatttcaagctccactccaaatagacctgtaatcagcagggataatgtccgtgatgcacttttatcattggttcaggaggatcatttcattgacatgatgttccaggcattactgaaggtgagtcattcatgagtaatcaaactctgaaggttggatggaaactgcatataaagttagttctgtatattgtagttacacaccatcacatctaacaagaggtgtaacctagtagtccgtctttagctttagccacaactttgcacgatacatctgaaatggcctattgcacaatatactaacaaatcatatggtgcattaatacactataatcttcaccactgaatttatgtgtgtctacgtgaacaagttacaagagaaaacaatggtaaaaatatagaatgatcttaatcgctaagttgatataacgattgctccacgtttacacacaaaaactaatggtgaaggtgctgtgtattcttacactgtaactctgttgtgtattgtagaaatagtcgtctgtatctgcaaaatgataaaagtgtttcgatgtcagtgtcgccttattaccctttgttgtcttgtctgtactttgtggttttaaatactgtcatggttctgtcgattgagtctttgcattaagttggacaagtcctctctatcgaccaatgaagatgcatgtataatcccatgcttagtatgcattttgatataaataaataaaaatttacctttcaatttagtccttaaag

SEQ ID NO: 58339 - protein, 166 aa, Glycine max
  peptide (1)..(166): Ceres Seq. ID no. 14315081
  misc_feature (21)..(162): Homolog of NCBI NO: 33146979 NR Description: putative transcription factor
  misc_feature (21)..(162): Homolog of NCBI NO: 34900778 NR Description: transcription factor-like protein
  misc_feature (14)..(160): Homolog of NCBI NO: 25455739 NR Description: hypothetical protein [imported] - Arabidopsis
  misc_feature (1)..(160): Homolog of NCBI NO: 6664305 NR Description: T27G7.7 [Arabidopsis thaliana]
  misc_feature (1)..(160): Homolog of NCBI NO: 18390886 NR Description: proline-rich protein family [Arabidopsis thaliana]
TGNYASNMENFRQHSATVTSAPGGLLSTAPTVQIPSASHSTSSISGFPLDSLETAKSGNQVINLVKPSTFFASTSSSSLLVPPIYSSVPPSAVVHHSLNVPRQYGTPVLQPFPPPNPPLSLTPISSSTPNRPVISRDNVRDALLSLVQEDHFIDMMFQALLKVSHS

SEQ ID NO: 58340 - protein, 159 aa, Glycine max
  peptide (1)..(159): Ceres Seq. ID no. 14315082
  misc_feature (14)..(155): Homolog of NCBI NO: 33146979 NR Description: putative transcription factor
  misc_feature (14)..(155): Homolog of NCBI NO: 34900778 NR Description: transcription factor-like protein
  misc_feature (7)..(153): Homolog of NCBI NO: 25455739 NR Description: hypothetical protein [imported] - Arabidopsis
  misc_feature (1)..(153): Homolog of NCBI NO: 6664305 NR Description: T27G7.7 [Arabidopsis thaliana]
  misc_feature (1)..(153): Homolog of NCBI NO: 18390886 NR Description: proline-rich protein family [Arabidopsis thaliana]
MENFRQHSATVTSAPGGLLSTAPTVQIPSASHSTSSISGFPLDSLETAKSGNQVINLVKPSTFFASTSSSSLLVPPIYSSVPPSAVVHHSLNVPRQYGTPVLQPFPPPNPPLSLTPISSSTPNRPVISRDNVRDALLSLVQEDHFIDMMFQALLKVSHS

SEQ ID NO: 58341 - DNA, 1506 bp, Glycine max
  misc_feature (1)..(1506): Ceres Seq. ID no. 14311609
acatgctcataatttagaccaagtctatatcatgagcttaatttggaccactttacttgttgatgcttgtgttgattctatttggacagtaaccaatgtggcttttacccttttgcattcaagatgcagttaaataggtagaataacggatgacaagtgaataatttctaaaattgattgcctttttttgctacagatttgaacctgatatgcttgcattttctggatgtgattatggtggaggggagaaggagcagaaggaactgggtgcaataagaaggaggtggaagacattacatagaagcaatcctgatagggcaaggaggcaggggagatgcccattaacccccgaagaagttggtctcatgctaagagcattgggatatggttctgacattcatatttacgttgcatcaggggaggtatatggaggggaaagaacattggcacctctcaaagcattatttcctaatttccattcaaaagagaccattgctaccaaggaagaattagaaccgttttcttcattttcttctcgcatggctgcactcgacttcattgtttgtgatgaaagtgatgtttttgtaaccaataataatggaaatatggcaaaaatattggctggacgaaggagatactttggccataaaccaaccattcgtccaaatgctaaaaaactttatcgattgttcttgaatagaagtaattcgacttgggaagcttttgcttctagtgtccgaactttccagaaaggcttcatgggagagccaaaggaggttagaccaggtagaggcgggtttcatgagaatccatcatcatgcatatgtgaagattctgcagcagccaaagtggacaaaaattcacaatctagaaaatatgggaaggataatacaacgaagaaaaatgtagcaaatgatgaactggatgttgacaatgtgtctgagtggccagacatggatgatgatgatgatgatcagaatgatctagcagagaagggtacattcaatgaaacaattttggattatgatgctctgaacttcgaggatcccgagttggaggaaattatatcagattagtgaaggtgctttattcagtgctgtacctgttgacttattatggttctttgccagctccatttgacagctgcttataaagctcaaaaacaggaacagaaaaggcacgactttctcgatactggccgaactatagtaaaaagacatctcaaaaatttaatcatacgttcatcttttctgcatttctaaggacataatggtctcagtttgatgctgaatttttggagtgtttagacttgtacgaatctgtaaagaggttatcagaagcgagcaatggaagtagagttagaggacatccatccgaatatagctgcacacaaaattgagtttgctaggaagtaggaaaatctgtatatcttttgcagttgatagactgtacacctttgttcctgtctttcattgacattgatgcagtcaacttctcttttagaac

SEQ ID NO: 58342 - protein, 288 aa, Glycine max
  peptide (1)..(288): Ceres Seq. ID no. 14311610
  misc_feature (1)..(172): Pfam Name: Plant protein family Pfam Description: Plant protein family
  misc_feature (1)..(248): Homolog of NCBI NO: 22328730 NR Description: growth regulator like protein [Arabidopsis
  misc_feature (1)..(256): Homolog of NCBI NO: 15233840 NR Description: growth regulator protein -related [Arabidopsis
  misc_feature (1)..(279): Homolog of NCBI NO: 38345930 NR Description: OSJNBb0078D11.5 [Oryza sativa (japonica
  misc_feature (1)..(211): Homolog of NCBI NO: 322752 NR Description: auxin-independent growth promoter - common
  misc_feature (1)..(288): Homolog of NCBI NO: 30686880 NR Description: axi 1 protein -related [Arabidopsis thaliana]
  misc_feature (1)..(288): Homolog of NCBI NO: 8886957 NR Description: F2D10.3 [Arabidopsis thaliana]
  misc_feature (1)..(288): Homolog of NCBI NO: 8778600 NR Description: F5M15.13 [Arabidopsis thaliana]
  misc_feature (1)..(288): Homolog of NCBI NO: 25406439 NR Description: hypothetical protein F15M4.23 [imported] -
  misc_feature (1)..(288): Homolog of NCBI NO: 18411065 NR Description: auxin-independent growth promoter -related
  misc_feature (1)..(288): Homolog of NCBI NO: 6573718 NR Description: T23E18.20 [Arabidopsis thaliana]
MLAFSGCDYGGGEKEQKELGAIRRRWKTLHRSNPDRARRQGRCPLTPEEVGLMLRALGYGSDIHIYVASGEVYGGERTLAPLKALFPNFHSKETIATKEELEPFSSFSSRMAALDFIVCDESDVFVTNNNGNMAKILAGRRRYFGHKPTIRPNAKKLYRLFLNRSNSTWEAFASSVRTFQKGFMGEPKEVRPGRGGFHENPSSCICEDSAAAKVDKNSQSRKYGKDNTTKKNVANDELDVDNVSEWPDMDDDDDDQNDLAEKGTFNETILDYDALNFEDPELEEIISD

SEQ ID NO: 58343 - protein, 236 aa, Glycine max
  peptide (1)..(236): Ceres Seq. ID no. 14311611
  misc_feature (1)..(120): Pfam Name: Plant protein family Pfam Description: Plant protein family
  misc_feature (1)..(196): Homolog of NCBI NO: 22328730 NR Description: growth regulator like protein [Arabidopsis
  misc_feature (1)..(204): Homolog of NCBI NO: 15233840 NR Description: growth regulator protein -related [Arabidopsis
  misc_feature (1)..(227): Homolog of NCBI NO: 38345930 NR Description: OSJNBb0078D11.5 [Oryza sativa (japonica
  misc_feature (1)..(159): Homolog of NCBI NO: 322752 NR Description: auxin-independent growth promoter - common
  misc_feature (1)..(236): Homolog of NCBI NO: 8886957 NR Description: F2D10.3 [Arabidopsis thaliana]
  misc_feature (1)..(236): Homolog of NCBI NO: 30686880 NR Description: axi 1 protein -related [Arabidopsis thaliana]
  misc_feature (1)..(236): Homolog of NCBI NO: 8778600 NR Description: F5M15.13 [Arabidopsis thaliana]
  misc_feature (1)..(236): Homolog of NCBI NO: 25406439 NR Description: hypothetical protein F15M4.23 [imported] -
  misc_feature (1)..(236): Homolog of NCBI NO: 18411065 NR Description: auxin-independent growth promoter -related
  misc_feature (1)..(236): Homolog of NCBI NO: 6573718 NR Description: T23E18.20 [Arabidopsis thaliana]
MLRALGYGSDIHIYVASGEVYGGERTLAPLKALFPNFHSKETIATKEELEPFSSFSSRMAALDFIVCDESDVFVTNNNGNMAKILAGRRRYFGHKPTIRPNAKKLYRLFLNRSNSTWEAFASSVRTFQKGFMGEPKEVRPGRGGFHENPSSCICEDSAAAKVDKNSQSRKYGKDNTTKKNVANDELDVDNVSEWPDMDDDDDDQNDLAEKGTFNETILDYDALNFEDPELEEIISD

SEQ ID NO: 58344 - protein, 178 aa, Glycine max
  peptide (1)..(178): Ceres Seq. ID no. 14311612
  misc_feature (1)..(62): Pfam Name: Plant protein family Pfam Description: Plant protein family
  misc_feature (1)..(138): Homolog of NCBI NO: 22328730 NR Description: growth regulator like protein [Arabidopsis
  misc_feature (1)..(146): Homolog of NCBI NO: 15233840 NR Description: growth regulator protein -related [Arabidopsis
  misc_feature (1)..(169): Homolog of NCBI NO: 38345930 NR Description: OSJNBb0078D11.5 [Oryza sativa (japonica
  misc_feature (1)..(101): Homolog of NCBI NO: 322752 NR Description: auxin-independent growth promoter - common
  misc_feature (1)..(178): Homolog of NCBI NO: 30686880 NR Description: axi 1 protein -related [Arabidopsis thaliana]
  misc_feature (1)..(178): Homolog of NCBI NO: 8886957 NR Description: F2D10.3 [Arabidopsis thaliana]
  misc_feature (1)..(178): Homolog of NCBI NO: 8778600 NR Description: F5M15.13 [Arabidopsis thaliana]
  misc_feature (1)..(178): Homolog of NCBI NO: 25406439 NR Description: hypothetical protein F15M4.23 [imported] -
  misc_feature (1)..(178): Homolog of NCBI NO: 18411065 NR Description: auxin-independent growth promoter -related
  misc_feature (1)..(178): Homolog of NCBI NO: 6573718 NR Description: T23E18.20 [Arabidopsis thaliana]
MAALDFIVCDESDVFVTNNNGNMAKILAGRRRYFGHKPTIRPNAKKLYRLFLNRSNSTWEAFASSVRTFQKGFMGEPKEVRPGRGGFHENPSSCICEDSAAAKVDKNSQSRKYGKDNTTKKNVANDELDVDNVSEWPDMDDDDDDQNDLAEKGTFNETILDYDALNFEDPELEEIISD

SEQ ID NO: 58345 - DNA, 1403 bp, Glycine max
  misc_feature (1)..(1403): Ceres Seq. ID no. 15225368
ccccccctcgagtcagctacgtaggccccccccccattcatagaacagcacttaatcaagaaggacgttacctcggttaatttcattttctagattgcttatcagtctccaagttgagactttctgagtcagtacacttggatcactacctctggcattggcagagtattccttcaaaggggtaattcatcgtccaaaaattgttggggacaccttgtctttcgagggattgtttgctctacacaaggaattaaacgttatagaatttagtctgcagagaaatttgcaattctgatcagccacattttacctcacttacatccagcatcccaacgatcctgcaacattggtaattacctcatgagattgaggcgtgatatctttgtgtgctgtttcactagcacatcttcagacacaatgcaaaaggaaaagcacagtaagttgaagtggcgaatctttccctacaaggaacttagaaaagccacaaataattttgatcgatttcatttcattggaaagagaggtggaaagacaggccttatcactcaatatcacggttagactatgctgtagccttttatgtgactaagagcctttcatattaagtgttttgagcattgttatttaattaaaattagaatttttccttagtaattcacacaatcaagattgaaattcaaatttggcattaaatacctaagtaaatctataattttgattaacataatcactaaaaggactacatatacctcatgtttttgcattgaacagtttcttctgattatctacattgttataggaaaacttgaggatggacgtgagattacaattcagcgctttaacggagaccagcgctacttattacaacagtttatcaatgaaactattatcctaaattacttgcctcacaaaaatattgtgtcaatttacgggtgtgcttctcatcatgaggaatctctgctagtgacagaatacctatccaatggcaatcttgctgctcatcttcatagtgaaaaggacgaaaagattacactaccttggcttaaacgattggatatagcatttgatattgcaaatgcattgaaccatcttcacaattatggcatcatccaccgcaatgtgaagtccagtaatattttcctagatgcgaacttttgtgcaaaagttggtaaccttcttttgtcgcagaaacttccagatggagttccggtgcatgcgacccatgttactggtgatagggcagggtcaagtggttatatggacccagagtatttgacaaaaggccaacttagcgtaaaaaatgatgtttatagctttggggtggttttgtgtgagcttctatcatcgacgctggcaaaagactggtttctgaatgaagaggataatattgctaccgttttttg

SEQ ID NO: 58346 - protein, 66 aa, Glycine max
  peptide (1)..(66): Ceres Seq. ID no. 15225369
  misc_feature (20)..(65): Homolog of NCBI NO: 37531714 NR Description: putative wall-associated kinase 1
  misc_feature (2)..(66): Homolog of NCBI NO: 38344360 NR Description: OSJNBb0032D24.11 [Oryza sativa (japonica
  misc_feature (20)..(66): Homolog of NCBI NO: 38347183 NR Description: OSJNBa0024J22.11 [Oryza sativa (japonica
MRLRRDIFVCCFTSTSSDTMQKEKHSKLKWRIFPYKELRKATNNFDRFHFIGKRGGKTGLITQYHG

SEQ ID NO: 58347 - protein, 47 aa, Glycine max
  peptide (1)..(47): Ceres Seq. ID no. 15225370
  misc_feature (1)..(46): Homolog of NCBI NO: 37531714 NR Description: putative wall-associated kinase 1
  misc_feature (1)..(47): Homolog of NCBI NO: 38344360 NR Description: OSJNBb0032D24.11 [Oryza sativa (japonica
  misc_feature (1)..(47): Homolog of NCBI NO: 38347183 NR Description: OSJNBa0024J22.11 [Oryza sativa (japonica
MQKEKHSKLKWRIFPYKELRKATNNFDRFHFIGKRGGKTGLITQYHG

SEQ ID NO: 58348 - protein, 48 aa, Glycine max
  peptide (1)..(48): Ceres Seq. ID no. 15225371
  misc_feature (1)..(35): Homolog of NCBI NO: 15221764 NR Description: protein kinase family [Arabidopsis thaliana]
  misc_feature (1)..(47): Homolog of NCBI NO: 10177797 NR Description: contains similarity to protein
  misc_feature (1)..(35): Homolog of NCBI NO: 15222572 NR Description: protein kinase family [Arabidopsis thaliana]
  misc_feature (1)..(47): Homolog of NCBI NO: 30697422 NR Description: serine/threonine protein kinase family
  misc_feature (1)..(47): Homolog of NCBI NO: 12597754 NR Description: protein kinase, putative [Arabidopsis thaliana]
  misc_feature (1)..(35): Homolog of NCBI NO: 15529242 NR Description: At1g25390/F2J7_14 [Arabidopsis thaliana]
  misc_feature (1)..(47): Homolog of NCBI NO: 22327431 NR Description: serine/threonine protein kinase family
  misc_feature (1)..(47): Homolog of NCBI NO: 25404646 NR Description: probable wall-associated kinase T4O24.5
  misc_feature (1)..(47): Homolog of NCBI NO: 24417464 NR Description: unknown [Arabidopsis thaliana]
  misc_feature (1)..(28): Homolog of NCBI NO: 38347183 NR Description: OSJNBa0024J22.11 [Oryza sativa (japonica
MDPEYLTKGQLSVKNDVYSFGVVLCELLSSTLAKDWFLNEEDNIATVF

SEQ ID NO: 58349 - DNA, 1329 bp, Glycine max
  misc_feature (1)..(1329): Ceres Seq. ID no. 12582113
cagctacgtaggccccccccccgaaaaactattcatttcttcatcagcaacttcacggaggagagaaaggcatggctggcaatataatagcttcatcagtgcccaagagcgtccaagaaatgtccatggatggtgatgaaccaccatcaagatatgtagttaatggaaatagctttggatctaaagattcttctgtacagtttccaatacccatcattgatgtgcgtctcctctcatcagaagatgagctagagaagcttagatctgctctaagttcagctggatgcttccaggcaattggtcatggaatgtcaagttcatatcttgacaatatacgagaaactgcaaaacaattttttgcactcccagaagaggaaaagcagaagtatgctcgagctgttaatgaatctgaagggtatggaaatgacagagtagtttcagacaaacaggtccttgactggtcctatcgcctaacacttcgagtttttccagaaacaaaacgaaggctttctctttggccaaaaattcctactgattttagtgagaaattagaggagttttctacgaaagtgaaatcaatgatggaatatctcttgagatgcatggcgaggtcactgaatttggaagagggtagcttcgtggaccagtttggggaacaaccgttgatgctatcgaggttcaacttctatccactttgttctagacctgatttggttcttggcgtcaaacctcatacagatagatcaggaatcacagtcctgttgcaagacaaagaagtggaaggtcttcaagttttgatagatgacaattggatcaatgtccccacaatgcctgatgctcttgttgtcaaccttggcgatcaaatgcagatcatgagtaatggaatattcaagagcataatgcacagggttgtgaccaatacagaaaagctgaggatgtctgtagcaatgtttaatgagccagaggccgagaacgagattggacctgtagaaggtctaatagatgagtcacggccaaggttatacagaaacgttaaaaattatggtgatatcaactacaagtgttatcaagagggaaagattgcactagagactgtcaaaattgcagataactctaatcagaggtgagactgtttcatatttgaattcccaaaagacaagattcatctagaccagccggttggaaagtacattaaagtttttgtaatttaagtcaaaccaatgaactaacagaaaaaaaatatgtatggttctcttactgtgaaaccgtaactagtcatacatttcaatctcgcaaaaaaaaaaaaaaaaagaattcctgcagcccggg

SEQ ID NO: 58350 - protein, 351 aa, Glycine max
  peptide (1)..(351): Ceres Seq. ID no. 12582114
  misc_feature (202)..(297): Pfam Name: 2OG-Fe(II) oxygenase superfamily Pfam Description: 2OG-Fe(II) oxygenase superfamily
  misc_feature (10)..(344): Homolog of NCBI NO: 24413984 NR Description: ethylene-forming-enzyme-like dioxygenase-like
  misc_feature (14)..(344): Homolog of NCBI NO: 34898468 NR Description: Similar to Prunus armeniaca
  misc_feature (11)..(333): Homolog of NCBI NO: 34898470 NR Description: ESTs D47168(S12332),D46350(S10967) correspond to region of the predicted gene.~Similar to Prunus armeniaca
  misc_feature (11)..(321): Homolog of NCBI NO: 24413982 NR Description: ethylene-forming-enzyme-like dioxygenase-like
  misc_feature (12)..(344): Homolog of NCBI NO: 15239524 NR Description: ethylene-forming-enzyme-like dioxygenase; protein
  misc_feature (12)..(336): Homolog of NCBI NO: 15241383 NR Description: ethylene-forming-enzyme-like dioxygenase - like
  misc_feature (12)..(344): Homolog of NCBI NO: 15241348 NR Description: ethylene-forming-enzyme-like dioxygenase-like
  misc_feature (12)..(344): Homolog of NCBI NO: 21593366 NR Description: ethylene-forming-enzyme-like dioxygenase-like
  misc_feature (12)..(344): Homolog of NCBI NO: 15222131 NR Description: flavonol synthase, putative; protein id:
  misc_feature (13)..(344): Homolog of NCBI NO: 2688828 NR Description: ethylene-forming-enzyme-like dioxygenase [Prunus
MAGNIIASSVPKSVQEMSMDGDEPPSRYVVNGNSFGSKDSSVQFPIPIIDVRLLSSEDELEKLRSALSSAGCFQAIGHGMSSSYLDNIRETAKQFFALPEEEKQKYARAVNESEGYGNDRVVSDKQVLDWSYRLTLRVFPETKRRLSLWPKIPTDFSEKLEEFSTKVKSMMEYLLRCMARSLNLEEGSFVDQFGEQPLMLSRFNFYPLCSRPDLVLGVKPHTDRSGITVLLQDKEVEGLQVLIDDNWINVPTMPDALVVNLGDQMQIMSNGIFKSIMHRVVTNTEKLRMSVAMFNEPEAENEIGPVEGLIDESRPRLYRNVKNYGDINYKCYQEGKIALETVKIADNSNQR

SEQ ID NO: 58351 - protein, 335 aa, Glycine max
  peptide (1)..(335): Ceres Seq. ID no. 12582115
  misc_feature (186)..(281): Pfam Name: 2OG-Fe(II) oxygenase superfamily Pfam Description: 2OG-Fe(II) oxygenase superfamily
  misc_feature (1)..(328): Homolog of NCBI NO: 24413984 NR Description: ethylene-forming-enzyme-like dioxygenase-like
  misc_feature (1)..(328): Homolog of NCBI NO: 34898468 NR Description: Similar to Prunus armeniaca
  misc_feature (1)..(317): Homolog of NCBI NO: 34898470 NR Description: ESTs D47168(S12332),D46350(S10967) correspond to region of the predicted gene.~Similar to Prunus armeniaca
  misc_feature (1)..(305): Homolog of NCBI NO: 24413982 NR Description: ethylene-forming-enzyme-like dioxygenase-like
  misc_feature (1)..(328): Homolog of NCBI NO: 15239524 NR Description: ethylene-forming-enzyme-like dioxygenase; protein
  misc_feature (1)..(320): Homolog of NCBI NO: 15241383 NR Description: ethylene-forming-enzyme-like dioxygenase - like
  misc_feature (1)..(328): Homolog of NCBI NO: 15241348 NR Description: ethylene-forming-enzyme-like dioxygenase-like
  misc_feature (1)..(328): Homolog of NCBI NO: 21593366 NR Description: ethylene-forming-enzyme-like dioxygenase-like
  misc_feature (1)..(328): Homolog of NCBI NO: 15222131 NR Description: flavonol synthase, putative; protein id:
  misc_feature (1)..(328): Homolog of NCBI NO: 2688828 NR Description: ethylene-forming-enzyme-like dioxygenase [Prunus
MSMDGDEPPSRYVVNGNSFGSKDSSVQFPIPIIDVRLLSSEDELEKLRSALSSAGCFQAIGHGMSSSYLDNIRETAKQFFALPEEEKQKYARAVNESEGYGNDRVVSDKQVLDWSYRLTLRVFPETKRRLSLWPKIPTDFSEKLEEFSTKVKSMMEYLLRCMARSLNLEEGSFVDQFGEQPLMLSRFNFYPLCSRPDLVLGVKPHTDRSGITVLLQDKEVEGLQVLIDDNWINVPTMPDALVVNLGDQMQIMSNGIFKSIMHRVVTNTEKLRMSVAMFNEPEAENEIGPVEGLIDESRPRLYRNVKNYGDINYKCYQEGKIALETVKIADNSNQR

SEQ ID NO: 58352 - protein, 333 aa, Glycine max
  peptide (1)..(333): Ceres Seq. ID no. 12582116
  misc_feature (184)..(279): Pfam Name: 2OG-Fe(II) oxygenase superfamily Pfam Description: 2OG-Fe(II) oxygenase superfamily
  misc_feature (1)..(326): Homolog of NCBI NO: 24413984 NR Description: ethylene-forming-enzyme-like dioxygenase-like
  misc_feature (1)..(326): Homolog of NCBI NO: 34898468 NR Description: Similar to Prunus armeniaca
  misc_feature (1)..(315): Homolog of NCBI NO: 34898470 NR Description: ESTs D47168(S12332),D46350(S10967) correspond to region of the predicted gene.~Similar to Prunus armeniaca
  misc_feature (1)..(303): Homolog of NCBI NO: 24413982 NR Description: ethylene-forming-enzyme-like dioxygenase-like
  misc_feature (1)..(326): Homolog of NCBI NO: 15239524 NR Description: ethylene-forming-enzyme-like dioxygenase; protein
  misc_feature (1)..(318): Homolog of NCBI NO: 15241383 NR Description: ethylene-forming-enzyme-like dioxygenase - like
  misc_feature (1)..(326): Homolog of NCBI NO: 15241348 NR Description: ethylene-forming-enzyme-like dioxygenase-like
  misc_feature (1)..(326): Homolog of NCBI NO: 21593366 NR Description: ethylene-forming-enzyme-like dioxygenase-like
  misc_feature (1)..(326): Homolog of NCBI NO: 15222131 NR Description: flavonol synthase, putative; protein id:
  misc_feature (1)..(326): Homolog of NCBI NO: 2688828 NR Description: ethylene-forming-enzyme-like dioxygenase [Prunus
MDGDEPPSRYVVNGNSFGSKDSSVQFPIPIIDVRLLSSEDELEKLRSALSSAGCFQAIGHGMSSSYLDNIRETAKQFFALPEEEKQKYARAVNESEGYGNDRVVSDKQVLDWSYRLTLRVFPETKRRLSLWPKIPTDFSEKLEEFSTKVKSMMEYLLRCMARSLNLEEGSFVDQFGEQPLMLSRFNFYPLCSRPDLVLGVKPHTDRSGITVLLQDKEVEGLQVLIDDNWINVPTMPDALVVNLGDQMQIMSNGIFKSIMHRVVTNTEKLRMSVAMFNEPEAENEIGPVEGLIDESRPRLYRNVKNYGDINYKCYQEGKIALETVKIADNSNQR

SEQ ID NO: 58353 - DNA, 1398 bp, Glycine max
  misc_feature (1)..(1398): Ceres Seq. ID no. 13639476
aaacgcatagcgcgaatttacaaaactagccaggaacaggccctgtctttccgatattcaccatctctttctctctaatccaaaaaaaaatctgttgtgaacaaacacacattattgtttgttttcatcccacggaaaaatcgatcaggcaaaacaaacaaaggtgaaactgaataggtgcgtgtttgtgttgatgggctaagaggacagagaaaaagaaagaaagagtataaaatcaaatctggcaaatctcgtggggttgagggctcggtcttcgtcgaagcaagcttcccctgatttgcaggacgacgaggaggagtgcaggccttggcgtcgaaggttaataatgtctttctcctggtcctccacccttaggatcaccatcctcctcctcctcctcgccgcggtcatcgtcgcgtgcttcactctccccatcgaaaagatgatgaaggacttcttattatgggtcgatcacgatcttggcccctggggcccacttgttctggctgttgcttacattcctttgactgtcttggctgttccagcttcagtgcttactcttggtggaggttatctttttgggcttccggtgggatttgttgttgactctataggtgcaactgttggtgccggagctgcatttcttcttggtagaacaattgggagatcatttgtcgtttctaggttgaaggattatccacaattcagatcagtggcaattgcaattcgaagatctggttttaagattgtattactgcttcggcttgttccactcctaccgtttaacatgctaaattatctcttgtcggtgactcctgtttcaataggggaatacatgctggcttcctggttaggaatgatgccaataacactggcacttgtatatgttggaacaactcttaaagatctttctgatgttacacatggttggggcgagttctcaaagactcgttgggcgtttatcattcttggtcttgtgatatcggttgttctgatgatatgtgttactagagttgccaaggctgctttagataaagccttggccgaaaatgaagatattgatgggattacttcctcgccagatttacctattgttgctgaaccatcagcagatcttaaccaacctctcataattaagatagattcttctgaagacagtcatgaaaagtgaattctattttgtgtaaattctttcttcactctaccttttataaaggctatggttttaattttaagctttagcggtagctggttgcttctatttattcgcgatttgtacagtttcaacattagaaatatagtttgtgacaggagtgtttaatcctaattcctacaaccaacatgacattatggactttgtgttttatttcttttgacagcagaaaagttcatgctatg

SEQ ID NO: 58354 - protein, 274 aa, Glycine max
  peptide (1)..(274): Ceres Seq. ID no. 13639477
  misc_feature (31)..(232): Homolog of NCBI NO: 23128177 NR Description: hypothetical protein [Nostoc punctiforme]
  misc_feature (4)..(239): Homolog of NCBI NO: 17229699 NR Description: hypothetical protein [Nostoc sp. PCC 7120]
  misc_feature (6)..(236): Homolog of NCBI NO: 23128176 NR Description: hypothetical protein [Nostoc punctiforme]
  misc_feature (14)..(243): Homolog of NCBI NO: 32476849 NR Description: conserved hypothetical protein [Pirellula sp.]
  misc_feature (31)..(233): Homolog of NCBI NO: 23042280 NR Description: hypothetical protein [Trichodesmium erythraeum
  misc_feature (1)..(268): Homolog of NCBI NO: 25406732 NR Description: protein F15K9.14 [imported] - Arabidopsis
  misc_feature (1)..(268): Homolog of NCBI NO: 30678508 NR Description: expressed protein [Arabidopsis thaliana]
  misc_feature (1)..(268): Homolog of NCBI NO: 40823094 NR Description: At1g03260 [Arabidopsis thaliana]
  misc_feature (1)..(269): Homolog of NCBI NO: 30687125 NR Description: expressed protein [Arabidopsis thaliana]
  misc_feature (1)..(274): Homolog of NCBI NO: 23617115 NR Description: contains EST AU173803(R3795)~integral membrane
MSFSWSSTLRITILLLLLAAVIVACFTLPIEKMMKDFLLWVDHDLGPWGPLVLAVAYIPLTVLAVPASVLTLGGGYLFGLPVGFVVDSIGATVGAGAAFLLGRTIGRSFVVSRLKDYPQFRSVAIAIRRSGFKIVLLLRLVPLLPFNMLNYLLSVTPVSIGEYMLASWLGMMPITLALVYVGTTLKDLSDVTHGWGEFSKTRWAFIILGLVISVVLMICVTRVAKAALDKALAENEDIDGITSSPDLPIVAEPSADLNQPLIIKIDSSEDSHEK

SEQ ID NO: 58355 - protein, 242 aa, Glycine max
  peptide (1)..(242): Ceres Seq. ID no. 13639478
  misc_feature (1)..(200): Homolog of NCBI NO: 23128177 NR Description: hypothetical protein [Nostoc punctiforme]
  misc_feature (1)..(207): Homolog of NCBI NO: 17229699 NR Description: hypothetical protein [Nostoc sp. PCC 7120]
  misc_feature (1)..(204): Homolog of NCBI NO: 23128176 NR Description: hypothetical protein [Nostoc punctiforme]
  misc_feature (1)..(211): Homolog of NCBI NO: 32476849 NR Description: conserved hypothetical protein [Pirellula sp.]
  misc_feature (1)..(201): Homolog of NCBI NO: 23042280 NR Description: hypothetical protein [Trichodesmium erythraeum
  misc_feature (1)..(236): Homolog of NCBI NO: 25406732 NR Description: protein F15K9.14 [imported] - Arabidopsis
  misc_feature (1)..(236): Homolog of NCBI NO: 30678508 NR Description: expressed protein [Arabidopsis thaliana]
  misc_feature (1)..(236): Homolog of NCBI NO: 40823094 NR Description: At1g03260 [Arabidopsis thaliana]
  misc_feature (1)..(237): Homolog of NCBI NO: 30687125 NR Description: expressed protein [Arabidopsis thaliana]
  misc_feature (1)..(242): Homolog of NCBI NO: 23617115 NR Description: contains EST AU173803(R3795)~integral membrane
MMKDFLLWVDHDLGPWGPLVLAVAYIPLTVLAVPASVLTLGGGYLFGLPVGFVVDSIGATVGAGAAFLLGRTIGRSFVVSRLKDYPQFRSVAIAIRRSGFKIVLLLRLVPLLPFNMLNYLLSVTPVSIGEYMLASWLGMMPITLALVYVGTTLKDLSDVTHGWGEFSKTRWAFIILGLVISVVLMICVTRVAKAALDKALAENEDIDGITSSPDLPIVAEPSADLNQPLIIKIDSSEDSHEK

SEQ ID NO: 58356 - protein, 241 aa, Glycine max
  peptide (1)..(241): Ceres Seq. ID no. 13639479
  misc_feature (1)..(199): Homolog of NCBI NO: 23128177 NR Description: hypothetical protein [Nostoc punctiforme]
  misc_feature (1)..(206): Homolog of NCBI NO: 17229699 NR Description: hypothetical protein [Nostoc sp. PCC 7120]
  misc_feature (1)..(203): Homolog of NCBI NO: 23128176 NR Description: hypothetical protein [Nostoc punctiforme]
  misc_feature (1)..(210): Homolog of NCBI NO: 32476849 NR Description: conserved hypothetical protein [Pirellula sp.]
  misc_feature (1)..(200): Homolog of NCBI NO: 23042280 NR Description: hypothetical protein [Trichodesmium erythraeum
  misc_feature (1)..(235): Homolog of NCBI NO: 25406732 NR Description: protein F15K9.14 [imported] - Arabidopsis
  misc_feature (1)..(235): Homolog of NCBI NO: 30678508 NR Description: expressed protein [Arabidopsis thaliana]
  misc_feature (1)..(235): Homolog of NCBI NO: 40823094 NR Description: At1g03260 [Arabidopsis thaliana]
  misc_feature (1)..(236): Homolog of NCBI NO: 30687125 NR Description: expressed protein [Arabidopsis thaliana]
  misc_feature (1)..(241): Homolog of NCBI NO: 23617115 NR Description: contains EST AU173803(R3795)~integral membrane
MKDFLLWVDHDLGPWGPLVLAVAYIPLTVLAVPASVLTLGGGYLFGLPVGFVVDSIGATVGAGAAFLLGRTIGRSFVVSRLKDYPQFRSVAIAIRRSGFKIVLLLRLVPLLPFNMLNYLLSVTPVSIGEYMLASWLGMMPITLALVYVGTTLKDLSDVTHGWGEFSKTRWAFIILGLVISVVLMICVTRVAKAALDKALAENEDIDGITSSPDLPIVAEPSADLNQPLIIKIDSSEDSHEK

SEQ ID NO: 58357 - DNA, 1217 bp, Glycine max
  misc_feature (1)..(1217): Ceres Seq. ID no. 15227285
cccgggccccccctcgagtcagctgcaggcccccccccccccaacagcactgagtaacggcaaagtccttgctggttgcttccattcgcgatggcgttgcaggagaggctagacaagttcaagaaacagcaagagaagtgccaaacgacactttcgaccattgcagctaccaaggccgccgcggcaacccaaaagtccgccacacatgcctcggcaaatggaagaaacgctgcccctgcggttaagttttccaacgacaccgagaggcttcagcatattaatagcattcgcaaggcccctgtgggtgctcagatgaagcgtgttattgatcttcttctagagacacgacaagcttttacaccggagcagataaatgaggcatgctatgtcgacatgaaggctaacaaagatgtctttgagaatctgaggaaaaacccaaaagtgaactatgatgggcaacgattatcttacaagtcaaagtatggtattaaggacaaaacagagcttcttcaactggtacgaaagtatcccgagggccttgctgttattgatctcaaggatgcttaccccactgtgatggaagatttgcaggctatgaaagctgcagggcagatttggcttctgtccaacttcgattcacaggaagacattgcctaccctaacgaccccaaagtacacattaaggtggatgatgacctaaaacatcttttccgcagtattgaattgcctcgtgatatgattgatatagagaaggatcttcaaaagaatggaatgaagcccgctaccaacactgcacagaggaggagtgcagctcaaattcaaggcatttcttccaagccaaagcctaagaagaagaagagtgaaatcagcaagagaacgaagcttaccaatgctcatcttccagagctctttcagaatttaaacagttcctgattaactctcatcaagtggttgtgtagttcaaatagatactttatcagccagtctaaactagattagcattgtgaaatattcaggaggttcttgctgctgtgccctacttttatttgtttttttattttatttttttttatttctgtacatcgaggctgcagctaatggactattgtactcgtcctaatttgtgaatccttgtatattatcatcatgttgcatttaaatttttagtcttgcaagtttataaaaaaaaaaaaaaaaaagaattcctgcwgcccttt

SEQ ID NO: 58358 - protein, 280 aa, Glycine max
  peptide (1)..(280): Ceres Seq. ID no. 15227286
  misc_feature (3)..(270): Homolog of NCBI NO: 267060 NR Description: Transcription initiation factor IIE, beta subunit
  misc_feature (56)..(273): Homolog of NCBI NO: 19074285 NR Description: TRANSCRIPTION INITIATION FACTOR TFIIE BETA
  misc_feature (3)..(270): Homolog of NCBI NO: 228298 NR Description: transcription factor IIE:SUBUNIT=small 34kD
  misc_feature (1)..(274): Homolog of NCBI NO: 39545898 NR Description: TFIIE-beta 1 [Arabidopsis thaliana]
  misc_feature (1)..(276): Homolog of NCBI NO: 15233477 NR Description: expressed protein [Arabidopsis thaliana]
  misc_feature (1)..(280): Homolog of NCBI NO: 15235379 NR Description: expressed protein [Arabidopsis thaliana]
  misc_feature (1)..(279): Homolog of NCBI NO: 37534050 NR Description: putative Transcription initiation factor IIE,
MALQERLDKFKKQQEKCQTTLSTIAATKAAAATQKSATHASANGRNAAPAVKFSNDTERLQHINSIRKAPVGAQMKRVIDLLLETRQAFTPEQINEACYVDMKANKDVFENLRKNPKVNYDGQRLSYKSKYGIKDKTELLQLVRKYPEGLAVIDLKDAYPTVMEDLQAMKAAGQIWLLSNFDSQEDIAYPNDPKVHIKVDDDLKHLFRSIELPRDMIDIEKDLQKNGMKPATNTAQRRSAAQIQGISSKPKPKKKKSEISKRTKLTNAHLPELFQNLNSS

SEQ ID NO: 58359 - protein, 206 aa, Glycine max
  peptide (1)..(206): Ceres Seq. ID no. 15227287
  misc_feature (1)..(196): Homolog of NCBI NO: 267060 NR Description: Transcription initiation factor IIE, beta subunit
  misc_feature (1)..(199): Homolog of NCBI NO: 19074285 NR Description: TRANSCRIPTION INITIATION FACTOR TFIIE BETA
  misc_feature (1)..(196): Homolog of NCBI NO: 228298 NR Description: transcription factor IIE:SUBUNIT=small 34kD
  misc_feature (1)..(200): Homolog of NCBI NO: 39545898 NR Description: TFIIE-beta 1 [Arabidopsis thaliana]
  misc_feature (1)..(202): Homolog of NCBI NO: 15233477 NR Description: expressed protein [Arabidopsis thaliana]
  misc_feature (1)..(206): Homolog of NCBI NO: 15235379 NR Description: expressed protein [Arabidopsis thaliana]
  misc_feature (1)..(205): Homolog of NCBI NO: 37534050 NR Description: putative Transcription initiation factor IIE,
MKRVIDLLLETRQAFTPEQINEACYVDMKANKDVFENLRKNPKVNYDGQRLSYKSKYGIKDKTELLQLVRKYPEGLAVIDLKDAYPTVMEDLQAMKAAGQIWLLSNFDSQEDIAYPNDPKVHIKVDDDLKHLFRSIELPRDMIDIEKDLQKNGMKPATNTAQRRSAAQIQGISSKPKPKKKKSEISKRTKLTNAHLPELFQNLNSS

SEQ ID NO: 58360 - protein, 179 aa, Glycine max
  peptide (1)..(179): Ceres Seq. ID no. 15227288
  misc_feature (1)..(169): Homolog of NCBI NO: 267060 NR Description: Transcription initiation factor IIE, beta subunit
  misc_feature (1)..(172): Homolog of NCBI NO: 19074285 NR Description: TRANSCRIPTION INITIATION FACTOR TFIIE BETA
  misc_feature (1)..(169): Homolog of NCBI NO: 228298 NR Description: transcription factor IIE:SUBUNIT=small 34kD
  misc_feature (1)..(173): Homolog of NCBI NO: 39545898 NR Description: TFIIE-beta 1 [Arabidopsis thaliana]
  misc_feature (1)..(175): Homolog of NCBI NO: 15233477 NR Description: expressed protein [Arabidopsis thaliana]
  misc_feature (1)..(179): Homolog of NCBI NO: 15235379 NR Description: expressed protein [Arabidopsis thaliana]
  misc_feature (1)..(178): Homolog of NCBI NO: 37534050 NR Description: putative Transcription initiation factor IIE,
MKANKDVFENLRKNPKVNYDGQRLSYKSKYGIKDKTELLQLVRKYPEGLAVIDLKDAYPTVMEDLQAMKAAGQIWLLSNFDSQEDIAYPNDPKVHIKVDDDLKHLFRSIELPRDMIDIEKDLQKNGMKPATNTAQRRSAAQIQGISSKPKPKKKKSEISKRTKLTNAHLPELFQNLNSS

SEQ ID NO: 58361 - DNA, 1195 bp, Glycine max
  misc_feature (1)..(1195): Ceres Seq. ID no. 13581579
cagctacgtaggccccccccccggaagttccacttaagacatcactcacttccccctctctgctttttgcagtcctcctttacctgcaaaaacagcaaatggctctgcttaacctcatacttgtctggttatttttcttgagtctgtgtctttattcgtgtcctacttcggcccagttaagtagacaccactatgcaaaaacttgccccaatgtagaaaacattgtcagagaagcagtcaaaaagaagtttcatcaaacatttgttacggtccctgccaccattcgtctcttcttccatgattgcttcgtgcagggctgtgatgcctcggttttggttgcatccacaaaaaacaacaaagcagagaaggatcaccctgataatctttcactagctggagatgggtttgatacagtgattaaagcaaaagaagcagtggatgcagttccattgtgcaggaacaaagtttcatgtgctgatattttagctatggcaacccgtgatgttattgcactggctggtgggcctttctacgaggttgaattgggaagatttgatgggctaagatctaaatcttcagatgtaaataggaggctgcctcaggcagagttcaacttgaaccagctgaattcactgtttgcggccaacggcctcacccaaactgaaatgatagctctgtcaggtgctcacactgttggattctcccattgcaacaaattcacgaacagagtatacaatttcaagagcaaaagtcgagtggaccctacactgaacgagaaatacgcaacacagctaaggtcaatgtgcccaaggaatgtggatccaaggattgcaatcgatatggacccaaccactccacggtcattcgacaatgtttatttcaagaatcttcagcaagggaagggcctcttctcttcagaccaagttctcttcacggactcaagatccaaggccacagtaaatgcctttgctagtagcagcaatatctttcatgccaacttcgctgctgccatgaccaaattgggccgagttggagtcaagaatgcacagaatggaaacattcgcaccgattgttctgtcatttaatttacgataaaaacaactcatgttaaggagggacattattatctagtcaggggaattcgttatgtatattatttaccctgtgtttaaaataataagtactgaaagtattt

SEQ ID NO: 58362 - protein, 328 aa, Glycine max
  peptide (1)..(328): Ceres Seq. ID no. 13581580
  misc_feature (43)..(293): Pfam Name: Peroxidase Pfam Description: Peroxidase
  misc_feature (1)..(325): Homolog of NCBI NO: 21554605 NR Description: peroxidase, prxr2 [Arabidopsis thaliana]
  misc_feature (1)..(325): Homolog of NCBI NO: 15235597 NR Description: peroxidase, putative [Arabidopsis thaliana]
  misc_feature (1)..(325): Homolog of NCBI NO: 17979440 NR Description: putative peroxidase [Arabidopsis thaliana]
  misc_feature (1)..(325): Homolog of NCBI NO: 15235600 NR Description: peroxidase, putative [Arabidopsis thaliana]
  misc_feature (5)..(327): Homolog of NCBI NO: 7433082 NR Description: probable peroxidase (EC 1.11.1.7) (clone PC55) -
  misc_feature (1)..(325): Homolog of NCBI NO: 14485511 NR Description: putative peroxidase [Solanum tuberosum]
  misc_feature (1)..(328): Homolog of NCBI NO: 13992528 NR Description: peroxidase2 [Medicago sativa]
  misc_feature (1)..(328): Homolog of NCBI NO: 2117624 NR Description: peroxidase (EC 1.11.1.7) 2 precursor - alfalfa
  misc_feature (5)..(328): Homolog of NCBI NO: 4138647 NR Description: peroxidase [Trifolium repens]
  misc_feature (4)..(328): Homolog of NCBI NO: 7433086 NR Description: peroxidase (EC 1.11.1.7) pxdD precursor - alfalfa
MALLNLILVWLFFLSLCLYSCPTSAQLSRHHYAKTCPNVENIVREAVKKKFHQTFVTVPATIRLFFHDCFVQGCDASVLVASTKNNKAEKDHPDNLSLAGDGFDTVIKAKEAVDAVPLCRNKVSCADILAMATRDVIALAGGPFYEVELGRFDGLRSKSSDVNRRLPQAEFNLNQLNSLFAANGLTQTEMIALSGAHTVGFSHCNKFTNRVYNFKSKSRVDPTLNEKYATQLRSMCPRNVDPRIAIDMDPTTPRSFDNVYFKNLQQGKGLFSSDQVLFTDSRSKATVNAFASSSNIFHANFAAAMTKLGRVGVKNAQNGNIRTDCSVI

SEQ ID NO: 58363 - protein, 198 aa, Glycine max
  peptide (1)..(198): Ceres Seq. ID no. 13581581
  misc_feature (1)..(163): Pfam Name: Peroxidase Pfam Description: Peroxidase
  misc_feature (1)..(195): Homolog of NCBI NO: 21554605 NR Description: peroxidase, prxr2 [Arabidopsis thaliana]
  misc_feature (1)..(195): Homolog of NCBI NO: 15235597 NR Description: peroxidase, putative [Arabidopsis thaliana]
  misc_feature (1)..(195): Homolog of NCBI NO: 17979440 NR Description: putative peroxidase [Arabidopsis thaliana]
  misc_feature (1)..(195): Homolog of NCBI NO: 15235600 NR Description: peroxidase, putative [Arabidopsis thaliana]
  misc_feature (1)..(197): Homolog of NCBI NO: 7433082 NR Description: probable peroxidase (EC 1.11.1.7) (clone PC55) -
  misc_feature (1)..(195): Homolog of NCBI NO: 14485511 NR Description: putative peroxidase [Solanum tuberosum]
  misc_feature (1)..(198): Homolog of NCBI NO: 13992528 NR Description: peroxidase2 [Medicago sativa]
  misc_feature (1)..(198): Homolog of NCBI NO: 2117624 NR Description: peroxidase (EC 1.11.1.7) 2 precursor - alfalfa
  misc_feature (1)..(198): Homolog of NCBI NO: 4138647 NR Description: peroxidase [Trifolium repens]
  misc_feature (1)..(198): Homolog of NCBI NO: 7433086 NR Description: peroxidase (EC 1.11.1.7) pxdD precursor - alfalfa
MATRDVIALAGGPFYEVELGRFDGLRSKSSDVNRRLPQAEFNLNQLNSLFAANGLTQTEMIALSGAHTVGFSHCNKFTNRVYNFKSKSRVDPTLNEKYATQLRSMCPRNVDPRIAIDMDPTTPRSFDNVYFKNLQQGKGLFSSDQVLFTDSRSKATVNAFASSSNIFHANFAAAMTKLGRVGVKNAQNGNIRTDCSVI

SEQ ID NO: 58364 - DNA, 1432 bp, Glycine max
  misc_feature (1)..(1432): Ceres Seq. ID no. 14312851
attactgatatttctctgttaatattctgctccaattacccttctaaatctttgcgctcacttgtcagtatctttcctttgttctgcactgcttttcttgtgcatagtagtaagtgataatgctttgaattcgatgatctttctttcttcaggacgatggccgctacttttaaacaccatcctacgggacttcacggttggggcgctccgagatcttctagaaatctcccaagcttcttctcaatgcgtttcccctgcagcactcgccaccatcacattcgtgcttccgtttctcaccactcatcaaccgaggctgagagtgctttgatattgattcgtcatggggagtctttgtggaatgagaagaacttgttcacgggatgttgcgatgtacctttgaccaatagaggtgtagaggaagctattgaagctggtcagaggattagctatatacccattgatatgatctttacgtccgcactcattcgtgcacagatgaccgctatgcttgcaatgactcagcactcccagaagaaggttcctattatcatccatgatgagagtgaacaggcaacaacttggactcaagtttacagtgaaaaaaccaccaagcaatctattccagttattacagcatggcagttgaatgaaagaatgtatggggagttacagggtcttaataagcaggagactgcagaaagatacggaaaggagaaggtgcatgaatggcgtcggagttttgacattcctcctcccaagggtgagagcctggaaatgtgttttcagagagctgttccgtattttaaagattttattgaaccccaactaaaatcaggaaagcacgtgatggttgctgctcatggaaactcattgaggtctattataatgtatctggacggattaacttctcaagaggtcactagtttagagatatcaactgggataccattgctttacatatacaaagaggggaagtttaacagtagaggaagtcctgtggggcctacagaagctggtgtttatgcatacactcagagtttagctgtttacagacaacagttggatgacatgtctagttgttattgatcctgcatttcaaagatcaaaatggtataaatatcgatattcatttttggtgggtgactctctgaatgttcatatgctaaacatcaatttgaaaattactggaaggaattgaccaatccatgacacttttaaatctgcaacctgcatagcgagacgtagaagccctgaaaaatttctgtactgtagcaaccaaagtagcaccaaaacaattttggttaaagagagtgaaaaacgggattagtaaatgacaatgtaagtttagaacttgtttgtgcctgaatggaagtgaacttataggtatagcttccatgtttagaacttacagggaattgaatttacggtaaat

SEQ ID NO: 58365 - protein, 309 aa, Glycine max
  peptide (1)..(309): Ceres Seq. ID no. 14312852
  misc_feature (55)..(277): Pfam Name: Phosphoglycerate mutase family Pfam Description: Phosphoglycerate mutase family
  misc_feature (57)..(273): Homolog of NCBI NO: 15836396 NR Description: phosphoglycerate mutase [Chlamydophila pneumoniae
  misc_feature (57)..(282): Homolog of NCBI NO: 15605455 NR Description: Phosphoglycerate Mutase [Chlamydia trachomatis]
  misc_feature (57)..(273): Homolog of NCBI NO: 15618772 NR Description: Phosphoglycerate Mutase [Chlamydophila pneumoniae
  misc_feature (57)..(282): Homolog of NCBI NO: 15834720 NR Description: phosphoglycerate mutase [Chlamydia muridarum]
  misc_feature (57)..(282): Homolog of NCBI NO: 29840659 NR Description: phosphoglycerate mutase [Chlamydophila caviae
  misc_feature (114)..(303): Homolog of NCBI NO: 15218201 NR Description: phosphoglycerate mutase -related [Arabidopsis
  misc_feature (47)..(303): Homolog of NCBI NO: 25405021 NR Description: protein F28K19.26 [imported] - Arabidopsis
  misc_feature (54)..(306): Homolog of NCBI NO: 21539557 NR Description: unknown protein [Arabidopsis thaliana]
  misc_feature (54)..(306): Homolog of NCBI NO: 21618275 NR Description: unknown [Arabidopsis thaliana]
  misc_feature (54)..(306): Homolog of NCBI NO: 18395083 NR Description: expressed protein [Arabidopsis thaliana]
MAATFKHHPTGLHGWGAPRSSRNLPSFFSMRFPCSTRHHHIRASVSHHSSTEAESALILIRHGESLWNEKNLFTGCCDVPLTNRGVEEAIEAGQRISYIPIDMIFTSALIRAQMTAMLAMTQHSQKKVPIIIHDESEQATTWTQVYSEKTTKQSIPVITAWQLNERMYGELQGLNKQETAERYGKEKVHEWRRSFDIPPPKGESLEMCFQRAVPYFKDFIEPQLKSGKHVMVAAHGNSLRSIIMYLDGLTSQEVTSLEISTGIPLLYIYKEGKFNSRGSPVGPTEAGVYAYTQSLAVYRQQLDDMSSCY

SEQ ID NO: 58366 - protein, 280 aa, Glycine max
  peptide (1)..(280): Ceres Seq. ID no. 14312853
  misc_feature (26)..(248): Pfam Name: Phosphoglycerate mutase family Pfam Description: Phosphoglycerate mutase family
  misc_feature (28)..(244): Homolog of NCBI NO: 15836396 NR Description: phosphoglycerate mutase [Chlamydophila pneumoniae
  misc_feature (28)..(253): Homolog of NCBI NO: 15605455 NR Description: Phosphoglycerate Mutase [Chlamydia trachomatis]
  misc_feature (28)..(244): Homolog of NCBI NO: 15618772 NR Description: Phosphoglycerate Mutase [Chlamydophila pneumoniae
  misc_feature (28)..(253): Homolog of NCBI NO: 15834720 NR Description: phosphoglycerate mutase [Chlamydia muridarum]
  misc_feature (28)..(253): Homolog of NCBI NO: 29840659 NR Description: phosphoglycerate mutase [Chlamydophila caviae
  misc_feature (85)..(274): Homolog of NCBI NO: 15218201 NR Description: phosphoglycerate mutase -related [Arabidopsis
  misc_feature (18)..(274): Homolog of NCBI NO: 25405021 NR Description: protein F28K19.26 [imported] - Arabidopsis
  misc_feature (25)..(277): Homolog of NCBI NO: 21539557 NR Description: unknown protein [Arabidopsis thaliana]
  misc_feature (25)..(277): Homolog of NCBI NO: 21618275 NR Description: unknown [Arabidopsis thaliana]
  misc_feature (25)..(277): Homolog of NCBI NO: 18395083 NR Description: expressed protein [Arabidopsis thaliana]
MRFPCSTRHHHIRASVSHHSSTEAESALILIRHGESLWNEKNLFTGCCDVPLTNRGVEEAIEAGQRISYIPIDMIFTSALIRAQMTAMLAMTQHSQKKVPIIIHDESEQATTWTQVYSEKTTKQSIPVITAWQLNERMYGELQGLNKQETAERYGKEKVHEWRRSFDIPPPKGESLEMCFQRAVPYFKDFIEPQLKSGKHVMVAAHGNSLRSIIMYLDGLTSQEVTSLEISTGIPLLYIYKEGKFNSRGSPVGPTEAGVYAYTQSLAVYRQQLDDMSSCY

SEQ ID NO: 58367 - protein, 207 aa, Glycine max
  peptide (1)..(207): Ceres Seq. ID no. 14312854
  misc_feature (1)..(175): Pfam Name: Phosphoglycerate mutase family Pfam Description: Phosphoglycerate mutase family
  misc_feature (1)..(171): Homolog of NCBI NO: 15836396 NR Description: phosphoglycerate mutase [Chlamydophila pneumoniae
  misc_feature (1)..(180): Homolog of NCBI NO: 15605455 NR Description: Phosphoglycerate Mutase [Chlamydia trachomatis]
  misc_feature (1)..(171): Homolog of NCBI NO: 15618772 NR Description: Phosphoglycerate Mutase [Chlamydophila pneumoniae
  misc_feature (1)..(180): Homolog of NCBI NO: 15834720 NR Description: phosphoglycerate mutase [Chlamydia muridarum]
  misc_feature (1)..(180): Homolog of NCBI NO: 29840659 NR Description: phosphoglycerate mutase [Chlamydophila caviae
  misc_feature (12)..(201): Homolog of NCBI NO: 15218201 NR Description: phosphoglycerate mutase -related [Arabidopsis
  misc_feature (1)..(201): Homolog of NCBI NO: 25405021 NR Description: protein F28K19.26 [imported] - Arabidopsis
  misc_feature (1)..(204): Homolog of NCBI NO: 21539557 NR Description: unknown protein [Arabidopsis thaliana]
  misc_feature (1)..(204): Homolog of NCBI NO: 21618275 NR Description: unknown [Arabidopsis thaliana]
  misc_feature (1)..(204): Homolog of NCBI NO: 18395083 NR Description: expressed protein [Arabidopsis thaliana]
MIFTSALIRAQMTAMLAMTQHSQKKVPIIIHDESEQATTWTQVYSEKTTKQSIPVITAWQLNERMYGELQGLNKQETAERYGKEKVHEWRRSFDIPPPKGESLEMCFQRAVPYFKDFIEPQLKSGKHVMVAAHGNSLRSIIMYLDGLTSQEVTSLEISTGIPLLYIYKEGKFNSRGSPVGPTEAGVYAYTQSLAVYRQQLDDMSSCY

SEQ ID NO: 58368 - DNA, 1099 bp, Glycine max
  misc_feature (1)..(1099): Ceres Seq. ID no. 15176777
acaaagaaggctgtccaatgttagaagacaatctcagcaggttacggatatggtggtggaaatgcaatctaaaattggcagtaatcgagtgacgcgcatggagttacaagtagaacttgagaaagaaaggtttgccaagaaaagagtggaagagaatctggaggttgctaggagaaagtttacatgccttaaagaacagaatgagggctttttagtaactgaaaagcttcaacaggaacttgaagagtacagggaaattatcaagtgcagtatctgccaagacagggcaaaagaggtggtaattacaaaatgctaccacttgttctgctactcatgtatccagaaagttgctgggagtaggcatcgcaagtgtccacaatgtggtacaagctttggggctaacgatgttaagtctgtttatttgtaactagaaacttggttctctcccggatgtcgagaagaggctggtgttcttttgaaaaagatttggtgtatggatacctacataggaggttcaattgtatgcttagtgccaactgtcgagataaggaacattggcagcgatcaatgagttgcttgtctacatttggaccaaaaatgattattttttgctggtacttaatcttagtaccacctgctcgcatttttgaatctggaatgatgtttagttagcatttttaatagatagaacgaattcggagtcataggaaacgtgatatttgttctttgcagatttatcataatgcatcttccaatgcgatttggagaggggtcatgaaggttggtctttgaccctgcaattaataattcaaattcgaaagcctgaattggccatcatggcaaattttcttggaagttgactccaaaggtggcaaccacgatgcctcacatctgtatttctgtttctcctgctgaaatgacacaagtacaaattttggtttcaggggatttgtatatatgctagagtttataaggggtcgttcaattttgtttataacagcctgtaatttgtgtaatcgtagatgatatgactagatatcattgtaattgatgttgtgaaaagttaagaaagctcaagtttatcatttttttctatttc

SEQ ID NO: 58369 - protein, 141 aa, Glycine max
  peptide (1)..(141): Ceres Seq. ID no. 15176778
  misc_feature (89)..(127): Pfam Name: Zinc finger, C3HC4 type (RING finger) Pfam Description: Zinc finger, C3HC4 type (RING finger)
  misc_feature (39)..(141): Homolog of NCBI NO: 31199093 NR Description: ENSANGP00000009515 [Anopheles gambiae]
  misc_feature (22)..(141): Homolog of NCBI NO: 7023699 NR Description: unnamed protein product [Homo sapiens]
  misc_feature (11)..(141): Homolog of NCBI NO: 33284892 NR Description: SI:bZ1C10.1.2 (novel ring finger protein) [Danio
  misc_feature (34)..(139): Homolog of NCBI NO: 25405809 NR Description: unknown protein, 71207-66119 [imported] -
  misc_feature (34)..(139): Homolog of NCBI NO: 18405292 NR Description: zinc finger (C3HC4-type RING finger) protein
  misc_feature (34)..(139): Homolog of NCBI NO: 21553880 NR Description: unknown [Arabidopsis thaliana]
  misc_feature (20)..(139): Homolog of NCBI NO: 37536934 NR Description: unknown protein [Oryza sativa (japonica
  misc_feature (1)..(141): Homolog of NCBI NO: 30689877 NR Description: zinc finger (C3HC4-type RING finger) protein
  misc_feature (1)..(141): Homolog of NCBI NO: 7486945 NR Description: hypothetical protein At2g44950 [imported] -
  misc_feature (1)..(141): Homolog of NCBI NO: 38605849 NR Description: OSJNBb0034G17.7 [Oryza sativa (japonica
QRRLSNVRRQSQQVTDMVVEMQSKIGSNRVTRMELQVELEKERFAKKRVEENLEVARRKFTCLKEQNEGFLVTEKLQQELEEYREIIKCSICQDRAKEVVITKCYHLFCYSCIQKVAGSRHRKCPQCGTSFGANDVKSVYL

SEQ ID NO: 58370 - protein, 125 aa, Glycine max
  peptide (1)..(125): Ceres Seq. ID no. 15176779
  misc_feature (73)..(111): Pfam Name: Zinc finger, C3HC4 type (RING finger) Pfam Description: Zinc finger, C3HC4 type (RING finger)
  misc_feature (23)..(125): Homolog of NCBI NO: 31199093 NR Description: ENSANGP00000009515 [Anopheles gambiae]
  misc_feature (6)..(125): Homolog of NCBI NO: 7023699 NR Description: unnamed protein product [Homo sapiens]
  misc_feature (1)..(125): Homolog of NCBI NO: 33284892 NR Description: SI:bZ1C10.1.2 (novel ring finger protein) [Danio
  misc_feature (18)..(123): Homolog of NCBI NO: 25405809 NR Description: unknown protein, 71207-66119 [imported] -
  misc_feature (18)..(123): Homolog of NCBI NO: 18405292 NR Description: zinc finger (C3HC4-type RING finger) protein
  misc_feature (18)..(123): Homolog of NCBI NO: 21553880 NR Description: unknown [Arabidopsis thaliana]
  misc_feature (4)..(123): Homolog of NCBI NO: 37536934 NR Description: unknown protein [Oryza sativa (japonica
  misc_feature (1)..(125): Homolog of NCBI NO: 30689877 NR Description: zinc finger (C3HC4-type RING finger) protein
  misc_feature (1)..(125): Homolog of NCBI NO: 7486945 NR Description: hypothetical protein At2g44950 [imported] -
  misc_feature (1)..(125): Homolog of NCBI NO: 38605849 NR Description: OSJNBb0034G17.7 [Oryza sativa (japonica
MVVEMQSKIGSNRVTRMELQVELEKERFAKKRVEENLEVARRKFTCLKEQNEGFLVTEKLQQELEEYREIIKCSICQDRAKEVVITKCYHLFCYSCIQKVAGSRHRKCPQCGTSFGANDVKSVYL

SEQ ID NO: 58371 - protein, 121 aa, Glycine max
  peptide (1)..(121): Ceres Seq. ID no. 15176780
  misc_feature (69)..(107): Pfam Name: Zinc finger, C3HC4 type (RING finger) Pfam Description: Zinc finger, C3HC4 type (RING finger)
  misc_feature (19)..(121): Homolog of NCBI NO: 31199093 NR Description: ENSANGP00000009515 [Anopheles gambiae]
  misc_feature (2)..(121): Homolog of NCBI NO: 7023699 NR Description: unnamed protein product [Homo sapiens]
  misc_feature (1)..(121): Homolog of NCBI NO: 33284892 NR Description: SI:bZ1C10.1.2 (novel ring finger protein) [Danio
  misc_feature (14)..(119): Homolog of NCBI NO: 25405809 NR Description: unknown protein, 71207-66119 [imported] -
  misc_feature (14)..(119): Homolog of NCBI NO: 18405292 NR Description: zinc finger (C3HC4-type RING finger) protein
  misc_feature (14)..(119): Homolog of NCBI NO: 21553880 NR Description: unknown [Arabidopsis thaliana]
  misc_feature (1)..(119): Homolog of NCBI NO: 37536934 NR Description: unknown protein [Oryza sativa (japonica
  misc_feature (1)..(121): Homolog of NCBI NO: 30689877 NR Description: zinc finger (C3HC4-type RING finger) protein
  misc_feature (1)..(121): Homolog of NCBI NO: 7486945 NR Description: hypothetical protein At2g44950 [imported] -
  misc_feature (1)..(121): Homolog of NCBI NO: 38605849 NR Description: OSJNBb0034G17.7 [Oryza sativa (japonica
MQSKIGSNRVTRMELQVELEKERFAKKRVEENLEVARRKFTCLKEQNEGFLVTEKLQQELEEYREIIKCSICQDRAKEVVITKCYHLFCYSCIQKVAGSRHRKCPQCGTSFGANDVKSVYL

SEQ ID NO: 58372 - DNA, 1267 bp, Glycine max
  misc_feature (1)..(1267): Ceres Seq. ID no. 15169045
gatttaaacaaactcctcccacttgcttcaacttcatcttatcaaagcctttcctgtttgcttttttcacaattcacttccttcatagagagtaatagagaaagaaaaaagagagagaaaaacagcacaaggatggagctttctcaacttggttttctggatgagctacttgctccaagaaaagacactagttggagtagtgctttgtccactgggttgaatgagttactactccctagtggttggagctttgactcttttgatgagaaccaaggtttatccactttgaatccctcatttgctgcattttcaactccactagaccacagatttgaatgcccttatggaagtgaagcagcatacccttttgttgatggcttcacattgcctgagcttgattcttcatacaccaggaatgatgagtcagcaccccttttgccacaagaggataacccatcattggaggatgaagagtttggctttctaggaagtgaaagccagagcttggaacaagcaaaaattggctgcaaaattgaggaactgacagagattccagtctttaacatgggcttgggtggggagaaaaggcccaaatcaaagaaactagaagggcagccatcaaagaatctcatggcagaaagaaggagaagaaagcgtttgaatgacaggctttccatgctaaggtcaatagtccctaagattagcaagatggacaggacctccattcttggagacaccattgattacatgaaagagcttctagaaaggataggcaagttgcaagaagaagaaatggaggagggaacaaatcggataaacctcttgggcatttctaaggagctaaagccaaatgaagtaatggtaagaaattcccccaagtttgatgttgagagaagagaccaggacacaaggattagcatctgctgtgccacaaagccaggattactactgtccacagtgaacaccttagaagcattaggccttgagattcaccagtgtgttataagcagcttcaatgatttttcaatgcaagcatcttgcacagaggtagcagagcagagaaattgtatgagccaggaagagataaagcaagcactattcagaaatgcaggttatggtggtagatgtctctaggagaaagatggaaagcagaaataacaatttgctgatgttgaaaaacaagcaaagttttcctcttgtgtaattcaaggaattaggagtgttacaaagtttaatgagatttcccaataagatgatggctttgatt

SEQ ID NO: 58373 - protein, 377 aa, Glycine max
  peptide (1)..(377): Ceres Seq. ID no. 15169046
  misc_feature (205)..(254): Pfam Name: Helix-loop-helix DNA-binding domain Pfam Description: Helix-loop-helix DNA-binding domain
  misc_feature (277)..(374): Homolog of NCBI NO: 22331357 NR Description: bHLH protein family [Arabidopsis thaliana]
  misc_feature (47)..(263): Homolog of NCBI NO: 22331357 NR Description: bHLH protein family [Arabidopsis thaliana]
  misc_feature (198)..(374): Homolog of NCBI NO: 15222101 NR Description: bHLH protein [Arabidopsis thaliana]
  misc_feature (198)..(374): Homolog of NCBI NO: 25513489 NR Description: F13K23.12 protein - Arabidopsis thaliana
  misc_feature (98)..(355): Homolog of NCBI NO: 37536566 NR Description: hypothetical protein [Oryza sativa (japonica
  misc_feature (108)..(375): Homolog of NCBI NO: 22758263 NR Description: Putative bHLH transcription protein
  misc_feature (195)..(377): Homolog of NCBI NO: 20127062 NR Description: putative bHLH transcription factor [Arabidopsis
  misc_feature (195)..(377): Homolog of NCBI NO: 15238199 NR Description: bHLH protein [Arabidopsis thaliana]
  misc_feature (74)..(377): Homolog of NCBI NO: 21537346 NR Description: unknown [Arabidopsis thaliana]
  misc_feature (74)..(377): Homolog of NCBI NO: 18424973 NR Description: bHLH protein [Arabidopsis thaliana]
DLNKLLPLASTSSYQSLSCLLFSQFTSFIESNRERKKREKNSTRMELSQLGFLDELLAPRKDTSWSSALSTGLNELLLPSGWSFDSFDENQGLSTLNPSFAAFSTPLDHRFECPYGSEAAYPFVDGFTLPELDSSYTRNDESAPLLPQEDNPSLEDEEFGFLGSESQSLEQAKIGCKIEELTEIPVFNMGLGGEKRPKSKKLEGQPSKNLMAERRRRKRLNDRLSMLRSIVPKISKMDRTSILGDTIDYMKELLERIGKLQEEEMEEGTNRINLLGISKELKPNEVMVRNSPKFDVERRDQDTRISICCATKPGLLLSTVNTLEALGLEIHQCVISSFNDFSMQASCTEVAEQRNCMSQEEIKQALFRNAGYGGRCL

SEQ ID NO: 58374 - protein, 333 aa, Glycine max
  peptide (1)..(333): Ceres Seq. ID no. 15169047
  misc_feature (161)..(210): Pfam Name: Helix-loop-helix DNA-binding domain Pfam Description: Helix-loop-helix DNA-binding domain
  misc_feature (233)..(330): Homolog of NCBI NO: 22331357 NR Description: bHLH protein family [Arabidopsis thaliana]
  misc_feature (3)..(219): Homolog of NCBI NO: 22331357 NR Description: bHLH protein family [Arabidopsis thaliana]
  misc_feature (154)..(330): Homolog of NCBI NO: 15222101 NR Description: bHLH protein [Arabidopsis thaliana]
  misc_feature (154)..(330): Homolog of NCBI NO: 25513489 NR Description: F13K23.12 protein - Arabidopsis thaliana
  misc_feature (54)..(311): Homolog of NCBI NO: 37536566 NR Description: hypothetical protein [Oryza sativa (japonica
  misc_feature (64)..(331): Homolog of NCBI NO: 22758263 NR Description: Putative bHLH transcription protein
  misc_feature (151)..(333): Homolog of NCBI NO: 20127062 NR Description: putative bHLH transcription factor [Arabidopsis
  misc_feature (151)..(333): Homolog of NCBI NO: 15238199 NR Description: bHLH protein [Arabidopsis thaliana]
  misc_feature (30)..(333): Homolog of NCBI NO: 21537346 NR Description: unknown [Arabidopsis thaliana]
  misc_feature (30)..(333): Homolog of NCBI NO: 18424973 NR Description: bHLH protein [Arabidopsis thaliana]
MELSQLGFLDELLAPRKDTSWSSALSTGLNELLLPSGWSFDSFDENQGLSTLNPSFAAFSTPLDHRFECPYGSEAAYPFVDGFTLPELDSSYTRNDESAPLLPQEDNPSLEDEEFGFLGSESQSLEQAKIGCKIEELTEIPVFNMGLGGEKRPKSKKLEGQPSKNLMAERRRRKRLNDRLSMLRSIVPKISKMDRTSILGDTIDYMKELLERIGKLQEEEMEEGTNRINLLGISKELKPNEVMVRNSPKFDVERRDQDTRISICCATKPGLLLSTVNTLEALGLEIHQCVISSFNDFSMQASCTEVAEQRNCMSQEEIKQALFRNAGYGGRCL

SEQ ID NO: 58375 - protein, 189 aa, Glycine max
  peptide (1)..(189): Ceres Seq. ID no. 15169048
  misc_feature (17)..(66): Pfam Name: Helix-loop-helix DNA-binding domain Pfam Description: Helix-loop-helix DNA-binding domain
  misc_feature (89)..(186): Homolog of NCBI NO: 22331357 NR Description: bHLH protein family [Arabidopsis thaliana]
  misc_feature (1)..(75): Homolog of NCBI NO: 22331357 NR Description: bHLH protein family [Arabidopsis thaliana]
  misc_feature (10)..(186): Homolog of NCBI NO: 15222101 NR Description: bHLH protein [Arabidopsis thaliana]
  misc_feature (10)..(186): Homolog of NCBI NO: 25513489 NR Description: F13K23.12 protein - Arabidopsis thaliana
  misc_feature (1)..(167): Homolog of NCBI NO: 37536566 NR Description: hypothetical protein [Oryza sativa (japonica
  misc_feature (1)..(187): Homolog of NCBI NO: 22758263 NR Description: Putative bHLH transcription protein
  misc_feature (7)..(189): Homolog of NCBI NO: 20127062 NR Description: putative bHLH transcription factor [Arabidopsis
  misc_feature (7)..(189): Homolog of NCBI NO: 15238199 NR Description: bHLH protein [Arabidopsis thaliana]
  misc_feature (1)..(189): Homolog of NCBI NO: 21537346 NR Description: unknown [Arabidopsis thaliana]
  misc_feature (1)..(189): Homolog of NCBI NO: 18424973 NR Description: bHLH protein [Arabidopsis thaliana]
MGLGGEKRPKSKKLEGQPSKNLMAERRRRKRLNDRLSMLRSIVPKISKMDRTSILGDTIDYMKELLERIGKLQEEEMEEGTNRINLLGISKELKPNEVMVRNSPKFDVERRDQDTRISICCATKPGLLLSTVNTLEALGLEIHQCVISSFNDFSMQASCTEVAEQRNCMSQEEIKQALFRNAGYGGRCL

SEQ ID NO: 58376 - DNA, 1457 bp, Glycine max
  misc_feature (1)..(1457): Ceres Seq. ID no. 14310483
gagagatcattgtccattatcacagaaatgggtgaagtaagagttctctcttacacaaaaaattcttgtctatatttattcttaatcaatctgtctctttccttttttcgacaacttttgctttgaaaactaactacaccacgggactaggatcgtgttttttaaacttttatgatcttttgtatataatgtctgttttatgatgtatatggtggcatcattatcaagtaatgcatgccacacacacacacacacacatatatatatactctagttctacacatggtggagatttttcaatcacatctttgctatatctaattaatgttctatatatttgcggagaacaaggaagaagaaaagaaagaagagaccacagaggaaaagaaggaaaaagagcctccagagatagtgctcaaggttgatatgcactgtgaagcttgtgcaaggaaagttgcaaaagcattgaaaggatttgaaggagtggaggaggtgactgcagatagcaaggcaagcaaagtggtagtgaaaggaaaggcagcagaccccataaaggtgtgtgagagactacaaaagaaaagtggcaagaaagtagagctcatttcacctttgcctaaacctccagaggagaaaaaagaagaagaaatcaaagaagaaccgcagccagaggagaaaaaggaggagctccctcctgtggtaacagtagtcctcaaagttcgaatgcattgtgaagcatgtgctcaagttatacaaaagcgaatccgcaagattcaaggagtagagtcagtggagacaagcttgggaaatgatcaagtcatagtaaaaggtgtgattgacccagcaaagctagttgattatgtgtacaagaggaccaaaaagcaagcttctatagtgaaagaggaggaaaaggaaaagaaggaagaagaggagaagaaagaggaggagaaaaaggaagagaaagaagaagagaaaaaaggagaagatggtgaagaggttgatactaaaactgacatcaagcgaagtgaatactggccattaagatcccacgttgactacgttgactacccttatgcttctcagattttcagtgatgagaacccaaatgcatgcactgtaatgtagatcagtcttttgtactaactcagtattttatagtagctgatcgatcaactgaagcaacttgtgctgtgtcgttggagcgtggaataagatgcatggttgtgaatgttttcaaggctttgtatatgatttcgcatccctcggagttggcattctatggagatagatgccttatttcttgtgttttatgagctttctacatatttccttggcaaagggtggctagaatcagttgtgttagtgtgtactgaattttggcctacaacttcaattatgtacctaaatgatgacatcaattagtaattttaagtcgtcatgtcatgataaaacttgctgcg

SEQ ID NO: 58377 - protein, 265 aa, Glycine max
  peptide (1)..(265): Ceres Seq. ID no. 14310484
  misc_feature (9)..(234): Pfam Name: Plasmodium histidine-rich protein (HRPII/III) Pfam Description: Plasmodium histidine-rich protein (HRPII/III)
  misc_feature (10)..(223): Homolog of NCBI NO: 21594005 NR Description: unknown [Arabidopsis thaliana]
  misc_feature (6)..(216): Homolog of NCBI NO: 15233023 NR Description: copper-binding protein - related [Arabidopsis
  misc_feature (7)..(265): Homolog of NCBI NO: 22327990 NR Description: heavy-metal-associated domain-containing protein
  misc_feature (9)..(152): Homolog of NCBI NO: 15241256 NR Description: copper chaperone (CCH)-related [Arabidopsis
  misc_feature (26)..(234): Homolog of NCBI NO: 4097547 NR Description: ATFP3 [Arabidopsis thaliana]
  misc_feature (7)..(234): Homolog of NCBI NO: 18424719 NR Description: copper chaperone (CCH)-related [Arabidopsis
  misc_feature (7)..(234): Homolog of NCBI NO: 9758294 NR Description: contains similarity to ATFP3~gene_id:MLE2.16
  misc_feature (235)..(265): Homolog of NCBI NO: 38344582 NR Description: OSJNBa0053B21.14 [Oryza sativa (japonica
  misc_feature (11)..(234): Homolog of NCBI NO: 38344582 NR Description: OSJNBa0053B21.14 [Oryza sativa (japonica
  misc_feature (9)..(264): Homolog of NCBI NO: 37532382 NR Description: putative ATFP3 [Oryza sativa (japonica
MFYIFAENKEEEKKEETTEEKKEKEPPEIVLKVDMHCEACARKVAKALKGFEGVEEVTADSKASKVVVKGKAADPIKVCERLQKKSGKKVELISPLPKPPEEKKEEEIKEEPQPEEKKEELPPVVTVVLKVRMHCEACAQVIQKRIRKIQGVESVETSLGNDQVIVKGVIDPAKLVDYVYKRTKKQASIVKEEEKEKKEEEEKKEEEKKEEKEEEKKGEDGEEVDTKTDIKRSEYWPLRSHVDYVDYPYASQIFSDENPNACTVM

SEQ ID NO: 58378 - protein, 231 aa, Glycine max
  peptide (1)..(231): Ceres Seq. ID no. 14310485
  misc_feature (1)..(200): Pfam Name: Plasmodium histidine-rich protein (HRPII/III) Pfam Description: Plasmodium histidine-rich protein (HRPII/III)
  misc_feature (1)..(189): Homolog of NCBI NO: 21594005 NR Description: unknown [Arabidopsis thaliana]
  misc_feature (1)..(182): Homolog of NCBI NO: 15233023 NR Description: copper-binding protein - related [Arabidopsis
  misc_feature (1)..(231): Homolog of NCBI NO: 22327990 NR Description: heavy-metal-associated domain-containing protein
  misc_feature (1)..(118): Homolog of NCBI NO: 15241256 NR Description: copper chaperone (CCH)-related [Arabidopsis
  misc_feature (1)..(200): Homolog of NCBI NO: 4097547 NR Description: ATFP3 [Arabidopsis thaliana]
  misc_feature (1)..(200): Homolog of NCBI NO: 18424719 NR Description: copper chaperone (CCH)-related [Arabidopsis
  misc_feature (1)..(200): Homolog of NCBI NO: 9758294 NR Description: contains similarity to ATFP3~gene_id:MLE2.16
  misc_feature (201)..(231): Homolog of NCBI NO: 38344582 NR Description: OSJNBa0053B21.14 [Oryza sativa (japonica
  misc_feature (1)..(200): Homolog of NCBI NO: 38344582 NR Description: OSJNBa0053B21.14 [Oryza sativa (japonica
  misc_feature (1)..(230): Homolog of NCBI NO: 37532382 NR Description: putative ATFP3 [Oryza sativa (japonica
MHCEACARKVAKALKGFEGVEEVTADSKASKVVVKGKAADPIKVCERLQKKSGKKVELISPLPKPPEEKKEEEIKEEPQPEEKKEELPPVVTVVLKVRMHCEACAQVIQKRIRKIQGVESVETSLGNDQVIVKGVIDPAKLVDYVYKRTKKQASIVKEEEKEKKEEEEKKEEEKKEEKEEEKKGEDGEEVDTKTDIKRSEYWPLRSHVDYVDYPYASQIFSDENPNACTVM

SEQ ID NO: 58379 - protein, 133 aa, Glycine max
  peptide (1)..(133): Ceres Seq. ID no. 14310486
  misc_feature (1)..(102): Pfam Name: Plasmodium histidine-rich protein (HRPII/III) Pfam Description: Plasmodium histidine-rich protein (HRPII/III)
  misc_feature (1)..(91): Homolog of NCBI NO: 21594005 NR Description: unknown [Arabidopsis thaliana]
  misc_feature (1)..(84): Homolog of NCBI NO: 15233023 NR Description: copper-binding protein - related [Arabidopsis
  misc_feature (1)..(133): Homolog of NCBI NO: 22327990 NR Description: heavy-metal-associated domain-containing protein
  misc_feature (1)..(20): Homolog of NCBI NO: 15241256 NR Description: copper chaperone (CCH)-related [Arabidopsis
  misc_feature (1)..(102): Homolog of NCBI NO: 4097547 NR Description: ATFP3 [Arabidopsis thaliana]
  misc_feature (1)..(102): Homolog of NCBI NO: 18424719 NR Description: copper chaperone (CCH)-related [Arabidopsis
  misc_feature (1)..(102): Homolog of NCBI NO: 9758294 NR Description: contains similarity to ATFP3~gene_id:MLE2.16
  misc_feature (103)..(133): Homolog of NCBI NO: 38344582 NR Description: OSJNBa0053B21.14 [Oryza sativa (japonica
  misc_feature (1)..(102): Homolog of NCBI NO: 38344582 NR Description: OSJNBa0053B21.14 [Oryza sativa (japonica
  misc_feature (1)..(132): Homolog of NCBI NO: 37532382 NR Description: putative ATFP3 [Oryza sativa (japonica
MHCEACAQVIQKRIRKIQGVESVETSLGNDQVIVKGVIDPAKLVDYVYKRTKKQASIVKEEEKEKKEEEEKKEEEKKEEKEEEKKGEDGEEVDTKTDIKRSEYWPLRSHVDYVDYPYASQIFSDENPNACTVM

SEQ ID NO: 58380 - DNA, 1508 bp, Glycine max
  misc_feature (1)..(1508): Ceres Seq. ID no. 15169013
gtaacaaaatatcccaaactctcactcgtcgacggccaccggatcgacctcaattcgccgtcgtccaatcgctctcagttccaccgcctccgccgccggcatccaattcagtttggccttgcatctctctcaggtattaagattctactaaaaaaaaggttgatcagcgtaaagatggagctcactattacacagcctgatgattggcatcttcacctccgtgatggttcccttcttgaagctgtcctccctcacagtgcgaagcattttggaagggccatagtaatgccaaatttgaaaccacccatcactaccacgtctgctgctgtcgcttatcgagagtccattttgaaagcaatacctaaagatagcaacttcactcctctcatgtcactttacctcacagacgtgactacccctgatgagattaaacttgcaaaaaaaagtggacttgtttatggtgtgaagttgtatcctgctggtgctacaacaaactcccaagatggtgttacagatctttttggaaattgtttttctgttcttgaggaaatggctgagcaaaatttaccattattggttcacggagaggttacagattcaaacgttgatatttttgaccgagaaaaagtctttattgaaacaattttaatgcctttaattcaaagacttccacagctgaaggttgtgatggagcatatcactactgcagatgctgttaaatttgtagagtcttgcaaagaaggttatgtagcagcaactgttacaccacagcatcttcttctgaatcgtaatgctttgttccaaggtggcttacagcctcacaattactgtcttccagtgctcaaaagagagatccatagacaggctattgtttcggctgtcactagtggaagtaaacgatttttccttggaactgatagtgctccacatgataggcgtaaaaaggaatgttcctgtggatgtgctggcatatacaactcaccggttgctctatcactatatgccaaagtttttgaagaggctggtgcacttgataagctagaggcttttacaagctttaacggacctgacttctatggcctccccagaaacaagtcaaagattaaactgaggaaagctccttggaaagtacctgattatttgtcatttccatttggagacatcgttcccatgtttgctggtgaaacccttgaatgggaggcattgccttgttgatttgctgtgtctatttgaaagtttggtatccttcagcttaaattattgattgctgagatgagaatttatgcagcgttcaagaactagagtcaagcaattttgttctaattttatcagtcagttctgcatttattttgcagattgttctcatttctatttcctaggtcaggtgaatttaagtatgaaccagaacacccactgtgactaataaattatgggaatttatatagtattcagagctatggtaattttgtagttctaatcagatcaatcaactaggcagagtttttcag

SEQ ID NO: 58381 - protein, 404 aa, Glycine max
  peptide (1)..(404): Ceres Seq. ID no. 15169014
  misc_feature (58)..(402): Pfam Name: Amidohydrolase family Pfam Description: Amidohydrolase family
  misc_feature (68)..(404): Homolog of NCBI NO: 21309874 NR Description: dihydroorotase [Toxoplasma gondii]
  misc_feature (44)..(403): Homolog of NCBI NO: 23026307 NR Description: hypothetical protein [Microbulbifer degradans
  misc_feature (61)..(399): Homolog of NCBI NO: 22988480 NR Description: hypothetical protein [Burkholderia fungorum]
  misc_feature (60)..(400): Homolog of NCBI NO: 16331133 NR Description: dihydroorotase [Synechocystis sp. PCC 6803]
  misc_feature (60)..(400): Homolog of NCBI NO: 30248736 NR Description: Dihydroorotase homodimeric type
  misc_feature (56)..(399): Homolog of NCBI NO: 34499785 NR Description: dihydroorotase [Chromobacterium violaceum ATCC
  misc_feature (60)..(399): Homolog of NCBI NO: 34909480 NR Description: putative dihydroorotase [Oryza sativa (japonica
  misc_feature (59)..(400): Homolog of NCBI NO: 17977977 NR Description: dihydroorotase [Beta vulgaris]
  misc_feature (38)..(402): Homolog of NCBI NO: 15235865 NR Description: dihydroorotase [Arabidopsis thaliana]
VTKYPKLSLVDGHRIDLNSPSSNRSQFHRLRRRHPIQFGLASLSGIKILLKKRLISVKMELTITQPDDWHLHLRDGSLLEAVLPHSAKHFGRAIVMPNLKPPITTTSAAVAYRESILKAIPKDSNFTPLMSLYLTDVTTPDEIKLAKKSGLVYGVKLYPAGATTNSQDGVTDLFGNCFSVLEEMAEQNLPLLVHGEVTDSNVDIFDREKVFIETILMPLIQRLPQLKVVMEHITTADAVKFVESCKEGYVAATVTPQHLLLNRNALFQGGLQPHNYCLPVLKREIHRQAIVSAVTSGSKRFFLGTDSAPHDRRKKECSCGCAGIYNSPVALSLYAKVFEEAGALDKLEAFTSFNGPDFYGLPRNKSKIKLRKAPWKVPDYLSFPFGDIVPMFAGETLEWEALPC

SEQ ID NO: 58382 - protein, 346 aa, Glycine max
  peptide (1)..(346): Ceres Seq. ID no. 15169015
  misc_feature (1)..(344): Pfam Name: Amidohydrolase family Pfam Description: Amidohydrolase family
  misc_feature (10)..(346): Homolog of NCBI NO: 21309874 NR Description: dihydroorotase [Toxoplasma gondii]
  misc_feature (1)..(345): Homolog of NCBI NO: 23026307 NR Description: hypothetical protein [Microbulbifer degradans
  misc_feature (3)..(341): Homolog of NCBI NO: 22988480 NR Description: hypothetical protein [Burkholderia fungorum]
  misc_feature (2)..(342): Homolog of NCBI NO: 16331133 NR Description: dihydroorotase [Synechocystis sp. PCC 6803]
  misc_feature (2)..(342): Homolog of NCBI NO: 30248736 NR Description: Dihydroorotase homodimeric type
  misc_feature (1)..(341): Homolog of NCBI NO: 34499785 NR Description: dihydroorotase [Chromobacterium violaceum ATCC
  misc_feature (2)..(341): Homolog of NCBI NO: 34909480 NR Description: putative dihydroorotase [Oryza sativa (japonica
  misc_feature (1)..(342): Homolog of NCBI NO: 17977977 NR Description: dihydroorotase [Beta vulgaris]
  misc_feature (1)..(344): Homolog of NCBI NO: 15235865 NR Description: dihydroorotase [Arabidopsis thaliana]
MELTITQPDDWHLHLRDGSLLEAVLPHSAKHFGRAIVMPNLKPPITTTSAAVAYRESILKAIPKDSNFTPLMSLYLTDVTTPDEIKLAKKSGLVYGVKLYPAGATTNSQDGVTDLFGNCFSVLEEMAEQNLPLLVHGEVTDSNVDIFDREKVFIETILMPLIQRLPQLKVVMEHITTADAVKFVESCKEGYVAATVTPQHLLLNRNALFQGGLQPHNYCLPVLKREIHRQAIVSAVTSGSKRFFLGTDSAPHDRRKKECSCGCAGIYNSPVALSLYAKVFEEAGALDKLEAFTSFNGPDFYGLPRNKSKIKLRKAPWKVPDYLSFPFGDIVPMFAGETLEWEALPC

SEQ ID NO: 58383 - protein, 309 aa, Glycine max
  peptide (1)..(309): Ceres Seq. ID no. 15169016
  misc_feature (1)..(307): Pfam Name: Amidohydrolase family Pfam Description: Amidohydrolase family
  misc_feature (1)..(309): Homolog of NCBI NO: 21309874 NR Description: dihydroorotase [Toxoplasma gondii]
  misc_feature (1)..(308): Homolog of NCBI NO: 23026307 NR Description: hypothetical protein [Microbulbifer degradans
  misc_feature (1)..(304): Homolog of NCBI NO: 22988480 NR Description: hypothetical protein [Burkholderia fungorum]
  misc_feature (1)..(305): Homolog of NCBI NO: 16331133 NR Description: dihydroorotase [Synechocystis sp. PCC 6803]
  misc_feature (1)..(305): Homolog of NCBI NO: 30248736 NR Description: Dihydroorotase homodimeric type
  misc_feature (1)..(304): Homolog of NCBI NO: 34499785 NR Description: dihydroorotase [Chromobacterium violaceum ATCC
  misc_feature (1)..(304): Homolog of NCBI NO: 34909480 NR Description: putative dihydroorotase [Oryza sativa (japonica
  misc_feature (1)..(305): Homolog of NCBI NO: 17977977 NR Description: dihydroorotase [Beta vulgaris]
  misc_feature (1)..(307): Homolog of NCBI NO: 15235865 NR Description: dihydroorotase [Arabidopsis thaliana]
MPNLKPPITTTSAAVAYRESILKAIPKDSNFTPLMSLYLTDVTTPDEIKLAKKSGLVYGVKLYPAGATTNSQDGVTDLFGNCFSVLEEMAEQNLPLLVHGEVTDSNVDIFDREKVFIETILMPLIQRLPQLKVVMEHITTADAVKFVESCKEGYVAATVTPQHLLLNRNALFQGGLQPHNYCLPVLKREIHRQAIVSAVTSGSKRFFLGTDSAPHDRRKKECSCGCAGIYNSPVALSLYAKVFEEAGALDKLEAFTSFNGPDFYGLPRNKSKIKLRKAPWKVPDYLSFPFGDIVPMFAGETLEWEALPC

SEQ ID NO: 58384 - DNA, 1232 bp, Glycine max
  misc_feature (1)..(1232): Ceres Seq. ID no. 14316340
ttatttttttttaccaccatgtccgagtttcgaaaacaaccggcttctagaccgaagcaaaagcttcgccaacagcactcctcgaaagagtcaaaggcgatgagaaaacttcgcatcatttgcgacgatcctgaggctactgattcatccgaagatgagtctgagagggttcagaagccgagaagagtaaaaagaagcgtgttggagatgtctcttccccctctccctcaaacattcaccaccactactcctgatactagctcctgtgaggtgaatagcagcaaaaatgcaacattgaaggtttgcactgaaggtcaaccccagagcaagaagagggttttgactcacactccatcaacgagaaggagcacttgtgggaaatatagaggtgttaggcagagaaaatggggtaaatgggctgcagaaattcgtgacccgtttcagtgtactcgtatatggcttggcactttcaacactgcagaagaggcttccaaagcctatgaaaccagaaggcttgagtttgaagccatggcaaagactcaaactctaaaaactggttctgaacctttgtctacaacttctgataagagtaactgctgtaactcctctgctgctgccgccgccgatgtgtctgtgtctgaaaagttttctactacttctgatgactcggaagagagtatgttgtcacacaattcaccatcctctgtgcttgagttggatacctcggcttccaaatccgttgagaagggtaatggttcaactgaggaagctactggggctaataatttggtggctgaacttgcagggcttgagataccagatttgagtctgttgaacctgccaccaccaccatctgttgctgcggatgctgctgggattgagccaaattttgggcttgattttgattggctgtcgtttaatgattatggacagggttttgaggatttcggtggcttggagaacattcatattggtgggtttgatgacactgagcctagtgagcttcctgacttcgattttggtgattttggtgctgatgagtttgctggttggattgaggaacccctcaatataccttgtgcctaagttttgttatttgttatggcctcaagttctgttagttttgttttttgttttatttattatttgtgagatctcaggaatttgcaataccaatttctgagcgagtgaatgttactttatgcgttttatattttcatttgtttttgagg

SEQ ID NO: 58385 - protein, 361 aa, Glycine max
  peptide (1)..(361): Ceres Seq. ID no. 14316341
  misc_feature (130)..(177): Pfam Name: AP2 domain Pfam Description: AP2 domain
  misc_feature (113)..(284): Homolog of NCBI NO: 25403338 NR Description: protein F3M18.20 [imported] - Arabidopsis
  misc_feature (113)..(284): Homolog of NCBI NO: 15218649 NR Description: ethylene responsive element binding factor 11,
  misc_feature (35)..(225): Homolog of NCBI NO: 34911974 NR Description: P0694A04.17 [Oryza sativa (japonica
  misc_feature (36)..(237): Homolog of NCBI NO: 34904146 NR Description: unnamed protein product [Oryza sativa (japonica
  misc_feature (20)..(245): Homolog of NCBI NO: 15234337 NR Description: putative protein; protein id: At4g27950.1
  misc_feature (35)..(324): Homolog of NCBI NO: 22655200 NR Description: putative Ap2 domain protein [Arabidopsis thaliana]
  misc_feature (35)..(324): Homolog of NCBI NO: 15236595 NR Description: AP2 domain transcription factor, putative
  misc_feature (19)..(113): Homolog of NCBI NO: 15221435 NR Description: AP2 domain transcription factor, putative
  misc_feature (130)..(278): Homolog of NCBI NO: 15221435 NR Description: AP2 domain transcription factor, putative
  misc_feature (12)..(226): Homolog of NCBI NO: 15230928 NR Description: AP2 domain transcription factor, putative
LFFFTTMSEFRKQPASRPKQKLRQQHSSKESKAMRKLRIICDDPEATDSSEDESERVQKPRRVKRSVLEMSLPPLPQTFTTTTPDTSSCEVNSSKNATLKVCTEGQPQSKKRVLTHTPSTRRSTCGKYRGVRQRKWGKWAAEIRDPFQCTRIWLGTFNTAEEASKAYETRRLEFEAMAKTQTLKTGSEPLSTTSDKSNCCNSSAAAAADVSVSEKFSTTSDDSEESMLSHNSPSSVLELDTSASKSVEKGNGSTEEATGANNLVAELAGLEIPDLSLLNLPPPPSVAADAAGIEPNFGLDFDWLSFNDYGQGFEDFGGLENIHIGGFDDTEPSELPDFDFGDFGADEFAGWIEEPLNIPCA

SEQ ID NO: 58386 - protein, 355 aa, Glycine max
  peptide (1)..(355): Ceres Seq. ID no. 14316342
  misc_feature (124)..(171): Pfam Name: AP2 domain Pfam Description: AP2 domain
  misc_feature (107)..(278): Homolog of NCBI NO: 25403338 NR Description: protein F3M18.20 [imported] - Arabidopsis
  misc_feature (107)..(278): Homolog of NCBI NO: 15218649 NR Description: ethylene responsive element binding factor 11,
  misc_feature (29)..(219): Homolog of NCBI NO: 34911974 NR Description: P0694A04.17 [Oryza sativa (japonica
  misc_feature (30)..(231): Homolog of NCBI NO: 34904146 NR Description: unnamed protein product [Oryza sativa (japonica
  misc_feature (14)..(239): Homolog of NCBI NO: 15234337 NR Description: putative protein; protein id: At4g27950.1
  misc_feature (29)..(318): Homolog of NCBI NO: 22655200 NR Description: putative Ap2 domain protein [Arabidopsis thaliana]
  misc_feature (29)..(318): Homolog of NCBI NO: 15236595 NR Description: AP2 domain transcription factor, putative
  misc_feature (13)..(107): Homolog of NCBI NO: 15221435 NR Description: AP2 domain transcription factor, putative
  misc_feature (124)..(272): Homolog of NCBI NO: 15221435 NR Description: AP2 domain transcription factor, putative
  misc_feature (6)..(220): Homolog of NCBI NO: 15230928 NR Description: AP2 domain transcription factor, putative
MSEFRKQPASRPKQKLRQQHSSKESKAMRKLRIICDDPEATDSSEDESERVQKPRRVKRSVLEMSLPPLPQTFTTTTPDTSSCEVNSSKNATLKVCTEGQPQSKKRVLTHTPSTRRSTCGKYRGVRQRKWGKWAAEIRDPFQCTRIWLGTFNTAEEASKAYETRRLEFEAMAKTQTLKTGSEPLSTTSDKSNCCNSSAAAAADVSVSEKFSTTSDDSEESMLSHNSPSSVLELDTSASKSVEKGNGSTEEATGANNLVAELAGLEIPDLSLLNLPPPPSVAADAAGIEPNFGLDFDWLSFNDYGQGFEDFGGLENIHIGGFDDTEPSELPDFDFGDFGADEFAGWIEEPLNIPCA

SEQ ID NO: 58387 - protein, 328 aa, Glycine max
  peptide (1)..(328): Ceres Seq. ID no. 14316343
  misc_feature (97)..(144): Pfam Name: AP2 domain Pfam Description: AP2 domain
  misc_feature (80)..(251): Homolog of NCBI NO: 25403338 NR Description: protein F3M18.20 [imported] - Arabidopsis
  misc_feature (80)..(251): Homolog of NCBI NO: 15218649 NR Description: ethylene responsive element binding factor 11,
  misc_feature (2)..(192): Homolog of NCBI NO: 34911974 NR Description: P0694A04.17 [Oryza sativa (japonica
  misc_feature (3)..(204): Homolog of NCBI NO: 34904146 NR Description: unnamed protein product [Oryza sativa (japonica
  misc_feature (1)..(212): Homolog of NCBI NO: 15234337 NR Description: putative protein; protein id: At4g27950.1
  misc_feature (2)..(291): Homolog of NCBI NO: 22655200 NR Description: putative Ap2 domain protein [Arabidopsis thaliana]
  misc_feature (2)..(291): Homolog of NCBI NO: 15236595 NR Description: AP2 domain transcription factor, putative
  misc_feature (1)..(80): Homolog of NCBI NO: 15221435 NR Description: AP2 domain transcription factor, putative
  misc_feature (97)..(245): Homolog of NCBI NO: 15221435 NR Description: AP2 domain transcription factor, putative
  misc_feature (1)..(193): Homolog of NCBI NO: 15230928 NR Description: AP2 domain transcription factor, putative
MRKLRIICDDPEATDSSEDESERVQKPRRVKRSVLEMSLPPLPQTFTTTTPDTSSCEVNSSKNATLKVCTEGQPQSKKRVLTHTPSTRRSTCGKYRGVRQRKWGKWAAEIRDPFQCTRIWLGTFNTAEEASKAYETRRLEFEAMAKTQTLKTGSEPLSTTSDKSNCCNSSAAAAADVSVSEKFSTTSDDSEESMLSHNSPSSVLELDTSASKSVEKGNGSTEEATGANNLVAELAGLEIPDLSLLNLPPPPSVAADAAGIEPNFGLDFDWLSFNDYGQGFEDFGGLENIHIGGFDDTEPSELPDFDFGDFGADEFAGWIEEPLNIPCA

SEQ ID NO: 58388 - DNA, 1571 bp, Glycine max
  misc_feature (1)..(1571): Ceres Seq. ID no. 14312057
aacgcagaggcgaagcagcaacaacagaagaatgctccgttcaactccatttccggcaccgtacaattcggcgccagttctctctcgcgcacgcacgtgcccctctccagcactcgcacgtgcccttcattctcattcctctttggtttggcggctcgtcttcccacaattccaccaacacaacgtaaatatttccggcggagtgtttgtcgcggccgccgcgaagaagcaacaacggcgcggcggcgctgagctcgccgtaatggacggcggtttcgacgacggtgatttttatgatgcttacgatgatgatgaagaagaagaagaatttgatgatgatgatgatgaagaagaagggatgcttccgttggatgacatgaacaaatggttcgagaagaagccgaggggttttggagaagggaaagtgtacgacacttcggttgaggataagctgctcgaggaaatgcgccagagtagaatagcgcaggctgaaaacttgacgaagcttaagagcaatcctgtgaagcatgcttcaaacgaaagtgttcaaaagaagaaagattcagaacttgttccaattggaggtcgagtgtgcttggtgaacctaccaaagaaaaagaacatccataaagatctgaaatcagccttgcaagggattcctggcataactaatatagtcccagctgttactggaaacaagaagacgagggacccaatctgcaagggttttgcatacgttgatttcgagtgtgaagaagatgcaattaggtttgttgagttatacactggacaagctattacttttggtaaaattcagaagcagataaaatgtgagcttctaaatgtacagtcttcatcttcttctctgaaattaagcaaaaaccttaatgctgctccgcaacttgtggcccgctttgaagaagtttcaaatgaggattctaacttggatggttctgcccttagttcctgggatgaggccaactcttcagatgatttggatgacctggactatcagatgaatggagaagaacaggaagatgatgaggacaatcaagagtctgtctccactttgggggtggatcatgatgatagtgtggaaatgaggatcgatcctgaaatttgttctcttccctcagagcaggttgacagaaaccatgcagctgagcagaagtcatctgccaaggttaaacaggagaatgcccgtaagaaaaaaccaacttccaaagatagagacaaaaaagttttaggtgttcctggatcctcaagaaggttaaagatcagggaaaaggctgttttaagtgacgttttctccaagtacggattaaaagctactcttgcttcaaaagataattagtaaattgctaatgaggtgagatcgccaaagtctaaatcatctcccagcacgtagggtctaaaaactaaaaggtcatattagatgcaatgggactttctagttggccatggatgctagtttttgattcagtgtacaatcaaattgtagcataagagtcttgtagaaaaattgatgatagtagattattatttttatgaatatcaaaacattctttatt

SEQ ID NO: 58389 - protein, 450 aa, Glycine max
  peptide (1)..(450): Ceres Seq. ID no. 14312058
  misc_feature (306)..(437): Pfam Name: Mpp10 protein Pfam Description: Mpp10 protein
  misc_feature (39)..(373): Homolog of NCBI NO: 30698005 NR Description: RNA recognition motif (RRM)-containing protein
  misc_feature (39)..(373): Homolog of NCBI NO: 25406039 NR Description: F20P5.8 [imported] - Arabidopsis thaliana
TQRRSSNNRRMLRSTPFPAPYNSAPVLSRARTCPSPALARALHSHSSLVWRLVFPQFHQHNVNISGGVFVAAAAKKQQRRGGAELAVMDGGFDDGDFYDAYDDDEEEEEFDDDDDEEEGMLPLDDMNKWFEKKPRGFGEGKVYDTSVEDKLLEEMRQSRIAQAENLTKLKSNPVKHASNESVQKKKDSELVPIGGRVCLVNLPKKKNIHKDLKSALQGIPGITNIVPAVTGNKKTRDPICKGFAYVDFECEEDAIRFVELYTGQAITFGKIQKQIKCELLNVQSSSSSLKLSKNLNAAPQLVARFEEVSNEDSNLDGSALSSWDEANSSDDLDDLDYQMNGEEQEDDEDNQESVSTLGVDHDDSVEMRIDPEICSLPSEQVDRNHAAEQKSSAKVKQENARKKKPTSKDRDKKVLGVPGSSRRLKIREKAVLSDVFSKYGLKATLASKDN

SEQ ID NO: 58390 - protein, 440 aa, Glycine max
  peptide (1)..(440): Ceres Seq. ID no. 14312059
  misc_feature (296)..(427): Pfam Name: Mpp10 protein Pfam Description: Mpp10 protein
  misc_feature (29)..(363): Homolog of NCBI NO: 30698005 NR Description: RNA recognition motif (RRM)-containing protein
  misc_feature (29)..(363): Homolog of NCBI NO: 25406039 NR Description: F20P5.8 [imported] - Arabidopsis thaliana
MLRSTPFPAPYNSAPVLSRARTCPSPALARALHSHSSLVWRLVFPQFHQHNVNISGGVFVAAAAKKQQRRGGAELAVMDGGFDDGDFYDAYDDDEEEEEFDDDDDEEEGMLPLDDMNKWFEKKPRGFGEGKVYDTSVEDKLLEEMRQSRIAQAENLTKLKSNPVKHASNESVQKKKDSELVPIGGRVCLVNLPKKKNIHKDLKSALQGIPGITNIVPAVTGNKKTRDPICKGFAYVDFECEEDAIRFVELYTGQAITFGKIQKQIKCELLNVQSSSSSLKLSKNLNAAPQLVARFEEVSNEDSNLDGSALSSWDEANSSDDLDDLDYQMNGEEQEDDEDNQESVSTLGVDHDDSVEMRIDPEICSLPSEQVDRNHAAEQKSSAKVKQENARKKKPTSKDRDKKVLGVPGSSRRLKIREKAVLSDVFSKYGLKATLASKDN

SEQ ID NO: 58391 - protein, 363 aa, Glycine max
  peptide (1)..(363): Ceres Seq. ID no. 14312060
  misc_feature (219)..(350): Pfam Name: Mpp10 protein Pfam Description: Mpp10 protein
  misc_feature (1)..(286): Homolog of NCBI NO: 30698005 NR Description: RNA recognition motif (RRM)-containing protein
  misc_feature (1)..(286): Homolog of NCBI NO: 25406039 NR Description: F20P5.8 [imported] - Arabidopsis thaliana
MDGGFDDGDFYDAYDDDEEEEEFDDDDDEEEGMLPLDDMNKWFEKKPRGFGEGKVYDTSVEDKLLEEMRQSRIAQAENLTKLKSNPVKHASNESVQKKKDSELVPIGGRVCLVNLPKKKNIHKDLKSALQGIPGITNIVPAVTGNKKTRDPICKGFAYVDFECEEDAIRFVELYTGQAITFGKIQKQIKCELLNVQSSSSSLKLSKNLNAAPQLVARFEEVSNEDSNLDGSALSSWDEANSSDDLDDLDYQMNGEEQEDDEDNQESVSTLGVDHDDSVEMRIDPEICSLPSEQVDRNHAAEQKSSAKVKQENARKKKPTSKDRDKKVLGVPGSSRRLKIREKAVLSDVFSKYGLKATLASKDN

SEQ ID NO: 58392 - DNA, 1419 bp, Glycine max
  misc_feature (1)..(1419): Ceres Seq. ID no. 14307571
atttattggacccgtcgtgaaccgtgtttggatatacggctctatcaaattcataaaactaaaatcctaacttgataatgacataaaccttgtggtgtcatacatgttgcctagaaacatgatcgttgaagaacaagccaagaaaaggaaaatgtttatatattttgtttgcttgtcaaaaacagaattatttttttttcttcttaaaatattaaagtaaaattaattcaatttaaaaataaaaaagtgctgatcttgtaaaaaaaaactcaccttcgttgtctcccttctttctcttctccattaaaagcttctaacagttttactagaagtagtttatgatttggcatatccaaacccaattccatcgtgatataagctttgttcaaatcacatgcaaaagagaggaagatattataaaatttgatattcatctggcagtttgaaggcattctgtgtttcatatgttttagcaatagtaaattacaaaaattaggtctgcctatgcttactgaattgtaaattttgtaggagcattgtttggtgacacattaattatacagtgcagagtgtacacaatgagtttgtttagttcttcaaagatattatgtttataccattctcaagccctaagtgttctggctttattgctaaatacaaactaagatttgagaacaagtgaagtttatttaaataatcatcacagctctctgcttctggagacagtggaatgcctgaagtggtagctgatcctcaaggtgaagtttccaagatattccaaaatctaggagtatgtgttgttcagcagtgtgccaaaatacgccaacaagtttcaactgcggtcacctatgataaatcaatcaaggcaatcaaagtgaaggtaccagattcaaaggaagaattctttctgcatcctgcaacagtgagacggaatgatcgctctgctcaaagtgtggatgaatggacgggggagcagaaattgcagtacggtgatgttcctgaagatattgaacctgaagaaattcgaccaatgggaaattatgcagtttcaataacttggcctgatgggtttagtcagattgctccttatgatcaattgcagatgattgaacggctagttgatgtttttgaaccaagtgtacaagcatgatgaaaaaaaaacgtcagatgggttgtactgatgtaggtgttggtatatggcaaaaatcatatatacatgtatgatagcctcaattcatagtccttcaacaagtaggggatattagaagtttgatagagcattctgcaaaggtataggttggccttgagattcactgcaatcctcaacttttttccttggtttttgttgtcccattgggtacaaagcttttatttctcaactgtgaacagaagtgtattatatatgtgtcattttcattc

SEQ ID NO: 58393 - protein, 139 aa, Glycine max
  peptide (1)..(139): Ceres Seq. ID no. 14307572
  misc_feature (1)..(132): Homolog of NCBI NO: 21592386 NR Description: mrp protein, putative [Arabidopsis thaliana]
  misc_feature (1)..(132): Homolog of NCBI NO: 15230111 NR Description: mrp protein -related [Arabidopsis thaliana]
  misc_feature (1)..(132): Homolog of NCBI NO: 11994706 NR Description: contains similarity to nucleotide-binding
  misc_feature (1)..(132): Homolog of NCBI NO: 34910672 NR Description: putative MRP protein (ATP/GTP-binding protein)
MPEVVADPQGEVSKIFQNLGVCVVQQCAKIRQQVSTAVTYDKSIKAIKVKVPDSKEEFFLHPATVRRNDRSAQSVDEWTGEQKLQYGDVPEDIEPEEIRPMGNYAVSITWPDGFSQIAPYDQLQMIERLVDVFEPSVQA

SEQ ID NO: 58394 - DNA, 1243 bp, Glycine max
  misc_feature (1)..(1243): Ceres Seq. ID no. 14307530
atccaacctcttaacaattcgcatggtttcgtacccacacaactgaactcacacaaacttctccaccacaccgacaacctcgccggaaaattcctcgccgtttccggttaccggcgatggcctcggcgacgtcgtttttgggcctcggtcttcgcccctccgtcccaatttgcgccaacagaaacaacggcattcgattctctcagtttcaagtctcctttggctttcgtgagaactccacttccctcaagactttgaattcaacaccgttgaagaaaagagaagctttctcaaatgggtcttcgagaacgcgaagaaacccgttgttctctgttcgctgcacagtttcatcaagtggaaagattacacaacaggaattcacggaaatggcatggcaagcaattatctcggcaccagaagtggctaaggagaacaagcatcagattgtggagactgagcacttgatgaaagcattgttggagcaaaagaatggacttgctcgccggatcttttctaaggttggggtagataatactcggcttctagaggccactgataagcacattcagcggcaacccaaggttgtaggggaatctgctggttcaatgctagggcgtgatttggaggcattgattcagagagccagggacttcaagaaagaatatggggactcatttgtgtcggttgagcactttgttcttggttttgcccaagataaacgatttgggaagatattgtttagagattttcaaatatctcagcaagctctaaaatctgccatagaatccataaggggacgccagtcagttattgaccaagatcctgaaggaaagtatgaagccttggaaaagtatgggaaagatttgacggcaatggctaaagcaggaaaacttgacccagtcataggaagagatgatgaaatacgcaggtgcattcagattctctccaggaggacaaagaacaatcctgttctaattggggagcctggtgttggaaagactgcaatctctgaagggctgctactgttatctgtttcctgaatttcatgtgtgacctgtttcatacatacaagaatggcacctgtgatggtgtgaaacaaaatataaaaattatttgaacacgacagttcaattttttgttaatatttttaagaaacaaatgatagttgtttcaaatattacattctgtatgaaagtataatatgtcaaaatagaaattccataaaagtaggaagtaagtttag

SEQ ID NO: 58395 - protein, 307 aa, Glycine max
  peptide (1)..(307): Ceres Seq. ID no. 14307531
  misc_feature (99)..(151): Pfam Name: Clp amino terminal domain Pfam Description: Clp amino terminal domain
  misc_feature (87)..(301): Homolog of NCBI NO: 23123825 NR Description: hypothetical protein [Nostoc punctiforme]
  misc_feature (87)..(301): Homolog of NCBI NO: 1705924 NR Description: CLPB PROTEIN
  misc_feature (87)..(307): Homolog of NCBI NO: 37523146 NR Description: endopeptidase Clp ATP-binding chain B
  misc_feature (87)..(301): Homolog of NCBI NO: 23040907 NR Description: hypothetical protein [Trichodesmium erythraeum
  misc_feature (86)..(307): Homolog of NCBI NO: 23128455 NR Description: hypothetical protein [Nostoc punctiforme]
  misc_feature (91)..(301): Homolog of NCBI NO: 25289888 NR Description: probable ATP-dependent CLPB protein
  misc_feature (87)..(301): Homolog of NCBI NO: 22298932 NR Description: ClpB protein [Thermosynechococcus elongatus BP-1]
  misc_feature (13)..(301): Homolog of NCBI NO: 18400735 NR Description: HSP100/ClpB, putative [Arabidopsis thaliana]
  misc_feature (68)..(301): Homolog of NCBI NO: 9651530 NR Description: ClpB [Phaseolus lunatus]
  misc_feature (1)..(301): Homolog of NCBI NO: 18417676 NR Description: HSP100/ClpB, putative [Arabidopsis thaliana]
MASATSFLGLGLRPSVPICANRNNGIRFSQFQVSFGFRENSTSLKTLNSTPLKKREAFSNGSSRTRRNPLFSVRCTVSSSGKITQQEFTEMAWQAIISAPEVAKENKHQIVETEHLMKALLEQKNGLARRIFSKVGVDNTRLLEATDKHIQRQPKVVGESAGSMLGRDLEALIQRARDFKKEYGDSFVSVEHFVLGFAQDKRFGKILFRDFQISQQALKSAIESIRGRQSVIDQDPEGKYEALEKYGKDLTAMAKAGKLDPVIGRDDEIRRCIQILSRRTKNNPVLIGEPGVGKTAISEGLLLLSVS

SEQ ID NO: 58396 - protein, 217 aa, Glycine max
  peptide (1)..(217): Ceres Seq. ID no. 14307532
  misc_feature (9)..(61): Pfam Name: Clp amino terminal domain Pfam Description: Clp amino terminal domain
  misc_feature (1)..(211): Homolog of NCBI NO: 23123825 NR Description: hypothetical protein [Nostoc punctiforme]
  misc_feature (1)..(211): Homolog of NCBI NO: 1705924 NR Description: CLPB PROTEIN
  misc_feature (1)..(217): Homolog of NCBI NO: 37523146 NR Description: endopeptidase Clp ATP-binding chain B
  misc_feature (1)..(211): Homolog of NCBI NO: 23040907 NR Description: hypothetical protein [Trichodesmium erythraeum
  misc_feature (1)..(217): Homolog of NCBI NO: 23128455 NR Description: hypothetical protein [Nostoc punctiforme]
  misc_feature (1)..(211): Homolog of NCBI NO: 25289888 NR Description: probable ATP-dependent CLPB protein
  misc_feature (1)..(211): Homolog of NCBI NO: 22298932 NR Description: ClpB protein [Thermosynechococcus elongatus BP-1]
  misc_feature (1)..(211): Homolog of NCBI NO: 18400735 NR Description: HSP100/ClpB, putative [Arabidopsis thaliana]
  misc_feature (1)..(211): Homolog of NCBI NO: 9651530 NR Description: ClpB [Phaseolus lunatus]
  misc_feature (1)..(211): Homolog of NCBI NO: 18417676 NR Description: HSP100/ClpB, putative [Arabidopsis thaliana]
MAWQAIISAPEVAKENKHQIVETEHLMKALLEQKNGLARRIFSKVGVDNTRLLEATDKHIQRQPKVVGESAGSMLGRDLEALIQRARDFKKEYGDSFVSVEHFVLGFAQDKRFGKILFRDFQISQQALKSAIESIRGRQSVIDQDPEGKYEALEKYGKDLTAMAKAGKLDPVIGRDDEIRRCIQILSRRTKNNPVLIGEPGVGKTAISEGLLLLSVS

SEQ ID NO: 58397 - protein, 191 aa, Glycine max
  peptide (1)..(191): Ceres Seq. ID no. 14307533
  misc_feature (1)..(185): Homolog of NCBI NO: 23123825 NR Description: hypothetical protein [Nostoc punctiforme]
  misc_feature (1)..(185): Homolog of NCBI NO: 1705924 NR Description: CLPB PROTEIN
  misc_feature (1)..(191): Homolog of NCBI NO: 37523146 NR Description: endopeptidase Clp ATP-binding chain B
  misc_feature (1)..(185): Homolog of NCBI NO: 23040907 NR Description: hypothetical protein [Trichodesmium erythraeum
  misc_feature (1)..(191): Homolog of NCBI NO: 23128455 NR Description: hypothetical protein [Nostoc punctiforme]
  misc_feature (1)..(185): Homolog of NCBI NO: 25289888 NR Description: probable ATP-dependent CLPB protein
  misc_feature (1)..(185): Homolog of NCBI NO: 22298932 NR Description: ClpB protein [Thermosynechococcus elongatus BP-1]
  misc_feature (1)..(185): Homolog of NCBI NO: 18400735 NR Description: HSP100/ClpB, putative [Arabidopsis thaliana]
  misc_feature (1)..(185): Homolog of NCBI NO: 9651530 NR Description: ClpB [Phaseolus lunatus]
  misc_feature (1)..(185): Homolog of NCBI NO: 18417676 NR Description: HSP100/ClpB, putative [Arabidopsis thaliana]
MKALLEQKNGLARRIFSKVGVDNTRLLEATDKHIQRQPKVVGESAGSMLGRDLEALIQRARDFKKEYGDSFVSVEHFVLGFAQDKRFGKILFRDFQISQQALKSAIESIRGRQSVIDQDPEGKYEALEKYGKDLTAMAKAGKLDPVIGRDDEIRRCIQILSRRTKNNPVLIGEPGVGKTAISEGLLLLSVS

SEQ ID NO: 58398 - DNA, 1257 bp, Glycine max
  misc_feature (1)..(1257): Ceres Seq. ID no. 15170635
agctaaagcgcacacatcactcctcactcactcggcggcacacacaaaaccctttctcagtcactcactcggcaaagagaagcgtcgacggtctgcacggtgggtgcttcatcgacggcagcgacctgtggcggaggacagggttcccttcgctcttggagttcgcatcgggcagagaagcttctctgcattgcgctgggacgcaaaaccctggcagcaatcagcaccacggcgcagccgcacacctctgagacgccaccgcaatcaggatgagtgaacttctttttgatgacattttcaaggtcgagaaggtagaccctgatggtaaaaagtatgacaaggtttctcggattgtggcacggagtgagaagtgtgacatgaacatgcttctagatgtaaataccgagatttatccaatgggggaaaaagaaagattcttgatggctttgtctccttcacttgttttgaatactaaggatggttcagtgtcaattcaagacaagtttgaatacatcatgcacgggaggttatataacattacgaaacctcagcttgaaaagaaagaaaagaaagagaaacgttcagaatctcagcctgaagagaatgaggaatgttcaaaacctcagcttgaagtggaggtatatgcatcgtttggtgggcttcagttgatgctgaaaggacatgcttcccactgtgttaagtttgcagtcgatcagaagttgtttttacttataaggaaggttgaaagttgatgttggtgatgggcctgaaaagaaaaacatgctagcattaagttttaagtaatctgtataaaataaattgatttttcagaagaatgatttttgtgttttgaaagtttctctgaagttagttttttggtacattagataatttttaggcattctcttatatttattaaactgaaatatttttgccatatatatataaggaatcaacttacattaagaataactcttttagagtttcttttcattctcttcattcatttttaaaaatctaatgattgtaatgtcattaattttatctgttagattacaagaaaatgaagataaggatgaagtgtagctctaaaagagttagttagtgtaagttgatccccctttctctattttttaattggtaggaatctaaaatggtatcaaaagggttataatagtcgtatatcattttcaattaattaagttagacccttctctatatgtgttattaggaatctgtaatttatattttcattat

SEQ ID NO: 58399 - protein, 160 aa, Glycine max
  peptide (1)..(160): Ceres Seq. ID no. 15170636
  misc_feature (1)..(88): Homolog of NCBI NO: 32416516 NR Description: hypothetical protein [Neurospora crassa]
  misc_feature (1)..(158): Homolog of NCBI NO: 21358365 NR Description: CG11246-PA [Drosophila melanogaster]
  misc_feature (1)..(159): Homolog of NCBI NO: 17553210 NR Description: rna polymerase (17.0 kD) (3G6) [Caenorhabditis
  misc_feature (1)..(158): Homolog of NCBI NO: 1017823 NR Description: RNA polymerase II subunit
  misc_feature (1)..(159): Homolog of NCBI NO: 39591722 NR Description: Hypothetical protein CBG18189 [Caenorhabditis
  misc_feature (1)..(158): Homolog of NCBI NO: 14589953 NR Description: RNA polymerase II, polypeptide H [Homo sapiens]
  misc_feature (1)..(158): Homolog of NCBI NO: 31239495 NR Description: ENSANGP00000011232 [Anopheles gambiae]
  misc_feature (4)..(158): Homolog of NCBI NO: 15221759 NR Description: RNA polymerase II subunit -related [Arabidopsis
  misc_feature (4)..(158): Homolog of NCBI NO: 15231714 NR Description: expressed protein [Arabidopsis thaliana]
  misc_feature (1)..(158): Homolog of NCBI NO: 34897522 NR Description: putative RNA polymerase [Oryza sativa (japonica
MSELLFDDIFKVEKVDPDGKKYDKVSRIVARSEKCDMNMLLDVNTEIYPMGEKERFLMALSPSLVLNTKDGSVSIQDKFEYIMHGRLYNITKPQLEKKEKKEKRSESQPEENEECSKPQLEVEVYASFGGLQLMLKGHASHCVKFAVDQKLFLLIRKVES

SEQ ID NO: 58400 - protein, 124 aa, Glycine max
  peptide (1)..(124): Ceres Seq. ID no. 15170637
  misc_feature (1)..(52): Homolog of NCBI NO: 32416516 NR Description: hypothetical protein [Neurospora crassa]
  misc_feature (1)..(122): Homolog of NCBI NO: 21358365 NR Description: CG11246-PA [Drosophila melanogaster]
  misc_feature (1)..(123): Homolog of NCBI NO: 17553210 NR Description: rna polymerase (17.0 kD) (3G6) [Caenorhabditis
  misc_feature (1)..(122): Homolog of NCBI NO: 1017823 NR Description: RNA polymerase II subunit
  misc_feature (1)..(123): Homolog of NCBI NO: 39591722 NR Description: Hypothetical protein CBG18189 [Caenorhabditis
  misc_feature (1)..(122): Homolog of NCBI NO: 14589953 NR Description: RNA polymerase II, polypeptide H [Homo sapiens]
  misc_feature (1)..(122): Homolog of NCBI NO: 31239495 NR Description: ENSANGP00000011232 [Anopheles gambiae]
  misc_feature (1)..(122): Homolog of NCBI NO: 15221759 NR Description: RNA polymerase II subunit -related [Arabidopsis
  misc_feature (1)..(122): Homolog of NCBI NO: 15231714 NR Description: expressed protein [Arabidopsis thaliana]
  misc_feature (1)..(122): Homolog of NCBI NO: 34897522 NR Description: putative RNA polymerase [Oryza sativa (japonica
MNMLLDVNTEIYPMGEKERFLMALSPSLVLNTKDGSVSIQDKFEYIMHGRLYNITKPQLEKKEKKEKRSESQPEENEECSKPQLEVEVYASFGGLQLMLKGHASHCVKFAVDQKLFLLIRKVES

SEQ ID NO: 58401 - protein, 122 aa, Glycine max
  peptide (1)..(122): Ceres Seq. ID no. 15170638
  misc_feature (1)..(50): Homolog of NCBI NO: 32416516 NR Description: hypothetical protein [Neurospora crassa]
  misc_feature (1)..(120): Homolog of NCBI NO: 21358365 NR Description: CG11246-PA [Drosophila melanogaster]
  misc_feature (1)..(121): Homolog of NCBI NO: 17553210 NR Description: rna polymerase (17.0 kD) (3G6) [Caenorhabditis
  misc_feature (1)..(120): Homolog of NCBI NO: 1017823 NR Description: RNA polymerase II subunit
  misc_feature (1)..(121): Homolog of NCBI NO: 39591722 NR Description: Hypothetical protein CBG18189 [Caenorhabditis
  misc_feature (1)..(120): Homolog of NCBI NO: 14589953 NR Description: RNA polymerase II, polypeptide H [Homo sapiens]
  misc_feature (1)..(120): Homolog of NCBI NO: 31239495 NR Description: ENSANGP00000011232 [Anopheles gambiae]
  misc_feature (1)..(120): Homolog of NCBI NO: 15221759 NR Description: RNA polymerase II subunit -related [Arabidopsis
  misc_feature (1)..(120): Homolog of NCBI NO: 15231714 NR Description: expressed protein [Arabidopsis thaliana]
  misc_feature (1)..(120): Homolog of NCBI NO: 34897522 NR Description: putative RNA polymerase [Oryza sativa (japonica
MLLDVNTEIYPMGEKERFLMALSPSLVLNTKDGSVSIQDKFEYIMHGRLYNITKPQLEKKEKKEKRSESQPEENEECSKPQLEVEVYASFGGLQLMLKGHASHCVKFAVDQKLFLLIRKVES

SEQ ID NO: 58402 - DNA, 1640 bp, Glycine max
  misc_feature (1)..(1640): Ceres Seq. ID no. 15226295
acaaattgggtaccggkycccccctcgagtcagctacgtaggccccccccccgcagcagccaaaaaacccgaaaccaaaaacaacaaagttctattctattgaagagctccagcacgatggcttccctctctacattgctcccgaacccgaaccttatttccaagcacaacagcaccctttcttccactcacccatgtgcttattcctggaaaaacaaaaccccaaccagtaagggtcggttctccgtttcttgttcttcttcgtctcaagcatacgacgtcgtcgtagttggcgctggcgtcattggcttaaccatcgctcgccacttcctcgtttcttccgacctttctgtcgccgtagtcgataaggctgtcccttgttccggtgccactggcgcagggcagggacatctgtggatggtaaacaaaacccctgggagtgctacgtgggatcttgcgtcaaggagtcatcaactttggaagacgctggtacagagcatagaagagcaaggtttggatcctatggtggagttgggttggaaacagtctggaagcctattaattggtaggactgatgctgagtcagacgtgctaaaagggagggtgaaactactatgtgaggctgggttgaaagcagagtacctgtgtagcagtgatttgattaaagaggaacctgatctactggtggacaaagacagtgcagctgcatttctaccagatgactgccaaatagatgcttatcgcactgttgcatatattgaaaagactaacaggagttttgcatcaaaaggaagatatacagaattttatgatgacccagtgaaatgtttcatcaggtcagatagcaatggagaggtcaaagctgttcagacttccaagaacacaatatacagcaagaaagcagttatagttgcagctggttgttggactggttctttgatgcaggacttgtttagaaattggggaatggatttacatgttccagtaatgcccagaaagggtcacctacttgtggttcaaaatttcaatttccttcaaatgaatcatggcttgatggaggcagattatctcaaccatccaacaatttctggttcagaatcccctgatcatcaaaagaacttatctgtttcaatggtagcaagtatagatgcagcaggaaatcttcttcttgggagtagccgtgaatttgttggtttcaacaccaatttggacgagtctgttgtcagttacatatggaagcgagttggagaattctttcccaaattgaaaacacttccactttcagatctaagtgcaagtagaaaagtcagaataggattacgaccttacatgcctaatgggaagccagtgattgggcctgtgcctggcttgtcaaatgtgtaccttgcagctggacatgaagggagtggacttttaatggctttggggactgctgaaatgatcgttgagatggtgttgggatatccagcaaaagttgatagcacacctttcgctgtgcagaaagttcttgtttaaaatttgcacaactttggagaattctaagtaattagctctagttttatgtgaacaaggtattgaaattcatgcttaaataatttgctcataagctcttcttatattgtaataaaaagaaaacggtc

SEQ ID NO: 58403 - protein, 504 aa, Glycine max
  peptide (1)..(504): Ceres Seq. ID no. 15226296
  misc_feature (92)..(490): Pfam Name: FAD dependent oxidoreductase Pfam Description: FAD dependent oxidoreductase
  misc_feature (94)..(486): Homolog of NCBI NO: 23041848 NR Description: COG0665: Glycine/D-amino acid oxidases
  misc_feature (331)..(498): Homolog of NCBI NO: 21243282 NR Description: D-amino acid oxidase [Xanthomonas axonopodis pv.
  misc_feature (331)..(498): Homolog of NCBI NO: 21231851 NR Description: D-amino acid oxidase
  misc_feature (278)..(485): Homolog of NCBI NO: 21400731 NR Description: DAO, FAD dependent oxidoreductase [Bacillus
  misc_feature (259)..(485): Homolog of NCBI NO: 30020955 NR Description: Sarcosine oxidase beta subunit [Bacillus cereus
  misc_feature (331)..(497): Homolog of NCBI NO: 16263212 NR Description: putative oxidoreductase [Sinorhizobium meliloti]
  misc_feature (94)..(307): Homolog of NCBI NO: 16263212 NR Description: putative oxidoreductase [Sinorhizobium meliloti]
  misc_feature (325)..(501): Homolog of NCBI NO: 29828276 NR Description: putative secreted oxidoreductase
  misc_feature (93)..(313): Homolog of NCBI NO: 29828276 NR Description: putative secreted oxidoreductase
  misc_feature (65)..(500): Homolog of NCBI NO: 15238972 NR Description: FAD dependent oxidoreductase family [Arabidopsis
  misc_feature (6)..(6): Xaa is any aa, unknown or other
TNWVPXPPSSQLRRPPPRSSQKTRNQKQQSSILLKSSSTMASLSTLLPNPNLISKHNSTLSSTHPCAYSWKNKTPTSKGRFSVSCSSSSQAYDVVVVGAGVIGLTIARHFLVSSDLSVAVVDKAVPCSGATGAGQGHLWMVNKTPGSATWDLASRSHQLWKTLVQSIEEQGLDPMVELGWKQSGSLLIGRTDAESDVLKGRVKLLCEAGLKAEYLCSSDLIKEEPDLLVDKDSAAAFLPDDCQIDAYRTVAYIEKTNRSFASKGRYTEFYDDPVKCFIRSDSNGEVKAVQTSKNTIYSKKAVIVAAGCWTGSLMQDLFRNWGMDLHVPVMPRKGHLLVVQNFNFLQMNHGLMEADYLNHPTISGSESPDHQKNLSVSMVASIDAAGNLLLGSSREFVGFNTNLDESVVSYIWKRVGEFFPKLKTLPLSDLSASRKVRIGLRPYMPNGKPVIGPVPGLSNVYLAAGHEGSGLLMALGTAEMIVEMVLGYPAKVDSTPFAVQKVLV

SEQ ID NO: 58404 - protein, 465 aa, Glycine max
  peptide (1)..(465): Ceres Seq. ID no. 15226297
  misc_feature (53)..(451): Pfam Name: FAD dependent oxidoreductase Pfam Description: FAD dependent oxidoreductase
  misc_feature (55)..(447): Homolog of NCBI NO: 23041848 NR Description: COG0665: Glycine/D-amino acid oxidases
  misc_feature (292)..(459): Homolog of NCBI NO: 21243282 NR Description: D-amino acid oxidase [Xanthomonas axonopodis pv.
  misc_feature (292)..(459): Homolog of NCBI NO: 21231851 NR Description: D-amino acid oxidase
  misc_feature (239)..(446): Homolog of NCBI NO: 21400731 NR Description: DAO, FAD dependent oxidoreductase [Bacillus
  misc_feature (220)..(446): Homolog of NCBI NO: 30020955 NR Description: Sarcosine oxidase beta subunit [Bacillus cereus
  misc_feature (292)..(458): Homolog of NCBI NO: 16263212 NR Description: putative oxidoreductase [Sinorhizobium meliloti]
  misc_feature (55)..(268): Homolog of NCBI NO: 16263212 NR Description: putative oxidoreductase [Sinorhizobium meliloti]
  misc_feature (286)..(462): Homolog of NCBI NO: 29828276 NR Description: putative secreted oxidoreductase
  misc_feature (54)..(274): Homolog of NCBI NO: 29828276 NR Description: putative secreted oxidoreductase
  misc_feature (26)..(461): Homolog of NCBI NO: 15238972 NR Description: FAD dependent oxidoreductase family [Arabidopsis
MASLSTLLPNPNLISKHNSTLSSTHPCAYSWKNKTPTSKGRFSVSCSSSSQAYDVVVVGAGVIGLTIARHFLVSSDLSVAVVDKAVPCSGATGAGQGHLWMVNKTPGSATWDLASRSHQLWKTLVQSIEEQGLDPMVELGWKQSGSLLIGRTDAESDVLKGRVKLLCEAGLKAEYLCSSDLIKEEPDLLVDKDSAAAFLPDDCQIDAYRTVAYIEKTNRSFASKGRYTEFYDDPVKCFIRSDSNGEVKAVQTSKNTIYSKKAVIVAAGCWTGSLMQDLFRNWGMDLHVPVMPRKGHLLVVQNFNFLQMNHGLMEADYLNHPTISGSESPDHQKNLSVSMVASIDAAGNLLLGSSREFVGFNTNLDESVVSYIWKRVGEFFPKLKTLPLSDLSASRKVRIGLRPYMPNGKPVIGPVPGLSNVYLAAGHEGSGLLMALGTAEMIVEMVLGYPAKVDSTPFAVQKVLV

SEQ ID NO: 58405 - protein, 365 aa, Glycine max
  peptide (1)..(365): Ceres Seq. ID no. 15226298
  misc_feature (1)..(351): Pfam Name: FAD dependent oxidoreductase Pfam Description: FAD dependent oxidoreductase
  misc_feature (1)..(347): Homolog of NCBI NO: 23041848 NR Description: COG0665: Glycine/D-amino acid oxidases
  misc_feature (192)..(359): Homolog of NCBI NO: 21243282 NR Description: D-amino acid oxidase [Xanthomonas axonopodis pv.
  misc_feature (192)..(359): Homolog of NCBI NO: 21231851 NR Description: D-amino acid oxidase
  misc_feature (139)..(346): Homolog of NCBI NO: 21400731 NR Description: DAO, FAD dependent oxidoreductase [Bacillus
  misc_feature (120)..(346): Homolog of NCBI NO: 30020955 NR Description: Sarcosine oxidase beta subunit [Bacillus cereus
  misc_feature (192)..(358): Homolog of NCBI NO: 16263212 NR Description: putative oxidoreductase [Sinorhizobium meliloti]
  misc_feature (1)..(168): Homolog of NCBI NO: 16263212 NR Description: putative oxidoreductase [Sinorhizobium meliloti]
  misc_feature (186)..(362): Homolog of NCBI NO: 29828276 NR Description: putative secreted oxidoreductase
  misc_feature (1)..(174): Homolog of NCBI NO: 29828276 NR Description: putative secreted oxidoreductase
  misc_feature (1)..(361): Homolog of NCBI NO: 15238972 NR Description: FAD dependent oxidoreductase family [Arabidopsis
MVNKTPGSATWDLASRSHQLWKTLVQSIEEQGLDPMVELGWKQSGSLLIGRTDAESDVLKGRVKLLCEAGLKAEYLCSSDLIKEEPDLLVDKDSAAAFLPDDCQIDAYRTVAYIEKTNRSFASKGRYTEFYDDPVKCFIRSDSNGEVKAVQTSKNTIYSKKAVIVAAGCWTGSLMQDLFRNWGMDLHVPVMPRKGHLLVVQNFNFLQMNHGLMEADYLNHPTISGSESPDHQKNLSVSMVASIDAAGNLLLGSSREFVGFNTNLDESVVSYIWKRVGEFFPKLKTLPLSDLSASRKVRIGLRPYMPNGKPVIGPVPGLSNVYLAAGHEGSGLLMALGTAEMIVEMVLGYPAKVDSTPFAVQKVLV

SEQ ID NO: 58406 - DNA, 1450 bp, Glycine max
  misc_feature (1)..(1450): Ceres Seq. ID no. 13638029
ttgtaatacagatacctcctattaaaattttttcaggccatcttatatggagaaaaaaaaaattcagacatgaactagtgaaatttgcaggtttcattgaaataaaccatcaagggaaaactattgggtaatttgcaggtttcattaatctcaagggaagttagtgaaatttactagtcttaatgattgctcgaatgagtatggataccctatttgtgttgtgacaacagaccttcaaacactaaatgtattgtttgttgttcattattcgtaatagtttgcatggagttgacaaaaacactgatctcaaataggtattgcagattataactctagcagaagtcgtaagccaattgctgtggttggtgaagctgagatgagaccaacaagtactgcagattataactctagtagaagtcgtaagccaattgctgtggttggtgaagctgggttgagaccacctgatttccagcaagaccctaatcagaaagcagatgcaaatctacaatccaaaccacctcaagaaagagctgaagacaaggctagtagtagttcaggcacaaggccaaaagaagttgtggaatctgttcctgttcaaaatcaagcagctgcccaaaagttacttcagaagttaaatcacccaagtcagaatgatcgacatcataggggttggaaacataggggcaagggraaacaagaagatccagttgtattcactctggaagaatatgaaaacagaaaggcccagacaaagccttctattaaagactgggatctagatatcagtcgtgatgagcatcttgctagacagcttcaaaatcaactagaccttgaagattctcgggtaggaaggggtacttatgaagacaaggcacaagatattaggatgagtatgttcgcatatgaaagggattctgacagcagccatcaaatggggcaaggaggaaggggaaggggaaggggaagaggaaagggtagaggaagggggagaggaagacatggttaactatcatgattttggtttcaagtgtttcttgtgaagatgaaaatcttggcttcagaatatgttaagagttccttgggcaaaatccaacgacaagacaatcgatagcatagggttcagttttcaaggtgatcaacctttgtgctttctttgttaaatgtatcataaattgggtatttatattcttttctttccatatagattgatcagtgaacttatcaccacatttcttattttgaatatactgaagcagagttcgagtgcttataagctatagtttgactagcctccctgatattctcaactccaaccttaccgaatctygtcatccaataawatacttgccttgttttggggtaaaaaaaaaaaaaaaaaaaaaaaaaaaaaaaaaaaaaaggaaaaaaaaaaaaaaaaagaattcctgctgtttaaacacaataaagtggg

SEQ ID NO: 58407 - protein, 209 aa, Glycine max
  peptide (1)..(209): Ceres Seq. ID no. 15220397
  misc_feature (1)..(157): Homolog of NCBI NO: 34906132 NR Description: P0509B06.3 [Oryza sativa (japonica
  misc_feature (8)..(207): Homolog of NCBI NO: 18420083 NR Description: expressed protein [Arabidopsis thaliana]
  misc_feature (105)..(105): Xaa is any aa, unknown or other
MRPTSTADYNSSRSRKPIAVVGEAGLRPPDFQQDPNQKADANLQSKPPQERAEDKASSSSGTRPKEVVESVPVQNQAAAQKLLQKLNHPSQNDRHHRGWKHRGKXKQEDPVVFTLEEYENRKAQTKPSIKDWDLDISRDEHLARQLQNQLDLEDSRVGRGTYEDKAQDIRMSMFAYERDSDSSHQMGQGGRGRGRGRGKGRGRGRGRHG

SEQ ID NO: 58408 - DNA, 823 bp, Glycine max
  misc_feature (1)..(823): Ceres Seq. ID no. 13595723
atgctgtagcaaaccaaggtgtgaacactgaggttcataaatcagaaagttcagatcaacgggtaacaagtctgggcagagtgcctcctgcgaaaatgaccatgtcaaatgaaacccgacatgctctgccaattgccctgaagaaactttttcagactcacaaagtttgcagcttcaaattgatatgcgaaggattgcgcgaaatggcagtttccaaagctatgctttcaaagggagattctaaaatggctgtggatgcagctcacagtcttgatggtccccataatgagttgatggctgtcataagtgaagttgcatgcgaaatcaatggttcttatgtgctgaagtcatcacccgatgatccattcagggatgttgtaattgatatgctttgtggaagtggacccaatgccaagctgaagaaggctgagatacttgaagctgccagaagaaaactcggtagggaggtcgctagcaatgaatataccaaggtcatgagcgagttatgtgtgtcaaaaggttctgtttgggtcttgaaaagcggtgatggaagtaagtaagcaatgatccgaggtccccgaggattgaactgcccacctgctcatgaatggaagtcatactctgctttctcatgagactaccagagtttagtttattggtcatagtcattattctcaaatattcaaatcttttccaactttttagctttagataaggaataaatttaaagagaatattttttattgttcgaatcaaaagaaaaaggtagagaagttagatgaaagaaaacaggaatggacaaagattgccctgttagctatta

SEQ ID NO: 58409 - protein, 185 aa, Glycine max
  peptide (1)..(185): Ceres Seq. ID no. 13595724
  misc_feature (31)..(165): Homolog of NCBI NO: 9858778 NR Description: BAC19.10 [Lycopersicon esculentum]
  misc_feature (34)..(179): Homolog of NCBI NO: 15240503 NR Description: expressed protein [Arabidopsis thaliana]
AVANQGVNTEVHKSESSDQRVTSLGRVPPAKMTMSNETRHALPIALKKLFQTHKVCSFKLICEGLREMAVSKAMLSKGDSKMAVDAAHSLDGPHNELMAVISEVACEINGSYVLKSSPDDPFRDVVIDMLCGSGPNAKLKKAEILEAARRKLGREVASNEYTKVMSELCVSKGSVWVLKSGDGSK

SEQ ID NO: 58410 - protein, 154 aa, Glycine max
  peptide (1)..(154): Ceres Seq. ID no. 13595725
  misc_feature (1)..(134): Homolog of NCBI NO: 9858778 NR Description: BAC19.10 [Lycopersicon esculentum]
  misc_feature (3)..(148): Homolog of NCBI NO: 15240503 NR Description: expressed protein [Arabidopsis thaliana]
MTMSNETRHALPIALKKLFQTHKVCSFKLICEGLREMAVSKAMLSKGDSKMAVDAAHSLDGPHNELMAVISEVACEINGSYVLKSSPDDPFRDVVIDMLCGSGPNAKLKKAEILEAARRKLGREVASNEYTKVMSELCVSKGSVWVLKSGDGSK

SEQ ID NO: 58411 - protein, 152 aa, Glycine max
  peptide (1)..(152): Ceres Seq. ID no. 13595726
  misc_feature (1)..(132): Homolog of NCBI NO: 9858778 NR Description: BAC19.10 [Lycopersicon esculentum]
  misc_feature (1)..(146): Homolog of NCBI NO: 15240503 NR Description: expressed protein [Arabidopsis thaliana]
MSNETRHALPIALKKLFQTHKVCSFKLICEGLREMAVSKAMLSKGDSKMAVDAAHSLDGPHNELMAVISEVACEINGSYVLKSSPDDPFRDVVIDMLCGSGPNAKLKKAEILEAARRKLGREVASNEYTKVMSELCVSKGSVWVLKSGDGSK

SEQ ID NO: 58412 - DNA, 1137 bp, Glycine max
  misc_feature (1)..(1137): Ceres Seq. ID no. 15171460
gactcttcttccttcctaggatgctgctcatggcctctaccctccctttcccaacactttccattcttcctcacaaggcacactgcaaatcaacaccaaaacttcatccacttcctcacatctcttcaagattgaatgttgtttcaaaagatcctcccatattattagatcaatcttgcaatgttctaaaaaatgcctctctttccctcacatcaatcacactcccctttttattggaacaaaaggatgtggcacttgctgttgaaggggaatttgggatattggaaggaagaacatttgctctcatacaccccattgtgatggcttctttgttcttgtacaccttgtgggcaggatatttggggtggcagtggaggagagtgaggactattcagaatgagattaatgagttaaagaaacaagtgaagcctaccccagtcaccccagaagaagtgccaccaccatcagaaattgagctcaaaattcagcaacttactgaggagaggaaagagctgctaaaagggtcttacaaggataggcattataatgcaggatccatacttctaggatttggggtgcttgaggctgttggtggaggattgaacacttggattaggacagggaagctattcccaggcccacatttgtttggaggagcagctattgcagtgttgtgggcactttcagcagcattggtaccatcaatgcagagagggagtgaaacagcaagaagtcttcacattgctttgaatacattaaacgtgctgctatttgtgtcacagcttcccactggatttgacattttattgaaagtgtttgagttcacaaactggccttgaatgatgtttcccttagatgtactccaatttgcaacaccaaaatcaccccaatttcatagtttaagatcacactttttctttttcttgaataaggtgtagaagtgtgtttaattaaaagtgaaggagacgaatataaatgtcattgtaattaattgggtagttgtagagtagtgaaatcagattccaaaagtaacttcgggatttatggcaatgtaaatcgtttttattttcctcggtgacatgacagtggacccatcagccaatgttgtctatcttaatctgatactctctttacaag

SEQ ID NO: 58413 - protein, 278 aa, Glycine max
  peptide (1)..(278): Ceres Seq. ID no. 15171461
  misc_feature (166)..(272): Homolog of NCBI NO: 33864786 NR Description: conserved hypothetical protein [Synechococcus sp.
  misc_feature (166)..(271): Homolog of NCBI NO: 16330950 NR Description: hypothetical protein [Synechocystis sp. PCC 6803]
  misc_feature (166)..(271): Homolog of NCBI NO: 17230241 NR Description: hypothetical protein [Nostoc sp. PCC 7120]
  misc_feature (166)..(271): Homolog of NCBI NO: 23130190 NR Description: hypothetical protein [Nostoc punctiforme]
  misc_feature (98)..(142): Homolog of NCBI NO: 22299036 NR Description: ORF_ID:tll1493~hypothetical protein
  misc_feature (166)..(271): Homolog of NCBI NO: 22299036 NR Description: ORF_ID:tll1493~hypothetical protein
  misc_feature (10)..(278): Homolog of NCBI NO: 15228623 NR Description: expressed protein [Arabidopsis thaliana]
LFFLPRMLLMASTLPFPTLSILPHKAHCKSTPKLHPLPHISSRLNVVSKDPPILLDQSCNVLKNASLSLTSITLPFLLEQKDVALAVEGEFGILEGRTFALIHPIVMASLFLYTLWAGYLGWQWRRVRTIQNEINELKKQVKPTPVTPEEVPPPSEIELKIQQLTEERKELLKGSYKDRHYNAGSILLGFGVLEAVGGGLNTWIRTGKLFPGPHLFGGAAIAVLWALSAALVPSMQRGSETARSLHIALNTLNVLLFVSQLPTGFDILLKVFEFTNWP

SEQ ID NO: 58414 - protein, 272 aa, Glycine max
  peptide (1)..(272): Ceres Seq. ID no. 15171462
  misc_feature (160)..(266): Homolog of NCBI NO: 33864786 NR Description: conserved hypothetical protein [Synechococcus sp.
  misc_feature (160)..(265): Homolog of NCBI NO: 16330950 NR Description: hypothetical protein [Synechocystis sp. PCC 6803]
  misc_feature (160)..(265): Homolog of NCBI NO: 17230241 NR Description: hypothetical protein [Nostoc sp. PCC 7120]
  misc_feature (160)..(265): Homolog of NCBI NO: 23130190 NR Description: hypothetical protein [Nostoc punctiforme]
  misc_feature (92)..(136): Homolog of NCBI NO: 22299036 NR Description: ORF_ID:tll1493~hypothetical protein
  misc_feature (160)..(265): Homolog of NCBI NO: 22299036 NR Description: ORF_ID:tll1493~hypothetical protein
  misc_feature (4)..(272): Homolog of NCBI NO: 15228623 NR Description: expressed protein [Arabidopsis thaliana]
MLLMASTLPFPTLSILPHKAHCKSTPKLHPLPHISSRLNVVSKDPPILLDQSCNVLKNASLSLTSITLPFLLEQKDVALAVEGEFGILEGRTFALIHPIVMASLFLYTLWAGYLGWQWRRVRTIQNEINELKKQVKPTPVTPEEVPPPSEIELKIQQLTEERKELLKGSYKDRHYNAGSILLGFGVLEAVGGGLNTWIRTGKLFPGPHLFGGAAIAVLWALSAALVPSMQRGSETARSLHIALNTLNVLLFVSQLPTGFDILLKVFEFTNWP

SEQ ID NO: 58415 - protein, 269 aa, Glycine max
  peptide (1)..(269): Ceres Seq. ID no. 15171463
  misc_feature (157)..(263): Homolog of NCBI NO: 33864786 NR Description: conserved hypothetical protein [Synechococcus sp.
  misc_feature (157)..(262): Homolog of NCBI NO: 16330950 NR Description: hypothetical protein [Synechocystis sp. PCC 6803]
  misc_feature (157)..(262): Homolog of NCBI NO: 17230241 NR Description: hypothetical protein [Nostoc sp. PCC 7120]
  misc_feature (157)..(262): Homolog of NCBI NO: 23130190 NR Description: hypothetical protein [Nostoc punctiforme]
  misc_feature (89)..(133): Homolog of NCBI NO: 22299036 NR Description: ORF_ID:tll1493~hypothetical protein
  misc_feature (157)..(262): Homolog of NCBI NO: 22299036 NR Description: ORF_ID:tll1493~hypothetical protein
  misc_feature (1)..(269): Homolog of NCBI NO: 15228623 NR Description: expressed protein [Arabidopsis thaliana]
MASTLPFPTLSILPHKAHCKSTPKLHPLPHISSRLNVVSKDPPILLDQSCNVLKNASLSLTSITLPFLLEQKDVALAVEGEFGILEGRTFALIHPIVMASLFLYTLWAGYLGWQWRRVRTIQNEINELKKQVKPTPVTPEEVPPPSEIELKIQQLTEERKELLKGSYKDRHYNAGSILLGFGVLEAVGGGLNTWIRTGKLFPGPHLFGGAAIAVLWALSAALVPSMQRGSETARSLHIALNTLNVLLFVSQLPTGFDILLKVFEFTNWP

SEQ ID NO: 58416 - DNA, 1317 bp, Glycine max
  misc_feature (1)..(1317): Ceres Seq. ID no. 15176197
gggaaaaaagtatatgccaaactcattttatattctcttccaccttactccatcctcgatcatgtgaaaaaagtttattttaccaaaaattgtggttatggttctgactgaaaccagtttatgattggcgtatatgcaaaatttgaatggtctaataatgccgattaaatttccgagctaattcctgagattgtgttgttatgcattgttgcagatgaaggtgaaaaagcagaagaggcataggaagattttgacgttttacactgcttgcttcggttttcggaagcctttcaaggttctatgtgatggcacattcgtgcatcaccttcttgtgaatcgaataacccctgctgacacggccattggcaatgttctcagtgctacggtcaagctctacacaacaagatgtgttctagctgagttgaatcgactcggtagctcgtattctgaggctctggaggcagctcataaacttatagttgcaagatgtgagcatgaaaaatgtaagagtgcagatgcttgcatcatggaggttgttggaggaaaaaactctgagcatttctttgttgctagtcaggacactgacctgcggaaaaagttgcaagaggtacctggtgtgcctctcatatttggtcttagaaatgctcttttccttgaatctccatctgcatttcagcggcaatatgtcaaaacttctgaagaaggacgattgcatatgactcagaaggagtaccagatatttaaggatagggtaattaatagattgactggtgaggaagctaaccattccatttctcaaataatggaaaatgacgattcagaagatcagaccataaatgtgcaggcagtaaagaagggtattactgcaaggaatcatatggaaatcaaggataaacctcagttcaagagaaaaagagctaagggcccgaacccactttcatgcaagaagaagaaaagtgaaaaacaaaatattggtcctttgaaggaaacagatggagacaactcagtgaagagaagtaggaaaagaaagaggtcacagagacggaaaatgccaacagaaacaggcagttaggtggatcttttttatatatacagttacaaataggaatttttagagagcttcttgactttactgcttctgttgagtggagagaaaagcaagttttacttttgatccatgctgacatgggaggggaaagtgtatctagattagttgcatgttgaattttatactgtttctattttgctggcgatcgtatttttacttaactatggatacccaaatagccgttggtcacaaaattgcttctgatattt

SEQ ID NO: 58417 - protein, 285 aa, Glycine max
  peptide (1)..(285): Ceres Seq. ID no. 15176198
  misc_feature (53)..(150): Pfam Name: Protein of unknown function, DUF652 Pfam Description: Protein of unknown function, DUF652
  misc_feature (1)..(139): Homolog of NCBI NO: 17552478 NR Description: protein required for cell viability like (26.3
  misc_feature (1)..(159): Homolog of NCBI NO: 24580927 NR Description: CG17652-PA [Drosophila melanogaster]
  misc_feature (1)..(236): Homolog of NCBI NO: 6324577 NR Description: Protein required for cell viability; Yor004wp
  misc_feature (1)..(251): Homolog of NCBI NO: 31222167 NR Description: ENSANGP00000006696 [Anopheles gambiae]
  misc_feature (1)..(227): Homolog of NCBI NO: 19075891 NR Description: conserved protein; putative tRNA synthetase class
  misc_feature (1)..(252): Homolog of NCBI NO: 14150118 NR Description: hypothetical protein MGC14595 [Homo sapiens]
  misc_feature (1)..(251): Homolog of NCBI NO: 26335161 NR Description: unnamed protein product [Mus musculus]
  misc_feature (1)..(251): Homolog of NCBI NO: 21313442 NR Description: RIKEN cDNA D530033C11 [Mus musculus]
  misc_feature (1)..(270): Homolog of NCBI NO: 25408336 NR Description: hypothetical protein At2g34570 [imported] -
  misc_feature (1)..(284): Homolog of NCBI NO: 30686117 NR Description: expressed protein [Arabidopsis thaliana]
MKVKKQKRHRKILTFYTACFGFRKPFKVLCDGTFVHHLLVNRITPADTAIGNVLSATVKLYTTRCVLAELNRLGSSYSEALEAAHKLIVARCEHEKCKSADACIMEVVGGKNSEHFFVASQDTDLRKKLQEVPGVPLIFGLRNALFLESPSAFQRQYVKTSEEGRLHMTQKEYQIFKDRVINRLTGEEANHSISQIMENDDSEDQTINVQAVKKGITARNHMEIKDKPQFKRKRAKGPNPLSCKKKKSEKQNIGPLKETDGDNSVKRSRKRKRSQRRKMPTETGS

SEQ ID NO: 58418 - protein, 181 aa, Glycine max
  peptide (1)..(181): Ceres Seq. ID no. 15176199
  misc_feature (1)..(35): Homolog of NCBI NO: 17552478 NR Description: protein required for cell viability like (26.3
  misc_feature (1)..(55): Homolog of NCBI NO: 24580927 NR Description: CG17652-PA [Drosophila melanogaster]
  misc_feature (1)..(132): Homolog of NCBI NO: 6324577 NR Description: Protein required for cell viability; Yor004wp
  misc_feature (1)..(147): Homolog of NCBI NO: 31222167 NR Description: ENSANGP00000006696 [Anopheles gambiae]
  misc_feature (1)..(123): Homolog of NCBI NO: 19075891 NR Description: conserved protein; putative tRNA synthetase class
  misc_feature (1)..(148): Homolog of NCBI NO: 14150118 NR Description: hypothetical protein MGC14595 [Homo sapiens]
  misc_feature (1)..(147): Homolog of NCBI NO: 26335161 NR Description: unnamed protein product [Mus musculus]
  misc_feature (1)..(147): Homolog of NCBI NO: 21313442 NR Description: RIKEN cDNA D530033C11 [Mus musculus]
  misc_feature (1)..(166): Homolog of NCBI NO: 25408336 NR Description: hypothetical protein At2g34570 [imported] -
  misc_feature (1)..(180): Homolog of NCBI NO: 30686117 NR Description: expressed protein [Arabidopsis thaliana]
MEVVGGKNSEHFFVASQDTDLRKKLQEVPGVPLIFGLRNALFLESPSAFQRQYVKTSEEGRLHMTQKEYQIFKDRVINRLTGEEANHSISQIMENDDSEDQTINVQAVKKGITARNHMEIKDKPQFKRKRAKGPNPLSCKKKKSEKQNIGPLKETDGDNSVKRSRKRKRSQRRKMPTETGS

SEQ ID NO: 58419 - DNA, 1293 bp, Glycine max
  misc_feature (1)..(1293): Ceres Seq. ID no. 13594172
ttcatcctttcttcactcctaccaatatcaaatatggtatcaaccgaagcagatgcctcaacacaaaaggttctgttttgtgcctctgcaagtccaatgaatctgaatctcaagctccccaaccaggagatattcgtaaacaagaactgctagcccaaattgccatgcttcaaactcagaaagtttgtctcacagattattttgatgagagatctgaatacttaacccagtttggtgaagaagccaaggccgagtttgacaagattggaaaagatgccctccaaggattagatgaagctagtgccattgtatgcttcaacttttgagttaacaatgtagtgtatttttggtttttgcatttggaaagtctcaaaccatggtttggtaaaagtctgtctcttgtgccatacacactagccaatcaatcatcaagcacggcatggaggaaaatcgatatgtgaaaggtattttagtaatgaccgcttattgtgttcatttgtgtttggcagataacagcaaacatagagagccagatggtggagtttgaggaatctgcagaacttaacagacaagagattcaggagcatgaaaaagaactaggtgaatttgaagttcaaatggaggatggaagaaatgaagggctgttctttaagaacctcagaaggaggacacctgttgacaaatcaaaagccaaggaggaggcagagaaaatcaaagatgtagccagagaaaaagctggtagcagaacaaggaaaggcttttacctcctctttattggcctactgacctttgcaatagttgattctattgcctcatcatcaactgattggaaaaaaatagcagttcttggagctactcttgtggctttagtttctcagttcatctacgaacagaatgtcattagaaactggagaaaaaagaaagaccgacacagaagaggaaaataactgaagtttaattgttactgagattcaatgcaagtttctgtggaagacaaaaagtataatggatgttgcgtgatacaataaacccaagtggaagcttataacttgggcctgataacatcatgctaatttgctttggcatcaacaacagcagatattggtgatataactacaatcaccaaaatctgagtaactgggttaccaagtgatgctgatgaaacttttcacatcttatgtcaatacaaaaaaacatactcttattatcatactagtttttagacatgtacatttggaacctgacgtgtatctctgtgtcttatgtcatatatacaattaatgagaaactaat

SEQ ID NO: 58420 - protein, 137 aa, Glycine max
  peptide (1)..(137): Ceres Seq. ID no. 13594173
  misc_feature (1)..(130): Homolog of NCBI NO: 34908370 NR Description: P0529E05.11 [Oryza sativa (japonica
  misc_feature (1)..(134): Homolog of NCBI NO: 15232007 NR Description: expressed protein [Arabidopsis thaliana]
MVEFEESAELNRQEIQEHEKELGEFEVQMEDGRNEGLFFKNLRRRTPVDKSKAKEEAEKIKDVAREKAGSRTRKGFYLLFIGLLTFAIVDSIASSSTDWKKIAVLGATLVALVSQFIYEQNVIRNWRKKKDRHRRGK

SEQ ID NO: 58421 - protein, 109 aa, Glycine max
  peptide (1)..(109): Ceres Seq. ID no. 13594174
  misc_feature (1)..(102): Homolog of NCBI NO: 34908370 NR Description: P0529E05.11 [Oryza sativa (japonica
  misc_feature (1)..(106): Homolog of NCBI NO: 15232007 NR Description: expressed protein [Arabidopsis thaliana]
MEDGRNEGLFFKNLRRRTPVDKSKAKEEAEKIKDVAREKAGSRTRKGFYLLFIGLLTFAIVDSIASSSTDWKKIAVLGATLVALVSQFIYEQNVIRNWRKKKDRHRRGK

SEQ ID NO: 58422 - protein, 107 aa, Glycine max
  peptide (1)..(107): Ceres Seq. ID no. 13594175
  misc_feature (55)..(98): Homolog of NCBI NO: 34908370 NR Description: P0529E05.11 [Oryza sativa (japonica
  misc_feature (5)..(106): Homolog of NCBI NO: 15232007 NR Description: expressed protein [Arabidopsis thaliana]
HPFFTPTNIKYGINRSRCLNTKGSVLCLCKSNESESQAPQPGDIRKQELLAQIAMLQTQKVCLTDYFDERSEYLTQFGEEAKAEFDKIGKDALQGLDEASAIVCFNF

SEQ ID NO: 58423 - DNA, 1234 bp, Glycine max
  misc_feature (1)..(1234): Ceres Seq. ID no. 14308120
gatcagaagttagctgcataacccagagaaaagtaaacactgcaataggaagagttttcaaatggcagagggaaaaggtagagtttgtgtcactggaggcactgggttccttggttcatggatcatcaagagactccttgaagatggatatgctgttaacaccactattagatctgacccaggacgaaagagagatgttagcttcctcacaaacctaccaggcgcatccgaaaagctaaaaattttcaacgctgatctcagcgaccctgaaagttttgatccagcagttgagggatgtgttggaattttccacacagccacgccaattgattttgcagtgaacgagcctgaggaagtggtaaccaaaagagccatcgatggagcactaggcataatgaaagcaggcctaaaagcaaagacagtgaagagggttgtttacacttctagtggctccaccgtttccttcagcagccttgaagaaaaagatgtggtggatgagagtgtttggagtgatgtggatatgcttaggagtgtaaagccttttggttggtcctatgcagtttcaaaggtgttgactgagaaggctgtgcttgaatttggagaacataatgggttggaagttgcaactgttattgctccttttattgttggtccttttgtttgtcccaagcttcctgactctattgaaaaagctctgcttatggtgttgggcaaaaaagaagaaattggtgtcattcgttaccatatggtacatgtggatgatgtggctagagcacatatcttcctgcttgagcatcctaatccaaaagggagatataattgctcaccattcattgtacccattgaagagatgggtgaacttctttcagccaaatacccggaatttcaactaccaacagtagacgagctgaagggaattaaaggtgccaagcaaccacatttaacctccaagaaacttgttgatgctggttttgagttcaagtatagcttagaggacatgtttcaggatgcaattgaatgctgcaaggaaaagggttatctttaatcgaatttagccatgaagttgacaaaataaaattgatgcatatggttgttagtttgaactatttcagatcgatggcaatcatggctaatgacatatatgtacatctaggaatgcatgatgttactcgtaatagatgaatgaggaaaataatcttcttcgtttgtctaaatgctaaataaaccatttaac

SEQ ID NO: 58424 - protein, 327 aa, Glycine max
  peptide (1)..(327): Ceres Seq. ID no. 14308121
  misc_feature (10)..(179): Pfam Name: NAD dependent epimerase/dehydratase family Pfam Description: NAD dependent epimerase/dehydratase family
MAEGKGRVCVTGGTGFLGSWIIKRLLEDGYAVNTTIRSDPGRKRDVSFLTNLPGASEKLKIFNADLSDPESFDPAVEGCVGIFHTATPIDFAVNEPEEVVTKRAIDGALGIMKAGLKAKTVKRVVYTSSGSTVSFSSLEEKDVVDESVWSDVDMLRSVKPFGWSYAVSKVLTEKAVLEFGEHNGLEVATVIAPFIVGPFVCPKLPDSIEKALLMVLGKKEEIGVIRYHMVHVDDVARAHIFLLEHPNPKGRYNCSPFIVPIEEMGELLSAKYPEFQLPTVDELKGIKGAKQPHLTSKKLVDAGFEFKYSLEDMFQDAIECCKEKGYL

SEQ ID NO: 58425 - protein, 216 aa, Glycine max
  peptide (1)..(216): Ceres Seq. ID no. 14308122
  misc_feature (1)..(68): Pfam Name: NAD dependent epimerase/dehydratase family Pfam Description: NAD dependent epimerase/dehydratase family
MKAGLKAKTVKRVVYTSSGSTVSFSSLEEKDVVDESVWSDVDMLRSVKPFGWSYAVSKVLTEKAVLEFGEHNGLEVATVIAPFIVGPFVCPKLPDSIEKALLMVLGKKEEIGVIRYHMVHVDDVARAHIFLLEHPNPKGRYNCSPFIVPIEEMGELLSAKYPEFQLPTVDELKGIKGAKQPHLTSKKLVDAGFEFKYSLEDMFQDAIECCKEKGYL

SEQ ID NO: 58426 - protein, 174 aa, Glycine max
  peptide (1)..(174): Ceres Seq. ID no. 14308123
  misc_feature (1)..(90): Pfam Name: 3-beta hydroxysteroid dehydrogenase/isomerase family Pfam Description: 3-beta hydroxysteroid dehydrogenase/isomerase
MLRSVKPFGWSYAVSKVLTEKAVLEFGEHNGLEVATVIAPFIVGPFVCPKLPDSIEKALLMVLGKKEEIGVIRYHMVHVDDVARAHIFLLEHPNPKGRYNCSPFIVPIEEMGELLSAKYPEFQLPTVDELKGIKGAKQPHLTSKKLVDAGFEFKYSLEDMFQDAIECCKEKGYL

SEQ ID NO: 58427 - DNA, 768 bp, Glycine max
  misc_feature (1)..(768): Ceres Seq. ID no. 15226758
accggsccccmcctcgagtcagctacgtaggcccccccccgagagttgttgatatcactcactcctcaaagcgcagaacacacattaagaaacattatatctaatatccatcgagagagtgacacaaaaccctaaccaaaacgacaccgtgggatctgttcctcctctcagattttgctgcaatgggcaagaaaaagttagattcaaagtccgatcgcaaattcgaaaagaaggtccaattttattccaaggtgaaagatgctgttacctccttgagtgcccaaaagtctattactaagaaaaagaaaaagagcaaacaacaaaggcggcagaagaaattgaaggcatataatctatcttcacttttagagtcccttcctgaggtgaaggcatcaaagaaaccaggttgtgcgaatgacagcaaacttacgtgtaaatccaggcagatgctagtattgactgaaagagatcgaatttctgctgttctcaatgatcctaactttcaagcagatcccctgtctgccattcatcaatatatacagaagaaacaaccggtagtagaggaacaacccaagaaaaaagtgaacaaaaatggatccaggaagaagaaatcaaaggcttcaactgggctacaatctatggaaatgtagtgtcttgtgtggctgctataatgatcaactttttttgaaggtctttcaataattttactacttctgtaaaacattagattactcgaattatgaatgcaaataactatggtaattggtc

SEQ ID NO: 58428 - protein, 155 aa, Glycine max
  peptide (1)..(155): Ceres Seq. ID no. 15226759
  misc_feature (1)..(148): Homolog of NCBI NO: 18379269 NR Description: expressed protein [Arabidopsis thaliana]
MGKKKLDSKSDRKFEKKVQFYSKVKDAVTSLSAQKSITKKKKKSKQQRRQKKLKAYNLSSLLESLPEVKASKKPGCANDSKLTCKSRQMLVLTERDRISAVLNDPNFQADPLSAIHQYIQKKQPVVEEQPKKKVNKNGSRKKKSKASTGLQSMEM

SEQ ID NO: 58429 - DNA, 1121 bp, Glycine max
  misc_feature (1)..(1121): Ceres Seq. ID no. 12612090
tgagaaataaattgggcatttatgcatattttaggttacctcgttaccttagaagcctaaagaatgctgctgggagcaggagaaccaaactgttgtttctccctaacggaatgtcgagaagagagaagaatcggtctcaatatgaccagcggaagaagtttatatcttggacaattgaattacattttcactcaacagatattgttttactcgaccatgaagttgatgaaaatacaagcttttactccattctagagaagcacctcaagcctggtccttggaagaatcagctaaggcaattttgtgaagtccagctggattgtctaaagcttttcattcgtaaatacccgaaaggtcccaagtcatctttcaaggagttagatataaaagcgccaatcagacagcaattagcaaatatagtcattttggagtttcctgttgtttttgttttcttgccatctcacagaatcaattttgaagttattaaggatgtcaataccagcaaacataaatcactgcagaaagattgtgaagacaaccaattccctcaaggtttatcttttagggaggaagtgatagaagatgacaacaactctgcagatcctcaggtttttgatctcatgaagcaagtggaatcaagtttatcacatgaagtgatgacccaaaatatgagttctgagaaagcaccaaatgattccccagagaagtctctgtttgaaggagcttctgggggtaatctttcacattctttgacggaaaccaatgaactaaaattctctgaagatatgacatttgactttgatcaggatttgatggatttctatactgatatcttggatcaaacaaatcctggtgatctttttgattttgatggtgaattttcaaagaaaacagaaaatgaaatagatttaattggtactagtgatttattccctatgccagaggaattggaggaaggggaaattttagaataattggtagctataattcacttctgttgaatagttggagagaaaatgagaaaacattgacaacatcaatactattatatgttttgaggttgaggtccattgattcccataatgggtttgaagccgagtttccagttgtgtggacatgat

SEQ ID NO: 58430 - protein, 323 aa, Glycine max
  peptide (1)..(323): Ceres Seq. ID no. 12612091
  misc_feature (8)..(172): Homolog of NCBI NO: 20149643 NR Description: hypothetical protein FLJ20729 [Homo sapiens]
  misc_feature (8)..(172): Homolog of NCBI NO: 7021062 NR Description: unnamed protein product [Homo sapiens]
  misc_feature (8)..(172): Homolog of NCBI NO: 7021009 NR Description: unnamed protein product [Homo sapiens]
  misc_feature (65)..(323): Homolog of NCBI NO: 15220356 NR Description: unknown protein; protein id: At1g04940.1
  misc_feature (7)..(116): Homolog of NCBI NO: 25406822 NR Description: hypothetical protein [imported] - Arabidopsis
  misc_feature (118)..(323): Homolog of NCBI NO: 25406822 NR Description: hypothetical protein [imported] - Arabidopsis
RNKLGIYAYFRLPRYLRSLKNAAGSRRTKLLFLPNGMSRREKNRSQYDQRKKFISWTIELHFHSTDIVLLDHEVDENTSFYSILEKHLKPGPWKNQLRQFCEVQLDCLKLFIRKYPKGPKSSFKELDIKAPIRQQLANIVILEFPVVFVFLPSHRINFEVIKDVNTSKHKSLQKDCEDNQFPQGLSFREEVIEDDNNSADPQVFDLMKQVESSLSHEVMTQNMSSEKAPNDSPEKSLFEGASGGNLSHSLTETNELKFSEDMTFDFDQDLMDFYTDILDQTNPGDLFDFDGEFSKKTENEIDLIGTSDLFPMPEELEEGEILE

SEQ ID NO: 58431 - protein, 287 aa, Glycine max
  peptide (1)..(287): Ceres Seq. ID no. 12612092
  misc_feature (1)..(136): Homolog of NCBI NO: 20149643 NR Description: hypothetical protein FLJ20729 [Homo sapiens]
  misc_feature (1)..(136): Homolog of NCBI NO: 7021062 NR Description: unnamed protein product [Homo sapiens]
  misc_feature (1)..(136): Homolog of NCBI NO: 7021009 NR Description: unnamed protein product [Homo sapiens]
  misc_feature (29)..(287): Homolog of NCBI NO: 15220356 NR Description: unknown protein; protein id: At1g04940.1
  misc_feature (1)..(80): Homolog of NCBI NO: 25406822 NR Description: hypothetical protein [imported] - Arabidopsis
  misc_feature (82)..(287): Homolog of NCBI NO: 25406822 NR Description: hypothetical protein [imported] - Arabidopsis
MSRREKNRSQYDQRKKFISWTIELHFHSTDIVLLDHEVDENTSFYSILEKHLKPGPWKNQLRQFCEVQLDCLKLFIRKYPKGPKSSFKELDIKAPIRQQLANIVILEFPVVFVFLPSHRINFEVIKDVNTSKHKSLQKDCEDNQFPQGLSFREEVIEDDNNSADPQVFDLMKQVESSLSHEVMTQNMSSEKAPNDSPEKSLFEGASGGNLSHSLTETNELKFSEDMTFDFDQDLMDFYTDILDQTNPGDLFDFDGEFSKKTENEIDLIGTSDLFPMPEELEEGEILE

SEQ ID NO: 58432 - DNA, 1497 bp, Glycine max
  misc_feature (1)..(1497): Ceres Seq. ID no. 15170493
aaaattccgattccgccgctaacaaaccctaataaagcttaattagcttggactgttaacttgactcagcgcaccacaaccccagtgtggttcccggaaccggaaggtactggcttggctaggttagttgcagcagcaacaccacacaacagccaaggtagggccagtttgaatatttgctcaacacaagcgtttactagggttttttccgctgaaaagtacgtgtcccattcttgtcaacaaacgtggcgcgcttcttaacataagcacttgcaatggcggattcagagcgaatccaaaattcgtggatggcttcggatcaaactgcaattgaaatgagcggcgagggcacaggttccagggaatgctcttctctccctccgccgccgcaaaaaccattcaattctgatcaattgggaatcggagaacgagctttctccgccgccggcgccgccttcctctccgccattattgtcaatcccctcgacgttgccaagacaaggttgcaagcacaagcggcaggggtcgcatattctcatccactcagtaatatgaccagtagaatggcttgttttgggccaaatatgatatttgctgatttaaaatgttctccatcatgccaccgggctggattccagggcacagtgtccatttgtcctcccgagtgttttcgctacaaaggaacactagatgttatctacaaaattataaaacaggagggaatttctaggctatggagaggcacaaatgctggcctggctcttgcagtaccaactgtgggaatataccttccttgctatgacatactccgcaattggttggaggaattcacagctaaaaaggcaccaaccacaactacttatgtacctctagtagctggttcattggcacgctctctagcttgcactacttgctaccctattgaacttgctaaaactcgtatgcaggcatttaaagagactcaaattggtaaaaagcctcctggagtgatccagactctgctaggtgttgtttcaaatgtcaagagcacaaacactccacagaacagcttgcaaggttatcgtgttttgtggactggcatgggagctcaacttgcccgtgatgtacccttctctgctatttgttggtcgacacttgaaccgactagaagaaaacttcttggtttgattggaggtgatgatgccaatgcattgagtgttcttggggcaaattttggagctgggtttgttgcaggaaccttagcagctggagccacatgtccgctagatgttgtaaaaactcgaaggcagatagagagggatcctgttagggcattgaaaatgactacaagacagacactgatggaggtgtggagagatggaggcttgaaaggattgtttacaggtgttggtccacgagttggtcgagcaggcccctctgttggaattgtgatttcattttatgaagttgtaaagtttgttctacatcatcagtacacataatcatgattttctgcac

SEQ ID NO: 58433 - protein, 401 aa, Glycine max; identical to SEQ ID NO: 54591
  peptide (1)..(401): Ceres Seq. ID no. 15170494
  misc_feature (44)..(395): Homolog of NCBI NO: 6321696 NR Description: Hypothetical ORF; Ygr257cp [Saccharomyces
  misc_feature (20)..(150): Homolog of NCBI NO: 7486963 NR Description: hypothetical protein T13J8.50 - Arabidopsis
  misc_feature (88)..(340): Homolog of NCBI NO: 7486963 NR Description: hypothetical protein T13J8.50 - Arabidopsis
  misc_feature (147)..(399): Homolog of NCBI NO: 30690327 NR Description: mitochondrial carrier protein family [Arabidopsis
  misc_feature (127)..(400): Homolog of NCBI NO: 34904154 NR Description: P0417G05.20 [Oryza sativa (japonica
  misc_feature (37)..(399): Homolog of NCBI NO: 25408981 NR Description: hypothetical protein At2g46320 [imported] -
  misc_feature (37)..(399): Homolog of NCBI NO: 19310377 NR Description: At2g46320/F11C10.1 [Arabidopsis thaliana]
  misc_feature (37)..(399): Homolog of NCBI NO: 30690323 NR Description: mitochondrial carrier protein family [Arabidopsis
  misc_feature (23)..(400): Homolog of NCBI NO: 40253478 NR Description: putative mitochondrial carrier protein
  misc_feature (1)..(397): Homolog of NCBI NO: 18417093 NR Description: mitochondrial carrier protein family [Arabidopsis

SEQ ID NO: 58434 - protein, 390 aa, Glycine max; identical to SEQ ID NO: 54592
  peptide (1)..(390): Ceres Seq. ID no. 15170495
  misc_feature (33)..(384): Homolog of NCBI NO: 6321696 NR Description: Hypothetical ORF; Ygr257cp [Saccharomyces
  misc_feature (9)..(139): Homolog of NCBI NO: 7486963 NR Description: hypothetical protein T13J8.50 - Arabidopsis
  misc_feature (77)..(329): Homolog of NCBI NO: 7486963 NR Description: hypothetical protein T13J8.50 - Arabidopsis
  misc_feature (136)..(388): Homolog of NCBI NO: 30690327 NR Description: mitochondrial carrier protein family [Arabidopsis
  misc_feature (116)..(389): Homolog of NCBI NO: 34904154 NR Description: P0417G05.20 [Oryza sativa (japonica
  misc_feature (26)..(388): Homolog of NCBI NO: 25408981 NR Description: hypothetical protein At2g46320 [imported] -
  misc_feature (26)..(388): Homolog of NCBI NO: 19310377 NR Description: At2g46320/F11C10.1 [Arabidopsis thaliana]
  misc_feature (26)..(388): Homolog of NCBI NO: 30690323 NR Description: mitochondrial carrier protein family [Arabidopsis
  misc_feature (12)..(389): Homolog of NCBI NO: 40253478 NR Description: putative mitochondrial carrier protein
  misc_feature (1)..(386): Homolog of NCBI NO: 18417093 NR Description: mitochondrial carrier protein family [Arabidopsis

SEQ ID NO: 58435 - protein, 381 aa, Glycine max; identical to SEQ ID NO: 54593
  peptide (1)..(381): Ceres Seq. ID no. 15170496
  misc_feature (24)..(375): Homolog of NCBI NO: 6321696 NR Description: Hypothetical ORF; Ygr257cp [Saccharomyces
  misc_feature (1)..(130): Homolog of NCBI NO: 7486963 NR Description: hypothetical protein T13J8.50 - Arabidopsis
  misc_feature (68)..(320): Homolog of NCBI NO: 7486963 NR Description: hypothetical protein T13J8.50 - Arabidopsis
  misc_feature (127)..(379): Homolog of NCBI NO: 30690327 NR Description: mitochondrial carrier protein family [Arabidopsis
  misc_feature (107)..(380): Homolog of NCBI NO: 34904154 NR Description: P0417G05.20 [Oryza sativa (japonica
  misc_feature (17)..(379): Homolog of NCBI NO: 25408981 NR Description: hypothetical protein At2g46320 [imported] -
  misc_feature (17)..(379): Homolog of NCBI NO: 19310377 NR Description: At2g46320/F11C10.1 [Arabidopsis thaliana]
  misc_feature (17)..(379): Homolog of NCBI NO: 30690323 NR Description: mitochondrial carrier protein family [Arabidopsis
  misc_feature (3)..(380): Homolog of NCBI NO: 40253478 NR Description: putative mitochondrial carrier protein
  misc_feature (1)..(377): Homolog of NCBI NO: 18417093 NR Description: mitochondrial carrier protein family [Arabidopsis

SEQ ID NO: 58436 - DNA, 1325 bp, Glycine max
  misc_feature (1)..(1325): Ceres Seq. ID no. 15177592
actacttctccctctctccctctctaatagtaacagtaatagtaatatacataacataaccaatggaagcacgtgcaggagccaatcaacgtattgcaagaatctctgctcatcttcagccttcaaatttccaggaagggagtgatgttcttcttaagagaggtgagtgcagagcaaaaggtggggcacctggattcaaagttgcaattttgggggctgctggaggaattggtcaatccctttctttgctgatgaagatgaacccattggtttcagttcttcatctttatgatgttgtcaacacccctggtgtcacagctgatgttagccacatggacactggtgctgtggttcgtggctttctggggcagcaacaacttgagagtgcactcactggcatggacttggtaatcatacctgctggggtgccaaggaaacctgggatgacaagagatgatttatttaaaataaatgctggaattgtgaggaccctttctgaaggaattgccaagtgctgccccaatgcaattgtcaacttgattagtaatccagtgaattccacagttgctattgctgcggaggttttcaagaaagccggtacatatgatccaaagcgactactgggtgttacaacccttgatgttgtgagggcaaatacttttgtggcagagatacttggagttgatccaagagaggttgatgttccagtggttggaggtcatgctggagtcacaattttgcctcttttgtcacaggttaagcctcccagtagcttcactgcagaagaaactgaatacctgacaaatcgcatccaaaatggtggaactgaagttgttgaggcaaaagctggggctggttctgcaacactgtcaatggcatatgcagctgccaagtttgctggtgcatgcctccgtggcttaaaaggagaagctggggtagtggagtgtgcttttgttgattctcaggttacagaacttcccttctttgcaaccaaagtgcgtctaggtcgtgctggagcagaagaagtttatcaactgggtcccctgaatgagtatgaaaggattggattggaaaaagcaaagagagagttagcaggaagcatccagaagggtgtagagttcatcagaaaataaatgtgataaggaaaaactagtttttgtctcttatatttaaggaccatgtgtaatacttctctttgttcatagatttttttcttcttcttaagaatagtactctaaatttttggtgtcatccgtaattgctgatgataacggatttgacatcaataatctcagaaagatactaaaatatcagccttttgtact

SEQ ID NO: 58437 - protein, 356 aa, Glycine max
  peptide (1)..(356): Ceres Seq. ID no. 15177593
  misc_feature (190)..(354): Pfam Name: lactate/malate dehydrogenase, alpha/beta Pfam Description: lactate/malate dehydrogenase, alpha/beta
  misc_feature (8)..(356): Homolog of NCBI NO: 15227752 NR Description: malate dehydrogenase, glyoxysomal, putative
  misc_feature (5)..(356): Homolog of NCBI NO: 169977 NR Description: malate dehydrogenase
  misc_feature (1)..(356): Homolog of NCBI NO: 1346501 NR Description: MALATE DEHYDROGENASE, GLYOXYSOMAL PRECURSOR
  misc_feature (1)..(356): Homolog of NCBI NO: 3183079 NR Description: MALATE DEHYDROGENASE, GLYOXYSOMAL PRECURSOR
  misc_feature (1)..(355): Homolog of NCBI NO: 126894 NR Description: MALATE DEHYDROGENASE, GLYOXYSOMAL PRECURSOR
  misc_feature (1)..(356): Homolog of NCBI NO: 12644436 NR Description: Malate dehydrogenase 1, glyoxysomal precursor
  misc_feature (1)..(355): Homolog of NCBI NO: 1170897 NR Description: MALATE DEHYDROGENASE, GLYOXYSOMAL PRECURSOR
  misc_feature (1)..(356): Homolog of NCBI NO: 11133654 NR Description: Malate dehydrogenase 2, glyoxysomal precursor
  misc_feature (1)..(356): Homolog of NCBI NO: 16323157 NR Description: AT5g09660/F17I14_150 [Arabidopsis thaliana]
  misc_feature (1)..(356): Homolog of NCBI NO: 15242466 NR Description: malate dehydrogenase, glyoxysomal [Arabidopsis
MEARAGANQRIARISAHLQPSNFQEGSDVLLKRGECRAKGGAPGFKVAILGAAGGIGQSLSLLMKMNPLVSVLHLYDVVNTPGVTADVSHMDTGAVVRGFLGQQQLESALTGMDLVIIPAGVPRKPGMTRDDLFKINAGIVRTLSEGIAKCCPNAIVNLISNPVNSTVAIAAEVFKKAGTYDPKRLLGVTTLDVVRANTFVAEILGVDPREVDVPVVGGHAGVTILPLLSQVKPPSSFTAEETEYLTNRIQNGGTEVVEAKAGAGSATLSMAYAAAKFAGACLRGLKGEAGVVECAFVDSQVTELPFFATKVRLGRAGAEEVYQLGPLNEYERIGLEKAKRELAGSIQKGVEFIRK

SEQ ID NO: 58438 - protein, 293 aa, Glycine max
  peptide (1)..(293): Ceres Seq. ID no. 15177594
  misc_feature (127)..(291): Pfam Name: lactate/malate dehydrogenase, alpha/beta Pfam Description: lactate/malate dehydrogenase, alpha/beta
  misc_feature (1)..(293): Homolog of NCBI NO: 15227752 NR Description: malate dehydrogenase, glyoxysomal, putative
  misc_feature (1)..(293): Homolog of NCBI NO: 169977 NR Description: malate dehydrogenase
  misc_feature (1)..(293): Homolog of NCBI NO: 1346501 NR Description: MALATE DEHYDROGENASE, GLYOXYSOMAL PRECURSOR
  misc_feature (1)..(293): Homolog of NCBI NO: 3183079 NR Description: MALATE DEHYDROGENASE, GLYOXYSOMAL PRECURSOR
  misc_feature (1)..(292): Homolog of NCBI NO: 126894 NR Description: MALATE DEHYDROGENASE, GLYOXYSOMAL PRECURSOR
  misc_feature (1)..(293): Homolog of NCBI NO: 12644436 NR Description: Malate dehydrogenase 1, glyoxysomal precursor
  misc_feature (1)..(292): Homolog of NCBI NO: 1170897 NR Description: MALATE DEHYDROGENASE, GLYOXYSOMAL PRECURSOR
  misc_feature (1)..(293): Homolog of NCBI NO: 11133654 NR Description: Malate dehydrogenase 2, glyoxysomal precursor
  misc_feature (1)..(293): Homolog of NCBI NO: 16323157 NR Description: AT5g09660/F17I14_150 [Arabidopsis thaliana]
  misc_feature (1)..(293): Homolog of NCBI NO: 15242466 NR Description: malate dehydrogenase, glyoxysomal [Arabidopsis
MKMNPLVSVLHLYDVVNTPGVTADVSHMDTGAVVRGFLGQQQLESALTGMDLVIIPAGVPRKPGMTRDDLFKINAGIVRTLSEGIAKCCPNAIVNLISNPVNSTVAIAAEVFKKAGTYDPKRLLGVTTLDVVRANTFVAEILGVDPREVDVPVVGGHAGVTILPLLSQVKPPSSFTAEETEYLTNRIQNGGTEVVEAKAGAGSATLSMAYAAAKFAGACLRGLKGEAGVVECAFVDSQVTELPFFATKVRLGRAGAEEVYQLGPLNEYERIGLEKAKRELAGSIQKGVEFIRK

SEQ ID NO: 58439 - protein, 291 aa, Glycine max
  peptide (1)..(291): Ceres Seq. ID no. 15177595
  misc_feature (125)..(289): Pfam Name: lactate/malate dehydrogenase, alpha/beta Pfam Description: lactate/malate dehydrogenase, alpha/beta
  misc_feature (1)..(291): Homolog of NCBI NO: 15227752 NR Description: malate dehydrogenase, glyoxysomal, putative
  misc_feature (1)..(291): Homolog of NCBI NO: 169977 NR Description: malate dehydrogenase
  misc_feature (1)..(291): Homolog of NCBI NO: 1346501 NR Description: MALATE DEHYDROGENASE, GLYOXYSOMAL PRECURSOR
  misc_feature (1)..(291): Homolog of NCBI NO: 3183079 NR Description: MALATE DEHYDROGENASE, GLYOXYSOMAL PRECURSOR
  misc_feature (1)..(290): Homolog of NCBI NO: 126894 NR Description: MALATE DEHYDROGENASE, GLYOXYSOMAL PRECURSOR
  misc_feature (1)..(291): Homolog of NCBI NO: 12644436 NR Description: Malate dehydrogenase 1, glyoxysomal precursor
  misc_feature (1)..(290): Homolog of NCBI NO: 1170897 NR Description: MALATE DEHYDROGENASE, GLYOXYSOMAL PRECURSOR
  misc_feature (1)..(291): Homolog of NCBI NO: 11133654 NR Description: Malate dehydrogenase 2, glyoxysomal precursor
  misc_feature (1)..(291): Homolog of NCBI NO: 16323157 NR Description: AT5g09660/F17I14_150 [Arabidopsis thaliana]
  misc_feature (1)..(291): Homolog of NCBI NO: 15242466 NR Description: malate dehydrogenase, glyoxysomal [Arabidopsis
MNPLVSVLHLYDVVNTPGVTADVSHMDTGAVVRGFLGQQQLESALTGMDLVIIPAGVPRKPGMTRDDLFKINAGIVRTLSEGIAKCCPNAIVNLISNPVNSTVAIAAEVFKKAGTYDPKRLLGVTTLDVVRANTFVAEILGVDPREVDVPVVGGHAGVTILPLLSQVKPPSSFTAEETEYLTNRIQNGGTEVVEAKAGAGSATLSMAYAAAKFAGACLRGLKGEAGVVECAFVDSQVTELPFFATKVRLGRAGAEEVYQLGPLNEYERIGLEKAKRELAGSIQKGVEFIRK

SEQ ID NO: 58440 - DNA, 1421 bp, Glycine max
  misc_feature (1)..(1421): Ceres Seq. ID no. 15169191
gaactatccttctctctctctctcatccacgccccaaatcttagggttttcaccaaataaaacaaccccaattcctcgaactcttcgattcgattacccaaccccacacgctgattccacatcctccatgagatttggttgattggatcgtacgatggcggcgccgaggaatgtgacggcgacgagggacgaagagaagggcgaggacgatgattcgccctccgcgaagaagcccaaatcggagaggttcccgctgaacacgtgggaattcgccgtcgccgtcgccgtcttcttggtgttctccaccggcctcttctgcatttacctcaccatggcctcgggcgcttacaccaacctcaaactcccccgcaccctctccgatcttcgcctcctcaaggaacatctttcgacgtatgcgagtaaccaccctgcgcagttcattcttgggtactgctccacctacatcttcatgcaaactttcatgattcttgggacaatcttcatgtccctcttggctggggcgctttttggagttgtacgaggaatcctattggttgttttcaacgccactgcgggtgcatcttcctgtttctttttgtctaagttaattgggaggcctttggtttcttggttgtggcctgaaaagctaaggttcttccaagctgagattgcgaagcgtagggataggctgctgaattacatgctttttctgaggataaccccgacattgccgaatctgttcatcaatttggcgtctcccatcgttgatgttcccttccatatattcttttcggcgacattgattgggctcgttccagcctcttatattactgtcagagctggccttgctcttggggatctaaagtcaattaaggatctatatgattttaagaccttatcagtacttttcctcattggttttgtttccatagctccaacacttttgaagcggaagcgagtatatgaatgaaggtttcctggctcagcttgcacaatcaagtttgtcaaaaggcaagttacgtgatctaattagatgatgaagacagtggatcagagaagataatatttaagaaagatatccatgaaaaaggaatgtattgttattaacttaaacagtggcatatgctccattttattttctgtggtggagcctaagtttttttgtttcccttttcattttttgatcgtgtggagagagtaaggttagacttagctgattggtgtacaatcaattcagctaaggttacgaggctttgttggagcattaaattatgtattggccttgatgtcatcaggaagattgtggtgattgtttagcggtgctgtatgtatgtgcttcgcaccaaataggatctgactttttaccctgtagtattgctttattcaattataagatattatcgtagaaaatttcaagtatc

SEQ ID NO: 58441 - protein, 271 aa, Glycine max
  peptide (1)..(271): Ceres Seq. ID no. 15169192
  misc_feature (69)..(271): Homolog of NCBI NO: 7510437 NR Description: hypothetical protein Y71A12C.2 - Caenorhabditis
  misc_feature (41)..(267): Homolog of NCBI NO: 20558053 NR Description: similar to KIAA0033 [Homo sapiens]
  misc_feature (41)..(267): Homolog of NCBI NO: 436224 NR Description: KIAA0033 [Homo sapiens]
  misc_feature (1)..(267): Homolog of NCBI NO: 34858940 NR Description: similar to D7Ertd743e protein [Rattus norvegicus]
  misc_feature (33)..(267): Homolog of NCBI NO: 28850296 NR Description: similar to Mus musculus (Mouse). Colon RCB-0549 cDNA, RIKEN full-length enriched library, clone:G430121L01 N-terminal nucleophile aminohydrolases (Ntn hydrolases) structure
  misc_feature (1)..(173): Homolog of NCBI NO: 25407510 NR Description: hypothetical protein AT4g09580 [imported] -
  misc_feature (12)..(268): Homolog of NCBI NO: 21593768 NR Description: unknown [Arabidopsis thaliana]
  misc_feature (12)..(268): Homolog of NCBI NO: 18414967 NR Description: expressed protein [Arabidopsis thaliana]
  misc_feature (3)..(271): Homolog of NCBI NO: 18409951 NR Description: expressed protein [Arabidopsis thaliana]
  misc_feature (1)..(271): Homolog of NCBI NO: 30681121 NR Description: expressed protein [Arabidopsis thaliana]
MAAPRNVTATRDEEKGEDDDSPSAKKPKSERFPLNTWEFAVAVAVFLVFSTGLFCIYLTMASGAYTNLKLPRTLSDLRLLKEHLSTYASNHPAQFILGYCSTYIFMQTFMILGTIFMSLLAGALFGVVRGILLVVFNATAGASSCFFLSKLIGRPLVSWLWPEKLRFFQAEIAKRRDRLLNYMLFLRITPTLPNLFINLASPIVDVPFHIFFSATLIGLVPASYITVRAGLALGDLKSIKDLYDFKTLSVLFLIGFVSIAPTLLKRKRVYE

SEQ ID NO: 58442 - protein, 212 aa, Glycine max
  peptide (1)..(212): Ceres Seq. ID no. 15169193
  misc_feature (10)..(212): Homolog of NCBI NO: 7510437 NR Description: hypothetical protein Y71A12C.2 - Caenorhabditis
  misc_feature (1)..(208): Homolog of NCBI NO: 20558053 NR Description: similar to KIAA0033 [Homo sapiens]
  misc_feature (1)..(208): Homolog of NCBI NO: 436224 NR Description: KIAA0033 [Homo sapiens]
  misc_feature (1)..(208): Homolog of NCBI NO: 34858940 NR Description: similar to D7Ertd743e protein [Rattus norvegicus]
  misc_feature (1)..(208): Homolog of NCBI NO: 28850296 NR Description: similar to Mus musculus (Mouse). Colon RCB-0549 cDNA, RIKEN full-length enriched library, clone:G430121L01 N-terminal nucleophile aminohydrolases (Ntn hydrolases) structure
  misc_feature (1)..(114): Homolog of NCBI NO: 25407510 NR Description: hypothetical protein AT4g09580 [imported] -
  misc_feature (1)..(209): Homolog of NCBI NO: 21593768 NR Description: unknown [Arabidopsis thaliana]
  misc_feature (1)..(209): Homolog of NCBI NO: 18414967 NR Description: expressed protein [Arabidopsis thaliana]
  misc_feature (1)..(212): Homolog of NCBI NO: 18409951 NR Description: expressed protein [Arabidopsis thaliana]
  misc_feature (1)..(212): Homolog of NCBI NO: 30681121 NR Description: expressed protein [Arabidopsis thaliana]
MASGAYTNLKLPRTLSDLRLLKEHLSTYASNHPAQFILGYCSTYIFMQTFMILGTIFMSLLAGALFGVVRGILLVVFNATAGASSCFFLSKLIGRPLVSWLWPEKLRFFQAEIAKRRDRLLNYMLFLRITPTLPNLFINLASPIVDVPFHIFFSATLIGLVPASYITVRAGLALGDLKSIKDLYDFKTLSVLFLIGFVSIAPTLLKRKRVYE

SEQ ID NO: 58443 - protein, 166 aa, Glycine max
  peptide (1)..(166): Ceres Seq. ID no. 15169194
  misc_feature (1)..(166): Homolog of NCBI NO: 7510437 NR Description: hypothetical protein Y71A12C.2 - Caenorhabditis
  misc_feature (1)..(162): Homolog of NCBI NO: 20558053 NR Description: similar to KIAA0033 [Homo sapiens]
  misc_feature (1)..(162): Homolog of NCBI NO: 436224 NR Description: KIAA0033 [Homo sapiens]
  misc_feature (1)..(162): Homolog of NCBI NO: 34858940 NR Description: similar to D7Ertd743e protein [Rattus norvegicus]
  misc_feature (1)..(162): Homolog of NCBI NO: 28850296 NR Description: similar to Mus musculus (Mouse). Colon RCB-0549 cDNA, RIKEN full-length enriched library, clone:G430121L01 N-terminal nucleophile aminohydrolases (Ntn hydrolases) structure
  misc_feature (1)..(68): Homolog of NCBI NO: 25407510 NR Description: hypothetical protein AT4g09580 [imported] -
  misc_feature (1)..(163): Homolog of NCBI NO: 21593768 NR Description: unknown [Arabidopsis thaliana]
  misc_feature (1)..(163): Homolog of NCBI NO: 18414967 NR Description: expressed protein [Arabidopsis thaliana]
  misc_feature (1)..(166): Homolog of NCBI NO: 18409951 NR Description: expressed protein [Arabidopsis thaliana]
  misc_feature (1)..(166): Homolog of NCBI NO: 30681121 NR Description: expressed protein [Arabidopsis thaliana]
MQTFMILGTIFMSLLAGALFGVVRGILLVVFNATAGASSCFFLSKLIGRPLVSWLWPEKLRFFQAEIAKRRDRLLNYMLFLRITPTLPNLFINLASPIVDVPFHIFFSATLIGLVPASYITVRAGLALGDLKSIKDLYDFKTLSVLFLIGFVSIAPTLLKRKRVYE

SEQ ID NO: 58444 - DNA, 1307 bp, Glycine max
  misc_feature (1)..(1307): Ceres Seq. ID no. 15225111
ccgggccccccctcgagtcagctacgtaggcccccccccaatatctctcttcctttctctttattctctcacacaaaataatggacaagaagcttggcaacacgtctcatgatcctgaagtgagaaaggggccatggacaatggaagaagacttaatcttgatcacctatattgccaatcacggggaaggggtttggaactctttggccaaggctgctggacttaaacgtaccggaaagagttgccggctccggtggctaaactacctccgtcctgatgttagaagagggaatattacacccgaggaacagcttttgatcatggaacttcatgcaaagtggggaaacaggtggtccaaaattgccaagcatctacccggaaggactgataatgagattaagaactactggaggacaaggatccagaagcacctcaagcaagcttccagcagcttccagcaacagagtagtaattctgagataatttatcatccccaagcttgcactagccaagtgtccaccatggcgcagcccatagaaacctattctccacccagttatcaaggaatgttagatccattttcaattcagttcccaacaaatcctcatcattctagttgttgtaccaatgacgacgacaacaacaactattggagcatggaggatatctggtcaatgcaattagccaattactgaacgggaattaaacctataaacataaatataaataatatatataaacctaagtgtctaagttccataaattaagctgtagtctctggcttaaaacatgttaggtttgtttatacaagtagttggatgtttggagtacttcggtcttttgcgtaccatcaatatttaagaactaagttagttatgttccgtaacttatgggctcttaattaaactatatctgcacaaaattatatatatatcaaatgtgatggtatgtggactataaaaagatatggttgagaaccacaaactttgaaacttcgaataatatattgccagtgacagtcttgttgatttgttatagcaagtcctattttcttaatcattgctttgttttaacgtacctagatttcataacttttgtctttgtctcaagctgaacctaatgatgatagtaatattaacttattgtataggggtatttcataggataaaaaatgatgtgcaattacgtgtagaccaaatattacttgatgacagatggataaatatttcrwrwwrwwmmaaaaawrrgaattcctgccagccckgrggatccactarttctasagcggmcgccaccgcassggakct

SEQ ID NO: 58445 - protein, 204 aa, Glycine max
  peptide (1)..(204): Ceres Seq. ID no. 15225112
  misc_feature (16)..(63): Pfam Name: Myb-like DNA-binding domain Pfam Description: Myb-like DNA-binding domain
  misc_feature (14)..(203): Homolog of NCBI NO: 15232137 NR Description: myb family transcription factor [Arabidopsis
  misc_feature (1)..(200): Homolog of NCBI NO: 13537530 NR Description: LhMyb [Lilium hybrid division I]
  misc_feature (8)..(203): Homolog of NCBI NO: 2280528 NR Description: ATMYB3 [Arabidopsis thaliana]
  misc_feature (8)..(203): Homolog of NCBI NO: 30688935 NR Description: myb family transcription factor (ATMYB3)
  misc_feature (6)..(203): Homolog of NCBI NO: 15242669 NR Description: myb family transcription factor [Arabidopsis
  misc_feature (6)..(203): Homolog of NCBI NO: 21554734 NR Description: putative transcription factor MYB24 [Arabidopsis
  misc_feature (1)..(203): Homolog of NCBI NO: 82311 NR Description: myb-related protein 340 - garden snapdragon
  misc_feature (1)..(203): Homolog of NCBI NO: 82306 NR Description: myb-related protein 305 - garden snapdragon
  misc_feature (1)..(203): Homolog of NCBI NO: 40643882 NR Description: MYB8 protein [Gerbera hybrid cv. 'Terra Regina']
  misc_feature (1)..(203): Homolog of NCBI NO: 7438338 NR Description: Myb26 protein - garden pea
MDKKLGNTSHDPEVRKGPWTMEEDLILITYIANHGEGVWNSLAKAAGLKRTGKSCRLRWLNYLRPDVRRGNITPEEQLLIMELHAKWGNRWSKIAKHLPGRTDNEIKNYWRTRIQKHLKQASSSFQQQSSNSEIIYHPQACTSQVSTMAQPIETYSPPSYQGMLDPFSIQFPTNPHHSSCCTNDDDNNNYWSMEDIWSMQLANY

SEQ ID NO: 58446 - protein, 184 aa, Glycine max
  peptide (1)..(184): Ceres Seq. ID no. 15225113
  misc_feature (1)..(43): Pfam Name: Myb-like DNA-binding domain Pfam Description: Myb-like DNA-binding domain
  misc_feature (1)..(183): Homolog of NCBI NO: 15232137 NR Description: myb family transcription factor [Arabidopsis
  misc_feature (1)..(180): Homolog of NCBI NO: 13537530 NR Description: LhMyb [Lilium hybrid division I]
  misc_feature (1)..(183): Homolog of NCBI NO: 2280528 NR Description: ATMYB3 [Arabidopsis thaliana]
  misc_feature (1)..(183): Homolog of NCBI NO: 30688935 NR Description: myb family transcription factor (ATMYB3)
  misc_feature (1)..(183): Homolog of NCBI NO: 15242669 NR Description: myb family transcription factor [Arabidopsis
  misc_feature (1)..(183): Homolog of NCBI NO: 21554734 NR Description: putative transcription factor MYB24 [Arabidopsis
  misc_feature (1)..(183): Homolog of NCBI NO: 82311 NR Description: myb-related protein 340 - garden snapdragon
  misc_feature (1)..(183): Homolog of NCBI NO: 82306 NR Description: myb-related protein 305 - garden snapdragon
  misc_feature (1)..(183): Homolog of NCBI NO: 40643882 NR Description: MYB8 protein [Gerbera hybrid cv. 'Terra Regina']
  misc_feature (1)..(183): Homolog of NCBI NO: 7438338 NR Description: Myb26 protein - garden pea
MEEDLILITYIANHGEGVWNSLAKAAGLKRTGKSCRLRWLNYLRPDVRRGNITPEEQLLIMELHAKWGNRWSKIAKHLPGRTDNEIKNYWRTRIQKHLKQASSSFQQQSSNSEIIYHPQACTSQVSTMAQPIETYSPPSYQGMLDPFSIQFPTNPHHSSCCTNDDDNNNYWSMEDIWSMQLANY

SEQ ID NO: 58447 - protein, 124 aa, Glycine max
  peptide (1)..(124): Ceres Seq. ID no. 15225114
  misc_feature (1)..(123): Homolog of NCBI NO: 15232137 NR Description: myb family transcription factor [Arabidopsis
  misc_feature (1)..(120): Homolog of NCBI NO: 13537530 NR Description: LhMyb [Lilium hybrid division I]
  misc_feature (1)..(123): Homolog of NCBI NO: 2280528 NR Description: ATMYB3 [Arabidopsis thaliana]
  misc_feature (1)..(123): Homolog of NCBI NO: 30688935 NR Description: myb family transcription factor (ATMYB3)
  misc_feature (1)..(123): Homolog of NCBI NO: 15242669 NR Description: myb family transcription factor [Arabidopsis
  misc_feature (1)..(123): Homolog of NCBI NO: 21554734 NR Description: putative transcription factor MYB24 [Arabidopsis
  misc_feature (1)..(123): Homolog of NCBI NO: 82311 NR Description: myb-related protein 340 - garden snapdragon
  misc_feature (1)..(123): Homolog of NCBI NO: 82306 NR Description: myb-related protein 305 - garden snapdragon
  misc_feature (1)..(123): Homolog of NCBI NO: 40643882 NR Description: MYB8 protein [Gerbera hybrid cv. 'Terra Regina']
  misc_feature (1)..(123): Homolog of NCBI NO: 7438338 NR Description: Myb26 protein - garden pea
MELHAKWGNRWSKIAKHLPGRTDNEIKNYWRTRIQKHLKQASSSFQQQSSNSEIIYHPQACTSQVSTMAQPIETYSPPSYQGMLDPFSIQFPTNPHHSSCCTNDDDNNNYWSMEDIWSMQLANY

SEQ ID NO: 58448 - DNA, 1251 bp, Glycine max
  misc_feature (1)..(1251): Ceres Seq. ID no. 12582076
cagctacgtaggccccccccccgagcagcatttgaactctactatcgttttctccgttctttctcaaagccgcactcaactttctaaaaccaaatcggtttgaatcctcatttcccgcctctcactggaaagcagcaaaatcacctttctctactatctatctgttccttttgtactctgagtgggtagaagtcatggtaaggctcactgctgacttgatttggaaaagccctcatttcttcaacacgattaaagagcgtgagttagatctcagaggcaacaagatagctgtaattgaaaacttgggtgctactgaggaccaatttgacacaatagacttatctgacaatgagattgttaaacttgaaaatgtaccatatcttaaccggttgggcacaatgctcattaacaacaacaggattactagaattaatcccaacatcggagagttcttgccaaatttacacactctagttctcacaaacaacagaattgtaaacttggttgaaattgatcctttagcatctcttccaaagctgcacttccttagtctgctggacaacaatattacaaagaaacctaattacaggctttatgttattaacaacctgaaatccctccgggtgttagatttcaagaaagtgaaaaataaggaacggttggaagccaaaaacttgtttgcttcaaaagaagttatagaagagattcaaaggacaccagcaaaaacattttcaactggtgaaactccaaatgtttctgaagcgattgaggaacaacagacgcccaaagtggttgctcctacacctgagcaaattattgctattaaggctgccattgtgaattctcagactcttgaagaggttgctaggcttgaaaaggcattgaagtctggtcagcttcctgcagatttaaaaagcttgagtgataatataatgttggataatgttgatgaaaaacatgaggacatgattcatgatgatagaagtcaagctgatggcaaatcgaatgatacacaagagcagagaaatactgattctgcttcaatggaacaggattagagtgaaaaggttttcaaatagtcctagcactgtggacttctttaatgtcaggttctagagttagactcttggtaattttccatgaggtgtactttatgaatcttccattacttgagaactggatgtttcaatttcactcgtggtgaatcattgctttggcctttatatatgtgttaaattgtattatttttac

SEQ ID NO: 58449 - protein, 287 aa, Glycine max
  peptide (1)..(287): Ceres Seq. ID no. 12582077
  misc_feature (1)..(236): Homolog of NCBI NO: 31981942 NR Description: U2 small nuclear ribonucleoprotein polypeptide
  misc_feature (1)..(236): Homolog of NCBI NO: 7021537 NR Description: U2 small nuclear ribonucleoprotein A' [Mus
  misc_feature (1)..(236): Homolog of NCBI NO: 31077178 NR Description: U2 small nuclear ribonucleoprotein A' (U2
  misc_feature (1)..(257): Homolog of NCBI NO: 34857187 NR Description: similar to U2 small nuclear ribonucleoprotein
  misc_feature (1)..(259): Homolog of NCBI NO: 7263962 NR Description: bA395L14.12 (novel protein similar to small
  misc_feature (1)..(259): Homolog of NCBI NO: 31077165 NR Description: U2 small nuclear ribonucleoprotein A' (U2
  misc_feature (1)..(259): Homolog of NCBI NO: 4507121 NR Description: u2 small nuclear ribonucleoprotein polypeptide A'
  misc_feature (1)..(275): Homolog of NCBI NO: 3955033 NR Description: U2 snRNP-specific A' protein [Salmo salar]
  misc_feature (1)..(239): Homolog of NCBI NO: 15218274 NR Description: putative U2 small nuclear ribonucleoprotein A (U2
  misc_feature (1)..(239): Homolog of NCBI NO: 322619 NR Description: U2 snRNP protein A' - Arabidopsis thaliana
MVRLTADLIWKSPHFFNTIKERELDLRGNKIAVIENLGATEDQFDTIDLSDNEIVKLENVPYLNRLGTMLINNNRITRINPNIGEFLPNLHTLVLTNNRIVNLVEIDPLASLPKLHFLSLLDNNITKKPNYRLYVINNLKSLRVLDFKKVKNKERLEAKNLFASKEVIEEIQRTPAKTFSTGETPNVSEAIEEQQTPKVVAPTPEQIIAIKAAIVNSQTLEEVARLEKALKSGQLPADLKSLSDNIMLDNVDEKHEDMIHDDRSQADGKSNDTQEQRNTDSASMEQD

SEQ ID NO: 58450 - protein, 219 aa, Glycine max
  peptide (1)..(219): Ceres Seq. ID no. 12582078
  misc_feature (1)..(168): Homolog of NCBI NO: 31981942 NR Description: U2 small nuclear ribonucleoprotein polypeptide
  misc_feature (1)..(168): Homolog of NCBI NO: 7021537 NR Description: U2 small nuclear ribonucleoprotein A' [Mus
  misc_feature (1)..(168): Homolog of NCBI NO: 31077178 NR Description: U2 small nuclear ribonucleoprotein A' (U2
  misc_feature (1)..(189): Homolog of NCBI NO: 34857187 NR Description: similar to U2 small nuclear ribonucleoprotein
  misc_feature (1)..(191): Homolog of NCBI NO: 7263962 NR Description: bA395L14.12 (novel protein similar to small
  misc_feature (1)..(191): Homolog of NCBI NO: 31077165 NR Description: U2 small nuclear ribonucleoprotein A' (U2
  misc_feature (1)..(191): Homolog of NCBI NO: 4507121 NR Description: u2 small nuclear ribonucleoprotein polypeptide A'
  misc_feature (1)..(207): Homolog of NCBI NO: 3955033 NR Description: U2 snRNP-specific A' protein [Salmo salar]
  misc_feature (1)..(171): Homolog of NCBI NO: 15218274 NR Description: putative U2 small nuclear ribonucleoprotein A (U2
  misc_feature (1)..(171): Homolog of NCBI NO: 322619 NR Description: U2 snRNP protein A' - Arabidopsis thaliana
MLINNNRITRINPNIGEFLPNLHTLVLTNNRIVNLVEIDPLASLPKLHFLSLLDNNITKKPNYRLYVINNLKSLRVLDFKKVKNKERLEAKNLFASKEVIEEIQRTPAKTFSTGETPNVSEAIEEQQTPKVVAPTPEQIIAIKAAIVNSQTLEEVARLEKALKSGQLPADLKSLSDNIMLDNVDEKHEDMIHDDRSQADGKSNDTQEQRNTDSASMEQD

SEQ ID NO: 58451 - DNA, 1538 bp, Glycine max
  misc_feature (1)..(1538): Ceres Seq. ID no. 14315261
actctcaaatttgtgtcagccaacattcccatcatcttgttaactttatccaaaccatcacaaaaaccacaacatttccagcttctgctactgtgaagcacaccctgtaccatgaccatccatctgctatatctgccaaatatcgcctacacaccctgcagcaatcacctcactgctcatcaccaccacaaagccgccttcaatctcaattctcaactaaacaacacctctcctttcacagtgagcaccacctcctcaatggatagttcccaacacctcagccccacattccacgtcttgaaccaaaatagctgcacaacattctctgagacaaattttcaccatcctcaacctttgtggcattgacattcttgccactaaactaaccttctcactggaatttaccattcttgagtggatcactctctagagttgcatgaaccactatcaatggaactttccacttctgagaaaaataagagagatgtggcaaacctttgctgctaggatggaggagaatgagagaagaacaagggaaagggtttagggcttatatttctgaaatttatagttcatgttcttggtgaggcttttgtttttaccacaaatgatcatggaggtagtataaagtgctactggaatcaccttgtttctccaaacttgtggacattgtctgagtcattcatgattgtagttgtttataactctcatgttagattttgaaaaagacatgcttttaagttttcaccttgacttcaaccttatatctcattgcctgttgttggtttttggtaatatatattttttcacagattccaacaaatcctgctggtcttattgaatatagggcacatccattctggatccagaaatattgccctactcacgaacatgatggtactacacgctgttgcagctgcgagcgaatggaggttagtatggatggagtatatttatctgataaaatattatttgtagtcttgcctagggaaaggtggatgaacttgtacagtgcaaagtgaatagaatgtaaaattttctctcatcatatgcagtcccaagaggcaggatatattgctcttaaggatggccggaagctctgcttagagtgtcttgattctgctatcatggatactaatgaatgccaaccccttcatgctgatatacaaagattttatgaaagcctaaatatgaaactggaccaacaaattccacttctattggttgaaagacaagcactgaatgaagcaagagaaggagagaagaatgtaagagaaaatgcatttccatctgtttgctataaatataataactgataatttgattgtaatgacattcagctgtctgacatactaggaactattttttggtgtttggcattgtctgcacaactaatattaaaagtaaaataatgccttttgctattgatagctttgagaatgctatctctgatgaaggtttttctattcgtgatatgttaaccacatgctatgtcaaatagttcaatatgactagcacgatatagaaaatttaagagt

SEQ ID NO: 58452 - protein, 88 aa, Glycine max
  peptide (1)..(88): Ceres Seq. ID no. 14315262
  misc_feature (8)..(72): Homolog of NCBI NO: 10177891 NR Description: emb|CAB16816.1|~gene_id:MPI7.6~similar to unknown
  misc_feature (1)..(72): Homolog of NCBI NO: 15240018 NR Description: hypothetical protein [Arabidopsis thaliana]
  misc_feature (1)..(73): Homolog of NCBI NO: 25407769 NR Description: hypothetical protein AT4g36860 [imported] -
  misc_feature (1)..(73): Homolog of NCBI NO: 22329212 NR Description: expressed protein [Arabidopsis thaliana]
  misc_feature (1)..(74): Homolog of NCBI NO: 15225574 NR Description: expressed protein [Arabidopsis thaliana]
  misc_feature (1)..(71): Homolog of NCBI NO: 29893641 NR Description: hypothetical protein [Oryza sativa (japonica
  misc_feature (1)..(73): Homolog of NCBI NO: 17065046 NR Description: Unknown protein [Arabidopsis thaliana]
  misc_feature (1)..(73): Homolog of NCBI NO: 25518496 NR Description: hypothetical protein T29M8.14 - Arabidopsis
  misc_feature (1)..(73): Homolog of NCBI NO: 15221983 NR Description: expressed protein [Arabidopsis thaliana]
  misc_feature (1)..(73): Homolog of NCBI NO: 29367477 NR Description: disease resistance-like protein
MQSQEAGYIALKDGRKLCLECLDSAIMDTNECQPLHADIQRFYESLNMKLDQQIPLLLVERQALNEAREGEKNVRENAFPSVCYKYNN

SEQ ID NO: 58453 - protein, 87 aa, Glycine max
  peptide (1)..(87): Ceres Seq. ID no. 14315263
SQICVSQHSHHLVNFIQTITKTTTFPASATVKHTLYHDHPSAISAKYRLHTLQQSPHCSSPPQSRLQSQFSTKQHLSFHSEHHLLNG

SEQ ID NO: 58454 - protein, 84 aa, Glycine max
  peptide (1)..(84): Ceres Seq. ID no. 14315264
MTIHLLYLPNIAYTPCSNHLTAHHHHKAAFNLNSQLNNTSPFTVSTTSSMDSSQHLSPTFHVLNQNSCTTFSETNFHHPQPLWH

SEQ ID NO: 58455 - DNA, 660 bp, Glycine max
  misc_feature (1)..(660): Ceres Seq. ID no. 14308791
tctctctctcagaattttctcctctctccgattccttttattaattggagttttctcgctcctttttctttccctgaaaacatttcatcttcgtattgatgtcggaaaagggtcggccacttcccaaatttggtgaatgggatgtcaatgatccagcctcagctgaggggttcacagtgatttttaataaggccagggatgagaaaaagacaggtggcaacccagagtcaccaggaaagactgctactgatcctcatagcaaacctgcagtagagcctggcaaaactcagactaaaaaatggttttgctgcatgcaaaacccttctgccgaatcatagcatagcaatggttgctcctgtgaaaagcctgaacagaagaacaatgtttatgtgtaactagcgtcacagtattttctcaaagataagagctgtagagccataagcgaattctacggaatttatattttgtgatgtaaaagtgagctgcaatgggggaaagaaaagaagacagactattatttatgtgtgtgtatcaatgttgtggtttattattaggagccagggttgcttcctgttttgccttgtcttgcgctatgagctagagcgttgcttgtcacattgtattgcttgtattatgaaacaaatcctattttatgaaccc

SEQ ID NO: 58456 - protein, 79 aa, Glycine max
  peptide (1)..(79): Ceres Seq. ID no. 14308792
  misc_feature (1)..(72): Pfam Name: Nitrate-induced NOI protein Pfam Description: Nitrate-induced NOI protein
  misc_feature (4)..(70): Homolog of NCBI NO: 18408633 NR Description: expressed protein [Arabidopsis thaliana]
  misc_feature (3)..(58): Homolog of NCBI NO: 9758092 NR Description: gene_id:MNF13.20~pir||T02212~similar to unknown
  misc_feature (3)..(71): Homolog of NCBI NO: 38344338 NR Description: OSJNBa0058K23.20 [Oryza sativa (japonica
  misc_feature (2)..(70): Homolog of NCBI NO: 15227879 NR Description: expressed protein [Arabidopsis thaliana]
  misc_feature (1)..(70): Homolog of NCBI NO: 15242695 NR Description: hypothetical protein [Arabidopsis thaliana]
  misc_feature (3)..(71): Homolog of NCBI NO: 18422009 NR Description: expressed protein [Arabidopsis thaliana]
  misc_feature (1)..(47): Homolog of NCBI NO: 28188707 NR Description: unknown protein [Arabidopsis thaliana]
  misc_feature (1)..(79): Homolog of NCBI NO: 7489791 NR Description: NOI protein, nitrate-induced - maize
  misc_feature (1)..(79): Homolog of NCBI NO: 7489517 NR Description: NOI protein - rice
  misc_feature (1)..(79): Homolog of NCBI NO: 15241050 NR Description: NOI protein, nitrate-induced [Arabidopsis
MSEKGRPLPKFGEWDVNDPASAEGFTVIFNKARDEKKTGGNPESPGKTATDPHSKPAVEPGKTQTKKWFCCMQNPSAES

SEQ ID NO: 58457 - protein, 44 aa, Glycine max
  peptide (1)..(44): Ceres Seq. ID no. 14308793
LSLRIFSSLRFLLLIGVFSLLFLSLKTFHLRIDVGKGSATSQIW

SEQ ID NO: 58458 - protein, 42 aa, Glycine max
  peptide (1)..(42): Ceres Seq. ID no. 14308794
MLWFIIRSQGCFLFCLVLRYELERCLSHCIACIMKQILFYEP

SEQ ID NO: 58459 - DNA, 1169 bp, Glycine max
  misc_feature (1)..(1169): Ceres Seq. ID no. 15225928
gggaagctaaatccagaacatgatactatctttctcaaagtgcaaatttccgacaaggatggttcttgtaggaatgtatactttccttttgacatatacacagacactcccattgatgttgcaatggagatggtgaaggaattggagatcacagatttgaagccttctgatattgcaaatatgattgaaggagagatwtskgtrccgggccccccctcragtcagctactaggcccccccccttatgatcgggcagaaatttttttcataaatcataaactgtgcagcctccttgtgttgatcaacctttgcaatgaatcattaaaaaatgttccaaagtaatgggacacgccaatactcaatgggacacaccaatactcaccaagaacataaattctataaaaaaagttgccactttgcaatgaaagttacatgctatatttgaactagaattgcaaataatgaggtatgcaattatggatccatatcacctgtcctcattgactatcccaccacttaaaatatgctagcattaatactataataacacaatttatcagctgacactttaatgttcgcttttctttggtgagagtagaactagaggtatggaatggggacaggtgatcttcatccctatgattatgtttacaattatgaattaattattcttttcattttatttatgtatggaatgatgctgcttgccattattttttacctgttttatttgctctagagctttaaatatctaactgcttttgttcatagacgcttcttcaataatagagaacaatttagtttgtatcaaccgtgactatgcagattttatcatatctgtcatgtggatcttttgctggataaacttgcaacataattttattgatttttggatacaggcttttacgagactcgaattgcatattatgcatggaggggtgctaaaggataccgcttttctgccatccctgattattagagtgttataataaatgaacaatagagctataccttgaaaacttaaattatcaaatttggttgcaacttgtatgcttcaatggcacagatcgaagtaaatggtagaaaagtgtaatcgtactactactcgatacttaagtaattaattcggtgacaaaatttataaaaattatgcattgaagtttgagttc

SEQ ID NO: 58460 - protein, 113 aa, Glycine max
  peptide (1)..(113): Ceres Seq. ID no. 15225929
  misc_feature (10)..(77): Homolog of NCBI NO: 15229843 NR Description: protein kinase family [Arabidopsis thaliana]
  misc_feature (6)..(71): Homolog of NCBI NO: 34393547 NR Description: mitogen activated protein kinase kinase
  misc_feature (6)..(71): Homolog of NCBI NO: 7489544 NR Description: probable mitogen activated protein kinase - rice
  misc_feature (6)..(71): Homolog of NCBI NO: 34393548 NR Description: putative mitogen activated protein kinase kinase
  misc_feature (1)..(66): Homolog of NCBI NO: 15241127 NR Description: protein kinase family [Arabidopsis thaliana]
  misc_feature (1)..(66): Homolog of NCBI NO: 15237174 NR Description: protein kinase family [Arabidopsis thaliana]
  misc_feature (1)..(66): Homolog of NCBI NO: 27542950 NR Description: mitogen-activated protein kinase [Triticum
  misc_feature (1)..(71): Homolog of NCBI NO: 30693513 NR Description: MAP kinase [Arabidopsis thaliana]
  misc_feature (1)..(71): Homolog of NCBI NO: 11358499 NR Description: MAP kinase - Arabidopsis thaliana
  misc_feature (1)..(71): Homolog of NCBI NO: 14194095 NR Description: AT3g51630/T18N14_10 [Arabidopsis thaliana]
  misc_feature (66)..(66): Xaa is any aa, unknown or other
  misc_feature (67)..(67): Xaa is any aa, unknown or other
  misc_feature (68)..(68): Xaa is any aa, unknown or other
  misc_feature (73)..(73): Xaa is any aa, unknown or other
GKLNPEHDTIFLKVQISDKDGSCRNVYFPFDIYTDTPIDVAMEMVKELEITDLKPSDIANMIEGEXXXPGPPXSQLLGPPPYDRAEIFFINHKLCSLLVLINLCNESLKNVPK

SEQ ID NO: 58461 - protein, 72 aa, Glycine max
  peptide (1)..(72): Ceres Seq. ID no. 15225930
  misc_feature (1)..(36): Homolog of NCBI NO: 15229843 NR Description: protein kinase family [Arabidopsis thaliana]
  misc_feature (1)..(30): Homolog of NCBI NO: 34393547 NR Description: mitogen activated protein kinase kinase
  misc_feature (1)..(30): Homolog of NCBI NO: 7489544 NR Description: probable mitogen activated protein kinase - rice
  misc_feature (1)..(30): Homolog of NCBI NO: 34393548 NR Description: putative mitogen activated protein kinase kinase
  misc_feature (1)..(25): Homolog of NCBI NO: 15241127 NR Description: protein kinase family [Arabidopsis thaliana]
  misc_feature (1)..(25): Homolog of NCBI NO: 15237174 NR Description: protein kinase family [Arabidopsis thaliana]
  misc_feature (1)..(25): Homolog of NCBI NO: 27542950 NR Description: mitogen-activated protein kinase [Triticum
  misc_feature (1)..(30): Homolog of NCBI NO: 30693513 NR Description: MAP kinase [Arabidopsis thaliana]
  misc_feature (1)..(30): Homolog of NCBI NO: 11358499 NR Description: MAP kinase - Arabidopsis thaliana
  misc_feature (1)..(30): Homolog of NCBI NO: 14194095 NR Description: AT3g51630/T18N14_10 [Arabidopsis thaliana]
  misc_feature (25)..(25): Xaa is any aa, unknown or other
  misc_feature (26)..(26): Xaa is any aa, unknown or other
  misc_feature (27)..(27): Xaa is any aa, unknown or other
  misc_feature (32)..(32): Xaa is any aa, unknown or other
MEMVKELEITDLKPSDIANMIEGEXXXPGPPXSQLLGPPPYDRAEIFFINHKLCSLLVLINLCNESLKNVPK

SEQ ID NO: 58462 - protein, 70 aa, Glycine max
  peptide (1)..(70): Ceres Seq. ID no. 15225931
  misc_feature (1)..(34): Homolog of NCBI NO: 15229843 NR Description: protein kinase family [Arabidopsis thaliana]
  misc_feature (1)..(28): Homolog of NCBI NO: 34393547 NR Description: mitogen activated protein kinase kinase
  misc_feature (1)..(28): Homolog of NCBI NO: 7489544 NR Description: probable mitogen activated protein kinase - rice
  misc_feature (1)..(28): Homolog of NCBI NO: 34393548 NR Description: putative mitogen activated protein kinase kinase
  misc_feature (1)..(23): Homolog of NCBI NO: 15241127 NR Description: protein kinase family [Arabidopsis thaliana]
  misc_feature (1)..(23): Homolog of NCBI NO: 15237174 NR Description: protein kinase family [Arabidopsis thaliana]
  misc_feature (1)..(23): Homolog of NCBI NO: 27542950 NR Description: mitogen-activated protein kinase [Triticum
  misc_feature (1)..(28): Homolog of NCBI NO: 30693513 NR Description: MAP kinase [Arabidopsis thaliana]
  misc_feature (1)..(28): Homolog of NCBI NO: 11358499 NR Description: MAP kinase - Arabidopsis thaliana
  misc_feature (1)..(28): Homolog of NCBI NO: 14194095 NR Description: AT3g51630/T18N14_10 [Arabidopsis thaliana]
  misc_feature (23)..(23): Xaa is any aa, unknown or other
  misc_feature (24)..(24): Xaa is any aa, unknown or other
  misc_feature (25)..(25): Xaa is any aa, unknown or other
  misc_feature (30)..(30): Xaa is any aa, unknown or other
MVKELEITDLKPSDIANMIEGEXXXPGPPXSQLLGPPPYDRAEIFFINHKLCSLLVLINLCNESLKNVPK

SEQ ID NO: 58463 - DNA, 2029 bp, Glycine max
  misc_feature (1)..(2029): Ceres Seq. ID no. 14310803
ggttttcaatttggggaaataaaaatagggggaaatattctggagagagtgtgtagaaaatatggttgtcgatgatatgacgctgtgcatcatcgtcggctatggaggttcctcttcttctcgtttctccgatgcttatcccaaaaggggtttgatggaggggagatatagtggggattgatatgatgaaggtgtttataaggttgttttgttgaattgtgtttttgggatggcaatattgtacgaaccagcaataaaactcatccaccagatgagctagcatgggcgattcttgtcttacttctatgtcaatggagaatcaccacccctccacgctcttgtcaatggactcaagtgcatcttctcacgaggaactggatttggagatgaatcgccaaatcatactcactcgtccgcccgatattaacctgcccctctccgccgagcgcagcccgccgccacagccgtggaattctgagccctgtgatattctggatgttggtcttggtactcaaggctacgagactgagagttttcttaatctgcccaaagctggtaggaagtgcgcgaagcgtgttgatagcatatggggtgcttggtttttcttcagtttttactttaaacctgctttgaacgataagtccaaggccaagattgtcagggacagcaatggtgtctcagggttcgataagtctgatctgaagctggatgttttcatggttcagcacgacatggaaaacatgtacatgtgggttttcaaggagaggccggagaacgcacttggtaagatgcagctgaggagttacatgaatgggcattctcgccaaggggagcgcccgtttccgttcagtgttgacaagggttttgctcggtcccacaggatgcagcgaaagcattatagaggactatcaaaccctcagtgcgtgcatggtgttgaggttgtttttgcacccagtctgatgaccctggatgaggatgatcgaaaaaggtggatagaactcactggccgggatttgaatttcacaatcccacctgaagcaagtgatttcagttcatggagaaatcttcccaacacggactttgagcttgagagaccacctcccccaatcaagagtggtcctaatgcacacccgaagaagctgcttaatggatccggacttaatggatctggacttcatctatctaaccacagtaatggtgatgggttggacctctctcctgtcagcagcaaaaaaaggaaggactttttccctcatggaaatgaagaagaatgttacttggctgttaatcctccatctgatcgtataccagatatagaaatgcacccaaccgagccacactggttgaatgacttcagcggggtgataaagagtgtttatggacctgttacagctgcaaaaactatttatgaggatgaacaaggttacttgattattatcagtctgccctttgtagatcttccaagtgtgaaagtttcatggaggaacactctgactcacggtatcataaaggtttcttgtatgagcacatctcggaagcctctcatcaagagacatgataggacattcaagcttacagatccatcgtcagagcactgcccccctggagagttcgtccgagaaatccctctttcaactcgaattcctgaagatgccaacatagaagcatactacgatgggccaggatcagtgcttgagatcctggtgccaaaacatcgcgtgggaccagaagagcatgaagtccgggtttgcctccgccctcatctgggagggaatgatctcaagttaacttgagataggcacttaaaaaaatttgttagggattccggtatggttcgtatgtcattgtttttctaactttgtaccatacagtgttatttgcaatagaattgtgtctcttatgtttgtctctagcaattttagctcactgactgccctggttcttttgttccggtgcatctgtattatgcttttgattgtaagcagtattgaacagctagttctcataatttataagaaattaccaaatc

SEQ ID NO: 58464 - protein, 503 aa, Glycine max
  peptide (1)..(503): Ceres Seq. ID no. 14310804
  misc_feature (14)..(503): Homolog of NCBI NO: 34908142 NR Description: putative SLT1 protein (ion homeostasis related
  misc_feature (31)..(503): Homolog of NCBI NO: 34895866 NR Description: P0009G03.13 [Oryza sativa (japonica
  misc_feature (11)..(496): Homolog of NCBI NO: 11280862 NR Description: hypothetical protein T22P11.70 - Arabidopsis
  misc_feature (1)..(496): Homolog of NCBI NO: 18413934 NR Description: expressed protein [Arabidopsis thaliana]
  misc_feature (1)..(493): Homolog of NCBI NO: 18399669 NR Description: expressed protein [Arabidopsis thaliana]
  misc_feature (11)..(503): Homolog of NCBI NO: 18404463 NR Description: SLT1 protein [Arabidopsis thaliana]
  misc_feature (1)..(503): Homolog of NCBI NO: 11611667 NR Description: SLT1 protein [Nicotiana tabacum]
MGDSCLTSMSMENHHPSTLLSMDSSASSHEELDLEMNRQIILTRPPDINLPLSAERSPPPQPWNSEPCDILDVGLGTQGYETESFLNLPKAGRKCAKRVDSIWGAWFFFSFYFKPALNDKSKAKIVRDSNGVSGFDKSDLKLDVFMVQHDMENMYMWVFKERPENALGKMQLRSYMNGHSRQGERPFPFSVDKGFARSHRMQRKHYRGLSNPQCVHGVEVVFAPSLMTLDEDDRKRWIELTGRDLNFTIPPEASDFSSWRNLPNTDFELERPPPPIKSGPNAHPKKLLNGSGLNGSGLHLSNHSNGDGLDLSPVSSKKRKDFFPHGNEEECYLAVNPPSDRIPDIEMHPTEPHWLNDFSGVIKSVYGPVTAAKTIYEDEQGYLIIISLPFVDLPSVKVSWRNTLTHGIIKVSCMSTSRKPLIKRHDRTFKLTDPSSEHCPPGEFVREIPLSTRIPEDANIEAYYDGPGSVLEILVPKHRVGPEEHEVRVCLRPHLGGNDLKLT

SEQ ID NO: 58465 - protein, 495 aa, Glycine max
  peptide (1)..(495): Ceres Seq. ID no. 14310805
  misc_feature (6)..(495): Homolog of NCBI NO: 34908142 NR Description: putative SLT1 protein (ion homeostasis related
  misc_feature (23)..(495): Homolog of NCBI NO: 34895866 NR Description: P0009G03.13 [Oryza sativa (japonica
  misc_feature (3)..(488): Homolog of NCBI NO: 11280862 NR Description: hypothetical protein T22P11.70 - Arabidopsis
  misc_feature (1)..(488): Homolog of NCBI NO: 18413934 NR Description: expressed protein [Arabidopsis thaliana]
  misc_feature (1)..(485): Homolog of NCBI NO: 18399669 NR Description: expressed protein [Arabidopsis thaliana]
  misc_feature (3)..(495): Homolog of NCBI NO: 18404463 NR Description: SLT1 protein [Arabidopsis thaliana]
  misc_feature (1)..(495): Homolog of NCBI NO: 11611667 NR Description: SLT1 protein [Nicotiana tabacum]
MSMENHHPSTLLSMDSSASSHEELDLEMNRQIILTRPPDINLPLSAERSPPPQPWNSEPCDILDVGLGTQGYETESFLNLPKAGRKCAKRVDSIWGAWFFFSFYFKPALNDKSKAKIVRDSNGVSGFDKSDLKLDVFMVQHDMENMYMWVFKERPENALGKMQLRSYMNGHSRQGERPFPFSVDKGFARSHRMQRKHYRGLSNPQCVHGVEVVFAPSLMTLDEDDRKRWIELTGRDLNFTIPPEASDFSSWRNLPNTDFELERPPPPIKSGPNAHPKKLLNGSGLNGSGLHLSNHSNGDGLDLSPVSSKKRKDFFPHGNEEECYLAVNPPSDRIPDIEMHPTEPHWLNDFSGVIKSVYGPVTAAKTIYEDEQGYLIIISLPFVDLPSVKVSWRNTLTHGIIKVSCMSTSRKPLIKRHDRTFKLTDPSSEHCPPGEFVREIPLSTRIPEDANIEAYYDGPGSVLEILVPKHRVGPEEHEVRVCLRPHLGGNDLKLT

SEQ ID NO: 58466 - protein, 493 aa, Glycine max
  peptide (1)..(493): Ceres Seq. ID no. 14310806
  misc_feature (4)..(493): Homolog of NCBI NO: 34908142 NR Description: putative SLT1 protein (ion homeostasis related
  misc_feature (21)..(493): Homolog of NCBI NO: 34895866 NR Description: P0009G03.13 [Oryza sativa (japonica
  misc_feature (1)..(486): Homolog of NCBI NO: 11280862 NR Description: hypothetical protein T22P11.70 - Arabidopsis
  misc_feature (1)..(486): Homolog of NCBI NO: 18413934 NR Description: expressed protein [Arabidopsis thaliana]
  misc_feature (1)..(483): Homolog of NCBI NO: 18399669 NR Description: expressed protein [Arabidopsis thaliana]
  misc_feature (1)..(493): Homolog of NCBI NO: 18404463 NR Description: SLT1 protein [Arabidopsis thaliana]
  misc_feature (1)..(493): Homolog of NCBI NO: 11611667 NR Description: SLT1 protein [Nicotiana tabacum]
MENHHPSTLLSMDSSASSHEELDLEMNRQIILTRPPDINLPLSAERSPPPQPWNSEPCDILDVGLGTQGYETESFLNLPKAGRKCAKRVDSIWGAWFFFSFYFKPALNDKSKAKIVRDSNGVSGFDKSDLKLDVFMVQHDMENMYMWVFKERPENALGKMQLRSYMNGHSRQGERPFPFSVDKGFARSHRMQRKHYRGLSNPQCVHGVEVVFAPSLMTLDEDDRKRWIELTGRDLNFTIPPEASDFSSWRNLPNTDFELERPPPPIKSGPNAHPKKLLNGSGLNGSGLHLSNHSNGDGLDLSPVSSKKRKDFFPHGNEEECYLAVNPPSDRIPDIEMHPTEPHWLNDFSGVIKSVYGPVTAAKTIYEDEQGYLIIISLPFVDLPSVKVSWRNTLTHGIIKVSCMSTSRKPLIKRHDRTFKLTDPSSEHCPPGEFVREIPLSTRIPEDANIEAYYDGPGSVLEILVPKHRVGPEEHEVRVCLRPHLGGNDLKLT

SEQ ID NO: 58467 - DNA, 1106 bp, Glycine max
  misc_feature (1)..(1106): Ceres Seq. ID no. 15224967
ccttgttcatttccttcacataagatacagccaagcttcattctatttgtttttgtccctggacgcagcacctttcttttgttctgttttaggtccttgtgcattttacttttgggagaattccaaaaaagttattattcatacataacatgaaggaagaatgattacttggtgtggttattcaaaccaaaattaaccaaaataatatgatgactaaaaccactttggtgttttctctccctcttcgtattaaatatttttaacactagttccttacttgaaatcataccttttatttttttggtgacttagccttaagccctcataaaaactgtcctttgatttcagccttttttcttcttcaaaaactgttgtaggatggaatgctaaaacacaaaggtacatatgaaataatatcacctgaggacattggacttgaaagaaccaatgaagtaggtattgtactgggaaagcttaggtatgtaattttcttttctctagaacacttatttttgcatggatcttgtacacactgctaatccctatgttctcttcatcctaacatgagaaaaattttatctctagctttctggacttatgtaagtcctcatggtacaagcataccggttatatttgagtgagtgcacaagaagttgtctgactatggcaggatgaaactctgcggataatgatgattcttggcctgctttattttgatgctcagaagcattctacttgttcatccatgcctggtggttgatatcagtggttgccatgctttgagaaagcgacttgaagttactatcacagtactttttgaggaagatggttatgtcgtgcatgagtggccctgtataggggaaaatcccacttgaattacggacttgacctgagaagaatgtttgaggattattactcttctcattcttctagacttctagttatttttcttatttgtattttattactatttcagtacgttatatttaaatccattcccatctgattggatgatcatgaattaccttcctgcttgtatggattatacattattatagatatatactagctcttactttctttgtgtcaaaaaaaaaaaaaaaaaa

SEQ ID NO: 58468 - protein, 52 aa, Glycine max
  peptide (1)..(52): Ceres Seq. ID no. 15224968
MLRSILLVHPCLVVDISGCHALRKRLEVTITVLFEEDGYVVHEWPCIGENPT

SEQ ID NO: 58469 - protein, 51 aa, Glycine max
  peptide (1)..(51): Ceres Seq. ID no. 15224969
  misc_feature (1)..(31): Homolog of NCBI NO: 15221125 NR Description: 2-isopropylmalate synthase -related [Arabidopsis
  misc_feature (1)..(31): Homolog of NCBI NO: 7387848 NR Description: 2-isopropylmalate synthase A
  misc_feature (1)..(50): Homolog of NCBI NO: 15221794 NR Description: 2-isopropylmalate synthase -related [Arabidopsis
  misc_feature (1)..(50): Homolog of NCBI NO: 6714306 NR Description: F15H18.3 [Arabidopsis thaliana]
MLKHKGTYEIISPEDIGLERTNEVGIVLGKLRYVIFFSLEHLFLHGSCTHC

SEQ ID NO: 58470 - protein, 50 aa, Glycine max
  peptide (1)..(50): Ceres Seq. ID no. 15224970
PCSFPSHKIQPSFILFVFVPGRSTFLLFCFRSLCILLLGEFQKSYYSYIT

SEQ ID NO: 58471 - DNA, 1106 bp, Glycine max
  misc_feature (1)..(1106): Ceres Seq. ID no. 13638152
ggagagagagaaaaaaaaaaaaaagtctctgtttcttcacttgctcacaagccgcaactgctactgtgtacccaatctgagcccaacgagatgggggggcagaatctttccccaaaggaaaggagtagagattggattggagttcttatgaacagcagctttggttattgtacttatcaccatgatcttcgatctaatgagatgaatgtgttctgcgtggactgtgcacttaggatgtgtaggcactgtaaggaagctcattccctacatagaaggtttcagatttacaaatattcctaccaggatgtcttccgccatgccgagctgcagaagtattttgattgctccaaaattcagacttacatatccaataatgaaaggattgtgcatctcaaacctcggccttcaatcaccaaatctaagtctgctgatctaagtcccgactctaaatacaaagagaccggcatagcaacaagaccaaagtcagggggcacgtgtgaagaatgtggaaaacacttacaagatgagcgtaatcgcttctgctccattacatgcaagatctcagtgcatccagtggagacccaataccaaggtcaaaatcaatgttcaccaaaccaccaaagtgctagaggcatcatcaatccaaaacctgaaggcattgactttacaatgaatgataaccataattcagaaccggagtcatctatctctgaagctgagccatatgggtgggttgaagttgtgaatttcagaaagcgtccaaggaaaagtatccctcagaggcctgtctttgttttcacgtcttagaataagatacactactctaatggttttcttcattttttttttttgactttacatttcttgaacatttgagggaagctcaaccccgttatgccccatattgggatttaggtatatataacttgggagtttgagattcagttgctattagcaaagtaactagccgagcttgtatagcacaaggacaaaggtaatgctactaacacacttccgacactactactacttaatatctgtatagttttcagcatcttactgtactcccttcgccccacatctaatatctattaatgtttgaggtt

SEQ ID NO: 58472 - protein, 268 aa, Glycine max
  peptide (1)..(268): Ceres Seq. ID no. 13638153
  misc_feature (45)..(135): Pfam Name: Protein of unknown function, DUF597 Pfam Description: Protein of unknown function, DUF597
  misc_feature (30)..(139): Homolog of NCBI NO: 18411153 NR Description: expressed protein [Arabidopsis thaliana]
  misc_feature (42)..(139): Homolog of NCBI NO: 21537073 NR Description: unknown [Arabidopsis thaliana]
  misc_feature (42)..(139): Homolog of NCBI NO: 25337907 NR Description: hypothetical protein F9H16.1 - Arabidopsis
  misc_feature (42)..(139): Homolog of NCBI NO: 18394936 NR Description: expressed protein [Arabidopsis thaliana]
  misc_feature (32)..(135): Homolog of NCBI NO: 15236696 NR Description: expressed protein [Arabidopsis thaliana]
  misc_feature (45)..(134): Homolog of NCBI NO: 9755373 NR Description: F17F8.4 [Arabidopsis thaliana]
  misc_feature (32)..(135): Homolog of NCBI NO: 38346725 NR Description: OSJNBa0086O06.23 [Oryza sativa (japonica
  misc_feature (35)..(141): Homolog of NCBI NO: 16117799 NR Description: zinc-binding protein [Pisum sativum]
  misc_feature (45)..(135): Homolog of NCBI NO: 15232396 NR Description: hypothetical protein [Arabidopsis thaliana]
  misc_feature (45)..(239): Homolog of NCBI NO: 20805059 NR Description: B1108H10.20 [Oryza sativa (japonica
GEREKKKKVSVSSLAHKPQLLLCTQSEPNEMGGQNLSPKERSRDWIGVLMNSSFGYCTYHHDLRSNEMNVFCVDCALRMCRHCKEAHSLHRRFQIYKYSYQDVFRHAELQKYFDCSKIQTYISNNERIVHLKPRPSITKSKSADLSPDSKYKETGIATRPKSGGTCEECGKHLQDERNRFCSITCKISVHPVETQYQGQNQCSPNHQSARGIINPKPEGIDFTMNDNHNSEPESSISEAEPYGWVEVVNFRKRPRKSIPQRPVFVFTS

SEQ ID NO: 58473 - protein, 238 aa, Glycine max
  peptide (1)..(238): Ceres Seq. ID no. 13638154
  misc_feature (15)..(105): Pfam Name: Protein of unknown function, DUF597 Pfam Description: Protein of unknown function, DUF597
  misc_feature (1)..(109): Homolog of NCBI NO: 18411153 NR Description: expressed protein [Arabidopsis thaliana]
  misc_feature (12)..(109): Homolog of NCBI NO: 21537073 NR Description: unknown [Arabidopsis thaliana]
  misc_feature (12)..(109): Homolog of NCBI NO: 25337907 NR Description: hypothetical protein F9H16.1 - Arabidopsis
  misc_feature (12)..(109): Homolog of NCBI NO: 18394936 NR Description: expressed protein [Arabidopsis thaliana]
  misc_feature (2)..(105): Homolog of NCBI NO: 15236696 NR Description: expressed protein [Arabidopsis thaliana]
  misc_feature (15)..(104): Homolog of NCBI NO: 9755373 NR Description: F17F8.4 [Arabidopsis thaliana]
  misc_feature (2)..(105): Homolog of NCBI NO: 38346725 NR Description: OSJNBa0086O06.23 [Oryza sativa (japonica
  misc_feature (5)..(111): Homolog of NCBI NO: 16117799 NR Description: zinc-binding protein [Pisum sativum]
  misc_feature (15)..(105): Homolog of NCBI NO: 15232396 NR Description: hypothetical protein [Arabidopsis thaliana]
  misc_feature (15)..(209): Homolog of NCBI NO: 20805059 NR Description: B1108H10.20 [Oryza sativa (japonica
MGGQNLSPKERSRDWIGVLMNSSFGYCTYHHDLRSNEMNVFCVDCALRMCRHCKEAHSLHRRFQIYKYSYQDVFRHAELQKYFDCSKIQTYISNNERIVHLKPRPSITKSKSADLSPDSKYKETGIATRPKSGGTCEECGKHLQDERNRFCSITCKISVHPVETQYQGQNQCSPNHQSARGIINPKPEGIDFTMNDNHNSEPESSISEAEPYGWVEVVNFRKRPRKSIPQRPVFVFTS

SEQ ID NO: 58474 - protein, 219 aa, Glycine max
  peptide (1)..(219): Ceres Seq. ID no. 13638155
  misc_feature (1)..(86): Pfam Name: Protein of unknown function, DUF597 Pfam Description: Protein of unknown function, DUF597
  misc_feature (1)..(90): Homolog of NCBI NO: 18411153 NR Description: expressed protein [Arabidopsis thaliana]
  misc_feature (1)..(90): Homolog of NCBI NO: 21537073 NR Description: unknown [Arabidopsis thaliana]
  misc_feature (1)..(90): Homolog of NCBI NO: 25337907 NR Description: hypothetical protein F9H16.1 - Arabidopsis
  misc_feature (1)..(90): Homolog of NCBI NO: 18394936 NR Description: expressed protein [Arabidopsis thaliana]
  misc_feature (1)..(86): Homolog of NCBI NO: 15236696 NR Description: expressed protein [Arabidopsis thaliana]
  misc_feature (1)..(85): Homolog of NCBI NO: 9755373 NR Description: F17F8.4 [Arabidopsis thaliana]
  misc_feature (1)..(86): Homolog of NCBI NO: 38346725 NR Description: OSJNBa0086O06.23 [Oryza sativa (japonica
  misc_feature (1)..(92): Homolog of NCBI NO: 16117799 NR Description: zinc-binding protein [Pisum sativum]
  misc_feature (1)..(86): Homolog of NCBI NO: 15232396 NR Description: hypothetical protein [Arabidopsis thaliana]
  misc_feature (1)..(190): Homolog of NCBI NO: 20805059 NR Description: B1108H10.20 [Oryza sativa (japonica
MNSSFGYCTYHHDLRSNEMNVFCVDCALRMCRHCKEAHSLHRRFQIYKYSYQDVFRHAELQKYFDCSKIQTYISNNERIVHLKPRPSITKSKSADLSPDSKYKETGIATRPKSGGTCEECGKHLQDERNRFCSITCKISVHPVETQYQGQNQCSPNHQSARGIINPKPEGIDFTMNDNHNSEPESSISEAEPYGWVEVVNFRKRPRKSIPQRPVFVFTS

SEQ ID NO: 58475 - DNA, 1286 bp, Glycine max
  misc_feature (1)..(1286): Ceres Seq. ID no. 14316251
gattaaaaaaaaaaacacaaaaaaattacaatgcaaaattaaagtgagcagggaggattgaattgtccccgctattcgatttgagaaattcgacgttttcaaagaattggaaactggaaacttcactttcattcgatcaatcatgagaactcgaaacgccgattccgcctccaaatccgcaacccctaagaagacgccgccgaagaaatcccctgcggccaagcgcaccaccgccaccaaaaccagagccaccaagaagaacgagctctcgcccgcacccgattccaaccccgatcaatctcctctggaacagaaatcgttaggcagtgctagcagcgcaaaatctgtgaaaaagaagactccggggagatcgagaagtaaagcaatcaatactccgaattcggaagaacaatgtgaggcagtagctgatgaaactccaattgaagatgataccgaggtagcagagaaagtggaagatgttggagtggttgatgcagataatgttgagggtgagaaggaggggggaaaaggtgttggttctgttggattgtctgatgagacggatcgtaagtcgatggaagtggatgaacttgttcaaaaggtttgtgaatctgtgggaaaggaaaatgatgtaatggaagttgaagtagctgcttgctgggatgcttctgtttcttttaggcgaccagggcgacctattgtggatctcaatatatctgcggataatgaagattgtactggtgaaaaggagggagagaaatggaaggaagagttgaaagatcaagagggggacaaagggaaggaagagttgaaaaaacaggaaggagacaacgggaaggaagagttgaaagaactggaaggagagaaaggagaggaagagttgaaagaactggaaggagaaaaaggtgaggaagagttgacagaactggaaggagagaaaggaaatgttgaattgaaagaacagaaaggagacaaaggaaaggaaaagttgaaagagcaggagccagagaaagcaaagggagaggaaacaaacctttttggacatgaagagaactctgagtcttttggtgtagaaggtgaagcccagatgcaaaaagaagatgctaatcctattaaagatggcggtgaaggaccaaagattggtgaaaattcagatcttggagaacaagggaaggtggagcttgttgaagatccagaagaaaaccctgaagaagatccagaggaacctccataagaaacttcggcattggaggaggagcatagggaattggaggctattgcaaatc

SEQ ID NO: 58476 - protein, 363 aa, Glycine max
  peptide (1)..(363): Ceres Seq. ID no. 14316252
  misc_feature (86)..(363): Pfam Name: S-antigen protein Pfam Description: S-antigen protein
  misc_feature (92)..(363): Homolog of NCBI NO: 20452161 NR Description: retinitis pigmentosa GTPase regulator [Canis
  misc_feature (36)..(363): Homolog of NCBI NO: 9837385 NR Description: retinitis pigmentosa GTPase regulator-like
  misc_feature (56)..(361): Homolog of NCBI NO: 9837379 NR Description: retinitis pigmentosa GTPase regulator [Homo
  misc_feature (43)..(363): Homolog of NCBI NO: 9837385 NR Description: retinitis pigmentosa GTPase regulator-like
  misc_feature (101)..(363): Homolog of NCBI NO: 20452161 NR Description: retinitis pigmentosa GTPase regulator [Canis
  misc_feature (101)..(361): Homolog of NCBI NO: 9626004 NR Description: ORF 48~EDLF5~sim. to EBV BRRF2 [Saimiriine
  misc_feature (70)..(363): Homolog of NCBI NO: 9837379 NR Description: retinitis pigmentosa GTPase regulator [Homo
  misc_feature (27)..(363): Homolog of NCBI NO: 9837385 NR Description: retinitis pigmentosa GTPase regulator-like
  misc_feature (56)..(363): Homolog of NCBI NO: 9837379 NR Description: retinitis pigmentosa GTPase regulator [Homo
  misc_feature (1)..(363): Homolog of NCBI NO: 27805831 NR Description: cylicin, basic protein of sperm head cytoskeleton
MRTRNADSASKSATPKKTPPKKSPAAKRTTATKTRATKKNELSPAPDSNPDQSPLEQKSLGSASSAKSVKKKTPGRSRSKAINTPNSEEQCEAVADETPIEDDTEVAEKVEDVGVVDADNVEGEKEGGKGVGSVGLSDETDRKSMEVDELVQKVCESVGKENDVMEVEVAACWDASVSFRRPGRPIVDLNISADNEDCTGEKEGEKWKEELKDQEGDKGKEELKKQEGDNGKEELKELEGEKGEEELKELEGEKGEEELTELEGEKGNVELKEQKGDKGKEKLKEQEPEKAKGEETNLFGHEENSESFGVEGEAQMQKEDANPIKDGGEGPKIGENSDLGEQGKVELVEDPEENPEEDPEEPP

SEQ ID NO: 58477 - protein, 219 aa, Glycine max
  peptide (1)..(219): Ceres Seq. ID no. 14316253
  misc_feature (1)..(219): Pfam Name: S-antigen protein Pfam Description: S-antigen protein
  misc_feature (1)..(219): Homolog of NCBI NO: 20452161 NR Description: retinitis pigmentosa GTPase regulator [Canis
  misc_feature (1)..(219): Homolog of NCBI NO: 9837385 NR Description: retinitis pigmentosa GTPase regulator-like
  misc_feature (1)..(217): Homolog of NCBI NO: 9837379 NR Description: retinitis pigmentosa GTPase regulator [Homo
  misc_feature (1)..(219): Homolog of NCBI NO: 9837385 NR Description: retinitis pigmentosa GTPase regulator-like
  misc_feature (1)..(219): Homolog of NCBI NO: 20452161 NR Description: retinitis pigmentosa GTPase regulator [Canis
  misc_feature (1)..(217): Homolog of NCBI NO: 9626004 NR Description: ORF 48~EDLF5~sim. to EBV BRRF2 [Saimiriine
  misc_feature (1)..(219): Homolog of NCBI NO: 9837379 NR Description: retinitis pigmentosa GTPase regulator [Homo
  misc_feature (1)..(219): Homolog of NCBI NO: 9837385 NR Description: retinitis pigmentosa GTPase regulator-like
  misc_feature (1)..(219): Homolog of NCBI NO: 9837379 NR Description: retinitis pigmentosa GTPase regulator [Homo
  misc_feature (1)..(219): Homolog of NCBI NO: 27805831 NR Description: cylicin, basic protein of sperm head cytoskeleton
MEVDELVQKVCESVGKENDVMEVEVAACWDASVSFRRPGRPIVDLNISADNEDCTGEKEGEKWKEELKDQEGDKGKEELKKQEGDNGKEELKELEGEKGEEELKELEGEKGEEELTELEGEKGNVELKEQKGDKGKEKLKEQEPEKAKGEETNLFGHEENSESFGVEGEAQMQKEDANPIKDGGEGPKIGENSDLGEQGKVELVEDPEENPEEDPEEPP

SEQ ID NO: 58478 - protein, 199 aa, Glycine max
  peptide (1)..(199): Ceres Seq. ID no. 14316254
  misc_feature (1)..(199): Pfam Name: S-antigen protein Pfam Description: S-antigen protein
  misc_feature (1)..(199): Homolog of NCBI NO: 20452161 NR Description: retinitis pigmentosa GTPase regulator [Canis
  misc_feature (1)..(199): Homolog of NCBI NO: 9837385 NR Description: retinitis pigmentosa GTPase regulator-like
  misc_feature (1)..(197): Homolog of NCBI NO: 9837379 NR Description: retinitis pigmentosa GTPase regulator [Homo
  misc_feature (1)..(199): Homolog of NCBI NO: 9837385 NR Description: retinitis pigmentosa GTPase regulator-like
  misc_feature (1)..(199): Homolog of NCBI NO: 20452161 NR Description: retinitis pigmentosa GTPase regulator [Canis
  misc_feature (1)..(197): Homolog of NCBI NO: 9626004 NR Description: ORF 48~EDLF5~sim. to EBV BRRF2 [Saimiriine
  misc_feature (1)..(199): Homolog of NCBI NO: 9837379 NR Description: retinitis pigmentosa GTPase regulator [Homo
  misc_feature (1)..(199): Homolog of NCBI NO: 9837385 NR Description: retinitis pigmentosa GTPase regulator-like
  misc_feature (1)..(199): Homolog of NCBI NO: 9837379 NR Description: retinitis pigmentosa GTPase regulator [Homo
  misc_feature (1)..(199): Homolog of NCBI NO: 27805831 NR Description: cylicin, basic protein of sperm head cytoskeleton
MEVEVAACWDASVSFRRPGRPIVDLNISADNEDCTGEKEGEKWKEELKDQEGDKGKEELKKQEGDNGKEELKELEGEKGEEELKELEGEKGEEELTELEGEKGNVELKEQKGDKGKEKLKEQEPEKAKGEETNLFGHEENSESFGVEGEAQMQKEDANPIKDGGEGPKIGENSDLGEQGKVELVEDPEENPEEDPEEPP

SEQ ID NO: 58479 - DNA, 1471 bp, Glycine max
  misc_feature (1)..(1471): Ceres Seq. ID no. 15226540
atccttaacaacatttcacgcttcctctgtttgctcgcacacgtcgtttttttctttttgttgcttcggagccaactcaacaacaacgccgtgcctaatccttaagaataacgaattacaacaaccaaccatgttgcattgtctcaacacttcctgttcggacatcacagtcttggaaagacaacgggaagcaaccatcaagtgccagaaccaccaaccaccctacttaacggactttaacgccgtcttcccttcttcttcttcttcttcttcttcttcctcttcttcttctcatagtcagggcttgctcatgatgtgctcggattcctcgctcggccaggtcctaactcactccgtcaaacccgatccgggcgtctggcccgaattcggttttctacccgccatttcgagaacttgtagcagagacggagacttggtttcgcccaaggaaaacatggccagtgggaaagaaaatgctaagaagagaaagcctcagaactccaaggttgttgcggagattgataataacaaggacaaggacaagagagtcaaagtaactggcgaggaaggagaatccaaagtaaccgagcaccataccagaaacaagaatgccaaatccaacgcaaataagaacaacagagaaacctctgcggacacttccaaaggctccgaggttcaaaatcagaaaccagactacattcatgtccgagcgcgtcgtggacaagccacggatagtcatagcttagctgaaagagtaaggagggagaagattagcgagagaatgaagtatttgcaagatttaataccgggttgcaacaaagttgcagggaaagctggaatgcttgatgaaattattaactatgttcagtctcttcaacgccaagttgagttcttgtcaatgaaattagcggctgtaaacccaaggcttgacttcaacattgacgaactgtttgccaaagaggtgtttccttcttgtgctcaaagttttccaaacatagggattccctcagatatgagtattagtaacaacccttcgtatcttcagttcaattcagcgcagcaacttgtatcgtgctgtggtggattaataaacagcatgggaataagccctcccaacatgggactccgaacgaacattattagtactagcactgtacctttgcccgaaacttttcttgactcttcctgtttcactcaaattctaccctcctcaaattgggaaggtggtgatttccaaagcctttacaacgttgcttttgatcaagggcgaacagcatcttttccccctcagccatttacaggtctagttgaagctagcaatctaaaaatggagatgtaaaccagataatccattattacaatatgttggattaggtcactcggaatgcctttgtcaagatttttttctattagagtacatcgcatatattggttgtatactgctccgtagaataaataagatcatattaac

SEQ ID NO: 58480 - protein, 445 aa, Glycine max
  peptide (1)..(445): Ceres Seq. ID no. 15226541
  misc_feature (242)..(292): Pfam Name: Helix-loop-helix DNA-binding domain Pfam Description: Helix-loop-helix DNA-binding domain
  misc_feature (140)..(444): Homolog of NCBI NO: 29647487 NR Description: OJ1191_A10.7 [Oryza sativa (japonica
  misc_feature (130)..(394): Homolog of NCBI NO: 20127085 NR Description: putative bHLH transcription factor [Arabidopsis
  misc_feature (144)..(376): Homolog of NCBI NO: 15221563 NR Description: DNA-binding protein -related [Arabidopsis
  misc_feature (144)..(376): Homolog of NCBI NO: 30697769 NR Description: DNA-binding protein -related [Arabidopsis
  misc_feature (130)..(394): Homolog of NCBI NO: 15239013 NR Description: bHLH protein family [Arabidopsis thaliana]
  misc_feature (144)..(376): Homolog of NCBI NO: 20127044 NR Description: putative bHLH transcription factor [Arabidopsis
  misc_feature (132)..(355): Homolog of NCBI NO: 21539493 NR Description: unknown protein [Arabidopsis thaliana]
  misc_feature (132)..(355): Homolog of NCBI NO: 22329164 NR Description: bHLH protein [Arabidopsis thaliana]
  misc_feature (132)..(355): Homolog of NCBI NO: 20127066 NR Description: putative bHLH transcription factor [Arabidopsis
  misc_feature (132)..(355): Homolog of NCBI NO: 7487656 NR Description: hypothetical protein T4L20.110 - Arabidopsis
SLTTFHASSVCSHTSFFSFCCFGANSTTTPCLILKNNELQQPTMLHCLNTSCSDITVLERQREATIKCQNHQPPYLTDFNAVFPSSSSSSSSSSSSSHSQGLLMMCSDSSLGQVLTHSVKPDPGVWPEFGFLPAISRTCSRDGDLVSPKENMASGKENAKKRKPQNSKVVAEIDNNKDKDKRVKVTGEEGESKVTEHHTRNKNAKSNANKNNRETSADTSKGSEVQNQKPDYIHVRARRGQATDSHSLAERVRREKISERMKYLQDLIPGCNKVAGKAGMLDEIINYVQSLQRQVEFLSMKLAAVNPRLDFNIDELFAKEVFPSCAQSFPNIGIPSDMSISNNPSYLQFNSAQQLVSCCGGLINSMGISPPNMGLRTNIISTSTVPLPETFLDSSCFTQILPSSNWEGGDFQSLYNVAFDQGRTASFPPQPFTGLVEASNLKMEM

SEQ ID NO: 58481 - protein, 402 aa, Glycine max
  peptide (1)..(402): Ceres Seq. ID no. 15226542
  misc_feature (199)..(249): Pfam Name: Helix-loop-helix DNA-binding domain Pfam Description: Helix-loop-helix DNA-binding domain
  misc_feature (97)..(401): Homolog of NCBI NO: 29647487 NR Description: OJ1191_A10.7 [Oryza sativa (japonica
  misc_feature (87)..(351): Homolog of NCBI NO: 20127085 NR Description: putative bHLH transcription factor [Arabidopsis
  misc_feature (101)..(333): Homolog of NCBI NO: 15221563 NR Description: DNA-binding protein -related [Arabidopsis
  misc_feature (101)..(333): Homolog of NCBI NO: 30697769 NR Description: DNA-binding protein -related [Arabidopsis
  misc_feature (87)..(351): Homolog of NCBI NO: 15239013 NR Description: bHLH protein family [Arabidopsis thaliana]
  misc_feature (101)..(333): Homolog of NCBI NO: 20127044 NR Description: putative bHLH transcription factor [Arabidopsis
  misc_feature (89)..(312): Homolog of NCBI NO: 21539493 NR Description: unknown protein [Arabidopsis thaliana]
  misc_feature (89)..(312): Homolog of NCBI NO: 22329164 NR Description: bHLH protein [Arabidopsis thaliana]
  misc_feature (89)..(312): Homolog of NCBI NO: 20127066 NR Description: putative bHLH transcription factor [Arabidopsis
  misc_feature (89)..(312): Homolog of NCBI NO: 7487656 NR Description: hypothetical protein T4L20.110 - Arabidopsis
MLHCLNTSCSDITVLERQREATIKCQNHQPPYLTDFNAVFPSSSSSSSSSSSSSHSQGLLMMCSDSSLGQVLTHSVKPDPGVWPEFGFLPAISRTCSRDGDLVSPKENMASGKENAKKRKPQNSKVVAEIDNNKDKDKRVKVTGEEGESKVTEHHTRNKNAKSNANKNNRETSADTSKGSEVQNQKPDYIHVRARRGQATDSHSLAERVRREKISERMKYLQDLIPGCNKVAGKAGMLDEIINYVQSLQRQVEFLSMKLAAVNPRLDFNIDELFAKEVFPSCAQSFPNIGIPSDMSISNNPSYLQFNSAQQLVSCCGGLINSMGISPPNMGLRTNIISTSTVPLPETFLDSSCFTQILPSSNWEGGDFQSLYNVAFDQGRTASFPPQPFTGLVEASNLKMEM

SEQ ID NO: 58482 - protein, 342 aa, Glycine max
  peptide (1)..(342): Ceres Seq. ID no. 15226543
  misc_feature (139)..(189): Pfam Name: Helix-loop-helix DNA-binding domain Pfam Description: Helix-loop-helix DNA-binding domain
  misc_feature (37)..(341): Homolog of NCBI NO: 29647487 NR Description: OJ1191_A10.7 [Oryza sativa (japonica
  misc_feature (27)..(291): Homolog of NCBI NO: 20127085 NR Description: putative bHLH transcription factor [Arabidopsis
  misc_feature (41)..(273): Homolog of NCBI NO: 15221563 NR Description: DNA-binding protein -related [Arabidopsis
  misc_feature (41)..(273): Homolog of NCBI NO: 30697769 NR Description: DNA-binding protein -related [Arabidopsis
  misc_feature (27)..(291): Homolog of NCBI NO: 15239013 NR Description: bHLH protein family [Arabidopsis thaliana]
  misc_feature (41)..(273): Homolog of NCBI NO: 20127044 NR Description: putative bHLH transcription factor [Arabidopsis
  misc_feature (29)..(252): Homolog of NCBI NO: 21539493 NR Description: unknown protein [Arabidopsis thaliana]
  misc_feature (29)..(252): Homolog of NCBI NO: 20127066 NR Description: putative bHLH transcription factor [Arabidopsis
  misc_feature (29)..(252): Homolog of NCBI NO: 22329164 NR Description: bHLH protein [Arabidopsis thaliana]
  misc_feature (29)..(252): Homolog of NCBI NO: 7487656 NR Description: hypothetical protein T4L20.110 - Arabidopsis
MMCSDSSLGQVLTHSVKPDPGVWPEFGFLPAISRTCSRDGDLVSPKENMASGKENAKKRKPQNSKVVAEIDNNKDKDKRVKVTGEEGESKVTEHHTRNKNAKSNANKNNRETSADTSKGSEVQNQKPDYIHVRARRGQATDSHSLAERVRREKISERMKYLQDLIPGCNKVAGKAGMLDEIINYVQSLQRQVEFLSMKLAAVNPRLDFNIDELFAKEVFPSCAQSFPNIGIPSDMSISNNPSYLQFNSAQQLVSCCGGLINSMGISPPNMGLRTNIISTSTVPLPETFLDSSCFTQILPSSNWEGGDFQSLYNVAFDQGRTASFPPQPFTGLVEASNLKMEM

SEQ ID NO: 58483 - DNA, 1351 bp, Glycine max
  misc_feature (1)..(1351): Ceres Seq. ID no. 15169380
atgagtattacaagacaatttaacaattgatgcaatgaagaacattaaaaaatgaagataaaatagtgtatcttgcagccatgattgggaaaacaagccataagcatagagtttaattgaaatctattgtcagttgaaactgagtagttatcagtggaaagatgagggaagggtgcagcaaagtatgcgtcacaggagctagtggttacatagcttcctctctggtgaagaagctcttggccaagggtcacagcgtccatgcaactctcagagacttgaagaacgagtcaaaggtgagcctcttaaagagccttccacaatcagaagggaaactggtgctgtttgaagctgatatttacaacccaaatgactttgaccatgcaattgaaggctgtgagtttgtctttcatgttgctactcccatgatccatgatcctggctcccagtacaagaatacttctgaagcggcaatggctgcgtcaaaaagcattgccctgtcttgtgtgagagcagggacggtgaagcgtctcatctacaccgcgtctgttgtttctgcttcttctttgaaagaagatgggagtggtttcaaagatgcaatggatgaaacttgctggacccctctaaatgattccttggcatatgtatacccagatgatcctttttataaggactatacttattcaaagacactgtcggagaaacatgtgttgagctacgggaacgatgaaaatggtggaggattggaggtggtaacactcccttgtgggctagtgggaggcgacacccttcaatcttctacacccgttagcggagtagtttgtatcgcacagatcatgcaagatgcaagggcgtacatatcactcaagttcctaaagaaattgctggggaaaattcctcttgtacacattgatgatgtctgtgaagctcatattttctgcatggaaagtacctcgatcagtggaagattcttgtgtgcaagttcatatatttcattagaagagatggctaatcatttcgctcttcattatccagaattcaatgtgaaacaagaatatgaagatgagctgaagaaggatatcaagtgggcctcaacaaagctgtgtgacaaaggatttgtatacaaatatgacgccaagatgatattagatgattgtatcaaatgtgcaagaaggatgggtgatctctagtctccatctacacccatgcttgccatatctgcttgtaatacgatatatagcaggcgtctgcctcatttcttctcgttccctatccaaatgttattaccattgtttttgtcattttgttaaaaaataaactcagtttcaaatcaattagaaaagtgaattaactg

SEQ ID NO: 58484 - protein, 341 aa, Glycine max
  peptide (1)..(341): Ceres Seq. ID no. 15169381
  misc_feature (8)..(128): Pfam Name: NAD dependent epimerase/dehydratase family Pfam Description: NAD dependent epimerase/dehydratase family
  misc_feature (4)..(333): Homolog of NCBI NO: 6689826 NR Description: DFR-like protein [Arabidopsis thaliana]
  misc_feature (7)..(341): Homolog of NCBI NO: 7431416 NR Description: NADPH HC toxin reductase - maize
  misc_feature (7)..(341): Homolog of NCBI NO: 7431414 NR Description: NADPH HC toxin reductase - maize
  misc_feature (7)..(341): Homolog of NCBI NO: 7431417 NR Description: NADPH HC toxin reductase hm1 - maize
  misc_feature (7)..(341): Homolog of NCBI NO: 7431412 NR Description: HC-toxin reductase (EC 1.-.-.-) - barley
  misc_feature (7)..(341): Homolog of NCBI NO: 2911362 NR Description: NADPH HC toxin reductase [Zea mays]
  misc_feature (8)..(339): Homolog of NCBI NO: 33146536 NR Description: putative NADPH HC toxin reductase
  misc_feature (7)..(339): Homolog of NCBI NO: 34393584 NR Description: putative NADPH HC toxin reductase
  misc_feature (6)..(341): Homolog of NCBI NO: 33146535 NR Description: putative NADPH HC toxin reductase
  misc_feature (6)..(341): Homolog of NCBI NO: 33146534 NR Description: putative NADPH HC toxin reductase
MREGCSKVCVTGASGYIASSLVKKLLAKGHSVHATLRDLKNESKVSLLKSLPQSEGKLVLFEADIYNPNDFDHAIEGCEFVFHVATPMIHDPGSQYKNTSEAAMAASKSIALSCVRAGTVKRLIYTASVVSASSLKEDGSGFKDAMDETCWTPLNDSLAYVYPDDPFYKDYTYSKTLSEKHVLSYGNDENGGGLEVVTLPCGLVGGDTLQSSTPVSGVVCIAQIMQDARAYISLKFLKKLLGKIPLVHIDDVCEAHIFCMESTSISGRFLCASSYISLEEMANHFALHYPEFNVKQEYEDELKKDIKWASTKLCDKGFVYKYDAKMILDDCIKCARRMGDL

SEQ ID NO: 58485 - protein, 254 aa, Glycine max
  peptide (1)..(254): Ceres Seq. ID no. 15169382
  misc_feature (1)..(246): Homolog of NCBI NO: 6689826 NR Description: DFR-like protein [Arabidopsis thaliana]
  misc_feature (1)..(254): Homolog of NCBI NO: 7431416 NR Description: NADPH HC toxin reductase - maize
  misc_feature (1)..(254): Homolog of NCBI NO: 7431414 NR Description: NADPH HC toxin reductase - maize
  misc_feature (1)..(254): Homolog of NCBI NO: 7431417 NR Description: NADPH HC toxin reductase hm1 - maize
  misc_feature (1)..(254): Homolog of NCBI NO: 7431412 NR Description: HC-toxin reductase (EC 1.-.-.-) - barley
  misc_feature (1)..(254): Homolog of NCBI NO: 2911362 NR Description: NADPH HC toxin reductase [Zea mays]
  misc_feature (1)..(252): Homolog of NCBI NO: 33146536 NR Description: putative NADPH HC toxin reductase
  misc_feature (1)..(252): Homolog of NCBI NO: 34393584 NR Description: putative NADPH HC toxin reductase
  misc_feature (1)..(254): Homolog of NCBI NO: 33146535 NR Description: putative NADPH HC toxin reductase
  misc_feature (1)..(254): Homolog of NCBI NO: 33146534 NR Description: putative NADPH HC toxin reductase
MIHDPGSQYKNTSEAAMAASKSIALSCVRAGTVKRLIYTASVVSASSLKEDGSGFKDAMDETCWTPLNDSLAYVYPDDPFYKDYTYSKTLSEKHVLSYGNDENGGGLEVVTLPCGLVGGDTLQSSTPVSGVVCIAQIMQDARAYISLKFLKKLLGKIPLVHIDDVCEAHIFCMESTSISGRFLCASSYISLEEMANHFALHYPEFNVKQEYEDELKKDIKWASTKLCDKGFVYKYDAKMILDDCIKCARRMGDL

SEQ ID NO: 58486 - protein, 238 aa, Glycine max
  peptide (1)..(238): Ceres Seq. ID no. 15169383
  misc_feature (1)..(230): Homolog of NCBI NO: 6689826 NR Description: DFR-like protein [Arabidopsis thaliana]
  misc_feature (1)..(238): Homolog of NCBI NO: 7431416 NR Description: NADPH HC toxin reductase - maize
  misc_feature (1)..(238): Homolog of NCBI NO: 7431414 NR Description: NADPH HC toxin reductase - maize
  misc_feature (1)..(238): Homolog of NCBI NO: 7431417 NR Description: NADPH HC toxin reductase hm1 - maize
  misc_feature (1)..(238): Homolog of NCBI NO: 7431412 NR Description: HC-toxin reductase (EC 1.-.-.-) - barley
  misc_feature (1)..(238): Homolog of NCBI NO: 2911362 NR Description: NADPH HC toxin reductase [Zea mays]
  misc_feature (1)..(236): Homolog of NCBI NO: 33146536 NR Description: putative NADPH HC toxin reductase
  misc_feature (1)..(236): Homolog of NCBI NO: 34393584 NR Description: putative NADPH HC toxin reductase
  misc_feature (1)..(238): Homolog of NCBI NO: 33146535 NR Description: putative NADPH HC toxin reductase
  misc_feature (1)..(238): Homolog of NCBI NO: 33146534 NR Description: putative NADPH HC toxin reductase
MAASKSIALSCVRAGTVKRLIYTASVVSASSLKEDGSGFKDAMDETCWTPLNDSLAYVYPDDPFYKDYTYSKTLSEKHVLSYGNDENGGGLEVVTLPCGLVGGDTLQSSTPVSGVVCIAQIMQDARAYISLKFLKKLLGKIPLVHIDDVCEAHIFCMESTSISGRFLCASSYISLEEMANHFALHYPEFNVKQEYEDELKKDIKWASTKLCDKGFVYKYDAKMILDDCIKCARRMGDL

SEQ ID NO: 58487 - DNA, 1838 bp, Glycine max
  misc_feature (1)..(1838): Ceres Seq. ID no. 14312951
aacgctgcctccaaggtgatcgatcatcaatccatccatttaattgcatttctagaaattgaattattagtttttttctcctccttggtctgcatttgcttgattccgtgatttagttttgtaacagaaaacacaagagggtaaaatctttgactctaataagtacaattattgaatagggttttggaacagaaatgagaatagggtaaatgaatatatattaggaaaaaaagttaaatacatttttagtcctttaagctatgtttgagattaaaaatctattatatttgtagagattaaaaatatttaatattttaaaatattattaagataaatatattgtcaatttacatgtaatttttttacaatatcaattaattataagtcatacaaattgatataaattaaagtaattattataaaaatgagcaaacttttatcattcagcgcaagaatttgtgattgattagacaataattgtgcattctaattataattaatagtttttttttataatttttatcttttaataattgagtataattaacatgatatgggagttttaaaaagaatagttaaagggtaaagtaaggaaataattaaaagataaagtagtgaatagtttcgaaagtagttaaagaataaaatagtctagttaaaaacaaatgttttgtctgtgttaatttgttcctaatgctacgaagaagcaaatgtagtccttgggtaaatttaatttttctaatgttaaggaccaaatttaccagtattgtaaatttcagggacaaaatagtgttaataatgtcaaggacccaaattgatcgtttgtgccaaactagattaaattgatgttttgcttattcttcttatggtattcatggaataaacattagagtgcttgtaaatgagtaatgactactggcccaatatttcttcaaaaaaaatatgtttggggctctttgaaaatttaactaaaacattcattagttgttctctccccttctatctgagaaaattagtcactacacattgtcaagggtgtggacagtgttcacaagtcaatggatgcggttgaagcagcaaagttgttagctcggacaagtggtgcaatagttgcagtgtcaggagccacggacattgtcacagatggaaatcgagttgttggggctcataatggggtggcgatgatgcagaaaataacagcaacgggatgttcagtcactgcactgattgctgcctttgttgccgttgacaaaagccatgctttggatgccgcagtgtctgcattagctgtatttggtgttgctggtgagctaggaatgaagatggctaaaggtcctgcatcgcttcgaatgcacttgatagatgaactctatgggcttgatgaatctgccttgaattctcatgttaatgtcaccagtttgtgatgaaatgtgaagatctgcattcaaattgataattaattatcataaaattcgcatgtatcatagttgatagttgtctatcaatggtgtccattggttgaattggaaggtggatcgtattagttagcaatagagatccctctataatttatgtcaataataatcactggtagctacctctggtaataacagtttgttcctgtagttaaaaatatctcatggtttcagcccttaatttagtttggtcaacattttgtatgtataggtttattttgttgaaagttaacttcgtaatttctgtttgatgtataggaatgggtttggtggaaattgtttatgaactcctgatgcattgttaatcagattgtgaaccggtaaagttgagtgtatatatgaattaacaaataacattttctc

SEQ ID NO: 58488 - protein, 121 aa, Glycine max
  peptide (1)..(121): Ceres Seq. ID no. 14312952
  misc_feature (1)..(110): Pfam Name: Hydroxyethylthiazole kinase family Pfam Description: Hydroxyethylthiazole kinase family
  misc_feature (1)..(117): Homolog of NCBI NO: 20091547 NR Description: hydroxyethylthiazole kinase [Methanosarcina
  misc_feature (1)..(118): Homolog of NCBI NO: 19552679 NR Description: hydroxyethylthiazole kinase
  misc_feature (1)..(114): Homolog of NCBI NO: 20808607 NR Description: Hydroxyethylthiazole kinase, sugar kinase family
  misc_feature (1)..(117): Homolog of NCBI NO: 23049619 NR Description: hypothetical protein [Methanosarcina barkeri]
  misc_feature (1)..(118): Homolog of NCBI NO: 23111999 NR Description: hypothetical protein [Desulfitobacterium
  misc_feature (1)..(121): Homolog of NCBI NO: 21229336 NR Description: Hydroxyethylthiazole kinase [Methanosarcina mazei
  misc_feature (1)..(113): Homolog of NCBI NO: 22960557 NR Description: hypothetical protein [Rhodobacter sphaeroides]
  misc_feature (1)..(118): Homolog of NCBI NO: 28899986 NR Description: putative hydroxyethylthiazole kinase
  misc_feature (1)..(119): Homolog of NCBI NO: 34915114 NR Description: putative hydoxyethylthiazole kinase
  misc_feature (1)..(121): Homolog of NCBI NO: 15229565 NR Description: hydoxyethylthiazole kinase -related [Arabidopsis
MDAVEAAKLLARTSGAIVAVSGATDIVTDGNRVVGAHNGVAMMQKITATGCSVTALIAAFVAVDKSHALDAAVSALAVFGVAGELGMKMAKGPASLRMHLIDELYGLDESALNSHVNVTSL

SEQ ID NO: 58489 - protein, 80 aa, Glycine max
  peptide (1)..(80): Ceres Seq. ID no. 14312953
  misc_feature (1)..(69): Pfam Name: Hydroxyethylthiazole kinase family Pfam Description: Hydroxyethylthiazole kinase family
  misc_feature (1)..(76): Homolog of NCBI NO: 20091547 NR Description: hydroxyethylthiazole kinase [Methanosarcina
  misc_feature (1)..(77): Homolog of NCBI NO: 19552679 NR Description: hydroxyethylthiazole kinase
  misc_feature (1)..(73): Homolog of NCBI NO: 20808607 NR Description: Hydroxyethylthiazole kinase, sugar kinase family
  misc_feature (1)..(76): Homolog of NCBI NO: 23049619 NR Description: hypothetical protein [Methanosarcina barkeri]
  misc_feature (1)..(77): Homolog of NCBI NO: 23111999 NR Description: hypothetical protein [Desulfitobacterium
  misc_feature (1)..(80): Homolog of NCBI NO: 21229336 NR Description: Hydroxyethylthiazole kinase [Methanosarcina mazei
  misc_feature (1)..(72): Homolog of NCBI NO: 22960557 NR Description: hypothetical protein [Rhodobacter sphaeroides]
  misc_feature (1)..(77): Homolog of NCBI NO: 28899986 NR Description: putative hydroxyethylthiazole kinase
  misc_feature (1)..(78): Homolog of NCBI NO: 34915114 NR Description: putative hydoxyethylthiazole kinase
  misc_feature (1)..(80): Homolog of NCBI NO: 15229565 NR Description: hydoxyethylthiazole kinase -related [Arabidopsis
MMQKITATGCSVTALIAAFVAVDKSHALDAAVSALAVFGVAGELGMKMAKGPASLRMHLIDELYGLDESALNSHVNVTSL

SEQ ID NO: 58490 - protein, 79 aa, Glycine max
  peptide (1)..(79): Ceres Seq. ID no. 14312954
  misc_feature (1)..(68): Pfam Name: Hydroxyethylthiazole kinase family Pfam Description: Hydroxyethylthiazole kinase family
  misc_feature (1)..(75): Homolog of NCBI NO: 20091547 NR Description: hydroxyethylthiazole kinase [Methanosarcina
  misc_feature (1)..(76): Homolog of NCBI NO: 19552679 NR Description: hydroxyethylthiazole kinase
  misc_feature (1)..(72): Homolog of NCBI NO: 20808607 NR Description: Hydroxyethylthiazole kinase, sugar kinase family
  misc_feature (1)..(75): Homolog of NCBI NO: 23049619 NR Description: hypothetical protein [Methanosarcina barkeri]
  misc_feature (1)..(76): Homolog of NCBI NO: 23111999 NR Description: hypothetical protein [Desulfitobacterium
  misc_feature (1)..(79): Homolog of NCBI NO: 21229336 NR Description: Hydroxyethylthiazole kinase [Methanosarcina mazei
  misc_feature (1)..(71): Homolog of NCBI NO: 22960557 NR Description: hypothetical protein [Rhodobacter sphaeroides]
  misc_feature (1)..(76): Homolog of NCBI NO: 28899986 NR Description: putative hydroxyethylthiazole kinase
  misc_feature (1)..(77): Homolog of NCBI NO: 34915114 NR Description: putative hydoxyethylthiazole kinase
  misc_feature (1)..(79): Homolog of NCBI NO: 15229565 NR Description: hydoxyethylthiazole kinase -related [Arabidopsis
MQKITATGCSVTALIAAFVAVDKSHALDAAVSALAVFGVAGELGMKMAKGPASLRMHLIDELYGLDESALNSHVNVTSL

SEQ ID NO: 58491 - DNA, 1290 bp, Glycine max
  misc_feature (1)..(1290): Ceres Seq. ID no. 15169419
aaagcactatccattccattccacgttccaagctaagatctgggctttggcttaaaggaatattccgtggggtgatcatagtttttaccctgttcttatgatgggtgactcagaggtggcaaagttcggcttaaaagtcgggaagaatgagaaaaatgggttcccaaggggactagatcctgcaatatccaagttttttgtgcagctccaaagtgttgttaagtctcgacttagtagattagcaaaacaggatggaatgagtttgatgagttctgtccaaagaaaaggggataagtctttcagttactctgaagctgaactaaatgagcaactgcaagcatggagagaaaatccatcttgggttgacaagcctccactaataaaggtcactgctcccaaaggttctctttgcaaccttgatgtagaagttgatgttggcctaccccctgatgcagtatataatatagtgatagatcctgacaataggagagttttcaaaaatatcaaagaagtggtatccagaaaagtgttggttgatgagggtcataggcaagtggttgatcttgaccaagcagccatttggaaatttctttggtggtctgggactatatcaatcaatgttttggtagatcaaaacagaaaggtcagttctatgaagttcaagcaaaccaaggctggattcatgaaaaaatttgagggctgctggagagtagagcctttatttgttgacgaagcaatgtgccatccctttaagccagtgacaaaggaagactattatgcatgtgcaagaggcaaaggaagaattggatctaaagttagcctgaaacaaacacttcagccatccattgtccctccccctcccctatcatggtatttgaggggaattaccgcccggacgactgagatgcttataaatgatatgcttgcagaaactgctagaatcagaggaggatatgaggctgaaaagtctaaggcagaggagcttcagggaaaacctggtgaaaatgtggacctggtttctaacacaagtgacattaaagaaagatggaaattgcgtagagaaaatgcaaagcatagccatagaagactgctgaccaagtgatattcctatgtttgttttattttttcagcaatctatctagattgttacatgtagtccagtttaaaggattctaatgtatgcattacacaatgttaaagtcactaattccagctcattgcatgacatttcagtcggatgagttgatgtatccaatagcatagcaagagggaaacattgcagttcttttc

SEQ ID NO: 58492 - protein, 334 aa, Glycine max
  peptide (1)..(334): Ceres Seq. ID no. 15169420
  misc_feature (167)..(266): Pfam Name: Domain of unknown function DUF220 Pfam Description: Domain of unknown function DUF220
  misc_feature (136)..(326): Homolog of NCBI NO: 8778583 NR Description: F28C11.19 [Arabidopsis thaliana]
  misc_feature (42)..(282): Homolog of NCBI NO: 15220802 NR Description: OBP32pep protein -related [Arabidopsis thaliana]
  misc_feature (38)..(282): Homolog of NCBI NO: 15220845 NR Description: OBP32pep protein -related [Arabidopsis thaliana]
  misc_feature (57)..(284): Homolog of NCBI NO: 15220781 NR Description: OBP32pep protein -related [Arabidopsis thaliana]
  misc_feature (2)..(333): Homolog of NCBI NO: 8778583 NR Description: F28C11.19 [Arabidopsis thaliana]
  misc_feature (2)..(333): Homolog of NCBI NO: 21554971 NR Description: unknown [Arabidopsis thaliana]
  misc_feature (2)..(333): Homolog of NCBI NO: 18395257 NR Description: expressed protein [Arabidopsis thaliana]
  misc_feature (33)..(281): Homolog of NCBI NO: 2129655 NR Description: hypothetical protein OBP32 - Arabidopsis thaliana
  misc_feature (11)..(331): Homolog of NCBI NO: 18409585 NR Description: expressed protein [Arabidopsis thaliana]
  misc_feature (11)..(331): Homolog of NCBI NO: 21592433 NR Description: unknown [Arabidopsis thaliana]
MMGDSEVAKFGLKVGKNEKNGFPRGLDPAISKFFVQLQSVVKSRLSRLAKQDGMSLMSSVQRKGDKSFSYSEAELNEQLQAWRENPSWVDKPPLIKVTAPKGSLCNLDVEVDVGLPPDAVYNIVIDPDNRRVFKNIKEVVSRKVLVDEGHRQVVDLDQAAIWKFLWWSGTISINVLVDQNRKVSSMKFKQTKAGFMKKFEGCWRVEPLFVDEAMCHPFKPVTKEDYYACARGKGRIGSKVSLKQTLQPSIVPPPPLSWYLRGITARTTEMLINDMLAETARIRGGYEAEKSKAEELQGKPGENVDLVSNTSDIKERWKLRRENAKHSHRRLLTK

SEQ ID NO: 58493 - protein, 333 aa, Glycine max
  peptide (1)..(333): Ceres Seq. ID no. 15169421
  misc_feature (166)..(265): Pfam Name: Domain of unknown function DUF220 Pfam Description: Domain of unknown function DUF220
  misc_feature (135)..(325): Homolog of NCBI NO: 8778583 NR Description: F28C11.19 [Arabidopsis thaliana]
  misc_feature (41)..(281): Homolog of NCBI NO: 15220802 NR Description: OBP32pep protein -related [Arabidopsis thaliana]
  misc_feature (37)..(281): Homolog of NCBI NO: 15220845 NR Description: OBP32pep protein -related [Arabidopsis thaliana]
  misc_feature (56)..(283): Homolog of NCBI NO: 15220781 NR Description: OBP32pep protein -related [Arabidopsis thaliana]
  misc_feature (1)..(332): Homolog of NCBI NO: 8778583 NR Description: F28C11.19 [Arabidopsis thaliana]
  misc_feature (1)..(332): Homolog of NCBI NO: 21554971 NR Description: unknown [Arabidopsis thaliana]
  misc_feature (1)..(332): Homolog of NCBI NO: 18395257 NR Description: expressed protein [Arabidopsis thaliana]
  misc_feature (32)..(280): Homolog of NCBI NO: 2129655 NR Description: hypothetical protein OBP32 - Arabidopsis thaliana
  misc_feature (10)..(330): Homolog of NCBI NO: 18409585 NR Description: expressed protein [Arabidopsis thaliana]
  misc_feature (10)..(330): Homolog of NCBI NO: 21592433 NR Description: unknown [Arabidopsis thaliana]
MGDSEVAKFGLKVGKNEKNGFPRGLDPAISKFFVQLQSVVKSRLSRLAKQDGMSLMSSVQRKGDKSFSYSEAELNEQLQAWRENPSWVDKPPLIKVTAPKGSLCNLDVEVDVGLPPDAVYNIVIDPDNRRVFKNIKEVVSRKVLVDEGHRQVVDLDQAAIWKFLWWSGTISINVLVDQNRKVSSMKFKQTKAGFMKKFEGCWRVEPLFVDEAMCHPFKPVTKEDYYACARGKGRIGSKVSLKQTLQPSIVPPPPLSWYLRGITARTTEMLINDMLAETARIRGGYEAEKSKAEELQGKPGENVDLVSNTSDIKERWKLRRENAKHSHRRLLTK

SEQ ID NO: 58494 - protein, 281 aa, Glycine max
  peptide (1)..(281): Ceres Seq. ID no. 15169422
  misc_feature (114)..(213): Pfam Name: Domain of unknown function DUF220 Pfam Description: Domain of unknown function DUF220
  misc_feature (83)..(273): Homolog of NCBI NO: 8778583 NR Description: F28C11.19 [Arabidopsis thaliana]
  misc_feature (1)..(229): Homolog of NCBI NO: 15220802 NR Description: OBP32pep protein -related [Arabidopsis thaliana]
  misc_feature (1)..(229): Homolog of NCBI NO: 15220845 NR Description: OBP32pep protein -related [Arabidopsis thaliana]
  misc_feature (4)..(231): Homolog of NCBI NO: 15220781 NR Description: OBP32pep protein -related [Arabidopsis thaliana]
  misc_feature (1)..(280): Homolog of NCBI NO: 8778583 NR Description: F28C11.19 [Arabidopsis thaliana]
  misc_feature (1)..(280): Homolog of NCBI NO: 21554971 NR Description: unknown [Arabidopsis thaliana]
  misc_feature (1)..(280): Homolog of NCBI NO: 18395257 NR Description: expressed protein [Arabidopsis thaliana]
  misc_feature (1)..(228): Homolog of NCBI NO: 2129655 NR Description: hypothetical protein OBP32 - Arabidopsis thaliana
  misc_feature (1)..(278): Homolog of NCBI NO: 18409585 NR Description: expressed protein [Arabidopsis thaliana]
  misc_feature (1)..(278): Homolog of NCBI NO: 21592433 NR Description: unknown [Arabidopsis thaliana]
MSLMSSVQRKGDKSFSYSEAELNEQLQAWRENPSWVDKPPLIKVTAPKGSLCNLDVEVDVGLPPDAVYNIVIDPDNRRVFKNIKEVVSRKVLVDEGHRQVVDLDQAAIWKFLWWSGTISINVLVDQNRKVSSMKFKQTKAGFMKKFEGCWRVEPLFVDEAMCHPFKPVTKEDYYACARGKGRIGSKVSLKQTLQPSIVPPPPLSWYLRGITARTTEMLINDMLAETARIRGGYEAEKSKAEELQGKPGENVDLVSNTSDIKERWKLRRENAKHSHRRLLTK

SEQ ID NO: 58495 - DNA, 1785 bp, Glycine max
  misc_feature (1)..(1785): Ceres Seq. ID no. 14311183
aataaaccatctcattccctctctccctaaaatggccactcttccctcctacgaccacctcatcttcactgccttagctttcttcttatctggccttattttcttcctcaaacacaaatccaaatccaaatccaaaaaattcaacctccctccaggaccccctggatggcctattgttggaaacctcttccaagttgctcgttccgggaaacctttctttgaatacgtgaacgatgtgagactcaaatatggctcaatcttcaccctcaagatggggacaaggaccatgatcatcctcaccgactcaaaactggtccacgaggccatgatacaaaagggtgcaacctacgccaccaggcctccagagaatcccaccagaaccatcttcagcgaaaacaagttcaccgtgaatgctgccacctatggccccgtgtggaagtctctcaggaggaacatggtgcagaacatgctcagctcaacaagacttaaggagtttcgcagcgttcgcgacaatgcgatggacaagctcatcaacaggctcaaggacgaagccgagaataataatggtgcggtttgggttctcaaagatgctaggtttgctgttttttgcatacttgtggctatgtgttttggtcttgagatggatgaggagacagttgagagaatcgatcaggttatgaagagtgttctcatcaccttggatccgagaattgatgactatcttccaattctaagtccgtttttctcaaagcaaagaaagaaagccttggaggttcgtagagaacaagttgagttcttagttccaattatagaacaaagaagaagagcaatccaaaacccgggttcagatcacaccgccacaacgttttcctacctagacacactttttgatctcaaagttgaagggaagaaatcagcaccttctgatgcagaattggtttcactgtgctcagagtttctcaacggtggcacagacacaacagcaacagcggttgagtggggcatagcacagctcatagcaaaccctcacgttcagaaaaagctctatgaagaaataaagaggacggtgggagagaagaaagtggatgaaaaggatgttgagaaaatgccatacctacacgctgtggtgaaggagcttcttagaaagcaccctccaacacactttgtgctaacacatgctgtgactgaacccaccactttgggtggttatgacataccaattgatgcaagtgttgaggtgtacacaccagccattgctggtgacccgaaaaattggtcaaaccctgagaagtttgaccccgagaggttcatctctgggggtgaggaagcagacataaccggggtaactggggtgaagatgatgccttttggtgttgggagaaggatttgccctggcttggctatggccacagtgcatattcacctcatgatggctaggatggtgcaggagtttgagtgggatgcttacccaccagagaagaagttggatttcactggcaagtgggagttcactgtggtcatgaaagagtctctaagagcaaccatcaaaccaagaggaggaggaggagaaaaagtgcacttgtaaaattttgttgctcctcctcctttctggtttttaatttcacagataacataaatattattgttgctattgttattattatatatggatacatcatcgtggtttgtggtggatttgcatacagagtactgcaagtttcatcacatcattatattgccttcttaattggtccggtttgttggagaaatatttgttttgatgac

SEQ ID NO: 58496 - protein, 527 aa, Glycine max
  peptide (1)..(527): Ceres Seq. ID no. 14311184
  misc_feature (50)..(517): Pfam Name: Cytochrome P450 Pfam Description: Cytochrome P450
INHLIPSLPKMATLPSYDHLIFTALAFFLSGLIFFLKHKSKSKSKKFNLPPGPPGWPIVGNLFQVARSGKPFFEYVNDVRLKYGSIFTLKMGTRTMIILTDSKLVHEAMIQKGATYATRPPENPTRTIFSENKFTVNAATYGPVWKSLRRNMVQNMLSSTRLKEFRSVRDNAMDKLINRLKDEAENNNGAVWVLKDARFAVFCILVAMCFGLEMDEETVERIDQVMKSVLITLDPRIDDYLPILSPFFSKQRKKALEVRREQVEFLVPIIEQRRRAIQNPGSDHTATTFSYLDTLFDLKVEGKKSAPSDAELVSLCSEFLNGGTDTTATAVEWGIAQLIANPHVQKKLYEEIKRTVGEKKVDEKDVEKMPYLHAVVKELLRKHPPTHFVLTHAVTEPTTLGGYDIPIDASVEVYTPAIAGDPKNWSNPEKFDPERFISGGEEADITGVTGVKMMPFGVGRRICPGLAMATVHIHLMMARMVQEFEWDAYPPEKKLDFTGKWEFTVVMKESLRATIKPRGGGGEKVHL

SEQ ID NO: 58497 - protein, 517 aa, Glycine max
  peptide (1)..(517): Ceres Seq. ID no. 14311185
  misc_feature (40)..(507): Pfam Name: Cytochrome P450 Pfam Description: Cytochrome P450
MATLPSYDHLIFTALAFFLSGLIFFLKHKSKSKSKKFNLPPGPPGWPIVGNLFQVARSGKPFFEYVNDVRLKYGSIFTLKMGTRTMIILTDSKLVHEAMIQKGATYATRPPENPTRTIFSENKFTVNAATYGPVWKSLRRNMVQNMLSSTRLKEFRSVRDNAMDKLINRLKDEAENNNGAVWVLKDARFAVFCILVAMCFGLEMDEETVERIDQVMKSVLITLDPRIDDYLPILSPFFSKQRKKALEVRREQVEFLVPIIEQRRRAIQNPGSDHTATTFSYLDTLFDLKVEGKKSAPSDAELVSLCSEFLNGGTDTTATAVEWGIAQLIANPHVQKKLYEEIKRTVGEKKVDEKDVEKMPYLHAVVKELLRKHPPTHFVLTHAVTEPTTLGGYDIPIDASVEVYTPAIAGDPKNWSNPEKFDPERFISGGEEADITGVTGVKMMPFGVGRRICPGLAMATVHIHLMMARMVQEFEWDAYPPEKKLDFTGKWEFTVVMKESLRATIKPRGGGGEKVHL

SEQ ID NO: 58498 - protein, 437 aa, Glycine max
  peptide (1)..(437): Ceres Seq. ID no. 14311186
  misc_feature (1)..(427): Pfam Name: Cytochrome P450 Pfam Description: Cytochrome P450
MGTRTMIILTDSKLVHEAMIQKGATYATRPPENPTRTIFSENKFTVNAATYGPVWKSLRRNMVQNMLSSTRLKEFRSVRDNAMDKLINRLKDEAENNNGAVWVLKDARFAVFCILVAMCFGLEMDEETVERIDQVMKSVLITLDPRIDDYLPILSPFFSKQRKKALEVRREQVEFLVPIIEQRRRAIQNPGSDHTATTFSYLDTLFDLKVEGKKSAPSDAELVSLCSEFLNGGTDTTATAVEWGIAQLIANPHVQKKLYEEIKRTVGEKKVDEKDVEKMPYLHAVVKELLRKHPPTHFVLTHAVTEPTTLGGYDIPIDASVEVYTPAIAGDPKNWSNPEKFDPERFISGGEEADITGVTGVKMMPFGVGRRICPGLAMATVHIHLMMARMVQEFEWDAYPPEKKLDFTGKWEFTVVMKESLRATIKPRGGGGEKVHL

SEQ ID NO: 58499 - DNA, 1103 bp, Glycine max
  misc_feature (1)..(1103): Ceres Seq. ID no. 12582229
cagctacgtaggccccccccccgatgatgagaagcgaagtgctgttactgccatggacagtatattttctgtgctaacccattacagtgaggccacagggagattggtgtgtagaaagaggtccagcattcctgacgtgggtcttttaagcacatccttgattatttctcttggtagaatcaaacaaagctttgtattgtgagttattggaaatgtctagttttgttattactttaccgcaagctttatgcttttttgcagacccttaatttgttgtttgtatgattttgagtttccatgcagaactaatccgcatttaccagacatgcctattgtttatgctagtgacgccttcttgaaattgacaggttatgcaaaaaatgaagttttgggccacaactgtagatttttaggtggaacagataccgatacctcgactttacatctggtgatacacttcttctcgccataggttttttaattttgtcttgtaatttggcaacttagagtcttagactaatgggaatggaccattttgttatgcctttctcttattgcttacgttcagataagggaaagcattaaaacagaacaaccatgcacagtacgtattttgaattacaggaaggacaaaagctcattttggaattttcttcatatctcacccgttcgtgatgcttctggcaaggttgcatactttgtgggagttcaaatagaagacaacaataaaaacgatgatagccattgtttgagtcctgagaagagacaacttagtgtggttggtgtagtcaaggttgcagtgaggagtttatcaatgactgcgggatcttctgagtcgtagcaaaaggatcatgtgagtttggaacaaataatatttgcctacttcccagaaatattaatccattcgaaaaaataatcaatctcaattggtgattgttgagatgatagaaaggtaaaagaattaatttgtgaagaagaaaaaaaaagagagtccatactgtcaattgtaagaaaacattctctgttggacgtgtataaataaaatgtattatatttcctaactgcatttattttccgtaatgtagcaataaaagttgacttgt

SEQ ID NO: 58500 - protein, 74 aa, Glycine max
  peptide (1)..(74): Ceres Seq. ID no. 12582230
  misc_feature (20)..(68): Homolog of NCBI NO: 541825 NR Description: serine/threonine protein kinase (EC 2.7.1.-),
  misc_feature (20)..(68): Homolog of NCBI NO: 24899170 NR Description: phototropin [Vicia faba]
  misc_feature (20)..(65): Homolog of NCBI NO: 21243288 NR Description: sensor histidine kinase
  misc_feature (20)..(68): Homolog of NCBI NO: 13786959 NR Description: Chain A, Structure Of A Flavin-Binding Domain,
  misc_feature (24)..(61): Homolog of NCBI NO: 33357429 NR Description: Chain A, Crystal Structure Of The Phot-Lov1
  misc_feature (20)..(65): Homolog of NCBI NO: 18395411 NR Description: putative receptor-like protein kinase
  misc_feature (20)..(65): Homolog of NCBI NO: 30678020 NR Description: receptor-related protein kinase [Arabidopsis
  misc_feature (20)..(71): Homolog of NCBI NO: 7487253 NR Description: probable receptor-like protein kinase
  misc_feature (20)..(66): Homolog of NCBI NO: 18395411 NR Description: putative receptor-like protein kinase
  misc_feature (20)..(66): Homolog of NCBI NO: 30678020 NR Description: receptor-related protein kinase [Arabidopsis
MLFCRPLICCLYDFEFPCRTNPHLPDMPIVYASDAFLKLTGYAKNEVLGHNCRFLGGTDTDTSTLHLVIHFFSP

SEQ ID NO: 58501 - protein, 66 aa, Glycine max
  peptide (1)..(66): Ceres Seq. ID no. 12582231
  misc_feature (8)..(66): Homolog of NCBI NO: 7487253 NR Description: probable receptor-like protein kinase
  misc_feature (8)..(66): Homolog of NCBI NO: 18395411 NR Description: putative receptor-like protein kinase
  misc_feature (8)..(66): Homolog of NCBI NO: 30678020 NR Description: receptor-related protein kinase [Arabidopsis
SYVGPPPDDEKRSAVTAMDSIFSVLTHYSEATGRLVCRKRSSIPDVGLLSTSLIISLGRIKQSFVL

SEQ ID NO: 58502 - protein, 49 aa, Glycine max
  peptide (1)..(49): Ceres Seq. ID no. 12582232
  misc_feature (1)..(49): Homolog of NCBI NO: 7487253 NR Description: probable receptor-like protein kinase
  misc_feature (1)..(49): Homolog of NCBI NO: 18395411 NR Description: putative receptor-like protein kinase
  misc_feature (1)..(49): Homolog of NCBI NO: 30678020 NR Description: receptor-related protein kinase [Arabidopsis
MDSIFSVLTHYSEATGRLVCRKRSSIPDVGLLSTSLIISLGRIKQSFVL

SEQ ID NO: 58503 - DNA, 2188 bp, Glycine max
  misc_feature (1)..(2188): Ceres Seq. ID no. 14310784
atgagtgagtgaactttggataagtaagtgttgtgtgaagattttgtatgagtacttgagcttctttgccttgtcagcttttgatttttgatgttgtggtgtggcagtggaagtcatactaaaaaaggtgattcttttgcagtggcaagcatggcaagaggaagagcagatgtgaactccagaaaaaaattggtcacagctgtgttggttttggtgattgttggtggttttttctatttctattctcagaatagtgattcatcttctgttgtgtatggtgataaatctttgagccactttggtttgggaggggacaaagatgatggtgaatcttcctccacagttgttggaggagagggcagtgttgtaccaaagagcattccagtctgtgatgatcgattatccgagctgattccttgtctggacagaaatctcatataccaaacaagattgaagcttgatttatctttgatggagcactatgagagacactgcccaacacctgataggagatacaattgtttaattcctcctcctccagggtacaaggttcctatcaagtggcccaaaagcagagaccaggtgtggaaggcaaatatacctcatacccatctagcaactgaaaaatctgaccagaactggatggttgtgaaaggtgaaacaatagtgtttcctggtggaggaacccacttccattatggtgctggtaaatacattgcttcaattgctaatatgcttaattttccaaacaatgatataaacaatgggggaagagtcaggtctgttcttgatgttggctgtggggttgctagctttggaggatatcttatttcctctaatgtgatagcaatgtcattggcaccaaatgatgttcatcaaaatcaaatccagtttgccttagagaggggaattccagcatatcttggtgtcttggggacccaaagactcccttatccaagtagatcattcgaacttgctcattgctctcgctgtagaatcgattggcttcagagagatggtatacttctgcttgagctggataggttactgaggccaggaggttatttcgcgtactcatctcctgaagcctatgcacaggatgaagaggataggaggatatggcgagaaatgagcactcttgtggagaggatgtgctggaaaatagcttctaagaaggatcagactgttatttgggtcaagcctctcactaatagctgctacttaaagagattgcctggtactaagcctccactctgcaggtctgatgatgatcctgatgctgtttggggagttaaaatgaaagtttgcatctcacgttattcagatcaaatgcacaaagcaaaaggaagtgatttggctccttggcctgctcgattgactactccacctcctcgtctggcagaaattcactattctactgaaatgtttgagaaggacatggaagtttggaaacaacgagttcgtaattactggagcaagctagccagtaagattaagccagacacaattcggaacgtgatggatatgaaggcaaacttgggttcatttgcagcagctttgaaggacaaagatgtttgggttatgaatgtagtgccagaaaatgaacaaaaaactctcaagattatatacgacagaggacttataggaacagttcacaactggtgtgaagctttttcaacctaccctcgaacgtatgatctactccatgcatggactgtgttttctgatattattaagaaagaatgcagtccagaggatttattaattgagatggatagaatcctaaggccaaagggtttcatcattgtccatgataagcgttcagtggtggagtatataaagaaatacttgccagcattacactgggaggctgtgaccatatatgatgtagatgatgatgatacagtgattataattcaaaagaaaatgtggctcacaagtcaaagcatcaaggtctctgaatagtgtcataatattcacttgtataagttaccagtgctactaggtgtataagtgtattatgtagctctattcctaaggcctaagctttcagtgtagctctcttcactatagacgcaagtcacagtgaaagctcacccaaatcgtctttatctttttttgcatttattgaattttgtacgcttcaacatttatatccactctgaagaaatattctaatttaaaaatt

SEQ ID NO: 58504 - protein, 624 aa, Glycine max
  peptide (1)..(624): Ceres Seq. ID no. 14310785
  misc_feature (106)..(611): Pfam Name: Putative methyltransferase Pfam Description: Putative methyltransferase
  misc_feature (97)..(623): Homolog of NCBI NO: 11357548 NR Description: hypothetical protein F18O22.220 - Arabidopsis
  misc_feature (28)..(623): Homolog of NCBI NO: 22326809 NR Description: dehydration-induced protein-related [Arabidopsis
  misc_feature (415)..(624): Homolog of NCBI NO: 25406781 NR Description: hypothetical protein [imported] - Arabidopsis
  misc_feature (99)..(414): Homolog of NCBI NO: 25406781 NR Description: hypothetical protein [imported] - Arabidopsis
  misc_feature (21)..(624): Homolog of NCBI NO: 14423548 NR Description: Unknown protein [Arabidopsis thaliana]
  misc_feature (23)..(624): Homolog of NCBI NO: 21536697 NR Description: ankyrin-like protein [Arabidopsis thaliana]
  misc_feature (21)..(624): Homolog of NCBI NO: 18390392 NR Description: dehydration-induced protein-related [Arabidopsis
  misc_feature (39)..(624): Homolog of NCBI NO: 7488052 NR Description: probable ankyrin - Arabidopsis thaliana
  misc_feature (23)..(621): Homolog of NCBI NO: 22331280 NR Description: dehydration-induced protein-related [Arabidopsis
  misc_feature (23)..(624): Homolog of NCBI NO: 18414198 NR Description: dehydration-induced protein-related [Arabidopsis
MLWCGSGSHTKKGDSFAVASMARGRADVNSRKKLVTAVLVLVIVGGFFYFYSQNSDSSSVVYGDKSLSHFGLGGDKDDGESSSTVVGGEGSVVPKSIPVCDDRLSELIPCLDRNLIYQTRLKLDLSLMEHYERHCPTPDRRYNCLIPPPPGYKVPIKWPKSRDQVWKANIPHTHLATEKSDQNWMVVKGETIVFPGGGTHFHYGAGKYIASIANMLNFPNNDINNGGRVRSVLDVGCGVASFGGYLISSNVIAMSLAPNDVHQNQIQFALERGIPAYLGVLGTQRLPYPSRSFELAHCSRCRIDWLQRDGILLLELDRLLRPGGYFAYSSPEAYAQDEEDRRIWREMSTLVERMCWKIASKKDQTVIWVKPLTNSCYLKRLPGTKPPLCRSDDDPDAVWGVKMKVCISRYSDQMHKAKGSDLAPWPARLTTPPPRLAEIHYSTEMFEKDMEVWKQRVRNYWSKLASKIKPDTIRNVMDMKANLGSFAAALKDKDVWVMNVVPENEQKTLKIIYDRGLIGTVHNWCEAFSTYPRTYDLLHAWTVFSDIIKKECSPEDLLIEMDRILRPKGFIIVHDKRSVVEYIKKYLPALHWEAVTIYDVDDDDTVIIIQKKMWLTSQSIKVSE

SEQ ID NO: 58505 - protein, 604 aa, Glycine max
  peptide (1)..(604): Ceres Seq. ID no. 14310786
  misc_feature (86)..(591): Pfam Name: Putative methyltransferase Pfam Description: Putative methyltransferase
  misc_feature (77)..(603): Homolog of NCBI NO: 11357548 NR Description: hypothetical protein F18O22.220 - Arabidopsis
  misc_feature (8)..(603): Homolog of NCBI NO: 22326809 NR Description: dehydration-induced protein-related [Arabidopsis
  misc_feature (395)..(604): Homolog of NCBI NO: 25406781 NR Description: hypothetical protein [imported] - Arabidopsis
  misc_feature (79)..(394): Homolog of NCBI NO: 25406781 NR Description: hypothetical protein [imported] - Arabidopsis
  misc_feature (1)..(604): Homolog of NCBI NO: 14423548 NR Description: Unknown protein [Arabidopsis thaliana]
  misc_feature (3)..(604): Homolog of NCBI NO: 21536697 NR Description: ankyrin-like protein [Arabidopsis thaliana]
  misc_feature (1)..(604): Homolog of NCBI NO: 18390392 NR Description: dehydration-induced protein-related [Arabidopsis
  misc_feature (19)..(604): Homolog of NCBI NO: 7488052 NR Description: probable ankyrin - Arabidopsis thaliana
  misc_feature (3)..(601): Homolog of NCBI NO: 22331280 NR Description: dehydration-induced protein-related [Arabidopsis
  misc_feature (3)..(604): Homolog of NCBI NO: 18414198 NR Description: dehydration-induced protein-related [Arabidopsis
MARGRADVNSRKKLVTAVLVLVIVGGFFYFYSQNSDSSSVVYGDKSLSHFGLGGDKDDGESSSTVVGGEGSVVPKSIPVCDDRLSELIPCLDRNLIYQTRLKLDLSLMEHYERHCPTPDRRYNCLIPPPPGYKVPIKWPKSRDQVWKANIPHTHLATEKSDQNWMVVKGETIVFPGGGTHFHYGAGKYIASIANMLNFPNNDINNGGRVRSVLDVGCGVASFGGYLISSNVIAMSLAPNDVHQNQIQFALERGIPAYLGVLGTQRLPYPSRSFELAHCSRCRIDWLQRDGILLLELDRLLRPGGYFAYSSPEAYAQDEEDRRIWREMSTLVERMCWKIASKKDQTVIWVKPLTNSCYLKRLPGTKPPLCRSDDDPDAVWGVKMKVCISRYSDQMHKAKGSDLAPWPARLTTPPPRLAEIHYSTEMFEKDMEVWKQRVRNYWSKLASKIKPDTIRNVMDMKANLGSFAAALKDKDVWVMNVVPENEQKTLKIIYDRGLIGTVHNWCEAFSTYPRTYDLLHAWTVFSDIIKKECSPEDLLIEMDRILRPKGFIIVHDKRSVVEYIKKYLPALHWEAVTIYDVDDDDTVIIIQKKMWLTSQSIKVSE

SEQ ID NO: 58506 - protein, 497 aa, Glycine max
  peptide (1)..(497): Ceres Seq. ID no. 14310787
  misc_feature (1)..(484): Pfam Name: Putative methyltransferase Pfam Description: Putative methyltransferase
  misc_feature (1)..(496): Homolog of NCBI NO: 11357548 NR Description: hypothetical protein F18O22.220 - Arabidopsis
  misc_feature (1)..(496): Homolog of NCBI NO: 22326809 NR Description: dehydration-induced protein-related [Arabidopsis
  misc_feature (288)..(497): Homolog of NCBI NO: 25406781 NR Description: hypothetical protein [imported] - Arabidopsis
  misc_feature (1)..(287): Homolog of NCBI NO: 25406781 NR Description: hypothetical protein [imported] - Arabidopsis
  misc_feature (1)..(497): Homolog of NCBI NO: 14423548 NR Description: Unknown protein [Arabidopsis thaliana]
  misc_feature (1)..(497): Homolog of NCBI NO: 21536697 NR Description: ankyrin-like protein [Arabidopsis thaliana]
  misc_feature (1)..(497): Homolog of NCBI NO: 18390392 NR Description: dehydration-induced protein-related [Arabidopsis
  misc_feature (1)..(497): Homolog of NCBI NO: 7488052 NR Description: probable ankyrin - Arabidopsis thaliana
  misc_feature (1)..(494): Homolog of NCBI NO: 22331280 NR Description: dehydration-induced protein-related [Arabidopsis
  misc_feature (1)..(497): Homolog of NCBI NO: 18414198 NR Description: dehydration-induced protein-related [Arabidopsis
MEHYERHCPTPDRRYNCLIPPPPGYKVPIKWPKSRDQVWKANIPHTHLATEKSDQNWMVVKGETIVFPGGGTHFHYGAGKYIASIANMLNFPNNDINNGGRVRSVLDVGCGVASFGGYLISSNVIAMSLAPNDVHQNQIQFALERGIPAYLGVLGTQRLPYPSRSFELAHCSRCRIDWLQRDGILLLELDRLLRPGGYFAYSSPEAYAQDEEDRRIWREMSTLVERMCWKIASKKDQTVIWVKPLTNSCYLKRLPGTKPPLCRSDDDPDAVWGVKMKVCISRYSDQMHKAKGSDLAPWPARLTTPPPRLAEIHYSTEMFEKDMEVWKQRVRNYWSKLASKIKPDTIRNVMDMKANLGSFAAALKDKDVWVMNVVPENEQKTLKIIYDRGLIGTVHNWCEAFSTYPRTYDLLHAWTVFSDIIKKECSPEDLLIEMDRILRPKGFIIVHDKRSVVEYIKKYLPALHWEAVTIYDVDDDDTVIIIQKKMWLTSQSIKVSE

SEQ ID NO: 58507 - DNA, 1212 bp, Glycine max
  misc_feature (1)..(1212): Ceres Seq. ID no. 14310756
agttgcattcgttcattcactccctaacatagcaattactaccatttaccaaagtaaacccagagatggagtggtgtgtgtcaatgccaaagattgagctgcatgctcacctcaatggatccatccgagactccacacttcttgaactcactaaggctttgattggaaagggtgtcatgaatttctccgaagtggagcatatcatcctcaaatataaccgttccctaaaagaagttttcaagctgttcgacctaatccacattctcaccactgatcacaacactgttacaagaattaccagagaagttattgaggattttgcatcagagaatgttgtctatctggagttgaggaccactccaaagaaaaatgattctgtgggaatgagcaaacactcttatgttgaagctgtactgaaaggtctaagatcaatcacttcagttgatgtggatttcattccacattgtgaagattcaaagactctttttactcctgcaccggttattaatggacatgtgagaaaaaaaatctttgttaggcttctcttgagcattgacagaagggagacaacagaagctgcaatggaaactgtcaagcttgcattggaaatgaggccttatggggtagttggaattgacctctctggaaatccaagtattggtgattggaccacatatttgccagcattgaaatttgctcgagaacaaggtctttatgtaacacttcattgtggcgagttacctaattcaaaggagataaaaaatatgcttgacttccgtccccaaaggattggacatgcttgtttctttgaggatgaacactggagacagctgaagtcgtcgaacattccggttgaaatttgcttgacatcaaacgttaggacaatgactgttccatctatagatgttcaccactttgctcatttgtacaacgcaaaacatcctttagccctgtgtactgatgactcgggagtcttctctacctgtctctccaaggaatacaaaattgctgctgattcatttgggctgggaaggagggaaatgtttgagctatcaaggaatgctgttgagcatatattcgcagatagcaaagtaaaggaggatttaagaaaaattttcaattcagtggcaaaaaaatatggaagtgtaaccacagtttcatctttagagaatatctgcatttagatataattaatattagagctttgttgac

SEQ ID NO: 58508 - protein, 372 aa, Glycine max
  peptide (1)..(372): Ceres Seq. ID no. 14310757
  misc_feature (6)..(350): Homolog of NCBI NO: 32403822 NR Description: hypothetical protein [Neurospora crassa]
  misc_feature (154)..(342): Homolog of NCBI NO: 24645260 NR Description: Adenosine deaminase CG11994-PA [Drosophila
  misc_feature (60)..(357): Homolog of NCBI NO: 12854977 NR Description: unnamed protein product [Mus musculus]
  misc_feature (52)..(357): Homolog of NCBI NO: 29747908 NR Description: Unknown (protein for MGC:63264) [Mus musculus]
  misc_feature (1)..(284): Homolog of NCBI NO: 4115949 NR Description: contains similarity to adenosine deaminases
  misc_feature (7)..(352): Homolog of NCBI NO: 37540847 NR Description: similar to Adenosine deaminase CG11994-PA [Homo
  misc_feature (2)..(357): Homolog of NCBI NO: 34899120 NR Description: putative adenosine deaminase
  misc_feature (176)..(348): Homolog of NCBI NO: 25407300 NR Description: probable adenosine deaminase [imported] -
  misc_feature (1)..(183): Homolog of NCBI NO: 25407300 NR Description: probable adenosine deaminase [imported] -
  misc_feature (1)..(358): Homolog of NCBI NO: 22328354 NR Description: adenosine deaminase -related [Arabidopsis
MEWCVSMPKIELHAHLNGSIRDSTLLELTKALIGKGVMNFSEVEHIILKYNRSLKEVFKLFDLIHILTTDHNTVTRITREVIEDFASENVVYLELRTTPKKNDSVGMSKHSYVEAVLKGLRSITSVDVDFIPHCEDSKTLFTPAPVINGHVRKKIFVRLLLSIDRRETTEAAMETVKLALEMRPYGVVGIDLSGNPSIGDWTTYLPALKFAREQGLYVTLHCGELPNSKEIKNMLDFRPQRIGHACFFEDEHWRQLKSSNIPVEICLTSNVRTMTVPSIDVHHFAHLYNAKHPLALCTDDSGVFSTCLSKEYKIAADSFGLGRREMFELSRNAVEHIFADSKVKEDLRKIFNSVAKKYGSVTTVSSLENICI

SEQ ID NO: 58509 - protein, 366 aa, Glycine max
  peptide (1)..(366): Ceres Seq. ID no. 14310758
  misc_feature (1)..(344): Homolog of NCBI NO: 32403822 NR Description: hypothetical protein [Neurospora crassa]
  misc_feature (148)..(336): Homolog of NCBI NO: 24645260 NR Description: Adenosine deaminase CG11994-PA [Drosophila
  misc_feature (54)..(351): Homolog of NCBI NO: 12854977 NR Description: unnamed protein product [Mus musculus]
  misc_feature (46)..(351): Homolog of NCBI NO: 29747908 NR Description: Unknown (protein for MGC:63264) [Mus musculus]
  misc_feature (1)..(278): Homolog of NCBI NO: 4115949 NR Description: contains similarity to adenosine deaminases
  misc_feature (1)..(346): Homolog of NCBI NO: 37540847 NR Description: similar to Adenosine deaminase CG11994-PA [Homo
  misc_feature (1)..(351): Homolog of NCBI NO: 34899120 NR Description: putative adenosine deaminase
  misc_feature (170)..(342): Homolog of NCBI NO: 25407300 NR Description: probable adenosine deaminase [imported] -
  misc_feature (1)..(177): Homolog of NCBI NO: 25407300 NR Description: probable adenosine deaminase [imported] -
  misc_feature (1)..(352): Homolog of NCBI NO: 22328354 NR Description: adenosine deaminase -related [Arabidopsis
MPKIELHAHLNGSIRDSTLLELTKALIGKGVMNFSEVEHIILKYNRSLKEVFKLFDLIHILTTDHNTVTRITREVIEDFASENVVYLELRTTPKKNDSVGMSKHSYVEAVLKGLRSITSVDVDFIPHCEDSKTLFTPAPVINGHVRKKIFVRLLLSIDRRETTEAAMETVKLALEMRPYGVVGIDLSGNPSIGDWTTYLPALKFAREQGLYVTLHCGELPNSKEIKNMLDFRPQRIGHACFFEDEHWRQLKSSNIPVEICLTSNVRTMTVPSIDVHHFAHLYNAKHPLALCTDDSGVFSTCLSKEYKIAADSFGLGRREMFELSRNAVEHIFADSKVKEDLRKIFNSVAKKYGSVTTVSSLENICI

SEQ ID NO: 58510 - protein, 335 aa, Glycine max
  peptide (1)..(335): Ceres Seq. ID no. 14310759
  misc_feature (1)..(313): Homolog of NCBI NO: 32403822 NR Description: hypothetical protein [Neurospora crassa]
  misc_feature (117)..(305): Homolog of NCBI NO: 24645260 NR Description: Adenosine deaminase CG11994-PA [Drosophila
  misc_feature (23)..(320): Homolog of NCBI NO: 12854977 NR Description: unnamed protein product [Mus musculus]
  misc_feature (15)..(320): Homolog of NCBI NO: 29747908 NR Description: Unknown (protein for MGC:63264) [Mus musculus]
  misc_feature (1)..(247): Homolog of NCBI NO: 4115949 NR Description: contains similarity to adenosine deaminases
  misc_feature (1)..(315): Homolog of NCBI NO: 37540847 NR Description: similar to Adenosine deaminase CG11994-PA [Homo
  misc_feature (1)..(320): Homolog of NCBI NO: 34899120 NR Description: putative adenosine deaminase
  misc_feature (139)..(311): Homolog of NCBI NO: 25407300 NR Description: probable adenosine deaminase [imported] -
  misc_feature (1)..(146): Homolog of NCBI NO: 25407300 NR Description: probable adenosine deaminase [imported] -
  misc_feature (1)..(321): Homolog of NCBI NO: 22328354 NR Description: adenosine deaminase -related [Arabidopsis
MNFSEVEHIILKYNRSLKEVFKLFDLIHILTTDHNTVTRITREVIEDFASENVVYLELRTTPKKNDSVGMSKHSYVEAVLKGLRSITSVDVDFIPHCEDSKTLFTPAPVINGHVRKKIFVRLLLSIDRRETTEAAMETVKLALEMRPYGVVGIDLSGNPSIGDWTTYLPALKFAREQGLYVTLHCGELPNSKEIKNMLDFRPQRIGHACFFEDEHWRQLKSSNIPVEICLTSNVRTMTVPSIDVHHFAHLYNAKHPLALCTDDSGVFSTCLSKEYKIAADSFGLGRREMFELSRNAVEHIFADSKVKEDLRKIFNSVAKKYGSVTTVSSLENICI

SEQ ID NO: 58511 - DNA, 1632 bp, Glycine max
  misc_feature (1)..(1632): Ceres Seq. ID no. 15178169
tttttttctgtgggaagaagaaaatgctggttcggaggagggtgatgagttggagaagggtggcgaaggcccttcaggctctggtagctcatgtcttacttttctccttcactatttcccttgctctcaagcttgaccatgtcattcgtcactcatggtggaaggtattttttcctctatgggtttttcatgctgtggtagcacgaggcaggttttccttgcccgctccttcgatgcctcatgatcgccgatgggctccttttcattcactcgtagcaactcctctacttgttgcatttgagctacttctttgtatgcatctcgggagcagttatgtgatgaatttaagaattgtcttcatgcccctgatatttcttgaaatggcgattttgtttgataatgtcaggatgtgtagggctttgatgcctggagatgatgaaaatttgaccgacgaagcagtatgggaaactcttccgcacttctgggtttcaatatccatggtcttctttattgctgccacagtgttcacccttctaaagatatgtggtgatgttgcagctctagggtggtgggacttgtttattaacttcggcattgcacagtgctttgcgtttcttgtttgtacaaagtggcacaatccaactattcatggaggctgtcatattacagaaccgtgttcatcatcaaataccataagatacctagacttgaggacaggaggcttagttgtttacacagatgaagatagacagcaaaatgggttctgcaatctgcaggatatcggcagccatattatgaaaattccattcattggtttccaaatacttctttttatgcatttagagggaacaccatccagtgcaaaaaatctgccacactgggtcattatttccccactatttttgttgcaaggagctggggttttatttgcagcttatagattaatagagaagatagttcttttactctacattggagatattcctgaaagatactcagctatagcatcaaaatcccgtgagtgctttgggttctttcgacgtgggtcaaggttgcttggttggtggtcaatagatgaaggaagtagagaggaagaagctagacttttttgtgctgggagtcctgggtataatactttcacccctgagacggtgaagaaaatgcctagaacagatctggttgaggagatttggagactacaagctgcactgggtgagcagacacacgttacaaaatttagccaggaggagtatgaaagacttcaaaatgagaagatcttatgcagaatttgctttgaggagcagatcaacgtggtcctacttccctgcaggcatcacattctttgtagcacttgctgcgaaaaatgtaaaaggtgccctgtctgccgtggatccattgaagaaaggatgcctgtatatgatgtatagaccgagttcaatgaagatgtataggtatcttactgatcatccagcttgtgattttagatgaggcaagcgctgagaattatcaatttctcttctcatagatatgatgaacatcagaagttgtatagaattttaaacgtgttactccccctccctcctaatttttcttccatagtgcatttttgcaattctgaagggattgccaatg

SEQ ID NO: 58512 - protein, 474 aa, Glycine max
  peptide (1)..(474): Ceres Seq. ID no. 15178170
  misc_feature (427)..(461): Pfam Name: Zinc finger, C3HC4 type (RING finger) Pfam Description: Zinc finger, C3HC4 type (RING finger)
  misc_feature (55)..(158): Homolog of NCBI NO: 6714286 NR Description: F15H18.5 [Arabidopsis thaliana]
  misc_feature (26)..(474): Homolog of NCBI NO: 6714286 NR Description: F15H18.5 [Arabidopsis thaliana]
  misc_feature (231)..(474): Homolog of NCBI NO: 12324138 NR Description: hypothetical protein; 29936-28688 [Arabidopsis
  misc_feature (280)..(350): Homolog of NCBI NO: 25373333 NR Description: unknown protein F2P9.18 [imported] - Arabidopsis
  misc_feature (361)..(422): Homolog of NCBI NO: 25373333 NR Description: unknown protein F2P9.18 [imported] - Arabidopsis
  misc_feature (17)..(239): Homolog of NCBI NO: 25373333 NR Description: unknown protein F2P9.18 [imported] - Arabidopsis
  misc_feature (11)..(474): Homolog of NCBI NO: 13937305 NR Description: unknown protein [Oryza sativa]
  misc_feature (17)..(474): Homolog of NCBI NO: 22330616 NR Description: zinc finger (C3HC4-type RING finger) protein
  misc_feature (15)..(474): Homolog of NCBI NO: 18394611 NR Description: zinc finger (C3HC4-type RING finger) protein
  misc_feature (8)..(474): Homolog of NCBI NO: 18409134 NR Description: expressed protein [Arabidopsis thaliana]
FFCGKKKMLVRRRVMSWRRVAKALQALVAHVLLFSFTISLALKLDHVIRHSWWKVFFPLWVFHAVVARGRFSLPAPSMPHDRRWAPFHSLVATPLLVAFELLLCMHLGSSYVMNLRIVFMPLIFLEMAILFDNVRMCRALMPGDDENLTDEAVWETLPHFWVSISMVFFIAATVFTLLKICGDVAALGWWDLFINFGIAQCFAFLVCTKWHNPTIHGGCHITEPCSSSNTIRYLDLRTGGLVVYTDEDRQQNGFCNLQDIGSHIMKIPFIGFQILLFMHLEGTPSSAKNLPHWVIISPLFLLQGAGVLFAAYRLIEKIVLLLYIGDIPERYSAIASKSRECFGFFRRGSRLLGWWSIDEGSREEEARLFCAGSPGYNTFTPETVKKMPRTDLVEEIWRLQAALGEQTHVTKFSQEEYERLQNEKILCRICFEEQINVVLLPCRHHILCSTCCEKCKRCPVCRGSIEERMPVYDV

SEQ ID NO: 58513 - protein, 467 aa, Glycine max
  peptide (1)..(467): Ceres Seq. ID no. 15178171
  misc_feature (420)..(454): Pfam Name: Zinc finger, C3HC4 type (RING finger) Pfam Description: Zinc finger, C3HC4 type (RING finger)
  misc_feature (48)..(151): Homolog of NCBI NO: 6714286 NR Description: F15H18.5 [Arabidopsis thaliana]
  misc_feature (19)..(467): Homolog of NCBI NO: 6714286 NR Description: F15H18.5 [Arabidopsis thaliana]
  misc_feature (224)..(467): Homolog of NCBI NO: 12324138 NR Description: hypothetical protein; 29936-28688 [Arabidopsis
  misc_feature (273)..(343): Homolog of NCBI NO: 25373333 NR Description: unknown protein F2P9.18 [imported] - Arabidopsis
  misc_feature (354)..(415): Homolog of NCBI NO: 25373333 NR Description: unknown protein F2P9.18 [imported] - Arabidopsis
  misc_feature (10)..(232): Homolog of NCBI NO: 25373333 NR Description: unknown protein F2P9.18 [imported] - Arabidopsis
  misc_feature (4)..(467): Homolog of NCBI NO: 13937305 NR Description: unknown protein [Oryza sativa]
  misc_feature (10)..(467): Homolog of NCBI NO: 22330616 NR Description: zinc finger (C3HC4-type RING finger) protein
  misc_feature (8)..(467): Homolog of NCBI NO: 18394611 NR Description: zinc finger (C3HC4-type RING finger) protein
  misc_feature (1)..(467): Homolog of NCBI NO: 18409134 NR Description: expressed protein [Arabidopsis thaliana]
MLVRRRVMSWRRVAKALQALVAHVLLFSFTISLALKLDHVIRHSWWKVFFPLWVFHAVVARGRFSLPAPSMPHDRRWAPFHSLVATPLLVAFELLLCMHLGSSYVMNLRIVFMPLIFLEMAILFDNVRMCRALMPGDDENLTDEAVWETLPHFWVSISMVFFIAATVFTLLKICGDVAALGWWDLFINFGIAQCFAFLVCTKWHNPTIHGGCHITEPCSSSNTIRYLDLRTGGLVVYTDEDRQQNGFCNLQDIGSHIMKIPFIGFQILLFMHLEGTPSSAKNLPHWVIISPLFLLQGAGVLFAAYRLIEKIVLLLYIGDIPERYSAIASKSRECFGFFRRGSRLLGWWSIDEGSREEEARLFCAGSPGYNTFTPETVKKMPRTDLVEEIWRLQAALGEQTHVTKFSQEEYERLQNEKILCRICFEEQINVVLLPCRHHILCSTCCEKCKRCPVCRGSIEERMPVYDV

SEQ ID NO: 58514 - protein, 460 aa, Glycine max
  peptide (1)..(460): Ceres Seq. ID no. 15178172
  misc_feature (413)..(447): Pfam Name: Zinc finger, C3HC4 type (RING finger) Pfam Description: Zinc finger, C3HC4 type (RING finger)
  misc_feature (41)..(144): Homolog of NCBI NO: 6714286 NR Description: F15H18.5 [Arabidopsis thaliana]
  misc_feature (12)..(460): Homolog of NCBI NO: 6714286 NR Description: F15H18.5 [Arabidopsis thaliana]
  misc_feature (217)..(460): Homolog of NCBI NO: 12324138 NR Description: hypothetical protein; 29936-28688 [Arabidopsis
  misc_feature (266)..(336): Homolog of NCBI NO: 25373333 NR Description: unknown protein F2P9.18 [imported] - Arabidopsis
  misc_feature (347)..(408): Homolog of NCBI NO: 25373333 NR Description: unknown protein F2P9.18 [imported] - Arabidopsis
  misc_feature (3)..(225): Homolog of NCBI NO: 25373333 NR Description: unknown protein F2P9.18 [imported] - Arabidopsis
  misc_feature (1)..(460): Homolog of NCBI NO: 13937305 NR Description: unknown protein [Oryza sativa]
  misc_feature (3)..(460): Homolog of NCBI NO: 22330616 NR Description: zinc finger (C3HC4-type RING finger) protein
  misc_feature (1)..(460): Homolog of NCBI NO: 18394611 NR Description: zinc finger (C3HC4-type RING finger) protein
  misc_feature (1)..(460): Homolog of NCBI NO: 18409134 NR Description: expressed protein [Arabidopsis thaliana]
MSWRRVAKALQALVAHVLLFSFTISLALKLDHVIRHSWWKVFFPLWVFHAVVARGRFSLPAPSMPHDRRWAPFHSLVATPLLVAFELLLCMHLGSSYVMNLRIVFMPLIFLEMAILFDNVRMCRALMPGDDENLTDEAVWETLPHFWVSISMVFFIAATVFTLLKICGDVAALGWWDLFINFGIAQCFAFLVCTKWHNPTIHGGCHITEPCSSSNTIRYLDLRTGGLVVYTDEDRQQNGFCNLQDIGSHIMKIPFIGFQILLFMHLEGTPSSAKNLPHWVIISPLFLLQGAGVLFAAYRLIEKIVLLLYIGDIPERYSAIASKSRECFGFFRRGSRLLGWWSIDEGSREEEARLFCAGSPGYNTFTPETVKKMPRTDLVEEIWRLQAALGEQTHVTKFSQEEYERLQNEKILCRICFEEQINVVLLPCRHHILCSTCCEKCKRCPVCRGSIEERMPVYDV

SEQ ID NO: 58515 - DNA, 1584 bp, Glycine max
  misc_feature (1)..(1584): Ceres Seq. ID no. 13493536
gtgtcagaaagcaaatattgcctattcggcaatatggcggaaaatggttcaattgagctgaacaagtttgtgttgttttgtttgttgttgctaatacaagtggcagtttctgaaatcatttttgaagagcgatttgatgatggatggcgaagtaggtgggtgaaatcagactggaaaagcagtgagggcaaagcaggttcattcaagcacacagctggaaaatgggctggtgatccagatgacaaaggtattcaaacatccagtgatgccaaacactttgccatctctgcaaaaataccagaattcacaaacaagaacagaacattggtccttcagtattctgtaaaatttgagcaagagattgaatgtggtggagggtacatcaagcttctctctggatttgttaatcaaaagaagtttggtggggatacaccatatattttaatgtttggaccagatttatgtggcacggatacaaagaagctccatgtgatactctcctaccacggtcaaaattaccccataaagaaggacctgcaatgtgaaactgacaggttaactcatttctacacattcattctcaggccagatgccacatacagtgtcctggttgataatagagagagagattctggaagcatgtatacagattgggatattcttcctccacgaaaaatcaaatatgtcaaggccaaaaagcctgcagactgggaggaaagagaatacattgaagaccctgatgatgtcaaacctgagggatatgattcaatcccaagagaaattcctgacccaaatgctaaagagcctgaaaactgggatgaagaggaagatgggaaatggaaaccaccaaagataccaaatccagcatacaaaggaccatggaaaagaaagaaaatcaagaaccctaactacaaagggaaatggaaaactccatggatagataatccagagtttgaagacgaccctgatctttatgtgcttaagcctatcaagtatgtaggtattgaagtttggcaggttaaaggcggttcagtttttgacaacgttttgatttgtgacgaccctgattatgcaaaacaagttgttgaggaggtgtttgccaacagggagattgaaaaggaaggttttgaggaagcagagaaagtgagaaaagccaaagaggaggaggaggctcaaagagcaagagaagaaggtgaaaggcgtagacgagagagaggtcatgatcgacgatatcgggacagatatagagacaaatatagaaggcatcgctatgattacgatggtcatgacgagctttgatgggataaaacgtccttctcaattatctggttgacaaatttcaagattgttatgaattatagttacattgatagtccatctcatgttactttccaagggaaactttttaattttaaataaaagtggtttatttgtcgcatatctatataggagtattatttttgtcttgtcttcagttgtcatgcatttactatagactggggaatataaacccaaacccaatttgccatcgataanaagnttgcaacaagggctatagaaatgtgcacgagttttttttttttt

SEQ ID NO: 58516 - protein, 432 aa, Glycine max
  peptide (1)..(432): Ceres Seq. ID no. 13493537
  misc_feature (39)..(351): Pfam Name: Calreticulin family Pfam Description: Calreticulin family
  misc_feature (19)..(408): Homolog of NCBI NO: 15223517 NR Description: calreticulin 1 (CRT1) [Arabidopsis thaliana]
  misc_feature (28)..(432): Homolog of NCBI NO: 11131949 NR Description: Calreticulin precursor
  misc_feature (25)..(432): Homolog of NCBI NO: 11131631 NR Description: Calreticulin precursor
  misc_feature (24)..(432): Homolog of NCBI NO: 12643243 NR Description: CALRETICULIN 2 PRECURSOR
  misc_feature (30)..(432): Homolog of NCBI NO: 11131769 NR Description: Calreticulin precursor
  misc_feature (23)..(431): Homolog of NCBI NO: 9858814 NR Description: calreticulin [Pinus taeda]
  misc_feature (25)..(392): Homolog of NCBI NO: 11131745 NR Description: Calreticulin precursor
  misc_feature (21)..(432): Homolog of NCBI NO: 27311777 NR Description: calreticulin, putative [Arabidopsis thaliana]
  misc_feature (21)..(432): Homolog of NCBI NO: 12643531 NR Description: Calreticulin 3 precursor
  misc_feature (21)..(432): Homolog of NCBI NO: 18390896 NR Description: calreticulin 3 (CRT3) [Arabidopsis thaliana]
VSESKYCLFGNMAENGSIELNKFVLFCLLLLIQVAVSEIIFEERFDDGWRSRWVKSDWKSSEGKAGSFKHTAGKWAGDPDDKGIQTSSDAKHFAISAKIPEFTNKNRTLVLQYSVKFEQEIECGGGYIKLLSGFVNQKKFGGDTPYILMFGPDLCGTDTKKLHVILSYHGQNYPIKKDLQCETDRLTHFYTFILRPDATYSVLVDNRERDSGSMYTDWDILPPRKIKYVKAKKPADWEEREYIEDPDDVKPEGYDSIPREIPDPNAKEPENWDEEEDGKWKPPKIPNPAYKGPWKRKKIKNPNYKGKWKTPWIDNPEFEDDPDLYVLKPIKYVGIEVWQVKGGSVFDNVLICDDPDYAKQVVEEVFANREIEKEGFEEAEKVRKAKEEEEAQRAREEGERRRRERGHDRRYRDRYRDKYRRHRYDYDGHDEL

SEQ ID NO: 58517 - protein, 421 aa, Glycine max
  peptide (1)..(421): Ceres Seq. ID no. 13493538
  misc_feature (28)..(340): Pfam Name: Calreticulin family Pfam Description: Calreticulin family
  misc_feature (8)..(397): Homolog of NCBI NO: 15223517 NR Description: calreticulin 1 (CRT1) [Arabidopsis thaliana]
  misc_feature (17)..(421): Homolog of NCBI NO: 11131949 NR Description: Calreticulin precursor
  misc_feature (14)..(421): Homolog of NCBI NO: 11131631 NR Description: Calreticulin precursor
  misc_feature (13)..(421): Homolog of NCBI NO: 12643243 NR Description: CALRETICULIN 2 PRECURSOR
  misc_feature (19)..(421): Homolog of NCBI NO: 11131769 NR Description: Calreticulin precursor
  misc_feature (12)..(420): Homolog of NCBI NO: 9858814 NR Description: calreticulin [Pinus taeda]
  misc_feature (14)..(381): Homolog of NCBI NO: 11131745 NR Description: Calreticulin precursor
  misc_feature (10)..(421): Homolog of NCBI NO: 27311777 NR Description: calreticulin, putative [Arabidopsis thaliana]
  misc_feature (10)..(421): Homolog of NCBI NO: 12643531 NR Description: Calreticulin 3 precursor
  misc_feature (10)..(421): Homolog of NCBI NO: 18390896 NR Description: calreticulin 3 (CRT3) [Arabidopsis thaliana]
MAENGSIELNKFVLFCLLLLIQVAVSEIIFEERFDDGWRSRWVKSDWKSSEGKAGSFKHTAGKWAGDPDDKGIQTSSDAKHFAISAKIPEFTNKNRTLVLQYSVKFEQEIECGGGYIKLLSGFVNQKKFGGDTPYILMFGPDLCGTDTKKLHVILSYHGQNYPIKKDLQCETDRLTHFYTFILRPDATYSVLVDNRERDSGSMYTDWDILPPRKIKYVKAKKPADWEEREYIEDPDDVKPEGYDSIPREIPDPNAKEPENWDEEEDGKWKPPKIPNPAYKGPWKRKKIKNPNYKGKWKTPWIDNPEFEDDPDLYVLKPIKYVGIEVWQVKGGSVFDNVLICDDPDYAKQVVEEVFANREIEKEGFEEAEKVRKAKEEEEAQRAREEGERRRRERGHDRRYRDRYRDKYRRHRYDYDGHDEL

SEQ ID NO: 58518 - protein, 284 aa, Glycine max
  peptide (1)..(284): Ceres Seq. ID no. 13493539
  misc_feature (1)..(203): Pfam Name: Calreticulin family Pfam Description: Calreticulin family
  misc_feature (1)..(260): Homolog of NCBI NO: 15223517 NR Description: calreticulin 1 (CRT1) [Arabidopsis thaliana]
  misc_feature (1)..(284): Homolog of NCBI NO: 11131949 NR Description: Calreticulin precursor
  misc_feature (1)..(284): Homolog of NCBI NO: 11131631 NR Description: Calreticulin precursor
  misc_feature (1)..(284): Homolog of NCBI NO: 12643243 NR Description: CALRETICULIN 2 PRECURSOR
  misc_feature (1)..(284): Homolog of NCBI NO: 11131769 NR Description: Calreticulin precursor
  misc_feature (1)..(283): Homolog of NCBI NO: 9858814 NR Description: calreticulin [Pinus taeda]
  misc_feature (1)..(244): Homolog of NCBI NO: 11131745 NR Description: Calreticulin precursor
  misc_feature (1)..(284): Homolog of NCBI NO: 27311777 NR Description: calreticulin, putative [Arabidopsis thaliana]
  misc_feature (1)..(284): Homolog of NCBI NO: 12643531 NR Description: Calreticulin 3 precursor
  misc_feature (1)..(284): Homolog of NCBI NO: 18390896 NR Description: calreticulin 3 (CRT3) [Arabidopsis thaliana]
MFGPDLCGTDTKKLHVILSYHGQNYPIKKDLQCETDRLTHFYTFILRPDATYSVLVDNRERDSGSMYTDWDILPPRKIKYVKAKKPADWEEREYIEDPDDVKPEGYDSIPREIPDPNAKEPENWDEEEDGKWKPPKIPNPAYKGPWKRKKIKNPNYKGKWKTPWIDNPEFEDDPDLYVLKPIKYVGIEVWQVKGGSVFDNVLICDDPDYAKQVVEEVFANREIEKEGFEEAEKVRKAKEEEEAQRAREEGERRRRERGHDRRYRDRYRDKYRRHRYDYDGHDEL

SEQ ID NO: 58519 - DNA, 1336 bp, Glycine max
  misc_feature (1)..(1336): Ceres Seq. ID no. 15226515
atagtatcttcagaatgctttctgtgagggatttttggaggcggcataggaggaaggttttcgtcactgttggtgttttaggaagtgggtatcttttgtataagctctacggtgctcacaggcatggggttcaggaacttgaaagagaactcgcagttcagagggaaactgaggagcttatgaaggctcagatgcaagctcactttgagaatattcagaggatgtctgatgtaacattgccgcatgctatgcacgagttaagttgtcggatcacagaagagttggatctttctcaccttcttgaaaggttaatacaaggaaagggtcaaccaaacaccttaacccaatcagagaaactagatttatggagtagactcaaaattctaagttttacaagaatgacattgtcagtatgggctacaacaatgcttagcttatatacaaaagttcaagtcaatatactaggaaggcatttatacattgatacagcacgaagccttggaatctctgattcagtagaaagtggagatgtggtcgatagggaggaccagaagaaatttctagatagtgttgattttctctctcagcatggtatgcctgccttgatttctgatatggaagcagcaacaaaagaagttctcaaaggaaagcagttgagtactttcttcaacagcacaacgcttcatgaaactatcatgcagatactcaacaccttcatgagcatggggactccaaattcctggataaagtatatgatacctgaagatgttagaccgtattccacaacctctggcagtgatgacccggtaccatttgacgtgactgaatttgaacaacttatgattgaagcacgggcagtattatcaagtgctgaatttggaagcattgtagagatatctctgaaagcagtggtggatacactggtggagcttatgaggactaaatttagtggaggaagtgtagctgagggcatgccgctggccagagtgttgcctcaagttgcacagatgtgtcctttgctcctcggagaacccagcaaaaatcagttcatccaaatcattaaaaatatacaggaggttgaactttttttcactctcctctatgcaaatatgccacatgagtagtgattaattatttatgtttccaaccaaagagattaaatttattgcatgaaaggcatcgggcagtgtacaaaaaattagacgaggttcaaaagagagatataggtgctaaattgttagctttcatcttttcaatatgacatttcccatttgttgtaattagtgattagtgatgcataatgctcccactttggctcaaacgtggcatttggtgg

SEQ ID NO: 58520 - protein, 373 aa, Glycine max
  peptide (1)..(373): Ceres Seq. ID no. 15226516
  misc_feature (8)..(370): Pfam Name: Peroxin-3 Pfam Description: Peroxin-3
  misc_feature (7)..(367): Homolog of NCBI NO: 12230450 NR Description: Peroxisomal assembly protein PEX3 (Peroxin-3)
  misc_feature (7)..(367): Homolog of NCBI NO: 4505727 NR Description: peroxisomal biogenesis factor 3 [Homo sapiens]
  misc_feature (176)..(371): Homolog of NCBI NO: 9294071 NR Description: gene_id:MRC8.15~unknown protein [Arabidopsis
  misc_feature (15)..(66): Homolog of NCBI NO: 12321594 NR Description: hypothetical protein, 3' partial [Arabidopsis
  misc_feature (63)..(348): Homolog of NCBI NO: 12321594 NR Description: hypothetical protein, 3' partial [Arabidopsis
  misc_feature (15)..(66): Homolog of NCBI NO: 12597815 NR Description: lysine and histidine specific transporter,
  misc_feature (63)..(360): Homolog of NCBI NO: 12597815 NR Description: lysine and histidine specific transporter,
  misc_feature (8)..(371): Homolog of NCBI NO: 21554142 NR Description: unknown [Arabidopsis thaliana]
  misc_feature (8)..(371): Homolog of NCBI NO: 18401790 NR Description: expressed protein [Arabidopsis thaliana]
  misc_feature (8)..(371): Homolog of NCBI NO: 22330115 NR Description: expressed protein [Arabidopsis thaliana]
SIFRMLSVRDFWRRHRRKVFVTVGVLGSGYLLYKLYGAHRHGVQELERELAVQRETEELMKAQMQAHFENIQRMSDVTLPHAMHELSCRITEELDLSHLLERLIQGKGQPNTLTQSEKLDLWSRLKILSFTRMTLSVWATTMLSLYTKVQVNILGRHLYIDTARSLGISDSVESGDVVDREDQKKFLDSVDFLSQHGMPALISDMEAATKEVLKGKQLSTFFNSTTLHETIMQILNTFMSMGTPNSWIKYMIPEDVRPYSTTSGSDDPVPFDVTEFEQLMIEARAVLSSAEFGSIVEISLKAVVDTLVELMRTKFSGGSVAEGMPLARVLPQVAQMCPLLLGEPSKNQFIQIIKNIQEVELFFTLLYANMPHE

SEQ ID NO: 58521 - protein, 369 aa, Glycine max
  peptide (1)..(369): Ceres Seq. ID no. 15226517
  misc_feature (4)..(366): Pfam Name: Peroxin-3 Pfam Description: Peroxin-3
  misc_feature (3)..(363): Homolog of NCBI NO: 12230450 NR Description: Peroxisomal assembly protein PEX3 (Peroxin-3)
  misc_feature (3)..(363): Homolog of NCBI NO: 4505727 NR Description: peroxisomal biogenesis factor 3 [Homo sapiens]
  misc_feature (172)..(367): Homolog of NCBI NO: 9294071 NR Description: gene_id:MRC8.15~unknown protein [Arabidopsis
  misc_feature (11)..(62): Homolog of NCBI NO: 12321594 NR Description: hypothetical protein, 3' partial [Arabidopsis
  misc_feature (59)..(344): Homolog of NCBI NO: 12321594 NR Description: hypothetical protein, 3' partial [Arabidopsis
  misc_feature (11)..(62): Homolog of NCBI NO: 12597815 NR Description: lysine and histidine specific transporter,
  misc_feature (59)..(356): Homolog of NCBI NO: 12597815 NR Description: lysine and histidine specific transporter,
  misc_feature (4)..(367): Homolog of NCBI NO: 21554142 NR Description: unknown [Arabidopsis thaliana]
  misc_feature (4)..(367): Homolog of NCBI NO: 18401790 NR Description: expressed protein [Arabidopsis thaliana]
  misc_feature (4)..(367): Homolog of NCBI NO: 22330115 NR Description: expressed protein [Arabidopsis thaliana]
MLSVRDFWRRHRRKVFVTVGVLGSGYLLYKLYGAHRHGVQELERELAVQRETEELMKAQMQAHFENIQRMSDVTLPHAMHELSCRITEELDLSHLLERLIQGKGQPNTLTQSEKLDLWSRLKILSFTRMTLSVWATTMLSLYTKVQVNILGRHLYIDTARSLGISDSVESGDVVDREDQKKFLDSVDFLSQHGMPALISDMEAATKEVLKGKQLSTFFNSTTLHETIMQILNTFMSMGTPNSWIKYMIPEDVRPYSTTSGSDDPVPFDVTEFEQLMIEARAVLSSAEFGSIVEISLKAVVDTLVELMRTKFSGGSVAEGMPLARVLPQVAQMCPLLLGEPSKNQFIQIIKNIQEVELFFTLLYANMPHE

SEQ ID NO: 58522 - protein, 314 aa, Glycine max
  peptide (1)..(314): Ceres Seq. ID no. 15226518
  misc_feature (1)..(311): Pfam Name: Peroxin-3 Pfam Description: Peroxin-3
  misc_feature (1)..(308): Homolog of NCBI NO: 9910484 NR Description: peroxisomal biogenesis factor 3; peroxisomal
  misc_feature (1)..(308): Homolog of NCBI NO: 13786194 NR Description: peroxisomal biogenesis factor 3 [Rattus
  misc_feature (1)..(308): Homolog of NCBI NO: 12230450 NR Description: Peroxisomal assembly protein PEX3 (Peroxin-3)
  misc_feature (1)..(308): Homolog of NCBI NO: 4505727 NR Description: peroxisomal biogenesis factor 3 [Homo sapiens]
  misc_feature (117)..(312): Homolog of NCBI NO: 9294071 NR Description: gene_id:MRC8.15~unknown protein [Arabidopsis
  misc_feature (4)..(289): Homolog of NCBI NO: 12321594 NR Description: hypothetical protein, 3' partial [Arabidopsis
  misc_feature (4)..(301): Homolog of NCBI NO: 12597815 NR Description: lysine and histidine specific transporter,
  misc_feature (1)..(312): Homolog of NCBI NO: 21554142 NR Description: unknown [Arabidopsis thaliana]
  misc_feature (1)..(312): Homolog of NCBI NO: 18401790 NR Description: expressed protein [Arabidopsis thaliana]
  misc_feature (1)..(312): Homolog of NCBI NO: 22330115 NR Description: expressed protein [Arabidopsis thaliana]
MKAQMQAHFENIQRMSDVTLPHAMHELSCRITEELDLSHLLERLIQGKGQPNTLTQSEKLDLWSRLKILSFTRMTLSVWATTMLSLYTKVQVNILGRHLYIDTARSLGISDSVESGDVVDREDQKKFLDSVDFLSQHGMPALISDMEAATKEVLKGKQLSTFFNSTTLHETIMQILNTFMSMGTPNSWIKYMIPEDVRPYSTTSGSDDPVPFDVTEFEQLMIEARAVLSSAEFGSIVEISLKAVVDTLVELMRTKFSGGSVAEGMPLARVLPQVAQMCPLLLGEPSKNQFIQIIKNIQEVELFFTLLYANMPHE

SEQ ID NO: 58523 - DNA, 876 bp, Glycine max
  misc_feature (1)..(876): Ceres Seq. ID no. 14309686
gggcaggaagatctgcagacaacatttggacgcggtagagaagaaagaaaggaaagggtagggtagatcaggcaggcttcagttcagccatgagaactcacactcacacttacacttatactattttctctctaattcttctctccttatttcttcgaacccattccgaggttataacgttaacctctgatacatttaatgataagatcaaggagaaagacactgcatggtttgtgaaattctgcgttccctggtgcaagcattgtaagaatcttggttcattgtgggatgatttggggaaagcaatggaaggagaagatgaaatagaggttggagaagtcgattgcggcatggacaaagcagtatgttccaaagttgatattcactcctatcctacctttaaggttttctatgatggtgaagaagtagccagataccaaggtacaagagatgttgaatcaatgaaaacctttgttttggaagaagctgaaaaggcagcagcaaaagcacttgaaagtaacaaagaattataacaacttttgaggtgcagtcattatctggattacaactagctctttactgtgggtggtgcacatcccagataagtaatcacctttgggttcaggctgagacattcattcttctctgttctgatcaacatttgtttgtttgacgtagcagttgtgagttaagaactaatttcgtacactaccacaatttctttctgctatactccacaattttcttttttaggtttatttatactctactaaactgatagtggcttgtcatgtttaaagtttcaatataatgatcagtgaattatgaatcgtacctcaggatttgtttatataatcatttggtcttttgaatgct

SEQ ID NO: 58524 - protein, 147 aa, Glycine max
  peptide (1)..(147): Ceres Seq. ID no. 14309687
  misc_feature (27)..(134): Pfam Name: Thioredoxin Pfam Description: Thioredoxin
  misc_feature (28)..(134): Homolog of NCBI NO: 21740140 NR Description: hypothetical protein [Homo sapiens]
  misc_feature (28)..(134): Homolog of NCBI NO: 13540604 NR Description: thioredoxin domain containing 5
  misc_feature (28)..(134): Homolog of NCBI NO: 34875200 NR Description: similar to expressed sequence AL022641 [Rattus
  misc_feature (28)..(134): Homolog of NCBI NO: 29839593 NR Description: Thioredoxin domain containing protein 5 precursor
  misc_feature (28)..(134): Homolog of NCBI NO: 37574006 NR Description: Txndc5 protein [Mus musculus]
  misc_feature (28)..(134): Homolog of NCBI NO: 21703732 NR Description: thioredoxin domain containing 5 [Mus musculus]
  misc_feature (28)..(134): Homolog of NCBI NO: 19353593 NR Description: similar to thioredoxin related protein [Mus
  misc_feature (39)..(147): Homolog of NCBI NO: 8778824 NR Description: T6D22.5 [Arabidopsis thaliana]
  misc_feature (15)..(131): Homolog of NCBI NO: 1532175 NR Description: similar to protein disulfide isomerase
  misc_feature (15)..(147): Homolog of NCBI NO: 15223058 NR Description: protein disulfide isomerase - related
MRTHTHTYTYTIFSLILLSLFLRTHSEVITLTSDTFNDKIKEKDTAWFVKFCVPWCKHCKNLGSLWDDLGKAMEGEDEIEVGEVDCGMDKAVCSKVDIHSYPTFKVFYDGEEVARYQGTRDVESMKTFVLEEAEKAAAKALESNKEL

SEQ ID NO: 58525 - protein, 75 aa, Glycine max
  peptide (1)..(75): Ceres Seq. ID no. 14309688
  misc_feature (1)..(62): Pfam Name: Thioredoxin Pfam Description: Thioredoxin
  misc_feature (1)..(62): Homolog of NCBI NO: 21740140 NR Description: hypothetical protein [Homo sapiens]
  misc_feature (1)..(62): Homolog of NCBI NO: 13540604 NR Description: thioredoxin domain containing 5
  misc_feature (1)..(62): Homolog of NCBI NO: 34875200 NR Description: similar to expressed sequence AL022641 [Rattus
  misc_feature (1)..(62): Homolog of NCBI NO: 29839593 NR Description: Thioredoxin domain containing protein 5 precursor
  misc_feature (1)..(62): Homolog of NCBI NO: 37574006 NR Description: Txndc5 protein [Mus musculus]
  misc_feature (1)..(62): Homolog of NCBI NO: 21703732 NR Description: thioredoxin domain containing 5 [Mus musculus]
  misc_feature (1)..(62): Homolog of NCBI NO: 19353593 NR Description: similar to thioredoxin related protein [Mus
  misc_feature (1)..(75): Homolog of NCBI NO: 8778824 NR Description: T6D22.5 [Arabidopsis thaliana]
  misc_feature (1)..(59): Homolog of NCBI NO: 1532175 NR Description: similar to protein disulfide isomerase
  misc_feature (1)..(75): Homolog of NCBI NO: 15223058 NR Description: protein disulfide isomerase - related
MEGEDEIEVGEVDCGMDKAVCSKVDIHSYPTFKVFYDGEEVARYQGTRDVESMKTFVLEEAEKAAAKALESNKEL

SEQ ID NO: 58526 - DNA, 1375 bp, Glycine max
  misc_feature (1)..(1375): Ceres Seq. ID no. 15171508
acatgccaactattccaaagtcattacttcaccctctcatcgtatcaaaagagtgttttacttcaaggttcttggcaaaatcacctgtatctctaagtgtgtaatacaattagtcatctctgtccaattgttttctgtttttagaacctagcacttcaattcttaagctgagaacatataagatagagtaatcaatcatgccatttggtttggtctcactctcggcctggaacaagcgccgtagaagcaaatctcaagatcatacagatccctgggtttacaaacctgcacagctttggcaacttgaagatcaaacaccacgacctacaaaaaggctacatggatcatctgtttacacactcaaggagatggaggaggcaacatgttcattcagtgatgagaatctgcttggaaaaggaggatttggcaaagtctatcggggcactttgcggtcaggagaggttgtagcaatcaagaaaatggagttgccagcaattaaagcagctgagggggaacgcgagtttcgagtcgaagttgacatcttgagcagacttgaccacccaaatcttgtttctttgataggctactgtgctgatggaaagcatagattcctagtatatgaatatatgcgtaaagggaacctgcaggatcatttgaatggaattggggaaagaaacatggattggcctcgaagactccaagtggcactgggagctgcaaaaggacttgcttatctccattcaagttctgatgttggaattcctattgttcatagggatttcaaatcgaccaatattctcttagacgataactttgaagcaaagatatctgattttggactcgcgaagttaatgccagaagggcaagagacacatgtgactgccagagtgcttggtacctttggctattttgatcccgagtatacatcgactgggaaactcactctacagagtgatgtttatgcttttggtgttgttcttttggagcttttgactggacgtcgagctgtagatctaaaccaaggtcccaacgatcaaaaccttgtactacaggtgaggcacatactgcatgaccgcaagaagcttcgtaaggtgatagatccagagatggctcgaaattcttacaccattcagtctatagtcatgtttgccaatctggcatcaagatgcgttcgtactgagagtaatgaaagaccttcaatcgtagaatgtataaaagaactcctaatgattatctatacaaattcaaaaggcttgggaatggttatgcatagtttgagaatgatctagtgaaatcacaagtttagacattggaattatgatgatttcttgatgagaataaaaagtgaactccaaaagtgatcagtacaaagcac

SEQ ID NO: 58527 - protein, 363 aa, Glycine max
  peptide (1)..(363): Ceres Seq. ID no. 15171509
  misc_feature (53)..(342): Homolog of NCBI NO: 15240038 NR Description: protein kinase family [Arabidopsis thaliana]
  misc_feature (48)..(337): Homolog of NCBI NO: 34902958 NR Description: putative protein kinase [Oryza sativa (japonica
  misc_feature (49)..(342): Homolog of NCBI NO: 15217992 NR Description: protein kinase -related [Arabidopsis thaliana]
  misc_feature (49)..(342): Homolog of NCBI NO: 8778594 NR Description: F5M15.3 [Arabidopsis thaliana]
  misc_feature (50)..(342): Homolog of NCBI NO: 34395193 NR Description: putative protein serine/threonine kinase
  misc_feature (50)..(342): Homolog of NCBI NO: 34899302 NR Description: putative protein serine/threonine kinase
  misc_feature (30)..(342): Homolog of NCBI NO: 15238886 NR Description: protein kinase family [Arabidopsis thaliana]
  misc_feature (58)..(363): Homolog of NCBI NO: 15221649 NR Description: protein kinase family [Arabidopsis thaliana]
  misc_feature (58)..(363): Homolog of NCBI NO: 25287587 NR Description: protein T23E23.18 [imported] - Arabidopsis
  misc_feature (1)..(363): Homolog of NCBI NO: 30102706 NR Description: At1g24030 [Arabidopsis thaliana]
MPFGLVSLSAWNKRRRSKSQDHTDPWVYKPAQLWQLEDQTPRPTKRLHGSSVYTLKEMEEATCSFSDENLLGKGGFGKVYRGTLRSGEVVAIKKMELPAIKAAEGEREFRVEVDILSRLDHPNLVSLIGYCADGKHRFLVYEYMRKGNLQDHLNGIGERNMDWPRRLQVALGAAKGLAYLHSSSDVGIPIVHRDFKSTNILLDDNFEAKISDFGLAKLMPEGQETHVTARVLGTFGYFDPEYTSTGKLTLQSDVYAFGVVLLELLTGRRAVDLNQGPNDQNLVLQVRHILHDRKKLRKVIDPEMARNSYTIQSIVMFANLASRCVRTESNERPSIVECIKELLMIIYTNSKGLGMVMHSLRMI

SEQ ID NO: 58528 - protein, 306 aa, Glycine max
  peptide (1)..(306): Ceres Seq. ID no. 15171510
  misc_feature (1)..(285): Homolog of NCBI NO: 15240038 NR Description: protein kinase family [Arabidopsis thaliana]
  misc_feature (1)..(280): Homolog of NCBI NO: 34902958 NR Description: putative protein kinase [Oryza sativa (japonica
  misc_feature (1)..(285): Homolog of NCBI NO: 15217992 NR Description: protein kinase -related [Arabidopsis thaliana]
  misc_feature (1)..(285): Homolog of NCBI NO: 8778594 NR Description: F5M15.3 [Arabidopsis thaliana]
  misc_feature (1)..(285): Homolog of NCBI NO: 34395193 NR Description: putative protein serine/threonine kinase
  misc_feature (1)..(285): Homolog of NCBI NO: 34899302 NR Description: putative protein serine/threonine kinase
  misc_feature (1)..(285): Homolog of NCBI NO: 15238886 NR Description: protein kinase family [Arabidopsis thaliana]
  misc_feature (1)..(306): Homolog of NCBI NO: 15221649 NR Description: protein kinase family [Arabidopsis thaliana]
  misc_feature (1)..(306): Homolog of NCBI NO: 25287587 NR Description: protein T23E23.18 [imported] - Arabidopsis
  misc_feature (1)..(306): Homolog of NCBI NO: 30102706 NR Description: At1g24030 [Arabidopsis thaliana]
MEEATCSFSDENLLGKGGFGKVYRGTLRSGEVVAIKKMELPAIKAAEGEREFRVEVDILSRLDHPNLVSLIGYCADGKHRFLVYEYMRKGNLQDHLNGIGERNMDWPRRLQVALGAAKGLAYLHSSSDVGIPIVHRDFKSTNILLDDNFEAKISDFGLAKLMPEGQETHVTARVLGTFGYFDPEYTSTGKLTLQSDVYAFGVVLLELLTGRRAVDLNQGPNDQNLVLQVRHILHDRKKLRKVIDPEMARNSYTIQSIVMFANLASRCVRTESNERPSIVECIKELLMIIYTNSKGLGMVMHSLRMI

SEQ ID NO: 58529 - protein, 269 aa, Glycine max
  peptide (1)..(269): Ceres Seq. ID no. 15171511
  misc_feature (1)..(248): Homolog of NCBI NO: 15240038 NR Description: protein kinase family [Arabidopsis thaliana]
  misc_feature (1)..(243): Homolog of NCBI NO: 34902958 NR Description: putative protein kinase [Oryza sativa (japonica
  misc_feature (1)..(248): Homolog of NCBI NO: 15217992 NR Description: protein kinase -related [Arabidopsis thaliana]
  misc_feature (1)..(248): Homolog of NCBI NO: 8778594 NR Description: F5M15.3 [Arabidopsis thaliana]
  misc_feature (1)..(248): Homolog of NCBI NO: 34395193 NR Description: putative protein serine/threonine kinase
  misc_feature (1)..(248): Homolog of NCBI NO: 34899302 NR Description: putative protein serine/threonine kinase
  misc_feature (1)..(248): Homolog of NCBI NO: 15238886 NR Description: protein kinase family [Arabidopsis thaliana]
  misc_feature (1)..(269): Homolog of NCBI NO: 15221649 NR Description: protein kinase family [Arabidopsis thaliana]
  misc_feature (1)..(269): Homolog of NCBI NO: 25287587 NR Description: protein T23E23.18 [imported] - Arabidopsis
  misc_feature (1)..(269): Homolog of NCBI NO: 30102706 NR Description: At1g24030 [Arabidopsis thaliana]
MELPAIKAAEGEREFRVEVDILSRLDHPNLVSLIGYCADGKHRFLVYEYMRKGNLQDHLNGIGERNMDWPRRLQVALGAAKGLAYLHSSSDVGIPIVHRDFKSTNILLDDNFEAKISDFGLAKLMPEGQETHVTARVLGTFGYFDPEYTSTGKLTLQSDVYAFGVVLLELLTGRRAVDLNQGPNDQNLVLQVRHILHDRKKLRKVIDPEMARNSYTIQSIVMFANLASRCVRTESNERPSIVECIKELLMIIYTNSKGLGMVMHSLRMI

SEQ ID NO: 58530 - DNA, 1423 bp, Glycine max
  misc_feature (1)..(1423): Ceres Seq. ID no. 15170741
agttaatgaagtgatagcccttgcagacagtggatttactagggatgaaatttgttcggaaccccaacaaaaagggatggttgcctcattggatactgaagaaaaatcaagtgaaacaatgggtagaaaattctctgaaccaaggcagcaacaagaaagtcctattttaaaaggaaaccttgactgtgttagggagtgttctacgtctgttgagggtaacttatcaagtccgggaacaagtaaaactggagagagaagacgggttaaagcagagaaaactataactttgcaagttcttagacaatattttgctggaagcctaaaagatgctgccaagaatattggtgtttgtactacaactttgaaaaggatctgccggcagcatgggataaagcgttggccttctcgaaagatcaaaaaggttggccactccttacaaaaacttcaacttgtcatcgactcggttcaaggtgcctctggtgcatttcaaatcaattccttctattcaaacttcccggatctagcttctccaaatttatcaggaactggcttcttctcaactttgaatcaaagtgataatccaaactcaacaagcacgcagcctgaacatggctcattgagcccagaaggtgcatcaaaatcaccctcttcgtcgagcagccagagttccatttcaagccattcctgctctagcatgtcagagctacaacagcagcacacaactaacattgccagtgacaaagatcctgccacggttggtgaatattctgctgatgttgtgttgaagttgatcagaaacgaggcaaagcttaaaagccttagtcaagatagagcaaagctcttgccaagatcactgagccaggaaacacttggtgaacacccgaaaactcagtatcaactgcctttattgaaaaccagtagcagcaaggtggattctcacagagtaaaagtcacatatggagatgagaaaacccggtttcggatgctgaaaaattgggtctatgaagatcttctgcaggaaattggtaggaaatttaatgtgagtgacatgagcaaatttgatgtcaaatacttggatgatgattgtgagtggatactactcacttgtgatgctgatttagaggagtgcattgatgtttgtcaatcttccgagagtggtaccatcaaacttagtctacaaccttctagtcatagtgtgagaagttttttagaatttagataacagattgattgtaaattataagatctttgtcatgtatgtgaagcagtcttagaaaaggcacaattatttttttgtgaaaaaaattattattttggcagaatgtaaggataaacttttgcttatccttgtgctccaagcaataagcaaattcagcttttgtttgattggtataatataataccatttgtgcaattgaattct

SEQ ID NO: 58531 - protein, 406 aa, Glycine max
  peptide (1)..(406): Ceres Seq. ID no. 15170742
  misc_feature (314)..(395): Pfam Name: PB1 domain Pfam Description: PB1 domain
  misc_feature (16)..(402): Homolog of NCBI NO: 23504755 NR Description: nodule inception protein [Pisum sativum]
  misc_feature (16)..(402): Homolog of NCBI NO: 23504753 NR Description: nodule inception protein [Pisum sativum]
  misc_feature (16)..(402): Homolog of NCBI NO: 23504759 NR Description: nodule inception protein [Pisum sativum]
  misc_feature (16)..(402): Homolog of NCBI NO: 23504757 NR Description: nodule inception protein [Pisum sativum]
  misc_feature (75)..(395): Homolog of NCBI NO: 20503001 NR Description: Putataive nodule inception protein
  misc_feature (16)..(396): Homolog of NCBI NO: 6448579 NR Description: nodule inception protein [Lotus corniculatus var.
  misc_feature (45)..(396): Homolog of NCBI NO: 30679885 NR Description: RWP-RK domain containing protein [Arabidopsis
  misc_feature (45)..(396): Homolog of NCBI NO: 25367427 NR Description: hypothetical protein At2g17150 [imported] -
  misc_feature (20)..(396): Homolog of NCBI NO: 30690272 NR Description: RWP-RK domain containing protein [Arabidopsis
  misc_feature (3)..(401): Homolog of NCBI NO: 33468530 NR Description: NIN-like protein 1 [Lotus corniculatus var.
VNEVIALADSGFTRDEICSEPQQKGMVASLDTEEKSSETMGRKFSEPRQQQESPILKGNLDCVRECSTSVEGNLSSPGTSKTGERRRVKAEKTITLQVLRQYFAGSLKDAAKNIGVCTTTLKRICRQHGIKRWPSRKIKKVGHSLQKLQLVIDSVQGASGAFQINSFYSNFPDLASPNLSGTGFFSTLNQSDNPNSTSTQPEHGSLSPEGASKSPSSSSSQSSISSHSCSSMSELQQQHTTNIASDKDPATVGEYSADVVLKLIRNEAKLKSLSQDRAKLLPRSLSQETLGEHPKTQYQLPLLKTSSSKVDSHRVKVTYGDEKTRFRMLKNWVYEDLLQEIGRKFNVSDMSKFDVKYLDDDCEWILLTCDADLEECIDVCQSSESGTIKLSLQPSSHSVRSFLEFR

SEQ ID NO: 58532 - protein, 381 aa, Glycine max
  peptide (1)..(381): Ceres Seq. ID no. 15170743
  misc_feature (289)..(370): Pfam Name: PB1 domain Pfam Description: PB1 domain
  misc_feature (1)..(377): Homolog of NCBI NO: 23504755 NR Description: nodule inception protein [Pisum sativum]
  misc_feature (1)..(377): Homolog of NCBI NO: 23504753 NR Description: nodule inception protein [Pisum sativum]
  misc_feature (1)..(377): Homolog of NCBI NO: 23504759 NR Description: nodule inception protein [Pisum sativum]
  misc_feature (1)..(377): Homolog of NCBI NO: 23504757 NR Description: nodule inception protein [Pisum sativum]
  misc_feature (50)..(370): Homolog of NCBI NO: 20503001 NR Description: Putataive nodule inception protein
  misc_feature (1)..(371): Homolog of NCBI NO: 6448579 NR Description: nodule inception protein [Lotus corniculatus var.
  misc_feature (20)..(371): Homolog of NCBI NO: 30679885 NR Description: RWP-RK domain containing protein [Arabidopsis
  misc_feature (20)..(371): Homolog of NCBI NO: 25367427 NR Description: hypothetical protein At2g17150 [imported] -
  misc_feature (1)..(371): Homolog of NCBI NO: 30690272 NR Description: RWP-RK domain containing protein [Arabidopsis
  misc_feature (1)..(376): Homolog of NCBI NO: 33468530 NR Description: NIN-like protein 1 [Lotus corniculatus var.
MVASLDTEEKSSETMGRKFSEPRQQQESPILKGNLDCVRECSTSVEGNLSSPGTSKTGERRRVKAEKTITLQVLRQYFAGSLKDAAKNIGVCTTTLKRICRQHGIKRWPSRKIKKVGHSLQKLQLVIDSVQGASGAFQINSFYSNFPDLASPNLSGTGFFSTLNQSDNPNSTSTQPEHGSLSPEGASKSPSSSSSQSSISSHSCSSMSELQQQHTTNIASDKDPATVGEYSADVVLKLIRNEAKLKSLSQDRAKLLPRSLSQETLGEHPKTQYQLPLLKTSSSKVDSHRVKVTYGDEKTRFRMLKNWVYEDLLQEIGRKFNVSDMSKFDVKYLDDDCEWILLTCDADLEECIDVCQSSESGTIKLSLQPSSHSVRSFLEFR

SEQ ID NO: 58533 - protein, 367 aa, Glycine max
  peptide (1)..(367): Ceres Seq. ID no. 15170744
  misc_feature (275)..(356): Pfam Name: PB1 domain Pfam Description: PB1 domain
  misc_feature (1)..(363): Homolog of NCBI NO: 23504755 NR Description: nodule inception protein [Pisum sativum]
  misc_feature (1)..(363): Homolog of NCBI NO: 23504753 NR Description: nodule inception protein [Pisum sativum]
  misc_feature (1)..(363): Homolog of NCBI NO: 23504759 NR Description: nodule inception protein [Pisum sativum]
  misc_feature (1)..(363): Homolog of NCBI NO: 23504757 NR Description: nodule inception protein [Pisum sativum]
  misc_feature (36)..(356): Homolog of NCBI NO: 20503001 NR Description: Putataive nodule inception protein
  misc_feature (1)..(357): Homolog of NCBI NO: 6448579 NR Description: nodule inception protein [Lotus corniculatus var.
  misc_feature (6)..(357): Homolog of NCBI NO: 30679885 NR Description: RWP-RK domain containing protein [Arabidopsis
  misc_feature (6)..(357): Homolog of NCBI NO: 25367427 NR Description: hypothetical protein At2g17150 [imported] -
  misc_feature (1)..(357): Homolog of NCBI NO: 30690272 NR Description: RWP-RK domain containing protein [Arabidopsis
  misc_feature (1)..(362): Homolog of NCBI NO: 33468530 NR Description: NIN-like protein 1 [Lotus corniculatus var.
MGRKFSEPRQQQESPILKGNLDCVRECSTSVEGNLSSPGTSKTGERRRVKAEKTITLQVLRQYFAGSLKDAAKNIGVCTTTLKRICRQHGIKRWPSRKIKKVGHSLQKLQLVIDSVQGASGAFQINSFYSNFPDLASPNLSGTGFFSTLNQSDNPNSTSTQPEHGSLSPEGASKSPSSSSSQSSISSHSCSSMSELQQQHTTNIASDKDPATVGEYSADVVLKLIRNEAKLKSLSQDRAKLLPRSLSQETLGEHPKTQYQLPLLKTSSSKVDSHRVKVTYGDEKTRFRMLKNWVYEDLLQEIGRKFNVSDMSKFDVKYLDDDCEWILLTCDADLEECIDVCQSSESGTIKLSLQPSSHSVRSFLEFR

SEQ ID NO: 58534 - DNA, 1849 bp, Glycine max
  misc_feature (1)..(1849): Ceres Seq. ID no. 15176273
aaaacaaaatacaataaatttggtaaagggcaatggcactttaaagggaagaaagcaccacctgaaaccagaagtggaaagtgctcctaacattagattagaccctctaccatgctcctctgcctctgaagtctgaacctcccacaggaatggcaatggagaagacaacattgtttgtgttgttgctgaatgtgcttgtgttcagtgcctctcttgtgtcctcggagcaaagtcatgtctcagctgtaggggacccaggaatgcagagagatggtctgagggtggcctttgaggcttggaacttctgcaatgaagttggtcaagaagctcctcacatgggtagtccaagagctgctgattgttttgatctttcaggttctctgactcacaaggtcacagaagctgataacagacttggggtgggggactcatttcctggtttaaaaccagaaaatatcaacaacacagacctttatgcaattgaaaaggaattgtatttgggttctttatgtgaagttgcagacaccccaaggccttggcagttttggatggtaatgctgaaaaatggtaactatgacaccaggtcggggttatgtcctcaggacgggaaaaaggtacccccttttagcccgggaaggtttccttgttttggacaagggtgcatgaatcaacccatcttgtgtcatcaatggacacagctcaaagatggcacaatgcaaggggggttcagtggtacttatgatttggattctggttgtggaggtgaacacgatggtgtgtcttactatgaggtagtttgggagaagaaagttaatgttgggagttgggtgttcaaacacaaactaaggacttcaaagaagtacccttggttgatgttgtaccttagagctgatgcaaccaaaggattctctggaggttaccattatgacactaggggaatgctaaaaactcttccaaagtcaccaaatttcaaggtgaggttgagcttggatatcaagaaggggggaggggccaagagccagttctatctgttagacattggaagctgctggaagaacaatggtgctccttgtgatggagatgtactcactgatgtcactagatatagtgagatgatcataaaccctgaaaccccagcttggtgcagccccaaaggcttggttaactgtccaccatttcacatcactccagacaacaaaaaaatatacagaaatgacacagccaatttcccctactcagcatatcactactactgtgctcctgggaatgctcaacacttggagcaaccagtgagcacttgtgatccttacagcaatcctcatgctcaagagatagttcagttgcttcctcaccctacttggggtgagtatggctatcccaccaaaaaaggtgatggttgggtgggggatgcaaggacttgggagcttgatgttggagggctatcaagtagactctacttttatcaggacccaggcactcctcctgccaagagaatatggacatctattgattctggtactgagatatttgttagtgacaaagatgaagaagcagagtggactcttagtgactttgacgtcattctaacacaatcagggaccaacttgatgaacaaggctgagagaaagaagtaaggaatattgataatggactaaacttttgggattttagatagtccaccaagtgtaggcttttaaatcataggcgttacagacacatttacacgaaaataattttcattggtcaaatcctgatcataggatcttgagttgtgcatgtttggactgtaatttgcacattccaaatcttagtttggagattgtgaatgttacatccacaaaataacgtc

SEQ ID NO: 58535 - protein, 494 aa, Glycine max
  peptide (1)..(494): Ceres Seq. ID no. 15176274
  misc_feature (412)..(484): Homolog of NCBI NO: 22328547 NR Description: hypothetical protein [Arabidopsis thaliana]
  misc_feature (361)..(480): Homolog of NCBI NO: 7459476 NR Description: hypothetical protein At2g47010 [imported] -
  misc_feature (38)..(479): Homolog of NCBI NO: 25335639 NR Description: F20D23.27 protein - Arabidopsis thaliana
  misc_feature (28)..(479): Homolog of NCBI NO: 30685122 NR Description: expressed protein [Arabidopsis thaliana]
  misc_feature (31)..(94): Homolog of NCBI NO: 7459476 NR Description: hypothetical protein At2g47010 [imported] -
  misc_feature (75)..(429): Homolog of NCBI NO: 7459476 NR Description: hypothetical protein At2g47010 [imported] -
  misc_feature (31)..(94): Homolog of NCBI NO: 18407231 NR Description: expressed protein [Arabidopsis thaliana]
  misc_feature (75)..(437): Homolog of NCBI NO: 18407231 NR Description: expressed protein [Arabidopsis thaliana]
  misc_feature (31)..(94): Homolog of NCBI NO: 16612271 NR Description: At2g47010/F14M4.16 [Arabidopsis thaliana]
  misc_feature (75)..(480): Homolog of NCBI NO: 16612271 NR Description: At2g47010/F14M4.16 [Arabidopsis thaliana]
MAMEKTTLFVLLLNVLVFSASLVSSEQSHVSAVGDPGMQRDGLRVAFEAWNFCNEVGQEAPHMGSPRAADCFDLSGSLTHKVTEADNRLGVGDSFPGLKPENINNTDLYAIEKELYLGSLCEVADTPRPWQFWMVMLKNGNYDTRSGLCPQDGKKVPPFSPGRFPCFGQGCMNQPILCHQWTQLKDGTMQGGFSGTYDLDSGCGGEHDGVSYYEVVWEKKVNVGSWVFKHKLRTSKKYPWLMLYLRADATKGFSGGYHYDTRGMLKTLPKSPNFKVRLSLDIKKGGGAKSQFYLLDIGSCWKNNGAPCDGDVLTDVTRYSEMIINPETPAWCSPKGLVNCPPFHITPDNKKIYRNDTANFPYSAYHYYCAPGNAQHLEQPVSTCDPYSNPHAQEIVQLLPHPTWGEYGYPTKKGDGWVGDARTWELDVGGLSSRLYFYQDPGTPPAKRIWTSIDSGTEIFVSDKDEEAEWTLSDFDVILTQSGTNLMNKAERKK

SEQ ID NO: 58536 - protein, 492 aa, Glycine max
  peptide (1)..(492): Ceres Seq. ID no. 15176275
  misc_feature (410)..(482): Homolog of NCBI NO: 22328547 NR Description: hypothetical protein [Arabidopsis thaliana]
  misc_feature (359)..(478): Homolog of NCBI NO: 7459476 NR Description: hypothetical protein At2g47010 [imported] -
  misc_feature (36)..(477): Homolog of NCBI NO: 25335639 NR Description: F20D23.27 protein - Arabidopsis thaliana
  misc_feature (26)..(477): Homolog of NCBI NO: 30685122 NR Description: expressed protein [Arabidopsis thaliana]
  misc_feature (29)..(92): Homolog of NCBI NO: 7459476 NR Description: hypothetical protein At2g47010 [imported] -
  misc_feature (73)..(427): Homolog of NCBI NO: 7459476 NR Description: hypothetical protein At2g47010 [imported] -
  misc_feature (29)..(92): Homolog of NCBI NO: 18407231 NR Description: expressed protein [Arabidopsis thaliana]
  misc_feature (73)..(435): Homolog of NCBI NO: 18407231 NR Description: expressed protein [Arabidopsis thaliana]
  misc_feature (29)..(92): Homolog of NCBI NO: 16612271 NR Description: At2g47010/F14M4.16 [Arabidopsis thaliana]
  misc_feature (73)..(478): Homolog of NCBI NO: 16612271 NR Description: At2g47010/F14M4.16 [Arabidopsis thaliana]
MEKTTLFVLLLNVLVFSASLVSSEQSHVSAVGDPGMQRDGLRVAFEAWNFCNEVGQEAPHMGSPRAADCFDLSGSLTHKVTEADNRLGVGDSFPGLKPENINNTDLYAIEKELYLGSLCEVADTPRPWQFWMVMLKNGNYDTRSGLCPQDGKKVPPFSPGRFPCFGQGCMNQPILCHQWTQLKDGTMQGGFSGTYDLDSGCGGEHDGVSYYEVVWEKKVNVGSWVFKHKLRTSKKYPWLMLYLRADATKGFSGGYHYDTRGMLKTLPKSPNFKVRLSLDIKKGGGAKSQFYLLDIGSCWKNNGAPCDGDVLTDVTRYSEMIINPETPAWCSPKGLVNCPPFHITPDNKKIYRNDTANFPYSAYHYYCAPGNAQHLEQPVSTCDPYSNPHAQEIVQLLPHPTWGEYGYPTKKGDGWVGDARTWELDVGGLSSRLYFYQDPGTPPAKRIWTSIDSGTEIFVSDKDEEAEWTLSDFDVILTQSGTNLMNKAERKK

SEQ ID NO: 58537 - protein, 457 aa, Glycine max
  peptide (1)..(457): Ceres Seq. ID no. 15176276
  misc_feature (375)..(447): Homolog of NCBI NO: 22328547 NR Description: hypothetical protein [Arabidopsis thaliana]
  misc_feature (324)..(443): Homolog of NCBI NO: 7459476 NR Description: hypothetical protein At2g47010 [imported] -
  misc_feature (1)..(442): Homolog of NCBI NO: 25335639 NR Description: F20D23.27 protein - Arabidopsis thaliana
  misc_feature (1)..(442): Homolog of NCBI NO: 30685122 NR Description: expressed protein [Arabidopsis thaliana]
  misc_feature (1)..(57): Homolog of NCBI NO: 7459476 NR Description: hypothetical protein At2g47010 [imported] -
  misc_feature (38)..(392): Homolog of NCBI NO: 7459476 NR Description: hypothetical protein At2g47010 [imported] -
  misc_feature (1)..(57): Homolog of NCBI NO: 18407231 NR Description: expressed protein [Arabidopsis thaliana]
  misc_feature (38)..(400): Homolog of NCBI NO: 18407231 NR Description: expressed protein [Arabidopsis thaliana]
  misc_feature (1)..(57): Homolog of NCBI NO: 16612271 NR Description: At2g47010/F14M4.16 [Arabidopsis thaliana]
  misc_feature (38)..(443): Homolog of NCBI NO: 16612271 NR Description: At2g47010/F14M4.16 [Arabidopsis thaliana]
MQRDGLRVAFEAWNFCNEVGQEAPHMGSPRAADCFDLSGSLTHKVTEADNRLGVGDSFPGLKPENINNTDLYAIEKELYLGSLCEVADTPRPWQFWMVMLKNGNYDTRSGLCPQDGKKVPPFSPGRFPCFGQGCMNQPILCHQWTQLKDGTMQGGFSGTYDLDSGCGGEHDGVSYYEVVWEKKVNVGSWVFKHKLRTSKKYPWLMLYLRADATKGFSGGYHYDTRGMLKTLPKSPNFKVRLSLDIKKGGGAKSQFYLLDIGSCWKNNGAPCDGDVLTDVTRYSEMIINPETPAWCSPKGLVNCPPFHITPDNKKIYRNDTANFPYSAYHYYCAPGNAQHLEQPVSTCDPYSNPHAQEIVQLLPHPTWGEYGYPTKKGDGWVGDARTWELDVGGLSSRLYFYQDPGTPPAKRIWTSIDSGTEIFVSDKDEEAEWTLSDFDVILTQSGTNLMNKAERKK

SEQ ID NO: 58538 - DNA, 1597 bp, Glycine max
  misc_feature (1)..(1597): Ceres Seq. ID no. 14308615
aaaaaaaaaaaaaaagtctacacactactatgatgtatctaacattctaaatttctaactttcctctctctctctctctctctccgaggtcttagatctctgctctgtctctatctctacttgaggcctttccctctgttccgttggcgggtgggtctttcttctctcaaaatggccaccggagtgaccagaaaaatttctgctgcatcagctcgggcccacaccagaagggcgaagaaaaccaattctctaccccttccttcaggaattcttggaacagcactagcagtgttgtttattgggtttctagcatgggcttatcaggttattcaacctccccctcccaagatatgcggcactcctgatggaccacctataacagcaccaagaatcaaattaagagacggaaggcatttggcatacaaagagcatggtgttccaaaagatgcagccaagtataaaatcatctctgtacatggttttaatagttgcaggcatgatgctgtgattgccgataccctatcaccggatgttgttgaggagctggggatctacattgtatctttcgacagacctggttatggggaaagtgatcctgatccaaatcgtacactaaaaagcattgctctagatatacaagagcttgcagatcagctgggattgggctccaaattctatgtagttggtgtctccatgggtggacaagttgtttggaactgccttaagtacatacctcacaggctgacaggtgcagtacttgtcgccccagttgtcaactactggtggcctggtctacctgcaaacttaactactgaagcctatgaccaacaaaaattacaagaccaatgggcacttcgtgttgctcactacgtaccatggctaacttactggtggaacactcagcgatggttcccaggatctagtgtaattgctcatagtccacatatcttttctcatcaagacaaagaacttctgcctaagttgttgtccgatagaaagagttatgcggcacaggtaatacagcaaggtgattatgaaaccatccacctcgacataaatattggatttggtaactgggaatatagtccccttgatcttgaaaacccatttccaaataacgaaggctctgtccatctttggcaaggagatgaggatatgatggttccagttacactgcaacgatacatagcacaaaaccttccatggattaactatcatgaactccaaggttctggtcacatttttgctcatgctgatggtatgagtgatactatcatcaagtcacttttacgtgcgaagtaggcttcttttatgttagttactgtctgtgagaagttggcggcttctatattggttacggtctatctcaggtcagtttcagcatttaatatctcagttttggaggattcaaactgttgaacagaatgatgtatgatcaactttgaacaacattgtgtacacttaatggtagggagaattcaattactcaataattgtatgaactatattcttttgtgtgggaagttgtttaacagaaattggcttgtttaagttactctgaagctgacactatggcgatgagtagcactatttttgc

SEQ ID NO: 58539 - protein, 376 aa, Glycine max
  peptide (1)..(376): Ceres Seq. ID no. 14308616
  misc_feature (127)..(371): Pfam Name: alpha/beta hydrolase fold Pfam Description: alpha/beta hydrolase fold
  misc_feature (34)..(373): Homolog of NCBI NO: 34908462 NR Description: P0683F02.22 [Oryza sativa (japonica
  misc_feature (32)..(372): Homolog of NCBI NO: 37536162 NR Description: putative alpha/beta hydrolase
  misc_feature (21)..(373): Homolog of NCBI NO: 15221193 NR Description: esterase/lipase/thioesterase family [Arabidopsis
  misc_feature (18)..(373): Homolog of NCBI NO: 18410575 NR Description: hydrolase, alpha/beta fold family [Arabidopsis
  misc_feature (18)..(373): Homolog of NCBI NO: 21537089 NR Description: unknown [Arabidopsis thaliana]
  misc_feature (34)..(373): Homolog of NCBI NO: 18410582 NR Description: esterase/lipase/thioesterase family [Arabidopsis
  misc_feature (8)..(373): Homolog of NCBI NO: 15228377 NR Description: hydrolase, alpha/beta fold family [Arabidopsis
  misc_feature (34)..(373): Homolog of NCBI NO: 21592662 NR Description: unknown [Arabidopsis thaliana]
  misc_feature (24)..(373): Homolog of NCBI NO: 28416665 NR Description: At2g36290 [Arabidopsis thaliana]
  misc_feature (24)..(373): Homolog of NCBI NO: 18404095 NR Description: hydrolase, alpha/beta fold family [Arabidopsis
MATGVTRKISAASARAHTRRAKKTNSLPLPSGILGTALAVLFIGFLAWAYQVIQPPPPKICGTPDGPPITAPRIKLRDGRHLAYKEHGVPKDAAKYKIISVHGFNSCRHDAVIADTLSPDVVEELGIYIVSFDRPGYGESDPDPNRTLKSIALDIQELADQLGLGSKFYVVGVSMGGQVVWNCLKYIPHRLTGAVLVAPVVNYWWPGLPANLTTEAYDQQKLQDQWALRVAHYVPWLTYWWNTQRWFPGSSVIAHSPHIFSHQDKELLPKLLSDRKSYAAQVIQQGDYETIHLDINIGFGNWEYSPLDLENPFPNNEGSVHLWQGDEDMMVPVTLQRYIAQNLPWINYHELQGSGHIFAHADGMSDTIIKSLLRAK

SEQ ID NO: 58540 - protein, 202 aa, Glycine max
  peptide (1)..(202): Ceres Seq. ID no. 14308617
  misc_feature (1)..(197): Pfam Name: alpha/beta hydrolase fold Pfam Description: alpha/beta hydrolase fold
  misc_feature (1)..(199): Homolog of NCBI NO: 34908462 NR Description: P0683F02.22 [Oryza sativa (japonica
  misc_feature (1)..(198): Homolog of NCBI NO: 37536162 NR Description: putative alpha/beta hydrolase
  misc_feature (1)..(199): Homolog of NCBI NO: 15221193 NR Description: esterase/lipase/thioesterase family [Arabidopsis
  misc_feature (1)..(199): Homolog of NCBI NO: 18410575 NR Description: hydrolase, alpha/beta fold family [Arabidopsis
  misc_feature (1)..(199): Homolog of NCBI NO: 21537089 NR Description: unknown [Arabidopsis thaliana]
  misc_feature (1)..(199): Homolog of NCBI NO: 18410582 NR Description: esterase/lipase/thioesterase family [Arabidopsis
  misc_feature (1)..(199): Homolog of NCBI NO: 15228377 NR Description: hydrolase, alpha/beta fold family [Arabidopsis
  misc_feature (1)..(199): Homolog of NCBI NO: 21592662 NR Description: unknown [Arabidopsis thaliana]
  misc_feature (1)..(199): Homolog of NCBI NO: 28416665 NR Description: At2g36290 [Arabidopsis thaliana]
  misc_feature (1)..(199): Homolog of NCBI NO: 18404095 NR Description: hydrolase, alpha/beta fold family [Arabidopsis
MGGQVVWNCLKYIPHRLTGAVLVAPVVNYWWPGLPANLTTEAYDQQKLQDQWALRVAHYVPWLTYWWNTQRWFPGSSVIAHSPHIFSHQDKELLPKLLSDRKSYAAQVIQQGDYETIHLDINIGFGNWEYSPLDLENPFPNNEGSVHLWQGDEDMMVPVTLQRYIAQNLPWINYHELQGSGHIFAHADGMSDTIIKSLLRAK

SEQ ID NO: 58541 - DNA, 2112 bp, Glycine max
  misc_feature (1)..(2112): Ceres Seq. ID no. 14308618
gaccttgtgttgtttcagattgcatttgcagatagattgaatgttgtgaacaaacaatgggttcatccaaggccttatgcagtgtttctctgctccatttgttcatagtggtttgccttgtcttccaatgctttgctactaaaaaccatgctgacctgaccacaactctaactgtgaatgcttctgatgcatctggaaagccaataccagagacactttttggcatattctttgaggagattaatcatgctggagctgggggattgtgggctgagcttgtgagcaacagaggatttgaagctggcggtcctaacactccttcaaatattgatccttggtcaattattggaaatgaatcattgataaatgttgaaactgatcgtacctcttgctttgaccgtaataaggttgcacttcgattggaggtatcatgtgacagcgaaggtgacaacatctgcccagctgatggtgttggtgtttataatcctggtttctggggcatgaatattgagcaagggaagaaatacaaagtggtcttctatgttcgttcaactgaatcacttaatctaacagtttcattgactggatccaatggtgtaggaaacctggcttcatctgtgatcacaggttctgcacttgatttttcaaactggacaaaggtggagaagatactggttgccaaggcaacagataataactcaagacttcaattaacaaccaccaccaaaggtgtgatatggttggaccaagtgtctgctatgccactggacacatataagggacatggtttccgaactgaccttgttgaaatgctgacagctttgaaaccaagatttatcagatttccgggcggttgttttgttgaaggagaatggttaagaaatgcatttcgatggaaaacatccattggaccatgggaggagagacctgggcactttggtgatgtttggatgtactggactgatgatggacttggttattatgagtttctccaacttgcagaggacttgggtgcttcaccaatatgggtatttaataatggtgtcagtcataatgatcaagttgatacatcggcggtcttacctcttgtgcaagaagcccttgatggaattgagttcgcgagaggtgatcccacttcaaaatggggttcccttagagctgctatgggacatcctgagccatttgacctcagatatgttgctgttgggaatgaagattgtggaaaaaagaattatcgaggaaactacctgaaattctatagtgcaataaaaagtgcttatccagatatccaaattatctcaaactgtgatggttcttctcgacctttagatcatccagctgatatgtatgattatcatgtttatacaaatgcgaatgacatgttttatagagctaacacatttgatcatacatcacgaaatggtccaaaggcttttgtaagtgagtatgccgtgactggaaaagatgctgggacaggaagcctcttggcagccctagctgaagctggcttcctaattggactggaaaagaacagtgatgttatccaaatggccagctatgctccactttttgttaatgccaatgataggaggtggaacctggatgcaattgtattcaactcctttcagctctatggaactcctagctattgggtgcaactatttttctcagagtcaagtggagcaacacttctaagtacatcacttcaagcaccttcctcaaattcacttgttgcatcagcaattacatttcaaaattctgtagataagaaaaattacatacgaataaaggttgtgaacttcggtaccactgccgtgaacctcaaaatctctcttgatggactggaaccaaactcattgcagttatctgggtcaacaaagactgtgcttacatctgcaaatgtaatggatgagaactccttctcacagccaaagaaggtggtgccaatccaaagtctacttcagaatgttgagaaggacatgaatgtcacagtcccacctcgttcgttcacatcatttgatctgctgaaacaatccagtaatttgaagatggcagggagcgattcttccacgtggtcttctatttaacgttattaaaaatttgaccaaaagc

SEQ ID NO: 58542 - protein, 676 aa, Glycine max
  peptide (1)..(676): Ceres Seq. ID no. 14308619
  misc_feature (72)..(236): Pfam Name: Carbohydrate binding domain Pfam Description: Carbohydrate binding domain
  misc_feature (32)..(661): Homolog of NCBI NO: 22324432 NR Description: putative arabinoxylan narabinofuranohydrolase
  misc_feature (1)..(656): Homolog of NCBI NO: 38347003 NR Description: OSJNBb0058J09.4 [Oryza sativa (japonica
  misc_feature (1)..(663): Homolog of NCBI NO: 13398414 NR Description: arabinoxylan arabinofuranohydrolase isoenzyme
  misc_feature (11)..(663): Homolog of NCBI NO: 13398412 NR Description: arabinoxylan arabinofuranohydrolase isoenzyme
  misc_feature (3)..(670): Homolog of NCBI NO: 22327075 NR Description: glycosyl hydrolase family 51 [Arabidopsis
  misc_feature (1)..(662): Homolog of NCBI NO: 16417958 NR Description: arabinosidase ARA-1 [Lycopersicon esculentum]
  misc_feature (1)..(672): Homolog of NCBI NO: 29825623 NR Description: alpha-L-arabinofuranosidase [Arabidopsis thaliana]
  misc_feature (1)..(672): Homolog of NCBI NO: 13937191 NR Description: AT3g10740/T7M13_18 [Arabidopsis thaliana]
  misc_feature (1)..(672): Homolog of NCBI NO: 15228368 NR Description: glycosyl hydrolase family 51 [Arabidopsis
  misc_feature (1)..(676): Homolog of NCBI NO: 33151175 NR Description: alpha-L-arabinofuranosidase [Malus x domestica]
MGSSKALCSVSLLHLFIVVCLVFQCFATKNHADLTTTLTVNASDASGKPIPETLFGIFFEEINHAGAGGLWAELVSNRGFEAGGPNTPSNIDPWSIIGNESLINVETDRTSCFDRNKVALRLEVSCDSEGDNICPADGVGVYNPGFWGMNIEQGKKYKVVFYVRSTESLNLTVSLTGSNGVGNLASSVITGSALDFSNWTKVEKILVAKATDNNSRLQLTTTTKGVIWLDQVSAMPLDTYKGHGFRTDLVEMLTALKPRFIRFPGGCFVEGEWLRNAFRWKTSIGPWEERPGHFGDVWMYWTDDGLGYYEFLQLAEDLGASPIWVFNNGVSHNDQVDTSAVLPLVQEALDGIEFARGDPTSKWGSLRAAMGHPEPFDLRYVAVGNEDCGKKNYRGNYLKFYSAIKSAYPDIQIISNCDGSSRPLDHPADMYDYHVYTNANDMFYRANTFDHTSRNGPKAFVSEYAVTGKDAGTGSLLAALAEAGFLIGLEKNSDVIQMASYAPLFVNANDRRWNLDAIVFNSFQLYGTPSYWVQLFFSESSGATLLSTSLQAPSSNSLVASAITFQNSVDKKNYIRIKVVNFGTTAVNLKISLDGLEPNSLQLSGSTKTVLTSANVMDENSFSQPKKVVPIQSLLQNVEKDMNVTVPPRSFTSFDLLKQSSNLKMAGSDSSTWSSI

SEQ ID NO: 58543 - protein, 528 aa, Glycine max
  peptide (1)..(528): Ceres Seq. ID no. 14308620
  misc_feature (1)..(88): Pfam Name: Carbohydrate binding domain Pfam Description: Carbohydrate binding domain
  misc_feature (1)..(513): Homolog of NCBI NO: 22324432 NR Description: putative arabinoxylan narabinofuranohydrolase
  misc_feature (1)..(508): Homolog of NCBI NO: 38347003 NR Description: OSJNBb0058J09.4 [Oryza sativa (japonica
  misc_feature (1)..(515): Homolog of NCBI NO: 13398414 NR Description: arabinoxylan arabinofuranohydrolase isoenzyme
  misc_feature (1)..(515): Homolog of NCBI NO: 13398412 NR Description: arabinoxylan arabinofuranohydrolase isoenzyme
  misc_feature (1)..(522): Homolog of NCBI NO: 22327075 NR Description: glycosyl hydrolase family 51 [Arabidopsis
  misc_feature (1)..(514): Homolog of NCBI NO: 16417958 NR Description: arabinosidase ARA-1 [Lycopersicon esculentum]
  misc_feature (1)..(524): Homolog of NCBI NO: 29825623 NR Description: alpha-L-arabinofuranosidase [Arabidopsis thaliana]
  misc_feature (1)..(524): Homolog of NCBI NO: 13937191 NR Description: AT3g10740/T7M13_18 [Arabidopsis thaliana]
  misc_feature (1)..(524): Homolog of NCBI NO: 15228368 NR Description: glycosyl hydrolase family 51 [Arabidopsis
  misc_feature (1)..(528): Homolog of NCBI NO: 33151175 NR Description: alpha-L-arabinofuranosidase [Malus x domestica]
MNIEQGKKYKVVFYVRSTESLNLTVSLTGSNGVGNLASSVITGSALDFSNWTKVEKILVAKATDNNSRLQLTTTTKGVIWLDQVSAMPLDTYKGHGFRTDLVEMLTALKPRFIRFPGGCFVEGEWLRNAFRWKTSIGPWEERPGHFGDVWMYWTDDGLGYYEFLQLAEDLGASPIWVFNNGVSHNDQVDTSAVLPLVQEALDGIEFARGDPTSKWGSLRAAMGHPEPFDLRYVAVGNEDCGKKNYRGNYLKFYSAIKSAYPDIQIISNCDGSSRPLDHPADMYDYHVYTNANDMFYRANTFDHTSRNGPKAFVSEYAVTGKDAGTGSLLAALAEAGFLIGLEKNSDVIQMASYAPLFVNANDRRWNLDAIVFNSFQLYGTPSYWVQLFFSESSGATLLSTSLQAPSSNSLVASAITFQNSVDKKNYIRIKVVNFGTTAVNLKISLDGLEPNSLQLSGSTKTVLTSANVMDENSFSQPKKVVPIQSLLQNVEKDMNVTVPPRSFTSFDLLKQSSNLKMAGSDSSTWSSI

SEQ ID NO: 58544 - protein, 442 aa, Glycine max
  peptide (1)..(442): Ceres Seq. ID no. 14308621
  misc_feature (1)..(427): Homolog of NCBI NO: 22324432 NR Description: putative arabinoxylan narabinofuranohydrolase
  misc_feature (1)..(422): Homolog of NCBI NO: 38347003 NR Description: OSJNBb0058J09.4 [Oryza sativa (japonica
  misc_feature (1)..(429): Homolog of NCBI NO: 13398414 NR Description: arabinoxylan arabinofuranohydrolase isoenzyme
  misc_feature (1)..(429): Homolog of NCBI NO: 13398412 NR Description: arabinoxylan arabinofuranohydrolase isoenzyme
  misc_feature (1)..(436): Homolog of NCBI NO: 22327075 NR Description: glycosyl hydrolase family 51 [Arabidopsis
  misc_feature (1)..(428): Homolog of NCBI NO: 16417958 NR Description: arabinosidase ARA-1 [Lycopersicon esculentum]
  misc_feature (1)..(438): Homolog of NCBI NO: 29825623 NR Description: alpha-L-arabinofuranosidase [Arabidopsis thaliana]
  misc_feature (1)..(438): Homolog of NCBI NO: 13937191 NR Description: AT3g10740/T7M13_18 [Arabidopsis thaliana]
  misc_feature (1)..(438): Homolog of NCBI NO: 15228368 NR Description: glycosyl hydrolase family 51 [Arabidopsis
  misc_feature (1)..(442): Homolog of NCBI NO: 33151175 NR Description: alpha-L-arabinofuranosidase [Malus x domestica]
MPLDTYKGHGFRTDLVEMLTALKPRFIRFPGGCFVEGEWLRNAFRWKTSIGPWEERPGHFGDVWMYWTDDGLGYYEFLQLAEDLGASPIWVFNNGVSHNDQVDTSAVLPLVQEALDGIEFARGDPTSKWGSLRAAMGHPEPFDLRYVAVGNEDCGKKNYRGNYLKFYSAIKSAYPDIQIISNCDGSSRPLDHPADMYDYHVYTNANDMFYRANTFDHTSRNGPKAFVSEYAVTGKDAGTGSLLAALAEAGFLIGLEKNSDVIQMASYAPLFVNANDRRWNLDAIVFNSFQLYGTPSYWVQLFFSESSGATLLSTSLQAPSSNSLVASAITFQNSVDKKNYIRIKVVNFGTTAVNLKISLDGLEPNSLQLSGSTKTVLTSANVMDENSFSQPKKVVPIQSLLQNVEKDMNVTVPPRSFTSFDLLKQSSNLKMAGSDSSTWSSI

SEQ ID NO: 58545 - DNA, 1530 bp, Glycine max
  misc_feature (1)..(1530): Ceres Seq. ID no. 15177965
aagattttcttggacgtgttagaaaatacagtagccgttgaccaaaaccaacaaaaaaaaaaatagtattatatgaacgtgaaccagcgtcacaaagaagtttgtgagcataaagaaacatctcaatctcaaaagaagcatctcgtgtattgtctcttaaaaacaatggaattgatgtgccattgttcgagctttcttcttccgccggagaatcctaacacgacgtgttcgctttctctaaagtacgctctcgttgttctcaaccaaagcctaccgagatttgctcctctgctctgggaccacgctcaagtacgagtttgcgctgatggaggtgccaatagggtgtatgatgaaatgcctcttttcttccctcatcaacaaccttcccatgttcgcaccaggtacaagcctgatgtaattaaaggagacatggattcaatcaggacagaagtacttgacttctatgcaaagctgggaactaagataattgatgagtctcatgatcaggacaccacagatttacacaaatgtgtggcatacatacgtgacctcaccccaaatgttgatggatcagaactatgcattcttgttgctggagcacttggtgggagattcgaccatgagattggaaatattaatgtgctgtgccgattttccaacacacgaattatccttctatctgatgattgcctcattcatcttcttccaaagaatcattgtcatcaaatctttattgaatcttctgttgagggtccgcattgtggactcattcccattgggatgccttctggaagctctacatccacaggactcaaatgggatctcaatgacacagcgatgagttttggaggtttagtaagtacatccaatattgtaaaaggggaaatagttacagtacagtctgattcagatcttctttggactatttctattaagaagctcgaggttttacatggtgcatagtgcggtgatttttcagatcttcaataccaatttatatgggccctatattccagttaaaagccagagcttctgctgacctttataactttacgtttcattctttcaatttactctgaattatgggagggtggaagggaattaggaaattattctttaaattaggaagttctattcctagtaactgtgccttgaaagtcagttttcaaaaggctacttacattccttggctcagttgtattgtatgttattgttatccgtaaatgaaatagcaggaataagatgagcaagaaaaagaaggagaaaaccatgtcatgtactattgcttatgcatacagaacagttactgtcaattgaaatggttaatggattgttagttgccactctacactgcaggaccatgacgggtcaataattctggttaatatctagtatgtgattagtgatatggatttttgaattagaagaatgagttgaaatttgattatacattgtaacgggagtaattattatatgtgagacgggtttttcaatttacaagaacgagttaataaaatttgattatgcagg

SEQ ID NO: 58546 - protein, 296 aa, Glycine max
  peptide (1)..(296): Ceres Seq. ID no. 15177966
  misc_feature (64)..(204): Pfam Name: Thiamin pyrophosphokinase, catalytic domain Pfam Description: Thiamin pyrophosphokinase, catalytic domain
  misc_feature (13)..(291): Homolog of NCBI NO: 28571654 NR Description: CG14721-PA [Drosophila melanogaster]
  misc_feature (35)..(288): Homolog of NCBI NO: 34907130 NR Description: putative thiamine pyrophosphokinase
  misc_feature (110)..(289): Homolog of NCBI NO: 30678410 NR Description: thiamin pyrophosphokinase -related [Arabidopsis
  misc_feature (32)..(110): Homolog of NCBI NO: 34915046 NR Description: putative thiamin pyrophosphokinase
  misc_feature (135)..(290): Homolog of NCBI NO: 34915046 NR Description: putative thiamin pyrophosphokinase
  misc_feature (32)..(289): Homolog of NCBI NO: 18379026 NR Description: thiamin pyrophosphokinase -related [Arabidopsis
  misc_feature (29)..(289): Homolog of NCBI NO: 30678415 NR Description: thiamin pyrophosphokinase -related [Arabidopsis
  misc_feature (28)..(289): Homolog of NCBI NO: 18406621 NR Description: thiamin pyrophosphokinase -related [Arabidopsis
  misc_feature (32)..(289): Homolog of NCBI NO: 7488367 NR Description: probable thiamin pyrophosphokinase At2g44750
  misc_feature (28)..(289): Homolog of NCBI NO: 30689827 NR Description: thiamin pyrophosphokinase -related [Arabidopsis
MNVNQRHKEVCEHKETSQSQKKHLVYCLLKTMELMCHCSSFLLPPENPNTTCSLSLKYALVVLNQSLPRFAPLLWDHAQVRVCADGGANRVYDEMPLFFPHQQPSHVRTRYKPDVIKGDMDSIRTEVLDFYAKLGTKIIDESHDQDTTDLHKCVAYIRDLTPNVDGSELCILVAGALGGRFDHEIGNINVLCRFSNTRIILLSDDCLIHLLPKNHCHQIFIESSVEGPHCGLIPIGMPSGSSTSTGLKWDLNDTAMSFGGLVSTSNIVKGEIVTVQSDSDLLWTISIKKLEVLHGA

SEQ ID NO: 58547 - protein, 265 aa, Glycine max
  peptide (1)..(265): Ceres Seq. ID no. 15177967
  misc_feature (33)..(173): Pfam Name: Thiamin pyrophosphokinase, catalytic domain Pfam Description: Thiamin pyrophosphokinase, catalytic domain
  misc_feature (1)..(260): Homolog of NCBI NO: 28571654 NR Description: CG14721-PA [Drosophila melanogaster]
  misc_feature (4)..(257): Homolog of NCBI NO: 34907130 NR Description: putative thiamine pyrophosphokinase
  misc_feature (79)..(258): Homolog of NCBI NO: 30678410 NR Description: thiamin pyrophosphokinase -related [Arabidopsis
  misc_feature (1)..(79): Homolog of NCBI NO: 34915046 NR Description: putative thiamin pyrophosphokinase
  misc_feature (104)..(259): Homolog of NCBI NO: 34915046 NR Description: putative thiamin pyrophosphokinase
  misc_feature (1)..(258): Homolog of NCBI NO: 18379026 NR Description: thiamin pyrophosphokinase -related [Arabidopsis
  misc_feature (1)..(258): Homolog of NCBI NO: 30678415 NR Description: thiamin pyrophosphokinase -related [Arabidopsis
  misc_feature (1)..(258): Homolog of NCBI NO: 18406621 NR Description: thiamin pyrophosphokinase -related [Arabidopsis
  misc_feature (1)..(258): Homolog of NCBI NO: 7488367 NR Description: probable thiamin pyrophosphokinase At2g44750
  misc_feature (1)..(258): Homolog of NCBI NO: 30689827 NR Description: thiamin pyrophosphokinase -related [Arabidopsis
MELMCHCSSFLLPPENPNTTCSLSLKYALVVLNQSLPRFAPLLWDHAQVRVCADGGANRVYDEMPLFFPHQQPSHVRTRYKPDVIKGDMDSIRTEVLDFYAKLGTKIIDESHDQDTTDLHKCVAYIRDLTPNVDGSELCILVAGALGGRFDHEIGNINVLCRFSNTRIILLSDDCLIHLLPKNHCHQIFIESSVEGPHCGLIPIGMPSGSSTSTGLKWDLNDTAMSFGGLVSTSNIVKGEIVTVQSDSDLLWTISIKKLEVLHGA

SEQ ID NO: 58548 - protein, 262 aa, Glycine max
  peptide (1)..(262): Ceres Seq. ID no. 15177968
  misc_feature (30)..(170): Pfam Name: Thiamin pyrophosphokinase, catalytic domain Pfam Description: Thiamin pyrophosphokinase, catalytic domain
  misc_feature (1)..(257): Homolog of NCBI NO: 28571654 NR Description: CG14721-PA [Drosophila melanogaster]
  misc_feature (1)..(254): Homolog of NCBI NO: 34907130 NR Description: putative thiamine pyrophosphokinase
  misc_feature (76)..(255): Homolog of NCBI NO: 30678410 NR Description: thiamin pyrophosphokinase -related [Arabidopsis
  misc_feature (1)..(76): Homolog of NCBI NO: 34915046 NR Description: putative thiamin pyrophosphokinase
  misc_feature (101)..(256): Homolog of NCBI NO: 34915046 NR Description: putative thiamin pyrophosphokinase
  misc_feature (1)..(255): Homolog of NCBI NO: 18379026 NR Description: thiamin pyrophosphokinase -related [Arabidopsis
  misc_feature (1)..(255): Homolog of NCBI NO: 30678415 NR Description: thiamin pyrophosphokinase -related [Arabidopsis
  misc_feature (1)..(255): Homolog of NCBI NO: 18406621 NR Description: thiamin pyrophosphokinase -related [Arabidopsis
  misc_feature (1)..(255): Homolog of NCBI NO: 7488367 NR Description: probable thiamin pyrophosphokinase At2g44750
  misc_feature (1)..(255): Homolog of NCBI NO: 30689827 NR Description: thiamin pyrophosphokinase -related [Arabidopsis
MCHCSSFLLPPENPNTTCSLSLKYALVVLNQSLPRFAPLLWDHAQVRVCADGGANRVYDEMPLFFPHQQPSHVRTRYKPDVIKGDMDSIRTEVLDFYAKLGTKIIDESHDQDTTDLHKCVAYIRDLTPNVDGSELCILVAGALGGRFDHEIGNINVLCRFSNTRIILLSDDCLIHLLPKNHCHQIFIESSVEGPHCGLIPIGMPSGSSTSTGLKWDLNDTAMSFGGLVSTSNIVKGEIVTVQSDSDLLWTISIKKLEVLHGA

SEQ ID NO: 58549 - DNA, 1238 bp, Glycine max
  misc_feature (1)..(1238): Ceres Seq. ID no. 14308084
ggtgcccttcattcctatcaattatcaaacagcttcggtgatcatcgtaactacctctacatttgtttgtttatcatttctttgctcgtatcaatgtctaacaccagcaacaatgtcgctggggtcgacaacacgttcagaagaaaatttgatcgagaagagtatctagaacgagcacgggagcgcgagagacaggaggaggagggtcgagcgaaacctaaagccaaaggtcctcccgtgcagaggaagcccttgaaacatagagattatgaagtggaccttgaatcccgcttgggcaagactcaggttgttacgccggttgcaccactaagtcagcaggctggatactactgctcagtttgtgagtgtgtggtgaaggactctgcaaactacttggatcatattaatggaaagaaacatcaaagagccttgggcatgtccatgcgagtagaacgtgcttctctccaacaggttcaggaacgatttgaagttcttaagaagcgtaaagatgttggcagcttcacagagcaagatcttgacgagcggattttaaaacagcagcaagaggaggaagaaagaaagcgactgcgtcgagaaaagaaaaaagaaaaggtagtgtctgtatagtcgtttaattttagttagaaataggcaataggtttgaataaaccttttttctatcctccctttaccttatcccactaccatcaagtacaattagtttttttaatgttatttacttattataactgctaataattgcatccatctttctaaaaatgatttttaatgttattttaataaacaaagattgcttttgtttttcacaacttagctaatagcatgtgttaaattttggattcagaaggagaaggcagttgaagaacctgaaattgatcctgatgttgctgccatgatggggtttggaggtttccggtcatccaacaagaaatgatagcattctgcatgcggaatgaactgcgtatgaaattttggaacaattattctgcaatgataagctgaaagattattctgtggagaatcgttaaatagttgggctgcggtatcttccagcctgattttgggtgtggcttaaagatttttctgtggagaatagttaaatagttgggctgctcaaacagtagtatgggtgctggtgcattgcgttatattcaatcatttgattcggttgattcatgtacatttcttctgatagctaacctgatgtattattatat

SEQ ID NO: 58550 - protein, 208 aa, Glycine max
  peptide (1)..(208): Ceres Seq. ID no. 14308085
  misc_feature (116)..(140): Pfam Name: Zinc finger, C2H2 type Pfam Description: Zinc finger, C2H2 type
  misc_feature (17)..(205): Homolog of NCBI NO: 39581678 NR Description: Hypothetical protein CBG00030 [Caenorhabditis
  misc_feature (7)..(203): Homolog of NCBI NO: 17557051 NR Description: putative nuclear protein, with 2 coiled coil-4
  misc_feature (47)..(204): Homolog of NCBI NO: 31216822 NR Description: ENSANGP00000020597 [Anopheles gambiae]
  misc_feature (47)..(204): Homolog of NCBI NO: 21355873 NR Description: CG11586-PA [Drosophila melanogaster]
  misc_feature (46)..(204): Homolog of NCBI NO: 34878791 NR Description: similar to histidyl-tRNA synthetase-like [Rattus
  misc_feature (40)..(204): Homolog of NCBI NO: 13385046 NR Description: RIKEN cDNA 2610510D14 [Mus musculus]
  misc_feature (40)..(204): Homolog of NCBI NO: 37595334 NR Description: z2610510D14Rik [Danio rerio]
  misc_feature (35)..(208): Homolog of NCBI NO: 6714389 NR Description: hypothetical protein [Arabidopsis thaliana]
  misc_feature (35)..(204): Homolog of NCBI NO: 18397358 NR Description: expressed protein [Arabidopsis thaliana]
  misc_feature (36)..(204): Homolog of NCBI NO: 34897240 NR Description: unknown protein [Oryza sativa (japonica
GALHSYQLSNSFGDHRNYLYICLFIISLLVSMSNTSNNVAGVDNTFRRKFDREEYLERARERERQEEEGRAKPKAKGPPVQRKPLKHRDYEVDLESRLGKTQVVTPVAPLSQQAGYYCSVCECVVKDSANYLDHINGKKHQRALGMSMRVERASLQQVQERFEVLKKRKDVGSFTEQDLDERILKQQQEEEERKRLRREKKKEKVVSV

SEQ ID NO: 58551 - protein, 177 aa, Glycine max
  peptide (1)..(177): Ceres Seq. ID no. 14308086
  misc_feature (85)..(109): Pfam Name: Zinc finger, C2H2 type Pfam Description: Zinc finger, C2H2 type
  misc_feature (1)..(174): Homolog of NCBI NO: 39581678 NR Description: Hypothetical protein CBG00030 [Caenorhabditis
  misc_feature (1)..(172): Homolog of NCBI NO: 17557051 NR Description: putative nuclear protein, with 2 coiled coil-4
  misc_feature (16)..(173): Homolog of NCBI NO: 31216822 NR Description: ENSANGP00000020597 [Anopheles gambiae]
  misc_feature (16)..(173): Homolog of NCBI NO: 21355873 NR Description: CG11586-PA [Drosophila melanogaster]
  misc_feature (15)..(173): Homolog of NCBI NO: 34878791 NR Description: similar to histidyl-tRNA synthetase-like [Rattus
  misc_feature (9)..(173): Homolog of NCBI NO: 13385046 NR Description: RIKEN cDNA 2610510D14 [Mus musculus]
  misc_feature (9)..(173): Homolog of NCBI NO: 37595334 NR Description: z2610510D14Rik [Danio rerio]
  misc_feature (4)..(177): Homolog of NCBI NO: 6714389 NR Description: hypothetical protein [Arabidopsis thaliana]
  misc_feature (4)..(173): Homolog of NCBI NO: 18397358 NR Description: expressed protein [Arabidopsis thaliana]
  misc_feature (5)..(173): Homolog of NCBI NO: 34897240 NR Description: unknown protein [Oryza sativa (japonica
MSNTSNNVAGVDNTFRRKFDREEYLERARERERQEEEGRAKPKAKGPPVQRKPLKHRDYEVDLESRLGKTQVVTPVAPLSQQAGYYCSVCECVVKDSANYLDHINGKKHQRALGMSMRVERASLQQVQERFEVLKKRKDVGSFTEQDLDERILKQQQEEEERKRLRREKKKEKVVSV

SEQ ID NO: 58552 - DNA, 421 bp, Glycine max
  misc_feature (1)..(421): Ceres Seq. ID no. 15226489
accgggccccccctcgagtcagctacgtaggccccccccccttttgagaagtttgtggaccttgcaatggagtgtgttgaagattcaggagctgacaggcccgcaatgagtgatgtggttaaagaaattgaagacatgttgcagtctgttggtatgcacctaacatctgaatcagtaacatccacaacatctagtcatagatatcaggaggtaagtatagtgagtttccatctggaccaaccttacagcaatgagtcctttggttcaagtgcagaacatattcaaaaattgaacctagttagttaagttagtcttttttctcaagattgaagtcaagagagacttgtttattagtatttcttggccaaaacacagaaaagtagaaattgtggaatttagagtttgtggctgtgagcttcag

SEQ ID NO: 58553 - protein, 79 aa, Glycine max
  peptide (1)..(79): Ceres Seq. ID no. 15226490
  misc_feature (1)..(40): Homolog of NCBI NO: 8978273 NR Description: receptor protein kinase-like [Arabidopsis
  misc_feature (1)..(69): Homolog of NCBI NO: 15240549 NR Description: leucine-rich repeat transmembrane protein kinase,
  misc_feature (1)..(65): Homolog of NCBI NO: 30695748 NR Description: receptor protein kinase-related [Arabidopsis
MECVEDSGADRPAMSDVVKEIEDMLQSVGMHLTSESVTSTTSSHRYQEVSIVSFHLDQPYSNESFGSSAEHIQKLNLVS

SEQ ID NO: 58554 - protein, 66 aa, Glycine max
  peptide (1)..(66): Ceres Seq. ID no. 15226491
  misc_feature (1)..(27): Homolog of NCBI NO: 8978273 NR Description: receptor protein kinase-like [Arabidopsis
  misc_feature (1)..(56): Homolog of NCBI NO: 15240549 NR Description: leucine-rich repeat transmembrane protein kinase,
  misc_feature (1)..(52): Homolog of NCBI NO: 30695748 NR Description: receptor protein kinase-related [Arabidopsis
MSDVVKEIEDMLQSVGMHLTSESVTSTTSSHRYQEVSIVSFHLDQPYSNESFGSSAEHIQKLNLVS

SEQ ID NO: 58555 - protein, 56 aa, Glycine max
  peptide (1)..(56): Ceres Seq. ID no. 15226492
  misc_feature (1)..(17): Homolog of NCBI NO: 8978273 NR Description: receptor protein kinase-like [Arabidopsis
  misc_feature (1)..(46): Homolog of NCBI NO: 15240549 NR Description: leucine-rich repeat transmembrane protein kinase,
  misc_feature (1)..(42): Homolog of NCBI NO: 30695748 NR Description: receptor protein kinase-related [Arabidopsis
MLQSVGMHLTSESVTSTTSSHRYQEVSIVSFHLDQPYSNESFGSSAEHIQKLNLVS

SEQ ID NO: 58556 - DNA, 1039 bp, Glycine max
  misc_feature (1)..(1039): Ceres Seq. ID no. 14313391
aacaattcaagaaaactaatcatgaacttgaggtttgtgatagggatatagccaatgtgcttgtgtgaatgcttattctggaaattaaggtttaatttttaactgaccaattatttcaaatcactttgtaagtgctttacctttctgcaatcatgtttatctttcccccttacaactgggagctgtaaaggggattgtaggtctcaaagatacttaatggaaatataaaaaactgagtttaatttattacttgtatgggagaatatgtgcatgctgttgctttggttcttgggagtttttcctttatagaattcccattctcattggttttctttctcaatcatttttcctcaacagtcaacatctgctctataacgggcatatggctccatccttctattgatggttccattgattctttatggcaggaaacgtttatttagcttgatcaatgatcttcctactgtttttgaagttgtgactgagaggaagccagtaaaggacaagcccactgcagacagtggaagcaagtctagaggcagcaccaagagatcaagtgatgggcaagttaagagcaacccaaagtttgcagatgatggttatgaagacgaggatgatgagcacagtgaaaccctttgtgggagctgtggcggaaattacaatgcagatgaattttggattggctgcgatatatgtgagaggtggttccatgggaaatgtgtgaagatcactcctgcaaaagctgagagcataaagcaatacaaatgtccatcatgcagcttgaggcgaggcaggccctaagccgaaggcaaaatgtgaagtgaataatgctgtttcatggccgacaaagatactgtaatattgttgtatcttttatagaagttcttgtaaacggtatagtatctatgtctgatcataatctttcagattaagttaatttcttctaccaagattaatcatcagtgtatgttatataattttatagaatagaattctatacattttatttttgtctattaatctatattttgcttgaatt

SEQ ID NO: 58557 - protein, 132 aa, Glycine max
  peptide (1)..(132): Ceres Seq. ID no. 14313392
  misc_feature (78)..(125): Pfam Name: PHD-finger Pfam Description: PHD-finger
  misc_feature (9)..(126): Homolog of NCBI NO: 15223786 NR Description: nucleic acid binding protein (alfin-1) -related
  misc_feature (9)..(131): Homolog of NCBI NO: 7488751 NR Description: probable zinc finger protein - alfalfa (fragment)
  misc_feature (9)..(132): Homolog of NCBI NO: 30687843 NR Description: zinc finger protein - like [Arabidopsis thaliana]
  misc_feature (9)..(131): Homolog of NCBI NO: 15239624 NR Description: nucleic acid binding protein - like [Arabidopsis
  misc_feature (9)..(131): Homolog of NCBI NO: 15229157 NR Description: nucleic acid binding protein-related [Arabidopsis
  misc_feature (9)..(126): Homolog of NCBI NO: 34900462 NR Description: putative nucleic acid binding protein
  misc_feature (9)..(126): Homolog of NCBI NO: 29124114 NR Description: putative PHD-type zinc finger protein
  misc_feature (9)..(126): Homolog of NCBI NO: 28876028 NR Description: putative PHD-finger domain containing protein
  misc_feature (9)..(131): Homolog of NCBI NO: 15229696 NR Description: nucleic acid binding protein -related
  misc_feature (9)..(131): Homolog of NCBI NO: 15239180 NR Description: nucleic acid binding protein-related [Arabidopsis
MVPLILYGRKRLFSLINDLPTVFEVVTERKPVKDKPTADSGSKSRGSTKRSSDGQVKSNPKFADDGYEDEDDEHSETLCGSCGGNYNADEFWIGCDICERWFHGKCVKITPAKAESIKQYKCPSCSLRRGRP

SEQ ID NO: 58558 - DNA, 1260 bp, Glycine max
  misc_feature (1)..(1260): Ceres Seq. ID no. 13594193
gatcatccactacttgtagctattagcttataacagagagagagagagagagagagagagagagggagagatcacatttcctgaactataagctatatagcacttccataatcttacaacaatggaggggaccagcagccaaagcacgtttgccttcatccctagcacaattgagacaccaagtccaagcatccctgagatatcatcatcatcttcccctggctctcttgcaagaattgcacaaagttaccctcccggctttcccagaaaggtgttagcggagattatagggacatttttgttggtgtttgtgggaagtggttctgctgggctaagcaagattgatgagaggatggtgtcaaagcttggagcatcacttgcaggaggactcatagtgacggtcatgatatactcaattggacacatatcaggggcacacatgaatcccgcggtttctcttgctttcaccgccgtcaggcatcttccttggccacagctcccattttatatagcagctcaactcactggtgccatttctgcttcatacacattgcgagagctgttacgaccatcaaatgagattggaggaacatcacctgctggatcacacattcaagccctaatcatggaaatggtgaccacatataccatggtgttcatttccatggccgtggccactgactcaaacgcgacaggacagctatcaggagtagcagtaggttcttctgtttgcatagcaagcattgtagccggaccaatatcagggggatcaatgaatccagcaaggacattaggtcctgcaattgcgacatcatactacaagggactttgggtatattttgttggacctattactggggcggttttagcagcttggtcttacaatgtgattagggacactgaacaccctggttttcccatttcactatcctccatttcatccaaggtgcgccaaagcattggtggaactgaacaaaaaagcgaccaaagatgcttggtgtgaatgaaataataaacaacaatgttttttctgacaccacaccaccgcccaaatcaacatcaccttcaatttcttgtcttggaggatctcaagtttccacatgtattatcatgtatatgatcaaaaataccatgcctagatcatatggtattattagcttggccatgtatcgagttaatttcagggctatgagctagccatgtgtaatgcaaaagtgtgtagtgtgattttcctacattaatgaaatgtcagcttcatcc

SEQ ID NO: 58559 - protein, 293 aa, Glycine max
  peptide (1)..(293): Ceres Seq. ID no. 13594194
  misc_feature (43)..(254): Pfam Name: Major intrinsic protein Pfam Description: Major intrinsic protein
  misc_feature (28)..(263): Homolog of NCBI NO: 17025880 NR Description: multifunctional aquaporin [Medicago truncatula]
  misc_feature (49)..(263): Homolog of NCBI NO: 5139541 NR Description: nodulin26-like major intrinsic protein [Pisum
  misc_feature (37)..(263): Homolog of NCBI NO: 13447785 NR Description: NOD26-like membrane integral protein ZmNIP1-1
  misc_feature (31)..(263): Homolog of NCBI NO: 1076748 NR Description: major intrinsic protein - rice
  misc_feature (34)..(261): Homolog of NCBI NO: 15777893 NR Description: early embryogenesis aquaglyceroporin [Pinus taeda]
  misc_feature (14)..(282): Homolog of NCBI NO: 9971217 NR Description: MIP [Adiantum capillus-veneris]
  misc_feature (39)..(263): Homolog of NCBI NO: 13448045 NR Description: NOD26-like membrane integral protein ZmNIP2-3
  misc_feature (39)..(278): Homolog of NCBI NO: 13447789 NR Description: NOD26-like membrane integral protein ZmNIP2-2
  misc_feature (28)..(278): Homolog of NCBI NO: 13447787 NR Description: NOD26-like membrane integral protein ZmNIP2-1
  misc_feature (28)..(278): Homolog of NCBI NO: 33468424 NR Description: Nod26-like protein [Cucurbita pepo]
MEGTSSQSTFAFIPSTIETPSPSIPEISSSSSPGSLARIAQSYPPGFPRKVLAEIIGTFLLVFVGSGSAGLSKIDERMVSKLGASLAGGLIVTVMIYSIGHISGAHMNPAVSLAFTAVRHLPWPQLPFYIAAQLTGAISASYTLRELLRPSNEIGGTSPAGSHIQALIMEMVTTYTMVFISMAVATDSNATGQLSGVAVGSSVCIASIVAGPISGGSMNPARTLGPAIATSYYKGLWVYFVGPITGAVLAAWSYNVIRDTEHPGFPISLSSISSKVRQSIGGTEQKSDQRCLV

SEQ ID NO: 58560 - protein, 216 aa, Glycine max
  peptide (1)..(216): Ceres Seq. ID no. 13594195
  misc_feature (1)..(177): Pfam Name: Major intrinsic protein Pfam Description: Major intrinsic protein
  misc_feature (1)..(186): Homolog of NCBI NO: 17025880 NR Description: multifunctional aquaporin [Medicago truncatula]
  misc_feature (1)..(186): Homolog of NCBI NO: 5139541 NR Description: nodulin26-like major intrinsic protein [Pisum
  misc_feature (1)..(186): Homolog of NCBI NO: 13447785 NR Description: NOD26-like membrane integral protein ZmNIP1-1
  misc_feature (1)..(186): Homolog of NCBI NO: 1076748 NR Description: major intrinsic protein - rice
  misc_feature (1)..(184): Homolog of NCBI NO: 15777893 NR Description: early embryogenesis aquaglyceroporin [Pinus taeda]
  misc_feature (1)..(205): Homolog of NCBI NO: 9971217 NR Description: MIP [Adiantum capillus-veneris]
  misc_feature (1)..(186): Homolog of NCBI NO: 13448045 NR Description: NOD26-like membrane integral protein ZmNIP2-3
  misc_feature (1)..(201): Homolog of NCBI NO: 13447789 NR Description: NOD26-like membrane integral protein ZmNIP2-2
  misc_feature (1)..(201): Homolog of NCBI NO: 13447787 NR Description: NOD26-like membrane integral protein ZmNIP2-1
  misc_feature (1)..(201): Homolog of NCBI NO: 33468424 NR Description: Nod26-like protein [Cucurbita pepo]
MVSKLGASLAGGLIVTVMIYSIGHISGAHMNPAVSLAFTAVRHLPWPQLPFYIAAQLTGAISASYTLRELLRPSNEIGGTSPAGSHIQALIMEMVTTYTMVFISMAVATDSNATGQLSGVAVGSSVCIASIVAGPISGGSMNPARTLGPAIATSYYKGLWVYFVGPITGAVLAAWSYNVIRDTEHPGFPISLSSISSKVRQSIGGTEQKSDQRCLV

SEQ ID NO: 58561 - protein, 199 aa, Glycine max
  peptide (1)..(199): Ceres Seq. ID no. 13594196
  misc_feature (1)..(160): Pfam Name: Major intrinsic protein Pfam Description: Major intrinsic protein
  misc_feature (1)..(169): Homolog of NCBI NO: 17025880 NR Description: multifunctional aquaporin [Medicago truncatula]
  misc_feature (1)..(169): Homolog of NCBI NO: 5139541 NR Description: nodulin26-like major intrinsic protein [Pisum
  misc_feature (1)..(169): Homolog of NCBI NO: 13447785 NR Description: NOD26-like membrane integral protein ZmNIP1-1
  misc_feature (1)..(169): Homolog of NCBI NO: 1076748 NR Description: major intrinsic protein - rice
  misc_feature (1)..(167): Homolog of NCBI NO: 15777893 NR Description: early embryogenesis aquaglyceroporin [Pinus taeda]
  misc_feature (1)..(188): Homolog of NCBI NO: 9971217 NR Description: MIP [Adiantum capillus-veneris]
  misc_feature (1)..(169): Homolog of NCBI NO: 13448045 NR Description: NOD26-like membrane integral protein ZmNIP2-3
  misc_feature (1)..(184): Homolog of NCBI NO: 13447789 NR Description: NOD26-like membrane integral protein ZmNIP2-2
  misc_feature (1)..(184): Homolog of NCBI NO: 13447787 NR Description: NOD26-like membrane integral protein ZmNIP2-1
  misc_feature (1)..(184): Homolog of NCBI NO: 33468424 NR Description: Nod26-like protein [Cucurbita pepo]
MIYSIGHISGAHMNPAVSLAFTAVRHLPWPQLPFYIAAQLTGAISASYTLRELLRPSNEIGGTSPAGSHIQALIMEMVTTYTMVFISMAVATDSNATGQLSGVAVGSSVCIASIVAGPISGGSMNPARTLGPAIATSYYKGLWVYFVGPITGAVLAAWSYNVIRDTEHPGFPISLSSISSKVRQSIGGTEQKSDQRCLV

SEQ ID NO: 58562 - DNA, 1540 bp, Glycine max
  misc_feature (1)..(1540): Ceres Seq. ID no. 15170209
aaaaaacttaaattgaaaacagagtccttccttgtctgttatcactgtgtaagcagtgatcgattctgcgaactgcgattcgcatcgccaattcaaaagcgttcgttcgtcggagatggagacgctaccgacgacgacgacaaagcgaggaggagcgagatcgaagcccgttcagacctcgaaatcgtctctcgttatggccttcttctcctgcgtcgcgtggctctacgtcgccggaaggttatggcaagacgcagagaatcgcaatttactcgctagtcttctgaaaaagaattcagctcagaggcctaaggttcttacagtggaagataagttaatggtgcttgggtgcagggatctggagaggaggattgtggaagctgagatggaattgacattggctaagagccaagggtacctaaaggggcaaggccagagaagcggctcttctgatcgtaggcttcttgctgttatcggagtgtatactggatttgggagtaaattgaagagaaatgttttcagggggtcttggatgcccagaggtgatgccttgaaaaaacttgaagaaagaggagtggtcatacgttttgttattggtcggagtgctaatcgaggtgatagcttagatcgcaatattgacgaggaaaatcgcacaacaaaggatttcctgattcttgaaggtcatgaggaagctcaagaagagttgcctaaaaaagttaaaaccttcttcagtactgcagttcagaactgggatgctgacttttatgtaaaagttgatgatggcattgatattgatctcgagggtttaattgaacttcttgaccgtcgtcgtggtcaggatagggcatatgttggatgcatgaagtcaggagaagtgatatcagaagagggaaagccatggtatgaacctgattggtggaaatttggggatgaaaaatcgtatttccgacatgcggctggttcacttgttataatttcaaagaatttggcacaatacattaatataaacagtgtatctttgaagacatatgcctatgatgatacatcattgggatcatggatgatgggcgtccaagcaacttacatagatgacagtcggctttgctgcagtagtatcagacaagacaaggtatgctccttggcttgattggaggatcacaagcacattcttccctactcttatgggaactcacacaatttgtctgaaaatcagtatcagttgaacattatgttcactcttttcagttgcatactgccttgagagctttgtagacaatatcaatataattcctttctagatccagttatctgttcattcttttagatgctagcagcgaaattgagggataactactgattacggagttcagcccttggtgctcaattgctatttccgggggtgatatgattgtacttttactctgctattggatatacacaacttctgttgatgaccaaatattgaagagaaaaaaaaactatatacaaaatattgatgtattgaaccgctgacgaactaattgtagactttgttgcactg

SEQ ID NO: 58563 - protein, 343 aa, Glycine max
  peptide (1)..(343): Ceres Seq. ID no. 15170210
  misc_feature (130)..(327): Pfam Name: Galactosyltransferase Pfam Description: Galactosyltransferase
  misc_feature (164)..(342): Homolog of NCBI NO: 7485372 NR Description: hypothetical protein F10N7.80 - Arabidopsis
  misc_feature (11)..(333): Homolog of NCBI NO: 9759181 NR Description: Avr9 elicitor response protein-like [Arabidopsis
  misc_feature (11)..(341): Homolog of NCBI NO: 18423501 NR Description: galactosyltransferase family [Arabidopsis
  misc_feature (24)..(343): Homolog of NCBI NO: 20372915 NR Description: beta 1,3-glycosyltransferase-like protein I
  misc_feature (24)..(342): Homolog of NCBI NO: 22553068 NR Description: beta 1,3-glycosyltransferase-like protein I
  misc_feature (11)..(341): Homolog of NCBI NO: 40253477 NR Description: putative Avr9 elicitor response protein
  misc_feature (60)..(343): Homolog of NCBI NO: 26451702 NR Description: unknown protein [Arabidopsis thaliana]
  misc_feature (1)..(343): Homolog of NCBI NO: 34898462 NR Description: ESTs D47620(S13223),AU029621(E31157) correspond a region of the predicted gene.~Similar to Arabidopsis thaliana
  misc_feature (1)..(336): Homolog of NCBI NO: 15224704 NR Description: galactosyltransferase family [Arabidopsis
  misc_feature (1)..(343): Homolog of NCBI NO: 15236681 NR Description: galactosyltransferase family [Arabidopsis
METLPTTTTKRGGARSKPVQTSKSSLVMAFFSCVAWLYVAGRLWQDAENRNLLASLLKKNSAQRPKVLTVEDKLMVLGCRDLERRIVEAEMELTLAKSQGYLKGQGQRSGSSDRRLLAVIGVYTGFGSKLKRNVFRGSWMPRGDALKKLEERGVVIRFVIGRSANRGDSLDRNIDEENRTTKDFLILEGHEEAQEELPKKVKTFFSTAVQNWDADFYVKVDDGIDIDLEGLIELLDRRRGQDRAYVGCMKSGEVISEEGKPWYEPDWWKFGDEKSYFRHAAGSLVIISKNLAQYININSVSLKTYAYDDTSLGSWMMGVQATYIDDSRLCCSSIRQDKVCSLA

SEQ ID NO: 58564 - protein, 316 aa, Glycine max
  peptide (1)..(316): Ceres Seq. ID no. 15170211
  misc_feature (103)..(300): Pfam Name: Galactosyltransferase Pfam Description: Galactosyltransferase
  misc_feature (137)..(315): Homolog of NCBI NO: 7485372 NR Description: hypothetical protein F10N7.80 - Arabidopsis
  misc_feature (1)..(306): Homolog of NCBI NO: 9759181 NR Description: Avr9 elicitor response protein-like [Arabidopsis
  misc_feature (1)..(314): Homolog of NCBI NO: 18423501 NR Description: galactosyltransferase family [Arabidopsis
  misc_feature (1)..(316): Homolog of NCBI NO: 20372915 NR Description: beta 1,3-glycosyltransferase-like protein I
  misc_feature (1)..(315): Homolog of NCBI NO: 22553068 NR Description: beta 1,3-glycosyltransferase-like protein I
  misc_feature (1)..(314): Homolog of NCBI NO: 40253477 NR Description: putative Avr9 elicitor response protein
  misc_feature (33)..(316): Homolog of NCBI NO: 26451702 NR Description: unknown protein [Arabidopsis thaliana]
  misc_feature (1)..(316): Homolog of NCBI NO: 34898462 NR Description: ESTs D47620(S13223),AU029621(E31157) correspond a region of the predicted gene.~Similar to Arabidopsis thaliana
  misc_feature (1)..(309): Homolog of NCBI NO: 15224704 NR Description: galactosyltransferase family [Arabidopsis
  misc_feature (1)..(316): Homolog of NCBI NO: 15236681 NR Description: galactosyltransferase family [Arabidopsis
MAFFSCVAWLYVAGRLWQDAENRNLLASLLKKNSAQRPKVLTVEDKLMVLGCRDLERRIVEAEMELTLAKSQGYLKGQGQRSGSSDRRLLAVIGVYTGFGSKLKRNVFRGSWMPRGDALKKLEERGVVIRFVIGRSANRGDSLDRNIDEENRTTKDFLILEGHEEAQEELPKKVKTFFSTAVQNWDADFYVKVDDGIDIDLEGLIELLDRRRGQDRAYVGCMKSGEVISEEGKPWYEPDWWKFGDEKSYFRHAAGSLVIISKNLAQYININSVSLKTYAYDDTSLGSWMMGVQATYIDDSRLCCSSIRQDKVCSLA

SEQ ID NO: 58565 - protein, 269 aa, Glycine max
  peptide (1)..(269): Ceres Seq. ID no. 15170212
  misc_feature (56)..(253): Pfam Name: Galactosyltransferase Pfam Description: Galactosyltransferase
  misc_feature (90)..(268): Homolog of NCBI NO: 7485372 NR Description: hypothetical protein F10N7.80 - Arabidopsis
  misc_feature (1)..(259): Homolog of NCBI NO: 9759181 NR Description: Avr9 elicitor response protein-like [Arabidopsis
  misc_feature (1)..(267): Homolog of NCBI NO: 18423501 NR Description: galactosyltransferase family [Arabidopsis
  misc_feature (1)..(269): Homolog of NCBI NO: 20372915 NR Description: beta 1,3-glycosyltransferase-like protein I
  misc_feature (1)..(268): Homolog of NCBI NO: 22553068 NR Description: beta 1,3-glycosyltransferase-like protein I
  misc_feature (1)..(267): Homolog of NCBI NO: 40253477 NR Description: putative Avr9 elicitor response protein
  misc_feature (1)..(269): Homolog of NCBI NO: 26451702 NR Description: unknown protein [Arabidopsis thaliana]
  misc_feature (1)..(269): Homolog of NCBI NO: 34898462 NR Description: ESTs D47620(S13223),AU029621(E31157) correspond a region of the predicted gene.~Similar to Arabidopsis thaliana
  misc_feature (1)..(262): Homolog of NCBI NO: 15224704 NR Description: galactosyltransferase family [Arabidopsis
  misc_feature (1)..(269): Homolog of NCBI NO: 15236681 NR Description: galactosyltransferase family [Arabidopsis
MVLGCRDLERRIVEAEMELTLAKSQGYLKGQGQRSGSSDRRLLAVIGVYTGFGSKLKRNVFRGSWMPRGDALKKLEERGVVIRFVIGRSANRGDSLDRNIDEENRTTKDFLILEGHEEAQEELPKKVKTFFSTAVQNWDADFYVKVDDGIDIDLEGLIELLDRRRGQDRAYVGCMKSGEVISEEGKPWYEPDWWKFGDEKSYFRHAAGSLVIISKNLAQYININSVSLKTYAYDDTSLGSWMMGVQATYIDDSRLCCSSIRQDKVCSLA

SEQ ID NO: 58566 - DNA, 1215 bp, Glycine max
  misc_feature (1)..(1215): Ceres Seq. ID no. 14308077
ggaatagagccacacatagggcgaagaggtgtcagcgggaagaggtgccacgtgtaggattttgccctcgctcattgcacttcccagtgagtgacttgactctctttctcacacctccttttttccccgatgctaactctacaagcttcgtctcgtaaagaaaattcgaaagctcaatagagagaactcaattgaatcatcaaatgaggacagtgatttcgcgcttgatccattccacgccttccatttccaggctcaatgccacggtagtgtcaatcagcgggagaaatctctgcacagattctaacaaagttgatgggccattcaaagttgaagaagcagagactgtaaatgtgcctccactcccaacagaaaagttgcttgtgttgggagggaatgggtttgttggatcacacatttgtagagaagccttagaccgtgatttgtctgttgcgagtcttagcaggtctggtaggtcatccctgcatgattcctgggctaccaatgttgcttggtataaagggaatctcctttcaactgattcattgaaagaagctctgaatggggtcactgctgttatctcatgtgttggtggttttggctccaactcttacatgtacaaaattaatgggactgctaacatcaatgcaattagagcagcttcagatcaaggtgttaaaagatttgtctatatctctgcagctgactttggtgtagtaaattacttactgcgggggtattatgaaggaaagagagcttctgaaacagagctcctgaccagattcccatatggaggagtaattctgaggccaggatttatttatggtactcgaagtgttgggagtatgaagataccccttggtgtaattggatctccattggaaatggttctccaagttgctaaaccattgaaccagatcccacttgttgggcctctattgacacctcctgtcaatgttactgcggtggcaaaagttgctgttagagctgctactgatcctgtttttcccccggggatcattgatgcttatggaatacaacgttacagtcagcataaatcaaactagaaaattatctatattttgttttctgggtaaatctaatatggggcgatttgcctctgaatatctgtgttttagtattgttaaactgagaatatttcttcattccatatccttgagagaataaaatctgaaagtgcgagcatgtagccat

SEQ ID NO: 58567 - protein, 287 aa, Glycine max
  peptide (1)..(287): Ceres Seq. ID no. 14308078
  misc_feature (59)..(226): Pfam Name: Isoflavone reductase Pfam Description: Isoflavone reductase
  misc_feature (58)..(130): Homolog of NCBI NO: 6323321 NR Description: Hypothetical ORF; Ylr290cp [Saccharomyces
  misc_feature (123)..(276): Homolog of NCBI NO: 8744993 NR Description: hypothetical protein P1295.07 [Leishmania major]
  misc_feature (59)..(285): Homolog of NCBI NO: 37523204 NR Description: probable oxidoreductase [Gloeobacter violaceus]
  misc_feature (138)..(281): Homolog of NCBI NO: 11346175 NR Description: hypothetical protein F1N13_50 - Arabidopsis
  misc_feature (51)..(268): Homolog of NCBI NO: 18398333 NR Description: expressed protein [Arabidopsis thaliana]
  misc_feature (51)..(268): Homolog of NCBI NO: 38346147 NR Description: OSJNBb0118P14.7 [Oryza sativa (japonica
  misc_feature (58)..(281): Homolog of NCBI NO: 21592373 NR Description: unknown [Arabidopsis thaliana]
  misc_feature (58)..(281): Homolog of NCBI NO: 18417824 NR Description: dehydrogenase-related [Arabidopsis thaliana]
  misc_feature (1)..(286): Homolog of NCBI NO: 10129651 NR Description: putative protein [Arabidopsis thaliana]
  misc_feature (1)..(286): Homolog of NCBI NO: 18416362 NR Description: expressed protein [Arabidopsis thaliana]
MRTVISRLIHSTPSISRLNATVVSISGRNLCTDSNKVDGPFKVEEAETVNVPPLPTEKLLVLGGNGFVGSHICREALDRDLSVASLSRSGRSSLHDSWATNVAWYKGNLLSTDSLKEALNGVTAVISCVGGFGSNSYMYKINGTANINAIRAASDQGVKRFVYISAADFGVVNYLLRGYYEGKRASETELLTRFPYGGVILRPGFIYGTRSVGSMKIPLGVIGSPLEMVLQVAKPLNQIPLVGPLLTPPVNVTAVAKVAVRAATDPVFPPGIIDAYGIQRYSQHKSN

SEQ ID NO: 58568 - protein, 150 aa, Glycine max
  peptide (1)..(150): Ceres Seq. ID no. 14308079
  misc_feature (1)..(89): Pfam Name: Isoflavone reductase Pfam Description: Isoflavone reductase
  misc_feature (1)..(139): Homolog of NCBI NO: 8744993 NR Description: hypothetical protein P1295.07 [Leishmania major]
  misc_feature (1)..(148): Homolog of NCBI NO: 37523204 NR Description: probable oxidoreductase [Gloeobacter violaceus]
  misc_feature (1)..(144): Homolog of NCBI NO: 11346175 NR Description: hypothetical protein F1N13_50 - Arabidopsis
  misc_feature (1)..(131): Homolog of NCBI NO: 18398333 NR Description: expressed protein [Arabidopsis thaliana]
  misc_feature (1)..(131): Homolog of NCBI NO: 38346147 NR Description: OSJNBb0118P14.7 [Oryza sativa (japonica
  misc_feature (1)..(144): Homolog of NCBI NO: 21592373 NR Description: unknown [Arabidopsis thaliana]
  misc_feature (1)..(144): Homolog of NCBI NO: 18417824 NR Description: dehydrogenase-related [Arabidopsis thaliana]
  misc_feature (1)..(149): Homolog of NCBI NO: 10129651 NR Description: putative protein [Arabidopsis thaliana]
  misc_feature (1)..(149): Homolog of NCBI NO: 18416362 NR Description: expressed protein [Arabidopsis thaliana]
MYKINGTANINAIRAASDQGVKRFVYISAADFGVVNYLLRGYYEGKRASETELLTRFPYGGVILRPGFIYGTRSVGSMKIPLGVIGSPLEMVLQVAKPLNQIPLVGPLLTPPVNVTAVAKVAVRAATDPVFPPGIIDAYGIQRYSQHKSN

SEQ ID NO: 58569 - DNA, 1433 bp, Glycine max
  misc_feature (1)..(1433): Ceres Seq. ID no. 14308217
gaggcacgggttttgtttgaggttttctgttcgtttcatttcatttggtcgcacagtgctgtcggccactgtctctctttctctttcgcgcttcaactttcgtttatgcaccgattgggatggatcagtgggatgctcatcatcgactcatgttcattggtcggcatgaggaagatggaactgctgatacttctaagggagaggaatcaaatgatgaagaaaaaataagtaaaactgaacccgtctttgtgcctgaaactaagaaaaggaaacgccttagccttagtcagcttaaagaggtgaaagaggagtctcatgggaagcaaagcagtagcaagtctaagagaaagaagcatgatagtagggatagatggtcagctgagaggtatcaattggccgagcaaaacatgtgggaggtactaaaggctgaaggggcgacatttgaaaacccaataacccgacctgcactaagattagctgcccgcaaacacattggagatactggacttttagaccacttactgaagcacattgatggtaaagtggcacctggagggactgagcgtttccgaagatggttcaacaccaatggaatcatggagtattggttggagagtgctgacttggacaaggtgcgccaggaggcaggggtgcaggacccttactggataccgccatctacatatagggaagctggtgccccctcccagaatattgattcttctggtgaattgaaacagcttaaaatagaattgatgcaaatgaagaaagatatgcatgagctcattgccaagaaggaagagaaaagtgatattaacatggtggaggtgaatgttgaataatttgttaattcaatggtttgctgtcttctcttgcagcactttatgatgttttgttttgagttgctatggcaggagacacacaaggaatctgtaaagtggaaatttatgactgaccatcgccttactgaaatcatgacttctttgaaggatattcaggggaagtatggtgaattgatgatttggaaaactacagttgagcaacaacttatggaaataactgataaattgaatgatcttcaagcatctagggagtgcaccactaatagtcctccttcagaaaggtggcaagattggatagaaagtaccaacctagacaatattcaggaagatgcatttgcaacttggattgggaatccggagctacttaatgttccacaagaggttatacttgaagatcccaacacaaccataccaacacagccacccagtgaagaactgactaacaagaggagcgatgtgctggagttagtacctggtaaactagaagatcaacctaatgtaacccctgattcttctacaactgttaattcgaagtcagaccatgacaacaactcattgatcatgtttcaggagatgtttatggatttatac

SEQ ID NO: 58570 - protein, 240 aa, Glycine max
  peptide (1)..(240): Ceres Seq. ID no. 14308218
  misc_feature (13)..(240): Homolog of NCBI NO: 15237794 NR Description: expressed protein [Arabidopsis thaliana]
  misc_feature (23)..(238): Homolog of NCBI NO: 30696040 NR Description: DYAD [Arabidopsis thaliana]
  misc_feature (23)..(238): Homolog of NCBI NO: 16033414 NR Description: SWITCH1 splice variant S [Arabidopsis thaliana]
  misc_feature (23)..(238): Homolog of NCBI NO: 9759279 NR Description: gb|AAD12714.1~gene_id:MFG13.3~similar to unknown
MDQWDAHHRLMFIGRHEEDGTADTSKGEESNDEEKISKTEPVFVPETKKRKRLSLSQLKEVKEESHGKQSSSKSKRKKHDSRDRWSAERYQLAEQNMWEVLKAEGATFENPITRPALRLAARKHIGDTGLLDHLLKHIDGKVAPGGTERFRRWFNTNGIMEYWLESADLDKVRQEAGVQDPYWIPPSTYREAGAPSQNIDSSGELKQLKIELMQMKKDMHELIAKKEEKSDINMVEVNVE

SEQ ID NO: 58571 - protein, 230 aa, Glycine max
  peptide (1)..(230): Ceres Seq. ID no. 14308219
  misc_feature (3)..(230): Homolog of NCBI NO: 15237794 NR Description: expressed protein [Arabidopsis thaliana]
  misc_feature (13)..(228): Homolog of NCBI NO: 16033414 NR Description: SWITCH1 splice variant S [Arabidopsis thaliana]
  misc_feature (13)..(228): Homolog of NCBI NO: 30696040 NR Description: DYAD [Arabidopsis thaliana]
  misc_feature (13)..(228): Homolog of NCBI NO: 9759279 NR Description: gb|AAD12714.1~gene_id:MFG13.3~similar to unknown
MFIGRHEEDGTADTSKGEESNDEEKISKTEPVFVPETKKRKRLSLSQLKEVKEESHGKQSSSKSKRKKHDSRDRWSAERYQLAEQNMWEVLKAEGATFENPITRPALRLAARKHIGDTGLLDHLLKHIDGKVAPGGTERFRRWFNTNGIMEYWLESADLDKVRQEAGVQDPYWIPPSTYREAGAPSQNIDSSGELKQLKIELMQMKKDMHELIAKKEEKSDINMVEVNVE

SEQ ID NO: 58572 - protein, 193 aa, Glycine max
  peptide (1)..(193): Ceres Seq. ID no. 14308220
  misc_feature (1)..(192): Homolog of NCBI NO: 15237794 NR Description: expressed protein [Arabidopsis thaliana]
MVCCLLLQHFMMFCFELLWQETHKESVKWKFMTDHRLTEIMTSLKDIQGKYGELMIWKTTVEQQLMEITDKLNDLQASRECTTNSPPSERWQDWIESTNLDNIQEDAFATWIGNPELLNVPQEVILEDPNTTIPTQPPSEELTNKRSDVLELVPGKLEDQPNVTPDSSTTVNSKSDHDNNSLIMFQEMFMDLY

SEQ ID NO: 58573 - DNA, 1319 bp, Glycine max
  misc_feature (1)..(1319): Ceres Seq. ID no. 14308310
ggttctctctctctctctcttatttgcttcttcgagtttcacagccaagtcgtaaaagggtttcaagggatggaaaacatgcagagcttctggcaattgggtgatgaactccgtgggcactcaaaagcatcggaggatcacaagtggttaatggttgcctcgaaactggccgaacagacaagattgaagggggagcgtgtgaacaaccttgatctttcaaagggacccattgaaacaaggtcaagggataaatttgggttccaggaagagaacaaatttgattctcttaacttgagcatgttgaacctggactctaaatttactgagaatgtgagcaaaagctcacttcgaaatggtgtttatggtatgaatgcagtgtatcagaaaaacaatgcaaacttggtgagtaatgtgatcagtaacaagtacaatggcagtattcagcataacaaagagatcaacaacaacactggcaacaacatcaacaccaatgaaagcaacaacacaaatgcaactgacaaaaggtttaagaccttgcctgctgcggagacactcccccgcaatgaggtgcttggaggatacatctttgtctgtaacaatgacacaatgcaggaagacttgaaacgtcagctatttggtttgcctccaaggtatcgagattctgttagggcaataacaccagggctacctttatttctttataactatactactcatcagctgcatggtatttttgaggcagcaagttttggtggctctaacatagatccaactgcctgggaggataaaaaatgcaaaggggaatcaaggtttccagctcaggtaagaatccgtgtcaggaagctctgcaaggcattggaagaagattctttcaggccagtattgcatcattatgacgggccaaagtttcgtcttgaactgtcagttccagagactctggatctgttggacctatgtgaacaagctggttcagcagcataagcaagaatcaaacaaagaatgaatgtgcaaaataggtaggttttggtgtgccagctgtgtggttttggcagattttccgtgaagcgtaagcttggaaagtgaatcatcatcatgttttgggggaagtaaagggagcgtgttgttgagagtgagagaccctttgttggtgaataaatggttgttgtggtatctatcccctggaagatgctttgtagctgttacatgacatttaatacctttgtatgattaagtaaagtacagactactgtttgtactgctaaagtatgtatctgttgaaccaagaaaaaaattaaagttaaaaagcttcatgtattacc

SEQ ID NO: 58574 - protein, 326 aa, Glycine max
  peptide (1)..(326): Ceres Seq. ID no. 14308311
  misc_feature (174)..(318): Homolog of NCBI NO: 34896110 NR Description: P0701D05.9 [Oryza sativa (japonica
  misc_feature (203)..(314): Homolog of NCBI NO: 7488804 NR Description: gda-1 protein - garden pea
  misc_feature (46)..(312): Homolog of NCBI NO: 34913876 NR Description: B1156H12.22 [Oryza sativa (japonica
  misc_feature (121)..(318): Homolog of NCBI NO: 9757950 NR Description: gene_id:MJC20.15~similar to unknown
  misc_feature (68)..(318): Homolog of NCBI NO: 18422167 NR Description: expressed protein [Arabidopsis thaliana]
  misc_feature (131)..(321): Homolog of NCBI NO: 584825 NR Description: B2 PROTEIN
  misc_feature (111)..(326): Homolog of NCBI NO: 21665866 NR Description: GDA2 protein [Pisum sativum]
  misc_feature (27)..(325): Homolog of NCBI NO: 15232081 NR Description: gda-1 -related [Arabidopsis thaliana]
  misc_feature (27)..(325): Homolog of NCBI NO: 21592623 NR Description: gda-1, putative [Arabidopsis thaliana]
  misc_feature (24)..(326): Homolog of NCBI NO: 2369766 NR Description: hypothetical protein [Citrus x paradisi]
GSLSLSLICFFEFHSQVVKGFQGMENMQSFWQLGDELRGHSKASEDHKWLMVASKLAEQTRLKGERVNNLDLSKGPIETRSRDKFGFQEENKFDSLNLSMLNLDSKFTENVSKSSLRNGVYGMNAVYQKNNANLVSNVISNKYNGSIQHNKEINNNTGNNINTNESNNTNATDKRFKTLPAAETLPRNEVLGGYIFVCNNDTMQEDLKRQLFGLPPRYRDSVRAITPGLPLFLYNYTTHQLHGIFEAASFGGSNIDPTAWEDKKCKGESRFPAQVRIRVRKLCKALEEDSFRPVLHHYDGPKFRLELSVPETLDLLDLCEQAGSAA

SEQ ID NO: 58575 - protein, 303 aa, Glycine max
  peptide (1)..(303): Ceres Seq. ID no. 14308312
  misc_feature (151)..(295): Homolog of NCBI NO: 34896110 NR Description: P0701D05.9 [Oryza sativa (japonica
  misc_feature (180)..(291): Homolog of NCBI NO: 7488804 NR Description: gda-1 protein - garden pea
  misc_feature (23)..(289): Homolog of NCBI NO: 34913876 NR Description: B1156H12.22 [Oryza sativa (japonica
  misc_feature (98)..(295): Homolog of NCBI NO: 9757950 NR Description: gene_id:MJC20.15~similar to unknown
  misc_feature (45)..(295): Homolog of NCBI NO: 18422167 NR Description: expressed protein [Arabidopsis thaliana]
  misc_feature (108)..(298): Homolog of NCBI NO: 584825 NR Description: B2 PROTEIN
  misc_feature (88)..(303): Homolog of NCBI NO: 21665866 NR Description: GDA2 protein [Pisum sativum]
  misc_feature (4)..(302): Homolog of NCBI NO: 15232081 NR Description: gda-1 -related [Arabidopsis thaliana]
  misc_feature (4)..(302): Homolog of NCBI NO: 21592623 NR Description: gda-1, putative [Arabidopsis thaliana]
  misc_feature (1)..(303): Homolog of NCBI NO: 2369766 NR Description: hypothetical protein [Citrus x paradisi]
MENMQSFWQLGDELRGHSKASEDHKWLMVASKLAEQTRLKGERVNNLDLSKGPIETRSRDKFGFQEENKFDSLNLSMLNLDSKFTENVSKSSLRNGVYGMNAVYQKNNANLVSNVISNKYNGSIQHNKEINNNTGNNINTNESNNTNATDKRFKTLPAAETLPRNEVLGGYIFVCNNDTMQEDLKRQLFGLPPRYRDSVRAITPGLPLFLYNYTTHQLHGIFEAASFGGSNIDPTAWEDKKCKGESRFPAQVRIRVRKLCKALEEDSFRPVLHHYDGPKFRLELSVPETLDLLDLCEQAGSAA

SEQ ID NO: 58576 - protein, 300 aa, Glycine max
  peptide (1)..(300): Ceres Seq. ID no. 14308313
  misc_feature (148)..(292): Homolog of NCBI NO: 34896110 NR Description: P0701D05.9 [Oryza sativa (japonica
  misc_feature (177)..(288): Homolog of NCBI NO: 7488804 NR Description: gda-1 protein - garden pea
  misc_feature (20)..(286): Homolog of NCBI NO: 34913876 NR Description: B1156H12.22 [Oryza sativa (japonica
  misc_feature (95)..(292): Homolog of NCBI NO: 9757950 NR Description: gene_id:MJC20.15~similar to unknown
  misc_feature (42)..(292): Homolog of NCBI NO: 18422167 NR Description: expressed protein [Arabidopsis thaliana]
  misc_feature (105)..(295): Homolog of NCBI NO: 584825 NR Description: B2 PROTEIN
  misc_feature (85)..(300): Homolog of NCBI NO: 21665866 NR Description: GDA2 protein [Pisum sativum]
  misc_feature (1)..(299): Homolog of NCBI NO: 15232081 NR Description: gda-1 -related [Arabidopsis thaliana]
  misc_feature (1)..(299): Homolog of NCBI NO: 21592623 NR Description: gda-1, putative [Arabidopsis thaliana]
  misc_feature (1)..(300): Homolog of NCBI NO: 2369766 NR Description: hypothetical protein [Citrus x paradisi]
MQSFWQLGDELRGHSKASEDHKWLMVASKLAEQTRLKGERVNNLDLSKGPIETRSRDKFGFQEENKFDSLNLSMLNLDSKFTENVSKSSLRNGVYGMNAVYQKNNANLVSNVISNKYNGSIQHNKEINNNTGNNINTNESNNTNATDKRFKTLPAAETLPRNEVLGGYIFVCNNDTMQEDLKRQLFGLPPRYRDSVRAITPGLPLFLYNYTTHQLHGIFEAASFGGSNIDPTAWEDKKCKGESRFPAQVRIRVRKLCKALEEDSFRPVLHHYDGPKFRLELSVPETLDLLDLCEQAGSAA

SEQ ID NO: 58577 - DNA, 1071 bp, Glycine max
  misc_feature (1)..(1071): Ceres Seq. ID no. 15174347
gatacatataacaatcattcttcttcttctgcaaatacttatccctcattgattcatcatggttcggttcagcaacaatgttatcggactccttaacttcctcaccttcctcttgtccatcccgatcctggtggccggagtgtggctgagcaagcaaggcgccaccgagtgcgagcggtggctggagaagcccgtcatcgcgctcggcgtcttcctcatgctcgtctcactcgccggcctcgtcggcgcgtgctgccgcgtgtcgtggctcctctggctctacctcctcgtcatgtttgtcctcatcgttcttctcttcgccttcaccattttcgctttcgtcgttaccaacaagggcgctggtgaagttgtttctaatagagggtataaagagtataggcttggggattactcgaattggctgcagaagaaggttaataacactaagacgtggaacaggatcagtagttgcttgcattctgggaaagtctgcactgagtttcaatccaagtttctaaacgacaccgttactcagttttacaccgagcacctgtccgcgcttcagtctggatgctgtaaacctgcagaagaatgcctatttacctatgagaattcaacgagctggacgaagcctggaaatgtgaccagttacaacaaccctgactgtgatgcttggaataacaatcaaacagttctgtgcttcaattgccaatcatgcaaggctggctttytgcaaaacttcaagactgaatggaagagggtggctgttgttaacatcgtattccttgttcttctcattattgtatactccatagggtgctgkgcattcaggaacaataggagggaaaattggaagggatattctcgttagctagattactcagtattactagtgagtagatcagtttgctagacaatctggtttatatgttggatttatttttttgggctttatgtgtatgctggattatactgttttcagtacagtctgttatggaaattgctcaattttatatagtagtttcctagtatcatctatacgtagatattacttctggacacactgcattc

SEQ ID NO: 58578 - protein, 270 aa, Glycine max
  peptide (1)..(270): Ceres Seq. ID no. 15174348
  misc_feature (5)..(246): Pfam Name: Tetraspanin family Pfam Description: Tetraspanin family
  misc_feature (5)..(264): Homolog of NCBI NO: 17979386 NR Description: putative senescence-associated protein 5
  misc_feature (79)..(270): Homolog of NCBI NO: 30682205 NR Description: senescence-associated protein family [Arabidopsis
  misc_feature (2)..(262): Homolog of NCBI NO: 15238641 NR Description: senescence-associated protein family [Arabidopsis
  misc_feature (2)..(262): Homolog of NCBI NO: 15231187 NR Description: senescence-associated protein family [Arabidopsis
  misc_feature (1)..(265): Homolog of NCBI NO: 21537169 NR Description: senescence-associated protein-like protein
  misc_feature (1)..(265): Homolog of NCBI NO: 15234743 NR Description: senescence-associated protein family [Arabidopsis
  misc_feature (3)..(268): Homolog of NCBI NO: 29367553 NR Description: senescence-associated protein-like protein
  misc_feature (1)..(267): Homolog of NCBI NO: 3551954 NR Description: senescence-associated protein 5 [Hemerocallis
  misc_feature (1)..(265): Homolog of NCBI NO: 15234374 NR Description: senescence-associated protein, putative
  misc_feature (1)..(270): Homolog of NCBI NO: 20197174 NR Description: hypothetical protein [Arabidopsis thaliana]
  misc_feature (225)..(225): Xaa is any aa, unknown or other
  misc_feature (255)..(255): Xaa is any aa, unknown or other
MVRFSNNVIGLLNFLTFLLSIPILVAGVWLSKQGATECERWLEKPVIALGVFLMLVSLAGLVGACCRVSWLLWLYLLVMFVLIVLLFAFTIFAFVVTNKGAGEVVSNRGYKEYRLGDYSNWLQKKVNNTKTWNRISSCLHSGKVCTEFQSKFLNDTVTQFYTEHLSALQSGCCKPAEECLFTYENSTSWTKPGNVTSYNNPDCDAWNNNQTVLCFNCQSCKAGFXQNFKTEWKRVAVVNIVFLVLLIIVYSIGCXAFRNNRRENWKGYSR

SEQ ID NO: 58579 - protein, 217 aa, Glycine max
  peptide (1)..(217): Ceres Seq. ID no. 15174349
  misc_feature (1)..(193): Pfam Name: Tetraspanin family Pfam Description: Tetraspanin family
  misc_feature (1)..(211): Homolog of NCBI NO: 17979386 NR Description: putative senescence-associated protein 5
  misc_feature (26)..(217): Homolog of NCBI NO: 30682205 NR Description: senescence-associated protein family [Arabidopsis
  misc_feature (1)..(209): Homolog of NCBI NO: 15238641 NR Description: senescence-associated protein family [Arabidopsis
  misc_feature (1)..(209): Homolog of NCBI NO: 15231187 NR Description: senescence-associated protein family [Arabidopsis
  misc_feature (1)..(212): Homolog of NCBI NO: 21537169 NR Description: senescence-associated protein-like protein
  misc_feature (1)..(212): Homolog of NCBI NO: 15234743 NR Description: senescence-associated protein family [Arabidopsis
  misc_feature (1)..(215): Homolog of NCBI NO: 29367553 NR Description: senescence-associated protein-like protein
  misc_feature (1)..(214): Homolog of NCBI NO: 3551954 NR Description: senescence-associated protein 5 [Hemerocallis
  misc_feature (1)..(212): Homolog of NCBI NO: 15234374 NR Description: senescence-associated protein, putative
  misc_feature (1)..(217): Homolog of NCBI NO: 20197174 NR Description: hypothetical protein [Arabidopsis thaliana]
  misc_feature (172)..(172): Xaa is any aa, unknown or other
  misc_feature (202)..(202): Xaa is any aa, unknown or other
MLVSLAGLVGACCRVSWLLWLYLLVMFVLIVLLFAFTIFAFVVTNKGAGEVVSNRGYKEYRLGDYSNWLQKKVNNTKTWNRISSCLHSGKVCTEFQSKFLNDTVTQFYTEHLSALQSGCCKPAEECLFTYENSTSWTKPGNVTSYNNPDCDAWNNNQTVLCFNCQSCKAGFXQNFKTEWKRVAVVNIVFLVLLIIVYSIGCXAFRNNRRENWKGYSR

SEQ ID NO: 58580 - protein, 192 aa, Glycine max
  peptide (1)..(192): Ceres Seq. ID no. 15174350
  misc_feature (1)..(168): Pfam Name: Tetraspanin family Pfam Description: Tetraspanin family
  misc_feature (1)..(186): Homolog of NCBI NO: 17979386 NR Description: putative senescence-associated protein 5
  misc_feature (1)..(192): Homolog of NCBI NO: 30682205 NR Description: senescence-associated protein family [Arabidopsis
  misc_feature (1)..(184): Homolog of NCBI NO: 15238641 NR Description: senescence-associated protein family [Arabidopsis
  misc_feature (1)..(184): Homolog of NCBI NO: 15231187 NR Description: senescence-associated protein family [Arabidopsis
  misc_feature (1)..(187): Homolog of NCBI NO: 21537169 NR Description: senescence-associated protein-like protein
  misc_feature (1)..(187): Homolog of NCBI NO: 15234743 NR Description: senescence-associated protein family [Arabidopsis
  misc_feature (1)..(190): Homolog of NCBI NO: 29367553 NR Description: senescence-associated protein-like protein
  misc_feature (1)..(189): Homolog of NCBI NO: 3551954 NR Description: senescence-associated protein 5 [Hemerocallis
  misc_feature (1)..(187): Homolog of NCBI NO: 15234374 NR Description: senescence-associated protein, putative
  misc_feature (1)..(192): Homolog of NCBI NO: 20197174 NR Description: hypothetical protein [Arabidopsis thaliana]
  misc_feature (147)..(147): Xaa is any aa, unknown or other
  misc_feature (177)..(177): Xaa is any aa, unknown or other
MFVLIVLLFAFTIFAFVVTNKGAGEVVSNRGYKEYRLGDYSNWLQKKVNNTKTWNRISSCLHSGKVCTEFQSKFLNDTVTQFYTEHLSALQSGCCKPAEECLFTYENSTSWTKPGNVTSYNNPDCDAWNNNQTVLCFNCQSCKAGFXQNFKTEWKRVAVVNIVFLVLLIIVYSIGCXAFRNNRRENWKGYSR

SEQ ID NO: 58581 - DNA, 1206 bp, Glycine max
  misc_feature (1)..(1206): Ceres Seq. ID no. 14312330
acgacacgccagccagatccacaaatcggaagaatcagagcgccgtcggaaaccgccgtccacggcggtgaaactcgccttcgcatcctctcgtcttcgaacccgaagcctctctcggttcctcactcttctcacatcgccaaaaactcaaattcacgatggaagagttggagcagtggaaggaacaactttcgcacttcgctaacctagctttggatcgtcttcgcgaggttcccccgaatcagctctacgctgctgctgcaatcgcgattttcacaactctgcttcttctctcaatacggttgttcaagcgcgcgaagtccaacaccattgttttgaccgggctcagtgggagtggaaaaactgttctcttctatcagcttagggatggctcaactcatcagggtacagttacatcgatggagcctaatgaaggcacttttattcttcacaatgagaaaaccaggaagggcaagataaagcctgttcatgttgttgatgttcctgggcattctcggcttcgacccaaactggatgagtacttgcctcaagcagctggggtagtttttgtagtagatgctttggactttttaccaaactgccgtgctgcttcagagtacctttatgatctattgactaaaggaagtgttgtgaggaagaagattccaatgcttattctctgcaacaaaacagacaaagtcactgctcatactaaagagtttatccgaaaacagatggagaaggaaatagacaaattacgggcatcaagaagtgcaatatcagcagctgacatcgcaaatgagttcaccctgggggtacccggtgagccgttttcttttacccagtgctctaacaaagtgacaactgcagacgcttctggtttaactggggaaatatctcagctggaagagtttatcagagaacatgtaaagcgatagctggatattgtgtttaaacttgcggatttttgttgaactgaatgaatatgtagcgttgctcttcttggttgttatttctttgatttcaaagaactgtctggataagaagaggcaaaaaagagaaaatggggttttgggggtggggttggggtgttcggagtaggaatcactatgttgggatcaatgaggatttacttcattttaagtcctggtatattgattggactataatgatttatcaaattgtatccatacttcatttactttt

SEQ ID NO: 58582 - protein, 259 aa, Glycine max
  peptide (1)..(259): Ceres Seq. ID no. 14312331
  misc_feature (42)..(198): Pfam Name: ADP-ribosylation factor family Pfam Description: ADP-ribosylation factor family
  misc_feature (22)..(244): Homolog of NCBI NO: 27721301 NR Description: similar to signal recognition particle receptor,
  misc_feature (22)..(253): Homolog of NCBI NO: 12842535 NR Description: unnamed protein product [Mus musculus]
  misc_feature (22)..(253): Homolog of NCBI NO: 6678137 NR Description: signal recognition particle receptor, B subunit
  misc_feature (22)..(240): Homolog of NCBI NO: 38174090 NR Description: Unknown (protein for MGC:75930) [Silurana
  misc_feature (38)..(256): Homolog of NCBI NO: 23509141 NR Description: hypothetical protein [Plasmodium falciparum 3D7]
  misc_feature (21)..(253): Homolog of NCBI NO: 28574941 NR Description: Signal recognition particle receptor beta
  misc_feature (23)..(240): Homolog of NCBI NO: 32450191 NR Description: Unknown (protein for MGC:64420) [Xenopus laevis]
  misc_feature (2)..(253): Homolog of NCBI NO: 31218892 NR Description: ENSANGP00000020947 [Anopheles gambiae]
  misc_feature (1)..(258): Homolog of NCBI NO: 15224229 NR Description: signal recognition particle receptor beta subunit
  misc_feature (1)..(258): Homolog of NCBI NO: 15239201 NR Description: signal recognition particle receptor beta
MEELEQWKEQLSHFANLALDRLREVPPNQLYAAAAIAIFTTLLLLSIRLFKRAKSNTIVLTGLSGSGKTVLFYQLRDGSTHQGTVTSMEPNEGTFILHNEKTRKGKIKPVHVVDVPGHSRLRPKLDEYLPQAAGVVFVVDALDFLPNCRAASEYLYDLLTKGSVVRKKIPMLILCNKTDKVTAHTKEFIRKQMEKEIDKLRASRSAISAADIANEFTLGVPGEPFSFTQCSNKVTTADASGLTGEISQLEEFIREHVKR

SEQ ID NO: 58583 - protein, 172 aa, Glycine max
  peptide (1)..(172): Ceres Seq. ID no. 14312332
  misc_feature (1)..(111): Pfam Name: ADP-ribosylation factor family Pfam Description: ADP-ribosylation factor family
  misc_feature (1)..(157): Homolog of NCBI NO: 27721301 NR Description: similar to signal recognition particle receptor,
  misc_feature (1)..(166): Homolog of NCBI NO: 12842535 NR Description: unnamed protein product [Mus musculus]
  misc_feature (1)..(166): Homolog of NCBI NO: 6678137 NR Description: signal recognition particle receptor, B subunit
  misc_feature (1)..(153): Homolog of NCBI NO: 38174090 NR Description: Unknown (protein for MGC:75930) [Silurana
  misc_feature (1)..(169): Homolog of NCBI NO: 23509141 NR Description: hypothetical protein [Plasmodium falciparum 3D7]
  misc_feature (1)..(166): Homolog of NCBI NO: 28574941 NR Description: Signal recognition particle receptor beta
  misc_feature (1)..(153): Homolog of NCBI NO: 32450191 NR Description: Unknown (protein for MGC:64420) [Xenopus laevis]
  misc_feature (1)..(166): Homolog of NCBI NO: 31218892 NR Description: ENSANGP00000020947 [Anopheles gambiae]
  misc_feature (1)..(171): Homolog of NCBI NO: 15224229 NR Description: signal recognition particle receptor beta subunit
  misc_feature (1)..(171): Homolog of NCBI NO: 15239201 NR Description: signal recognition particle receptor beta
MEPNEGTFILHNEKTRKGKIKPVHVVDVPGHSRLRPKLDEYLPQAAGVVFVVDALDFLPNCRAASEYLYDLLTKGSVVRKKIPMLILCNKTDKVTAHTKEFIRKQMEKEIDKLRASRSAISAADIANEFTLGVPGEPFSFTQCSNKVTTADASGLTGEISQLEEFIREHVKR

SEQ ID NO: 58584 - DNA, 1408 bp, Glycine max
  misc_feature (1)..(1408): Ceres Seq. ID no. 15175700
aaagagaaatggaattgcctctttcaagaagcatctgagtgtttattattcgtaatatatagtcactcaagcttctaggatttctgccagctacatgaaaatgggaagcaacttgaggtttttgagtctttgcctcttggcattgattgcatcaactcatgcccaacttcagcttggtttttatgcccagagctgcccaaaagctgagaaaatcattttgaaatttgttcatgagcatatccacaatgctccatcactagcagctgcattgataagaatgcatttccatgattgttttgtaaggggatgtgatggatcagtccttctgaactcaacaaccaatcaggctgagaagaatgctcctccaaatctcacagtaagaggctttgacttcattgacagaataaagagccttgttgaagctgaatgccctggtgtggtctcttgtgctgatatcctcactttggctgccagagacactattgtagccacaggtggaccctattggaaagttccaacaggtcgaagggatggggtcatctctaacttggtggaagccagaaataacattcctgctccatttgacaacatcactacgctacagacactctttgccaaccaaggacttgatttgaaggacttggtcctgctctctggtgctcacacaattggtatcgctcattgttcatcattatcaaaccgcttgttcaatttcactggcaagggtgatcaagacccttcactagacagtgaatatgctgcaaatctgaaagccttcaagtgcaaggacctcagtaaattgaacaccacaaaaattgagatagaccctggaagtcgcaagacatttgatcttagctactatagtcacgttattaagagaaggggtctatttgaatcagatgctgcattgttgactaactcagttacaaagtctcaaatcatccaattgcttgaagggacagttgaaaatttctctgctgagtttgcaacctccatagagaaaatgggaagaattaatgtgaagacagggacagagggagagatcaggaagcattgtgcattcgtaaatagctaagaatcttgtcttgttcatggatgaatcttgtatcttttattttttgggtttgattatttatgctatgccaatgttttttgattagttatgctatgccatgtggtgtctgtctacttataaaagaccccttatggcatggttgttgtatgtgtgttggaataagtaggttccattgttattcttatttccaactttgctggtagatcatgctcttgcaataagcagcagaatttcttgtgctaccaacagcagagttaatgtatgtttagtcttttttttttgtattgatgtactttttcattgttattctcaatttaatgcatttttcctctc

SEQ ID NO: 58585 - protein, 326 aa, Glycine max
  peptide (1)..(326): Ceres Seq. ID no. 15175701
  misc_feature (41)..(288): Pfam Name: Peroxidase Pfam Description: Peroxidase
MKMGSNLRFLSLCLLALIASTHAQLQLGFYAQSCPKAEKIILKFVHEHIHNAPSLAAALIRMHFHDCFVRGCDGSVLLNSTTNQAEKNAPPNLTVRGFDFIDRIKSLVEAECPGVVSCADILTLAARDTIVATGGPYWKVPTGRRDGVISNLVEARNNIPAPFDNITTLQTLFANQGLDLKDLVLLSGAHTIGIAHCSSLSNRLFNFTGKGDQDPSLDSEYAANLKAFKCKDLSKLNTTKIEIDPGSRKTFDLSYYSHVIKRRGLFESDAALLTNSVTKSQIIQLLEGTVENFSAEFATSIEKMGRINVKTGTEGEIRKHCAFVNS

SEQ ID NO: 58586 - protein, 324 aa, Glycine max
  peptide (1)..(324): Ceres Seq. ID no. 15175702
  misc_feature (39)..(286): Pfam Name: Peroxidase Pfam Description: Peroxidase
MGSNLRFLSLCLLALIASTHAQLQLGFYAQSCPKAEKIILKFVHEHIHNAPSLAAALIRMHFHDCFVRGCDGSVLLNSTTNQAEKNAPPNLTVRGFDFIDRIKSLVEAECPGVVSCADILTLAARDTIVATGGPYWKVPTGRRDGVISNLVEARNNIPAPFDNITTLQTLFANQGLDLKDLVLLSGAHTIGIAHCSSLSNRLFNFTGKGDQDPSLDSEYAANLKAFKCKDLSKLNTTKIEIDPGSRKTFDLSYYSHVIKRRGLFESDAALLTNSVTKSQIIQLLEGTVENFSAEFATSIEKMGRINVKTGTEGEIRKHCAFVNS

SEQ ID NO: 58587 - protein, 265 aa, Glycine max
  peptide (1)..(265): Ceres Seq. ID no. 15175703
  misc_feature (1)..(227): Pfam Name: Peroxidase Pfam Description: Peroxidase
MHFHDCFVRGCDGSVLLNSTTNQAEKNAPPNLTVRGFDFIDRIKSLVEAECPGVVSCADILTLAARDTIVATGGPYWKVPTGRRDGVISNLVEARNNIPAPFDNITTLQTLFANQGLDLKDLVLLSGAHTIGIAHCSSLSNRLFNFTGKGDQDPSLDSEYAANLKAFKCKDLSKLNTTKIEIDPGSRKTFDLSYYSHVIKRRGLFESDAALLTNSVTKSQIIQLLEGTVENFSAEFATSIEKMGRINVKTGTEGEIRKHCAFVNS

SEQ ID NO: 58588 - DNA, 845 bp, Glycine max
  misc_feature (1)..(845): Ceres Seq. ID no. 13638156
atttatggatgaaatcaagaagcgtgcaaatcagaggaagcaacttgctaaaaaggaaaagaaggaaaaaataatggctgaagctactgctgcttattctcttcccatatcattaagtcatcagtttacttctcgcaatgatcctccgacattcttcatggatgactttgaagctcttggaaattcaaccatatcatcaagtcctcccttagctggggagagaaaatcgttctcaaatgttactaggcttgggtttgctgctgctcatgattctccatccttacaaattcaagaaactagtggtctgcataataacaacacaactgctgattcttctgtcacaacaggtttgagaaatggggagacacaatcatactccaatgttacatcaagaacagaatctaatataagctcgaatgcaccaaagacaaatgagttggggaagaagggaaagaaaccaaatcgagttcttctgtcaacagctggtggtaggcgctattgattttggttgccgacccttaccctagattatgcgagtgtcaatgattctcagcctcctccctgctatagtcccaagccaaactctctggcagatgatttcagtgtagagttagtaacgttctacggatcatatttatgcacctcttaactacttgtaggtaggtaggcatgtgtggagagaataaatgtttttagcaataaacaagccacaactgttagaaggtcagtatattgtttctgtggatctgtagaactgtgctggcgttgggtatgttaattaaatccagactatgagcattgactatacacaagacatttaaattgggaagggggtttttttctct

SEQ ID NO: 58589 - protein, 166 aa, Glycine max
  peptide (1)..(166): Ceres Seq. ID no. 13638157
  misc_feature (1)..(147): Homolog of NCBI NO: 1402891 NR Description: unknown [Arabidopsis thaliana]
  misc_feature (1)..(166): Homolog of NCBI NO: 22331355 NR Description: zinc finger (C3HC4-type RING finger) protein
FMDEIKKRANQRKQLAKKEKKEKIMAEATAAYSLPISLSHQFTSRNDPPTFFMDDFEALGNSTISSSPPLAGERKSFSNVTRLGFAAAHDSPSLQIQETSGLHNNNTTADSSVTTGLRNGETQSYSNVTSRTESNISSNAPKTNELGKKGKKPNRVLLSTAGGRRY

SEQ ID NO: 58590 - protein, 165 aa, Glycine max
  peptide (1)..(165): Ceres Seq. ID no. 13638158
  misc_feature (1)..(146): Homolog of NCBI NO: 1402891 NR Description: unknown [Arabidopsis thaliana]
  misc_feature (1)..(165): Homolog of NCBI NO: 22331355 NR Description: zinc finger (C3HC4-type RING finger) protein
MDEIKKRANQRKQLAKKEKKEKIMAEATAAYSLPISLSHQFTSRNDPPTFFMDDFEALGNSTISSSPPLAGERKSFSNVTRLGFAAAHDSPSLQIQETSGLHNNNTTADSSVTTGLRNGETQSYSNVTSRTESNISSNAPKTNELGKKGKKPNRVLLSTAGGRRY

SEQ ID NO: 58591 - protein, 142 aa, Glycine max
  peptide (1)..(142): Ceres Seq. ID no. 13638159
  misc_feature (1)..(123): Homolog of NCBI NO: 1402891 NR Description: unknown [Arabidopsis thaliana]
  misc_feature (1)..(142): Homolog of NCBI NO: 22331355 NR Description: zinc finger (C3HC4-type RING finger) protein
MAEATAAYSLPISLSHQFTSRNDPPTFFMDDFEALGNSTISSSPPLAGERKSFSNVTRLGFAAAHDSPSLQIQETSGLHNNNTTADSSVTTGLRNGETQSYSNVTSRTESNISSNAPKTNELGKKGKKPNRVLLSTAGGRRY

SEQ ID NO: 58592 - DNA, 2335 bp, Glycine max
  misc_feature (1)..(2335): Ceres Seq. ID no. 15176302
gaagaaaaggttctctccctctctctcttcttctctttctctgcgtgtgtgttcgtgagtggagtggcgtatgtgtagctgcgctctctatcgccggcgctctcgtcggaatttccgttattgatttttccgatcaccggattcgatccaatccctaatccctaatcccgcgattccatcaattgaaaaaattgaatagccattgaaccgtttcgtttcgggggtagcggagatggacgtttacgcgagcagcgacgaagattaccattacgactccgaccacgaggactccgtcgaggcctacgaaaacgacgagaattacgccttgctctcttccaagggcaccactactaaggtgattacaaaggaatcactgctagctgcacagaaggaggatttgcgcagagtgatggacatgctatcggtgagagagcaacatgctcggacgctgcttatttttcatcgttgggatgtggagaatctgtttgaagtgttagtagacaaggggaaatcatttctctttgctgaagctggtgttagtgtggatgaacatcgcaactctgactcacctgttcctcctgcattcatgtgctacatctgtatggaggaagttcctagtagcaaaacaacgagaatggactgcggtcactgcttttgcaacggctgttggatagagcactttattgtcaagataaatgagggtcaaagtaagcgcattagatgcatggaacacaagtgcaattccatatgtgatgatgccgttgtaagaactctactcagtagagagcaccctcatacggcagagaaatatgaacgctttctgcttgaatcttacattgaagacaataagagagttaaatggtgccccagcacacctcattgtgggaatgcaatacgggtcgaggatgatgaactgtgtgaggtagaatgttcatgtggtgtacaattttgttttagttgtttgtcagaagcacactccccttgttcatgtctgatgtgggagctttgggctaagaagtgccgagatgaatcagaaacagttaattggataactgttcatacaaaaccatgtccaaagtgtcacaaaccagtggagaagaatggtggttgtaacttggttagctgtatctgtggccaagcattttgttggttgtgtggtggagctactggccgagagcatacttggtcaagtatagctggtcatagctgtggtcgatacaaagagcaagaaaagacagctgaacgtgcaaagagggatctatatcgttatatgcattatcataaccgatataaagctcacacagactcctttaagattgaaagtaaactgaaagagactatacaagggaagattgccatttcagaagaaaaagattctacactcagagattatagctgggtaaataatggactctccagacttttcagatctaggcgagtcctatcatattcatatgcatttgcattttatatgtttggagatgagctttttaaggatgaaatgacagatgctcaacgggaaataaaacagaacttatttgaggatcaacagcaacagcttgaggcaaatgttgaaaagctctctaaaattttggaggagccttttgaaaccttttcagatgataaggttgttgagataaggatgcagatactcaacctttcaacaattattgacaaactttgtcaaaaaatgtatgaatgcattgagaatgatctattgggttctctcaatcttggcattcatagtattgctccatacaagtcaaagggcatcgagagggcatcagaactttcagttggctggaacaacaaagtcaataatactggtgtaacagaagaacttgatcgaccatctggatcagggagttcagacgataatggatgttcttctcgtaaacgtgctagaaaagagggtcttggaggtggtggtttttttgatctaaacttgccagcagagtttgtagacagaaattgactttgaaggacaccttattatacgtacaggcgtacaggtctaacaacataaaattgctttgctttgctgcctttggaaggaaggaattaatctttttggatttcataccccatttgctttctcatatctttcttttagccagccatgtctctgctgagataaaagatatgtttccaaggtttcttattcctatgccatctacctttctgtttgaaatcctagcgctgtatatagatagccttggggcatttatttgctagtagttttatgtaaatggctaccttgaggacaactaggatgcttttattcctattttatggagttataggtggaggtaacttcactgatttttcttcaaag

SEQ ID NO: 58593 - protein, 580 aa, Glycine max
  peptide (1)..(580): Ceres Seq. ID no. 15176303
  misc_feature (223)..(326): Pfam Name: IBR domain Pfam Description: IBR domain
  misc_feature (120)..(156): Homolog of NCBI NO: 9294477 NR Description: RING finger protein-like [Arabidopsis thaliana]
  misc_feature (203)..(521): Homolog of NCBI NO: 9294477 NR Description: RING finger protein-like [Arabidopsis thaliana]
  misc_feature (8)..(519): Homolog of NCBI NO: 15232251 NR Description: expressed protein [Arabidopsis thaliana]
  misc_feature (2)..(235): Homolog of NCBI NO: 25411698 NR Description: hypothetical protein At2g16090 [imported] -
  misc_feature (223)..(527): Homolog of NCBI NO: 25411698 NR Description: hypothetical protein At2g16090 [imported] -
  misc_feature (41)..(579): Homolog of NCBI NO: 20330766 NR Description: Putative RING zinc finger protein
  misc_feature (1)..(580): Homolog of NCBI NO: 18418437 NR Description: expressed protein [Arabidopsis thaliana]
  misc_feature (1)..(580): Homolog of NCBI NO: 7485315 NR Description: hypothetical protein F10M10.140 - Arabidopsis
  misc_feature (2)..(579): Homolog of NCBI NO: 22325707 NR Description: expressed protein [Arabidopsis thaliana]
  misc_feature (2)..(579): Homolog of NCBI NO: 18086414 NR Description: At2g16090/F7H1.11 [Arabidopsis thaliana]
MDVYASSDEDYHYDSDHEDSVEAYENDENYALLSSKGTTTKVITKESLLAAQKEDLRRVMDMLSVREQHARTLLIFHRWDVENLFEVLVDKGKSFLFAEAGVSVDEHRNSDSPVPPAFMCYICMEEVPSSKTTRMDCGHCFCNGCWIEHFIVKINEGQSKRIRCMEHKCNSICDDAVVRTLLSREHPHTAEKYERFLLESYIEDNKRVKWCPSTPHCGNAIRVEDDELCEVECSCGVQFCFSCLSEAHSPCSCLMWELWAKKCRDESETVNWITVHTKPCPKCHKPVEKNGGCNLVSCICGQAFCWLCGGATGREHTWSSIAGHSCGRYKEQEKTAERAKRDLYRYMHYHNRYKAHTDSFKIESKLKETIQGKIAISEEKDSTLRDYSWVNNGLSRLFRSRRVLSYSYAFAFYMFGDELFKDEMTDAQREIKQNLFEDQQQQLEANVEKLSKILEEPFETFSDDKVVEIRMQILNLSTIIDKLCQKMYECIENDLLGSLNLGIHSIAPYKSKGIERASELSVGWNNKVNNTGVTEELDRPSGSGSSDDNGCSSRKRARKEGLGGGGFFDLNLPAEFVDRN

SEQ ID NO: 58594 - protein, 521 aa, Glycine max
  peptide (1)..(521): Ceres Seq. ID no. 15176304
  misc_feature (164)..(267): Pfam Name: IBR domain Pfam Description: IBR domain
  misc_feature (61)..(97): Homolog of NCBI NO: 9294477 NR Description: RING finger protein-like [Arabidopsis thaliana]
  misc_feature (144)..(462): Homolog of NCBI NO: 9294477 NR Description: RING finger protein-like [Arabidopsis thaliana]
  misc_feature (1)..(460): Homolog of NCBI NO: 15232251 NR Description: expressed protein [Arabidopsis thaliana]
  misc_feature (1)..(176): Homolog of NCBI NO: 25411698 NR Description: hypothetical protein At2g16090 [imported] -
  misc_feature (164)..(468): Homolog of NCBI NO: 25411698 NR Description: hypothetical protein At2g16090 [imported] -
  misc_feature (1)..(520): Homolog of NCBI NO: 20330766 NR Description: Putative RING zinc finger protein
  misc_feature (1)..(521): Homolog of NCBI NO: 18418437 NR Description: expressed protein [Arabidopsis thaliana]
  misc_feature (1)..(521): Homolog of NCBI NO: 7485315 NR Description: hypothetical protein F10M10.140 - Arabidopsis
  misc_feature (1)..(520): Homolog of NCBI NO: 22325707 NR Description: expressed protein [Arabidopsis thaliana]
  misc_feature (1)..(520): Homolog of NCBI NO: 18086414 NR Description: At2g16090/F7H1.11 [Arabidopsis thaliana]
MDMLSVREQHARTLLIFHRWDVENLFEVLVDKGKSFLFAEAGVSVDEHRNSDSPVPPAFMCYICMEEVPSSKTTRMDCGHCFCNGCWIEHFIVKINEGQSKRIRCMEHKCNSICDDAVVRTLLSREHPHTAEKYERFLLESYIEDNKRVKWCPSTPHCGNAIRVEDDELCEVECSCGVQFCFSCLSEAHSPCSCLMWELWAKKCRDESETVNWITVHTKPCPKCHKPVEKNGGCNLVSCICGQAFCWLCGGATGREHTWSSIAGHSCGRYKEQEKTAERAKRDLYRYMHYHNRYKAHTDSFKIESKLKETIQGKIAISEEKDSTLRDYSWVNNGLSRLFRSRRVLSYSYAFAFYMFGDELFKDEMTDAQREIKQNLFEDQQQQLEANVEKLSKILEEPFETFSDDKVVEIRMQILNLSTIIDKLCQKMYECIENDLLGSLNLGIHSIAPYKSKGIERASELSVGWNNKVNNTGVTEELDRPSGSGSSDDNGCSSRKRARKEGLGGGGFFDLNLPAEFVDRN

SEQ ID NO: 58595 - protein, 519 aa, Glycine max
  peptide (1)..(519): Ceres Seq. ID no. 15176305
  misc_feature (162)..(265): Pfam Name: IBR domain Pfam Description: IBR domain
  misc_feature (59)..(95): Homolog of NCBI NO: 9294477 NR Description: RING finger protein-like [Arabidopsis thaliana]
  misc_feature (142)..(460): Homolog of NCBI NO: 9294477 NR Description: RING finger protein-like [Arabidopsis thaliana]
  misc_feature (1)..(458): Homolog of NCBI NO: 15232251 NR Description: expressed protein [Arabidopsis thaliana]
  misc_feature (1)..(174): Homolog of NCBI NO: 25411698 NR Description: hypothetical protein At2g16090 [imported] -
  misc_feature (162)..(466): Homolog of NCBI NO: 25411698 NR Description: hypothetical protein At2g16090 [imported] -
  misc_feature (1)..(518): Homolog of NCBI NO: 20330766 NR Description: Putative RING zinc finger protein
  misc_feature (1)..(519): Homolog of NCBI NO: 18418437 NR Description: expressed protein [Arabidopsis thaliana]
  misc_feature (1)..(519): Homolog of NCBI NO: 7485315 NR Description: hypothetical protein F10M10.140 - Arabidopsis
  misc_feature (1)..(518): Homolog of NCBI NO: 22325707 NR Description: expressed protein [Arabidopsis thaliana]
  misc_feature (1)..(518): Homolog of NCBI NO: 18086414 NR Description: At2g16090/F7H1.11 [Arabidopsis thaliana]
MLSVREQHARTLLIFHRWDVENLFEVLVDKGKSFLFAEAGVSVDEHRNSDSPVPPAFMCYICMEEVPSSKTTRMDCGHCFCNGCWIEHFIVKINEGQSKRIRCMEHKCNSICDDAVVRTLLSREHPHTAEKYERFLLESYIEDNKRVKWCPSTPHCGNAIRVEDDELCEVECSCGVQFCFSCLSEAHSPCSCLMWELWAKKCRDESETVNWITVHTKPCPKCHKPVEKNGGCNLVSCICGQAFCWLCGGATGREHTWSSIAGHSCGRYKEQEKTAERAKRDLYRYMHYHNRYKAHTDSFKIESKLKETIQGKIAISEEKDSTLRDYSWVNNGLSRLFRSRRVLSYSYAFAFYMFGDELFKDEMTDAQREIKQNLFEDQQQQLEANVEKLSKILEEPFETFSDDKVVEIRMQILNLSTIIDKLCQKMYECIENDLLGSLNLGIHSIAPYKSKGIERASELSVGWNNKVNNTGVTEELDRPSGSGSSDDNGCSSRKRARKEGLGGGGFFDLNLPAEFVDRN

SEQ ID NO: 58596 - DNA, 1358 bp, Glycine max
  misc_feature (1)..(1358): Ceres Seq. ID no. 15169114
agagttcagtagcaatggccgtggttgagtttgaacctcaacaactacgcctcttcatccccaacttcctctccctcgatgaatgcaaagaattggaattcatccataagagtagcagcacggtgggttacagacccaatgtcttctccaccactctctcccatctcattgctaccaactcttcccacttcatcattccttttatacccatcagagaaaggttgaaagacaagttagaggagtttttcaagtgtgagtatgagctcttcattgaattcactggtttaatcagttggagtagaggagcaagcattggatggcatagtgatgataacaggccctacctcaaacaacgccacttctcagcagtatgctatttgaatacttatggcaaggatttcagtggtggactctttcacttccaggatggtgagcccaagtcaattgtgccaaaagccggagatgttgtgatgtacacagctgatgaccgtaacattcattctgttgatgagataactgagggagaaaggctcacacttgctttatggttcagtcgtgatggctcccatgatgaggatatgaagctcatttctcttctttcacaacacctgctacatgagaacgtggctgattcatacctacctttgccagcatccagtaatatgtactggttttctaaggaccaagcttccaattatcaattcggttttaatatatcctgggctagactgcatgttcttggatacgacatatatatttctcaagacagtagctgtgagtctgatgtctttgaattactggtaaagccagtgcgtttagtgagggataatgagttgttagaccaggaattcgtcaatattatgcatgcacttcaggttgtccatttctattgttggaaaggatcagctttactgaacaacatgtcaaatatagactccagggtactaaaagtgacagaggtacagagagagaaaatcagtggtctgaattctgtacttttgaatgataatgattttgcatccaaagttttctgtaatatgccttcggaagaaaagggatgcatttgctttgactggtcagaagttctagctgcagttgctgcttgggaagattatgcgtcaaacttaagcaaacaaattcatttacagttgccttactggagaatgcatgagtctatatataatgtgcaattagagtagtatttgtgatcaacaattccaagaaaaagtaaccacctacaattgtgcttgggttaaaaatttggagaaaagcactgttgaaacaactaaaaagtagtttgtgaaggtttgctttgatagcattattcaatttaatgtgctttgggaaagttttaaggt

SEQ ID NO: 58597 - protein, 398 aa, Glycine max
  peptide (1)..(398): Ceres Seq. ID no. 15169115
  misc_feature (118)..(184): Pfam Name: 2OG-Fe(II) oxygenase superfamily Pfam Description: 2OG-Fe(II) oxygenase superfamily
  misc_feature (68)..(396): Homolog of NCBI NO: 15220642 NR Description: hypothetical protein [Arabidopsis thaliana]
SSVAMAVVEFEPQQLRLFIPNFLSLDECKELEFIHKSSSTVGYRPNVFSTTLSHLIATNSSHFIIPFIPIRERLKDKLEEFFKCEYELFIEFTGLISWSRGASIGWHSDDNRPYLKQRHFSAVCYLNTYGKDFSGGLFHFQDGEPKSIVPKAGDVVMYTADDRNIHSVDEITEGERLTLALWFSRDGSHDEDMKLISLLSQHLLHENVADSYLPLPASSNMYWFSKDQASNYQFGFNISWARLHVLGYDIYISQDSSCESDVFELLVKPVRLVRDNELLDQEFVNIMHALQVVHFYCWKGSALLNNMSNIDSRVLKVTEVQREKISGLNSVLLNDNDFASKVFCNMPSEEKGCICFDWSEVLAAVAAWEDYASNLSKQIHLQLPYWRMHESIYNVQLE

SEQ ID NO: 58598 - protein, 394 aa, Glycine max
  peptide (1)..(394): Ceres Seq. ID no. 15169116
  misc_feature (114)..(180): Pfam Name: 2OG-Fe(II) oxygenase superfamily Pfam Description: 2OG-Fe(II) oxygenase superfamily
  misc_feature (64)..(392): Homolog of NCBI NO: 15220642 NR Description: hypothetical protein [Arabidopsis thaliana]
MAVVEFEPQQLRLFIPNFLSLDECKELEFIHKSSSTVGYRPNVFSTTLSHLIATNSSHFIIPFIPIRERLKDKLEEFFKCEYELFIEFTGLISWSRGASIGWHSDDNRPYLKQRHFSAVCYLNTYGKDFSGGLFHFQDGEPKSIVPKAGDVVMYTADDRNIHSVDEITEGERLTLALWFSRDGSHDEDMKLISLLSQHLLHENVADSYLPLPASSNMYWFSKDQASNYQFGFNISWARLHVLGYDIYISQDSSCESDVFELLVKPVRLVRDNELLDQEFVNIMHALQVVHFYCWKGSALLNNMSNIDSRVLKVTEVQREKISGLNSVLLNDNDFASKVFCNMPSEEKGCICFDWSEVLAAVAAWEDYASNLSKQIHLQLPYWRMHESIYNVQLE

SEQ ID NO: 58599 - protein, 242 aa, Glycine max
  peptide (1)..(242): Ceres Seq. ID no. 15169117
  misc_feature (1)..(240): Homolog of NCBI NO: 15220642 NR Description: hypothetical protein [Arabidopsis thaliana]
MYTADDRNIHSVDEITEGERLTLALWFSRDGSHDEDMKLISLLSQHLLHENVADSYLPLPASSNMYWFSKDQASNYQFGFNISWARLHVLGYDIYISQDSSCESDVFELLVKPVRLVRDNELLDQEFVNIMHALQVVHFYCWKGSALLNNMSNIDSRVLKVTEVQREKISGLNSVLLNDNDFASKVFCNMPSEEKGCICFDWSEVLAAVAAWEDYASNLSKQIHLQLPYWRMHESIYNVQLE

SEQ ID NO: 58600 - DNA, 1313 bp, Glycine max
  misc_feature (1)..(1313): Ceres Seq. ID no. 14315557
aattttttttgctcatcattttgtgctcatggtggtgaggtttaacccttcatgtctcaccctctctcataatcctcaccacactacatatttctctaagcaagtgacagttaggagcagttatgggaaacacatgaaaagtggtggccttggaagaaggcctcagatagtgtcttcagttttggggaacagtaacactgaaggggtgagtgtgtttgtggtgtctgacttgcacactgactatgctgagaatttgaagtgggtggagtgcttgtctaatgtgaagcacaagaatgatgtgcttcttgtggcaggtgatgtggctgagacatgttccatgtttgttgtgacaatgtctcttttgaaagagaggtttgagcatgtcttctatgttcctggaaaccatgacctttggtgccgtcgcgaggggcaaaattatgttgattctcttgaaaagctgaataaattgcttgatgcgtgtgagagaattggagtggagacaaatccaacggttatagatgaaataggaatcattcctttgttctcttggtaccatgagagctttgacaaagagaaggacataacaggctttcgcatcccgtctttggagatggcatgtaaagatttctatgcgtgtaagtggcccgagggactttcaaatggagatatgtcactggctttatattttgatgccatgaatgataaacaaatagatgtgataaaggagattcagatggcatgcgatcacatcattaccttttcacactttgttcccaggcaggaactttgtccagagaagaggatgttgttctatcccaagcttccaaaaataattggttcagactctcttgaagatcgaataaggtctattcatggtgctgagggaaggaaggatgcgtcgtcttgtcatgtgtttggtcatactcacttctgttgggatgctgttgttgatggtatcaggtatgtacaggcacccttagcttacccaagggaaaggaagagaagaatgaatggaggtgaaaattggctaccgttttgcctttatgctgacaacaaatttgctgatagactcaacccttgctattggtctgattattactctgccaaccccaggacaccccataatactaaacttgctccttgggtagccagattttataagcaaacagaaactgtggatgtatagtattcactattgactttattgagctggttttatttgttgataagacattcctatattgtgttgtcttttttacattaaatcaataaataacatgagtcattttgcaaggtgaaagttgcacaaacac

SEQ ID NO: 58601 - protein, 394 aa, Glycine max
  peptide (1)..(394): Ceres Seq. ID no. 14315558
  misc_feature (71)..(311): Pfam Name: Calcineurin-like phosphoesterase Pfam Description: Calcineurin-like phosphoesterase
  misc_feature (70)..(188): Homolog of NCBI NO: 19554103 NR Description: hypothetical protein [Corynebacterium glutamicum
  misc_feature (62)..(188): Homolog of NCBI NO: 16224015 NR Description: Sim18 [Streptomyces antibioticus]
  misc_feature (70)..(208): Homolog of NCBI NO: 19553185 NR Description: hypothetical protein [Corynebacterium glutamicum
  misc_feature (71)..(188): Homolog of NCBI NO: 29828291 NR Description: putative SimX4 homolog [Streptomyces avermitilis
  misc_feature (69)..(347): Homolog of NCBI NO: 18140054 NR Description: putative phosphoesterase [Myxococcus xanthus]
  misc_feature (70)..(188): Homolog of NCBI NO: 25029314 NR Description: conserved hypothetical protein [Corynebacterium
  misc_feature (70)..(208): Homolog of NCBI NO: 25028430 NR Description: Conserved hypothetical protein [Corynebacterium
  misc_feature (251)..(365): Homolog of NCBI NO: 15609932 NR Description: hypothetical protein Rv2795c [Mycobacterium
  misc_feature (70)..(188): Homolog of NCBI NO: 15609932 NR Description: hypothetical protein Rv2795c [Mycobacterium
  misc_feature (71)..(388): Homolog of NCBI NO: 37535636 NR Description: unknown protein [Oryza sativa (japonica
IFFAHHFVLMVVRFNPSCLTLSHNPHHTTYFSKQVTVRSSYGKHMKSGGLGRRPQIVSSVLGNSNTEGVSVFVVSDLHTDYAENLKWVECLSNVKHKNDVLLVAGDVAETCSMFVVTMSLLKERFEHVFYVPGNHDLWCRREGQNYVDSLEKLNKLLDACERIGVETNPTVIDEIGIIPLFSWYHESFDKEKDITGFRIPSLEMACKDFYACKWPEGLSNGDMSLALYFDAMNDKQIDVIKEIQMACDHIITFSHFVPRQELCPEKRMLFYPKLPKIIGSDSLEDRIRSIHGAEGRKDASSCHVFGHTHFCWDAVVDGIRYVQAPLAYPRERKRRMNGGENWLPFCLYADNKFADRLNPCYWSDYYSANPRTPHNTKLAPWVARFYKQTETVDV

SEQ ID NO: 58602 - protein, 385 aa, Glycine max
  peptide (1)..(385): Ceres Seq. ID no. 14315559
  misc_feature (62)..(302): Pfam Name: Calcineurin-like phosphoesterase Pfam Description: Calcineurin-like phosphoesterase
  misc_feature (61)..(179): Homolog of NCBI NO: 19554103 NR Description: hypothetical protein [Corynebacterium glutamicum
  misc_feature (53)..(179): Homolog of NCBI NO: 16224015 NR Description: Sim18 [Streptomyces antibioticus]
  misc_feature (61)..(199): Homolog of NCBI NO: 19553185 NR Description: hypothetical protein [Corynebacterium glutamicum
  misc_feature (62)..(179): Homolog of NCBI NO: 29828291 NR Description: putative SimX4 homolog [Streptomyces avermitilis
  misc_feature (60)..(338): Homolog of NCBI NO: 18140054 NR Description: putative phosphoesterase [Myxococcus xanthus]
  misc_feature (61)..(179): Homolog of NCBI NO: 25029314 NR Description: conserved hypothetical protein [Corynebacterium
  misc_feature (61)..(199): Homolog of NCBI NO: 25028430 NR Description: Conserved hypothetical protein [Corynebacterium
  misc_feature (242)..(356): Homolog of NCBI NO: 15609932 NR Description: hypothetical protein Rv2795c [Mycobacterium
  misc_feature (61)..(179): Homolog of NCBI NO: 15609932 NR Description: hypothetical protein Rv2795c [Mycobacterium
  misc_feature (62)..(379): Homolog of NCBI NO: 37535636 NR Description: unknown protein [Oryza sativa (japonica
MVVRFNPSCLTLSHNPHHTTYFSKQVTVRSSYGKHMKSGGLGRRPQIVSSVLGNSNTEGVSVFVVSDLHTDYAENLKWVECLSNVKHKNDVLLVAGDVAETCSMFVVTMSLLKERFEHVFYVPGNHDLWCRREGQNYVDSLEKLNKLLDACERIGVETNPTVIDEIGIIPLFSWYHESFDKEKDITGFRIPSLEMACKDFYACKWPEGLSNGDMSLALYFDAMNDKQIDVIKEIQMACDHIITFSHFVPRQELCPEKRMLFYPKLPKIIGSDSLEDRIRSIHGAEGRKDASSCHVFGHTHFCWDAVVDGIRYVQAPLAYPRERKRRMNGGENWLPFCLYADNKFADRLNPCYWSDYYSANPRTPHNTKLAPWVARFYKQTETVDV

SEQ ID NO: 58603 - protein, 350 aa, Glycine max
  peptide (1)..(350): Ceres Seq. ID no. 14315560
  misc_feature (27)..(267): Pfam Name: Calcineurin-like phosphoesterase Pfam Description: Calcineurin-like phosphoesterase
  misc_feature (26)..(144): Homolog of NCBI NO: 19554103 NR Description: hypothetical protein [Corynebacterium glutamicum
  misc_feature (18)..(144): Homolog of NCBI NO: 16224015 NR Description: Sim18 [Streptomyces antibioticus]
  misc_feature (26)..(164): Homolog of NCBI NO: 19553185 NR Description: hypothetical protein [Corynebacterium glutamicum
  misc_feature (27)..(144): Homolog of NCBI NO: 29828291 NR Description: putative SimX4 homolog [Streptomyces avermitilis
  misc_feature (25)..(303): Homolog of NCBI NO: 18140054 NR Description: putative phosphoesterase [Myxococcus xanthus]
  misc_feature (26)..(144): Homolog of NCBI NO: 25029314 NR Description: conserved hypothetical protein [Corynebacterium
  misc_feature (26)..(164): Homolog of NCBI NO: 25028430 NR Description: Conserved hypothetical protein [Corynebacterium
  misc_feature (207)..(321): Homolog of NCBI NO: 15609932 NR Description: hypothetical protein Rv2795c [Mycobacterium
  misc_feature (26)..(144): Homolog of NCBI NO: 15609932 NR Description: hypothetical protein Rv2795c [Mycobacterium
  misc_feature (27)..(344): Homolog of NCBI NO: 37535636 NR Description: unknown protein [Oryza sativa (japonica
MKSGGLGRRPQIVSSVLGNSNTEGVSVFVVSDLHTDYAENLKWVECLSNVKHKNDVLLVAGDVAETCSMFVVTMSLLKERFEHVFYVPGNHDLWCRREGQNYVDSLEKLNKLLDACERIGVETNPTVIDEIGIIPLFSWYHESFDKEKDITGFRIPSLEMACKDFYACKWPEGLSNGDMSLALYFDAMNDKQIDVIKEIQMACDHIITFSHFVPRQELCPEKRMLFYPKLPKIIGSDSLEDRIRSIHGAEGRKDASSCHVFGHTHFCWDAVVDGIRYVQAPLAYPRERKRRMNGGENWLPFCLYADNKFADRLNPCYWSDYYSANPRTPHNTKLAPWVARFYKQTETVDV

SEQ ID NO: 58604 - DNA, 614 bp, Glycine max
  misc_feature (1)..(614): Ceres Seq. ID no. 13594048
tgtctcaactctatcaaacttcaaagttcacacacacaaaagaatcagcatggctttcaatcaagagttagaagctgtaacccaagctttctcagggcatggagtggatgagaaatcattggtaacattactgggaaaatgggatcctctggagagagaatctttcaggaagaagacaccacatttgttcagtgaagatcatgaacgccattttcagaggtgggatgatcaatatgtccgtcttctcaagcatgaattcgtgcgttttaagaatgctgtggtgctttggtccatgcacccttgggaaagagatgcccgtttagtaaaagaggccctaaagaagggtccaaatgcatatggagtgctgattgaggtttcatgcactagatcctcagaagagctattgggagctaggaaggcataccattccctctttgaccactccattgaagaagatgttgcctctcacatccatggcattgaaagaaagctattggttgccctactaagtgcctatagatacgaaggaacaaaggttaaagatgacactgcaaaatcagaagccaaaatcctttccaatggcattaagaatgctcataagaagcctattaatg

SEQ ID NO: 58605 - protein, 204 aa, Glycine max
  peptide (1)..(204): Ceres Seq. ID no. 13594049
  misc_feature (101)..(168): Pfam Name: Annexin Pfam Description: Annexin
  misc_feature (21)..(197): Homolog of NCBI NO: 2467255 NR Description: annexin [Nicotiana tabacum]
  misc_feature (20)..(199): Homolog of NCBI NO: 15220216 NR Description: Ca2+-dependent membrane-binding protein annexin
  misc_feature (20)..(199): Homolog of NCBI NO: 1429207 NR Description: annexin [Arabidopsis thaliana]
  misc_feature (20)..(197): Homolog of NCBI NO: 33357398 NR Description: Chain A, Annexin Gh1 From Cotton
  misc_feature (20)..(197): Homolog of NCBI NO: 15214410 NR Description: annexin [Gossypium hirsutum]
  misc_feature (20)..(197): Homolog of NCBI NO: 2459926 NR Description: annexin [Lavatera thuringiaca]
  misc_feature (20)..(197): Homolog of NCBI NO: 7484723 NR Description: fiber annexin - upland cotton
  misc_feature (21)..(197): Homolog of NCBI NO: 21264397 NR Description: Annexin-like protein RJ4
  misc_feature (28)..(199): Homolog of NCBI NO: 7441511 NR Description: annexin 2 - upland cotton (fragment)
  misc_feature (17)..(203): Homolog of NCBI NO: 15224946 NR Description: annexin -related [Arabidopsis thaliana]
VSTLSNFKVHTHKRISMAFNQELEAVTQAFSGHGVDEKSLVTLLGKWDPLERESFRKKTPHLFSEDHERHFQRWDDQYVRLLKHEFVRFKNAVVLWSMHPWERDARLVKEALKKGPNAYGVLIEVSCTRSSEELLGARKAYHSLFDHSIEEDVASHIHGIERKLLVALLSAYRYEGTKVKDDTAKSEAKILSNGIKNAHKKPIN

SEQ ID NO: 58606 - protein, 188 aa, Glycine max
  peptide (1)..(188): Ceres Seq. ID no. 13594050
  misc_feature (85)..(152): Pfam Name: Annexin Pfam Description: Annexin
  misc_feature (5)..(181): Homolog of NCBI NO: 2467255 NR Description: annexin [Nicotiana tabacum]
  misc_feature (4)..(183): Homolog of NCBI NO: 15220216 NR Description: Ca2+-dependent membrane-binding protein annexin
  misc_feature (4)..(183): Homolog of NCBI NO: 1429207 NR Description: annexin [Arabidopsis thaliana]
  misc_feature (4)..(181): Homolog of NCBI NO: 33357398 NR Description: Chain A, Annexin Gh1 From Cotton
  misc_feature (4)..(181): Homolog of NCBI NO: 15214410 NR Description: annexin [Gossypium hirsutum]
  misc_feature (4)..(181): Homolog of NCBI NO: 2459926 NR Description: annexin [Lavatera thuringiaca]
  misc_feature (4)..(181): Homolog of NCBI NO: 7484723 NR Description: fiber annexin - upland cotton
  misc_feature (5)..(181): Homolog of NCBI NO: 21264397 NR Description: Annexin-like protein RJ4
  misc_feature (12)..(183): Homolog of NCBI NO: 7441511 NR Description: annexin 2 - upland cotton (fragment)
  misc_feature (1)..(187): Homolog of NCBI NO: 15224946 NR Description: annexin -related [Arabidopsis thaliana]
MAFNQELEAVTQAFSGHGVDEKSLVTLLGKWDPLERESFRKKTPHLFSEDHERHFQRWDDQYVRLLKHEFVRFKNAVVLWSMHPWERDARLVKEALKKGPNAYGVLIEVSCTRSSEELLGARKAYHSLFDHSIEEDVASHIHGIERKLLVALLSAYRYEGTKVKDDTAKSEAKILSNGIKNAHKKPIN

SEQ ID NO: 58607 - protein, 107 aa, Glycine max
  peptide (1)..(107): Ceres Seq. ID no. 13594051
  misc_feature (4)..(71): Pfam Name: Annexin Pfam Description: Annexin
  misc_feature (1)..(100): Homolog of NCBI NO: 2467255 NR Description: annexin [Nicotiana tabacum]
  misc_feature (1)..(102): Homolog of NCBI NO: 15220216 NR Description: Ca2+-dependent membrane-binding protein annexin
  misc_feature (1)..(102): Homolog of NCBI NO: 1429207 NR Description: annexin [Arabidopsis thaliana]
  misc_feature (1)..(100): Homolog of NCBI NO: 33357398 NR Description: Chain A, Annexin Gh1 From Cotton
  misc_feature (1)..(100): Homolog of NCBI NO: 15214410 NR Description: annexin [Gossypium hirsutum]
  misc_feature (1)..(100): Homolog of NCBI NO: 2459926 NR Description: annexin [Lavatera thuringiaca]
  misc_feature (1)..(100): Homolog of NCBI NO: 7484723 NR Description: fiber annexin - upland cotton
  misc_feature (1)..(100): Homolog of NCBI NO: 21264397 NR Description: Annexin-like protein RJ4
  misc_feature (1)..(102): Homolog of NCBI NO: 7441511 NR Description: annexin 2 - upland cotton (fragment)
  misc_feature (1)..(106): Homolog of NCBI NO: 15224946 NR Description: annexin -related [Arabidopsis thaliana]
MHPWERDARLVKEALKKGPNAYGVLIEVSCTRSSEELLGARKAYHSLFDHSIEEDVASHIHGIERKLLVALLSAYRYEGTKVKDDTAKSEAKILSNGIKNAHKKPIN

SEQ ID NO: 58608 - DNA, 1401 bp, Glycine max
  misc_feature (1)..(1401): Ceres Seq. ID no. 13594128
aaaatcattaaaatcttttttttgcccttatgaacaccttcgtaaagaagactagaggcatcatctcccttgccaccagaggtttcgccagctcttccggagccatcaaagttaaacttctcccctccgatacttacaacctcgaaggcagaaagatccccactgaaactgaaaccaacgctgaggaacttatgcactacttcaaggaaatgtccatgatgagaagaatggaaatcgctctcgacaacctctacaaggctcgtgaaatcagaggtttctgccatttgtacgatggtcaggaatctattgccatgggtatcgaagctgccgttacttttgaagattgtttgatcactgcttacagagaccattgccaagcttactgcagaggtgattccgtccatcaaattatcgctgaattgatgggtaagagaaccggttcaaccaacggtaagggtggttctatgcatttctacagaaagaagaccaacttctatggtggtcacggtattgtcggtgctcaatgtgccctcggtactggtttgggcttcgctttgaagtaccaaaagaagcccaatgttgccattactatgtacggtgatggtgctgccaaccaaggacaattgttcgaagctgccaatatggctgctttgtggaagctccccgtcctctacgtctgtgaaaacaaccattacgccatgggtacctccaccgccagaggtgctgccagtactgaatactataaaagacttatgcccgtccccggtattagatttgctgccaacaacgtctttgccgttagagaagtcaccaaattcgccaaggaatactccatcaaagaaggtcccatctgcctcgaaatgcaaacatacagataccacggtcactctatgtctgatcccggtgttacttacagaaagaagcaagaaatcgatgaatacagaaagactaaggattgtatcacccttgtcaagcaactcatcattgacaataaggtcgccactgaggaggatcttaaggaagttgaaagagccatcaagaaggaagtcgatgaaaccgtcgaaaaggtccgtgaagatgcttatcccgatgccaaggatctcctcaaggatgtgtatattgaagaccccaaggaaccccaacacatcagaggtgttgaatacgacaagtctttcgcccccagaggattgccttaagagatttccgcatactagaaatagtagaaattttataagtctataaatgaatttaatgccttgattaaaaatttcttgttaaagaaatctggaaaaagggatttcaaaatgatttattaaatgcgtatttattttatatgacttatattcgctatatagcttggacagcatacatcatcctcatataaaaaattcctcttaactc

SEQ ID NO: 58609 - protein, 388 aa, Glycine max
  peptide (1)..(388): Ceres Seq. ID no. 13594129
  misc_feature (59)..(354): Pfam Name: Dehydrogenase E1 component Pfam Description: Dehydrogenase E1 component
  misc_feature (48)..(365): Homolog of NCBI NO: 28465345 NR Description: pyruvate dehydrogenase E1 alpha subunit [Beta
  misc_feature (31)..(365): Homolog of NCBI NO: 1709449 NR Description: Pyruvate dehydrogenase E1 component alpha
  misc_feature (48)..(365): Homolog of NCBI NO: 2117533 NR Description: pyruvate dehydrogenase (lipoamide) (EC 1.2.4.1)
  misc_feature (48)..(365): Homolog of NCBI NO: 15218940 NR Description: pyruvate dehydrogenase e1 alpha subunit -related
  misc_feature (2)..(366): Homolog of NCBI NO: 23306664 NR Description: pyruvate dehydrogenase E1a-like subunit IAR4
  misc_feature (48)..(365): Homolog of NCBI NO: 13430788 NR Description: putative pyruvate dehydrogenase e1 alpha subunit
  misc_feature (48)..(365): Homolog of NCBI NO: 28465343 NR Description: pyruvate dehydrogenase E1alpha subunit [Beta
  misc_feature (2)..(366): Homolog of NCBI NO: 15221692 NR Description: pyruvate dehydrogenase E1 alpha subunit
  misc_feature (15)..(365): Homolog of NCBI NO: 12003246 NR Description: pyruvate dehydrogenase [Lycopersicon esculentum]
  misc_feature (15)..(365): Homolog of NCBI NO: 1709453 NR Description: Pyruvate dehydrogenase E1 component alpha
MNTFVKKTRGIISLATRGFASSSGAIKVKLLPSDTYNLEGRKIPTETETNAEELMHYFKEMSMMRRMEIALDNLYKAREIRGFCHLYDGQESIAMGIEAAVTFEDCLITAYRDHCQAYCRGDSVHQIIAELMGKRTGSTNGKGGSMHFYRKKTNFYGGHGIVGAQCALGTGLGFALKYQKKPNVAITMYGDGAANQGQLFEAANMAALWKLPVLYVCENNHYAMGTSTARGAASTEYYKRLMPVPGIRFAANNVFAVREVTKFAKEYSIKEGPICLEMQTYRYHGHSMSDPGVTYRKKQEIDEYRKTKDCITLVKQLIIDNKVATEEDLKEVERAIKKEVDETVEKVREDAYPDAKDLLKDVYIEDPKEPQHIRGVEYDKSFAPRGLP

SEQ ID NO: 58610 - protein, 334 aa, Glycine max
  peptide (1)..(334): Ceres Seq. ID no. 13594130
  misc_feature (5)..(300): Pfam Name: Dehydrogenase E1 component Pfam Description: Dehydrogenase E1 component
  misc_feature (1)..(311): Homolog of NCBI NO: 28465345 NR Description: pyruvate dehydrogenase E1 alpha subunit [Beta
  misc_feature (1)..(311): Homolog of NCBI NO: 1709449 NR Description: Pyruvate dehydrogenase E1 component alpha
  misc_feature (1)..(311): Homolog of NCBI NO: 2117533 NR Description: pyruvate dehydrogenase (lipoamide) (EC 1.2.4.1)
  misc_feature (1)..(311): Homolog of NCBI NO: 15218940 NR Description: pyruvate dehydrogenase e1 alpha subunit -related
  misc_feature (1)..(312): Homolog of NCBI NO: 23306664 NR Description: pyruvate dehydrogenase E1a-like subunit IAR4
  misc_feature (1)..(311): Homolog of NCBI NO: 13430788 NR Description: putative pyruvate dehydrogenase e1 alpha subunit
  misc_feature (1)..(311): Homolog of NCBI NO: 28465343 NR Description: pyruvate dehydrogenase E1alpha subunit [Beta
  misc_feature (1)..(312): Homolog of NCBI NO: 15221692 NR Description: pyruvate dehydrogenase E1 alpha subunit
  misc_feature (1)..(311): Homolog of NCBI NO: 12003246 NR Description: pyruvate dehydrogenase [Lycopersicon esculentum]
  misc_feature (1)..(311): Homolog of NCBI NO: 1709453 NR Description: Pyruvate dehydrogenase E1 component alpha
MHYFKEMSMMRRMEIALDNLYKAREIRGFCHLYDGQESIAMGIEAAVTFEDCLITAYRDHCQAYCRGDSVHQIIAELMGKRTGSTNGKGGSMHFYRKKTNFYGGHGIVGAQCALGTGLGFALKYQKKPNVAITMYGDGAANQGQLFEAANMAALWKLPVLYVCENNHYAMGTSTARGAASTEYYKRLMPVPGIRFAANNVFAVREVTKFAKEYSIKEGPICLEMQTYRYHGHSMSDPGVTYRKKQEIDEYRKTKDCITLVKQLIIDNKVATEEDLKEVERAIKKEVDETVEKVREDAYPDAKDLLKDVYIEDPKEPQHIRGVEYDKSFAPRGLP

SEQ ID NO: 58611 - protein, 328 aa, Glycine max
  peptide (1)..(328): Ceres Seq. ID no. 13594131
  misc_feature (1)..(294): Pfam Name: Dehydrogenase E1 component Pfam Description: Dehydrogenase E1 component
  misc_feature (1)..(305): Homolog of NCBI NO: 28465345 NR Description: pyruvate dehydrogenase E1 alpha subunit [Beta
  misc_feature (1)..(305): Homolog of NCBI NO: 1709449 NR Description: Pyruvate dehydrogenase E1 component alpha
  misc_feature (1)..(305): Homolog of NCBI NO: 2117533 NR Description: pyruvate dehydrogenase (lipoamide) (EC 1.2.4.1)
  misc_feature (1)..(305): Homolog of NCBI NO: 15218940 NR Description: pyruvate dehydrogenase e1 alpha subunit -related
  misc_feature (1)..(306): Homolog of NCBI NO: 23306664 NR Description: pyruvate dehydrogenase E1a-like subunit IAR4
  misc_feature (1)..(305): Homolog of NCBI NO: 13430788 NR Description: putative pyruvate dehydrogenase e1 alpha subunit
  misc_feature (1)..(305): Homolog of NCBI NO: 28465343 NR Description: pyruvate dehydrogenase E1alpha subunit [Beta
  misc_feature (1)..(306): Homolog of NCBI NO: 15221692 NR Description: pyruvate dehydrogenase E1 alpha subunit
  misc_feature (1)..(305): Homolog of NCBI NO: 12003246 NR Description: pyruvate dehydrogenase [Lycopersicon esculentum]
  misc_feature (1)..(305): Homolog of NCBI NO: 1709453 NR Description: Pyruvate dehydrogenase E1 component alpha
MSMMRRMEIALDNLYKAREIRGFCHLYDGQESIAMGIEAAVTFEDCLITAYRDHCQAYCRGDSVHQIIAELMGKRTGSTNGKGGSMHFYRKKTNFYGGHGIVGAQCALGTGLGFALKYQKKPNVAITMYGDGAANQGQLFEAANMAALWKLPVLYVCENNHYAMGTSTARGAASTEYYKRLMPVPGIRFAANNVFAVREVTKFAKEYSIKEGPICLEMQTYRYHGHSMSDPGVTYRKKQEIDEYRKTKDCITLVKQLIIDNKVATEEDLKEVERAIKKEVDETVEKVREDAYPDAKDLLKDVYIEDPKEPQHIRGVEYDKSFAPRGLP

SEQ ID NO: 58612 - DNA, 1364 bp, Glycine max
  misc_feature (1)..(1364): Ceres Seq. ID no. 15224558
gtcagctacgtaggccccccccccatttttaattagaaaaggcgcagaaacagaaacagaaagaatggctggtcccggcaaatgcttcctcgtgacgggtcctccgggtgtgggaaaaaccactcttattatgaaagtattcgagtccctcaaagtcaatccatccctcaagcttcagggcttctacactcgggaaattaggcgcgccggccagagggttggttttgaagtggtcacactcgacggtcgcactgccccacttgcttccatcgacatttcaacgttcattttttcattccctcactctttagctccacaccataaacatctcaatttttagtttaccataattagtacttaggacccattatctggtgtttctctgtttggtaacttgtatttattgctcatgccacttgagggtctttattcatttttcaacaaaggtactcatgtgatagtaaatcctaaaggggcaggcaaaaaatagatgaaacgaactgaactgtaaaaggggtttaggcaaactgaactgaactgcaactgaattgaaccggactgttctaaataaacatcttatacaactctgcctatttgattaaatggtgtcatttgattgcattgactttggcagccccgagtctctcagatggcctaatgttggcaagtataaagttgatgttgcttccttcgagtcactagcacttcccgagttacaggttaaagaagacactgatctcttcatcattgacgaagttggtaagatggagttgttcagttcctcattcttccctgcagttctaagagttttggagtcaaatatcccagttttggcttccattccagttccaaaattcggcagagacatacctgaagttgcaaggttgcggaatcatgcaggggcaacttgttttacattgagcgttagtaacagagatgctgttagagaacagatacgctcacaattggaagatatgctgacaaaacactagtcattgcaagtttgtggtctgaattcataccgtgtaatgtagaataaattatgaatttatgatgggctaatactatttagtgagagaaaaaaaaagtgcaaatcttaatcgagccttaaataagttgataagctagttgagctttgaataccattagtagtatacatgacttatctgcatgatagtccttttgtaatgacttatctgtatgtctgtattatggacaatatcttctgcaggaaaaaaaaaaaaaaaaaaaaaaaaaaaaaaaaaaaaaaaaaaaaaaaaaaaaaaagaaaaaaaaaaaaaaaaaagatttcctgcaccccggggaatccactagttctaaagcgcccgcccccgcgggggagc

SEQ ID NO: 58613 - protein, 129 aa, Glycine max
  peptide (1)..(129): Ceres Seq. ID no. 15224559
  misc_feature (11)..(128): Pfam Name: Protein of unknown function, DUF265 Pfam Description: Protein of unknown function, DUF265
  misc_feature (18)..(121): Homolog of NCBI NO: 20092214 NR Description: conserved hypothetical protein
  misc_feature (18)..(125): Homolog of NCBI NO: 23049827 NR Description: COG1618: Predicted nucleotide kinase
  misc_feature (20)..(119): Homolog of NCBI NO: 31215040 NR Description: ENSANGP00000014191 [Anopheles gambiae]
  misc_feature (20)..(123): Homolog of NCBI NO: 15642811 NR Description: conserved hypothetical protein [Thermotoga
  misc_feature (20)..(118): Homolog of NCBI NO: 34851911 NR Description: similar to RIKEN cDNA 2310079N02 [Rattus
  misc_feature (21)..(127): Homolog of NCBI NO: 12859618 NR Description: unnamed protein product [Mus musculus]
  misc_feature (10)..(127): Homolog of NCBI NO: 13385098 NR Description: RIKEN cDNA 2310079N02 [Mus musculus]
  misc_feature (12)..(112): Homolog of NCBI NO: 14150100 NR Description: hypothetical protein MGC13186 [Homo sapiens]
  misc_feature (11)..(128): Homolog of NCBI NO: 20503005 NR Description: Unknown protein [Oryza sativa (japonica
  misc_feature (11)..(129): Homolog of NCBI NO: 6063556 NR Description: similar to Aquifex aeolicus section 65 of 109 of
MVSFDCIDFGSPESLRWPNVGKYKVDVASFESLALPELQVKEDTDLFIIDEVGKMELFSSSFFPAVLRVLESNIPVLASIPVPKFGRDIPEVARLRNHAGATCFTLSVSNRDAVREQIRSQLEDMLTKH

SEQ ID NO: 58614 - protein, 91 aa, Glycine max
  peptide (1)..(91): Ceres Seq. ID no. 15224560
  misc_feature (1)..(69): Homolog of NCBI NO: 20092214 NR Description: conserved hypothetical protein
  misc_feature (10)..(69): Homolog of NCBI NO: 23049827 NR Description: COG1618: Predicted nucleotide kinase
  misc_feature (9)..(69): Homolog of NCBI NO: 31215040 NR Description: ENSANGP00000014191 [Anopheles gambiae]
  misc_feature (9)..(71): Homolog of NCBI NO: 15642811 NR Description: conserved hypothetical protein [Thermotoga
  misc_feature (10)..(69): Homolog of NCBI NO: 34851911 NR Description: similar to RIKEN cDNA 2310079N02 [Rattus
  misc_feature (10)..(69): Homolog of NCBI NO: 12859618 NR Description: unnamed protein product [Mus musculus]
  misc_feature (10)..(69): Homolog of NCBI NO: 13385098 NR Description: RIKEN cDNA 2310079N02 [Mus musculus]
  misc_feature (10)..(71): Homolog of NCBI NO: 14150100 NR Description: hypothetical protein MGC13186 [Homo sapiens]
  misc_feature (45)..(73): Homolog of NCBI NO: 20503005 NR Description: Unknown protein [Oryza sativa (japonica
  misc_feature (13)..(73): Homolog of NCBI NO: 6063556 NR Description: similar to Aquifex aeolicus section 65 of 109 of
MAGPGKCFLVTGPPGVGKTTLIMKVFESLKVNPSLKLQGFYTREIRRAGQRVGFEVVTLDGRTAPLASIDISTFIFSFPHSLAPHHKHLNF

SEQ ID NO: 58615 - protein, 75 aa, Glycine max
  peptide (1)..(75): Ceres Seq. ID no. 15224561
  misc_feature (1)..(74): Pfam Name: Protein of unknown function, DUF265 Pfam Description: Protein of unknown function, DUF265
  misc_feature (1)..(67): Homolog of NCBI NO: 20092214 NR Description: conserved hypothetical protein
  misc_feature (1)..(71): Homolog of NCBI NO: 23049827 NR Description: COG1618: Predicted nucleotide kinase
  misc_feature (1)..(65): Homolog of NCBI NO: 31215040 NR Description: ENSANGP00000014191 [Anopheles gambiae]
  misc_feature (1)..(69): Homolog of NCBI NO: 15642811 NR Description: conserved hypothetical protein [Thermotoga
  misc_feature (1)..(64): Homolog of NCBI NO: 34851911 NR Description: similar to RIKEN cDNA 2310079N02 [Rattus
  misc_feature (1)..(73): Homolog of NCBI NO: 12859618 NR Description: unnamed protein product [Mus musculus]
  misc_feature (1)..(73): Homolog of NCBI NO: 13385098 NR Description: RIKEN cDNA 2310079N02 [Mus musculus]
  misc_feature (1)..(58): Homolog of NCBI NO: 14150100 NR Description: hypothetical protein MGC13186 [Homo sapiens]
  misc_feature (1)..(74): Homolog of NCBI NO: 20503005 NR Description: Unknown protein [Oryza sativa (japonica
  misc_feature (1)..(75): Homolog of NCBI NO: 6063556 NR Description: similar to Aquifex aeolicus section 65 of 109 of
MELFSSSFFPAVLRVLESNIPVLASIPVPKFGRDIPEVARLRNHAGATCFTLSVSNRDAVREQIRSQLEDMLTKH

SEQ ID NO: 58616 - DNA, 1407 bp, Glycine max
  misc_feature (1)..(1407): Ceres Seq. ID no. 14308679
gagaagaaacgagagcgagagagagaaagaaatggcgaccaacattgggatcatggatgcggcttacttcgtcggcagatctgagattctttcttggatcaactcaactctgcaactcaatctctccaaagtcgaagaggcttgttccggcgccgttcattgtcagcttctcgatgccgctcatccagggatcgtgcctatgcacaaggtcaatttcgacgccaagagcgagtacgagatgattcagaactacaaggtccttcaagatgtcttcaacaaactcaaaatcaccaagcacatcgaggtcagcaagctggtgaaaggaaggccactggataacctcgagttcatgcaatggatgaaacgatactgcgattctgtcgattccggccttcagtacaattataatcctctggagaggagagaggtttgcaaaggaggaagagaaacgagcaagaaatctgcaaactcccaagcctcaaccaagggttctactgcacagagacctcattcttctcataatgctcgaagaaatgaggtttctaatgcaaaccctacaaatcaggctgcaaaggttgcgagagcagcaccttctgctggaaaccctgctcctgtgtatgaagaaaagataacagagttgaagttgtccattgatagccttgagaaggaacgagatttctacttcgcaaagctgagagatattgagatactgtgccagactcctgagatagaacactcaccgattgttgcggcaatacagaagatattatatgctacagatgacaatggaatggctgtggtcgaagctcaagctatgatttctgttggtcgtaaggaaatagagggattaagccccattgctgaggtttcggaggagaagagcagttcagaaactcataagagaaagaatattgccaatattgattttgatgttgctggcctcgcaacgttgtctcccagacagaggctttctgatgtttcagatgttcattgtagcgagtcacctcttatgacttgttagggaggaggaaggatcaccttctgttgttaattcagttagcaacatgttaaaaccgttttggtcacagtaattcctgttacaagtgtgaattgacagggttattcataatggttaggggttttagggagactattctgttatcaagtatcaagtatcgggtatcgggtatcagcccagaaaaatgtagccagatatattttgcctttagaatttgcttgttgtctcaacaatgtttctgaatccagtcatgtaatttctggctagtgctttgagcaacactatttcattttcagcatttttttcatttattatgtgatgatcaaattgtttacaattcagggaaaattacatatcggaatttgtaattaatttctgaattcggtctt

SEQ ID NO: 58617 - protein, 339 aa, Glycine max
  peptide (1)..(339): Ceres Seq. ID no. 14308680
  misc_feature (25)..(125): Pfam Name: Calponin homology (CH) domain Pfam Description: Calponin homology (CH) domain
  misc_feature (24)..(261): Homolog of NCBI NO: 6912494 NR Description: microtubule-associated protein, RP/EB family,
  misc_feature (24)..(271): Homolog of NCBI NO: 38512258 NR Description: Microtubule-associated protein RP/EB family
  misc_feature (8)..(261): Homolog of NCBI NO: 30851559 NR Description: Unknown (protein for IMAGE:5715929) [Mus musculus]
  misc_feature (11)..(170): Homolog of NCBI NO: 26450360 NR Description: putative microtubule-associated protein EB1
  misc_feature (13)..(281): Homolog of NCBI NO: 29124955 NR Description: microtubule-associated protein EB1 [Chlamydomonas
  misc_feature (12)..(274): Homolog of NCBI NO: 38344911 NR Description: OSJNBb0079B02.14 [Oryza sativa (japonica
  misc_feature (11)..(297): Homolog of NCBI NO: 15241860 NR Description: microtubule-associated protein EB1-related
  misc_feature (11)..(296): Homolog of NCBI NO: 32815913 NR Description: At3g47690 [Arabidopsis thaliana]
  misc_feature (12)..(336): Homolog of NCBI NO: 37535740 NR Description: putative microtubule-associated protein
  misc_feature (11)..(339): Homolog of NCBI NO: 15240262 NR Description: expressed protein [Arabidopsis thaliana]
RRNESEREKEMATNIGIMDAAYFVGRSEILSWINSTLQLNLSKVEEACSGAVHCQLLDAAHPGIVPMHKVNFDAKSEYEMIQNYKVLQDVFNKLKITKHIEVSKLVKGRPLDNLEFMQWMKRYCDSVDSGLQYNYNPLERREVCKGGRETSKKSANSQASTKGSTAQRPHSSHNARRNEVSNANPTNQAAKVARAAPSAGNPAPVYEEKITELKLSIDSLEKERDFYFAKLRDIEILCQTPEIEHSPIVAAIQKILYATDDNGMAVVEAQAMISVGRKEIEGLSPIAEVSEEKSSSETHKRKNIANIDFDVAGLATLSPRQRLSDVSDVHCSESPLMTC

SEQ ID NO: 58618 - protein, 329 aa, Glycine max
  peptide (1)..(329): Ceres Seq. ID no. 14308681
  misc_feature (15)..(115): Pfam Name: Calponin homology (CH) domain Pfam Description: Calponin homology (CH) domain
  misc_feature (14)..(251): Homolog of NCBI NO: 6912494 NR Description: microtubule-associated protein, RP/EB family,
  misc_feature (14)..(261): Homolog of NCBI NO: 38512258 NR Description: Microtubule-associated protein RP/EB family
  misc_feature (1)..(251): Homolog of NCBI NO: 30851559 NR Description: Unknown (protein for IMAGE:5715929) [Mus musculus]
  misc_feature (1)..(160): Homolog of NCBI NO: 26450360 NR Description: putative microtubule-associated protein EB1
  misc_feature (3)..(271): Homolog of NCBI NO: 29124955 NR Description: microtubule-associated protein EB1 [Chlamydomonas
  misc_feature (2)..(264): Homolog of NCBI NO: 38344911 NR Description: OSJNBb0079B02.14 [Oryza sativa (japonica
  misc_feature (1)..(287): Homolog of NCBI NO: 15241860 NR Description: microtubule-associated protein EB1-related
  misc_feature (1)..(286): Homolog of NCBI NO: 32815913 NR Description: At3g47690 [Arabidopsis thaliana]
  misc_feature (2)..(326): Homolog of NCBI NO: 37535740 NR Description: putative microtubule-associated protein
  misc_feature (1)..(329): Homolog of NCBI NO: 15240262 NR Description: expressed protein [Arabidopsis thaliana]
MATNIGIMDAAYFVGRSEILSWINSTLQLNLSKVEEACSGAVHCQLLDAAHPGIVPMHKVNFDAKSEYEMIQNYKVLQDVFNKLKITKHIEVSKLVKGRPLDNLEFMQWMKRYCDSVDSGLQYNYNPLERREVCKGGRETSKKSANSQASTKGSTAQRPHSSHNARRNEVSNANPTNQAAKVARAAPSAGNPAPVYEEKITELKLSIDSLEKERDFYFAKLRDIEILCQTPEIEHSPIVAAIQKILYATDDNGMAVVEAQAMISVGRKEIEGLSPIAEVSEEKSSSETHKRKNIANIDFDVAGLATLSPRQRLSDVSDVHCSESPLMTC

SEQ ID NO: 58619 - protein, 322 aa, Glycine max
  peptide (1)..(322): Ceres Seq. ID no. 14308682
  misc_feature (8)..(108): Pfam Name: Calponin homology (CH) domain Pfam Description: Calponin homology (CH) domain
  misc_feature (7)..(244): Homolog of NCBI NO: 6912494 NR Description: microtubule-associated protein, RP/EB family,
  misc_feature (7)..(254): Homolog of NCBI NO: 38512258 NR Description: Microtubule-associated protein RP/EB family
  misc_feature (1)..(244): Homolog of NCBI NO: 30851559 NR Description: Unknown (protein for IMAGE:5715929) [Mus musculus]
  misc_feature (1)..(153): Homolog of NCBI NO: 26450360 NR Description: putative microtubule-associated protein EB1
  misc_feature (1)..(264): Homolog of NCBI NO: 29124955 NR Description: microtubule-associated protein EB1 [Chlamydomonas
  misc_feature (1)..(257): Homolog of NCBI NO: 38344911 NR Description: OSJNBb0079B02.14 [Oryza sativa (japonica
  misc_feature (1)..(280): Homolog of NCBI NO: 15241860 NR Description: microtubule-associated protein EB1-related
  misc_feature (1)..(279): Homolog of NCBI NO: 32815913 NR Description: At3g47690 [Arabidopsis thaliana]
  misc_feature (1)..(319): Homolog of NCBI NO: 37535740 NR Description: putative microtubule-associated protein
  misc_feature (1)..(322): Homolog of NCBI NO: 15240262 NR Description: expressed protein [Arabidopsis thaliana]
MDAAYFVGRSEILSWINSTLQLNLSKVEEACSGAVHCQLLDAAHPGIVPMHKVNFDAKSEYEMIQNYKVLQDVFNKLKITKHIEVSKLVKGRPLDNLEFMQWMKRYCDSVDSGLQYNYNPLERREVCKGGRETSKKSANSQASTKGSTAQRPHSSHNARRNEVSNANPTNQAAKVARAAPSAGNPAPVYEEKITELKLSIDSLEKERDFYFAKLRDIEILCQTPEIEHSPIVAAIQKILYATDDNGMAVVEAQAMISVGRKEIEGLSPIAEVSEEKSSSETHKRKNIANIDFDVAGLATLSPRQRLSDVSDVHCSESPLMTC

SEQ ID NO: 58620 - DNA, 1358 bp, Glycine max
  misc_feature (1)..(1358): Ceres Seq. ID no. 14308331
gaatgaacactttactcatcgctttgtcagttatagggcaagcagctgccgaccggctgctggtggcttcatacggaaatgaaactcatgctggcgccatccagacgctcgaagtactgcctagcacaagcgcaaattctagccatgcgatgaaagttacccaagagaaccacgagtgtggaactttgcctacatggttggatgcgtcccttggcctggataggatagtctgtctagacgaatcagctgccaatgctagtctcacaatgttgagccttggtgatgacggcagcctccaaaaggtgtccaataccagtgtgctgggaggagcagtatcctcggcgtcctacaataacaaatccgcattagcccttgctcactacggacccgagccagccatatcactgtttactatcgatggggaaaacaaattttcgtctttgcaaaacatcaccttccaggcgcctgagcaaatccatcaagcggtcgtcgatcctacggggcaatacatgatattccccagtctcggtgcagatacagtccacgtctattgcatcgatcctgtcagccacttgctcacagagcatgcgccactcaaatccaagcaaggatacggtccgcgacatgcagttttctggacaggttccaattctacaaagacgtacctttttgtagtccatgagaagagcaacaaaatcactagttacgaagtttgttatctggagcagggtggcctagcttttaccgaagtcgacgaggtcagcacatacggcaatcaaaccgtcccaccagcgacgttcgcttcggagatgacgctctcgcctgataacaagttcttgatcgcagcaaaccgtaacggcacagttttcaaagcagagaattcggacccaaccaacagcactcaagttccaagtgattcacttgtgacgttcaaaccgtcagccgacgggaagctatcgtttgtccagcttgcaaaatcagggggatggtaccctcgccacttcagtatgaaccagaatggatcgttgattgcggtcgcaaatcaactcagcaaaaacgtcgacatctatgcccgtaacctagaaactggaatcatcgaagacagcaaagcggtggcaagagctaataatctcgggcccggcgatttgatgttcgtgcagtgggtggggcaacaatagatcatgattgaaattctattcaaagctcaagcagatgagcagtagacctgatatttagcgggttactccacccatgttctatatggagatttctcaaccctatttttgtgcatagcatggcggaattttgtattgtagcatagcatcaaggagtgttagctgaagatacccagttttcct

SEQ ID NO: 58621 - protein, 391 aa, Glycine max
  peptide (1)..(391): Ceres Seq. ID no. 14308332
  misc_feature (96)..(284): Homolog of NCBI NO: 15599399 NR Description: conserved hypothetical protein [Pseudomonas
  misc_feature (305)..(385): Homolog of NCBI NO: 32039414 NR Description: hypothetical protein [Pseudomonas aeruginosa
  misc_feature (96)..(284): Homolog of NCBI NO: 32039414 NR Description: hypothetical protein [Pseudomonas aeruginosa
  misc_feature (264)..(386): Homolog of NCBI NO: 26988746 NR Description: conserved hypothetical protein [Pseudomonas
  misc_feature (63)..(287): Homolog of NCBI NO: 26988746 NR Description: conserved hypothetical protein [Pseudomonas
  misc_feature (267)..(363): Homolog of NCBI NO: 23102319 NR Description: hypothetical protein [Azotobacter vinelandii]
  misc_feature (96)..(287): Homolog of NCBI NO: 23102319 NR Description: hypothetical protein [Azotobacter vinelandii]
  misc_feature (6)..(363): Homolog of NCBI NO: 32415862 NR Description: predicted protein [Neurospora crassa]
  misc_feature (1)..(382): Homolog of NCBI NO: 40745788 NR Description: hypothetical protein AN2112.2 [Aspergillus
  misc_feature (1)..(388): Homolog of NCBI NO: 32413899 NR Description: hypothetical protein [Neurospora crassa]
MNTLLIALSVIGQAAADRLLVASYGNETHAGAIQTLEVLPSTSANSSHAMKVTQENHECGTLPTWLDASLGLDRIVCLDESAANASLTMLSLGDDGSLQKVSNTSVLGGAVSSASYNNKSALALAHYGPEPAISLFTIDGENKFSSLQNITFQAPEQIHQAVVDPTGQYMIFPSLGADTVHVYCIDPVSHLLTEHAPLKSKQGYGPRHAVFWTGSNSTKTYLFVVHEKSNKITSYEVCYLEQGGLAFTEVDEVSTYGNQTVPPATFASEMTLSPDNKFLIAANRNGTVFKAENSDPTNSTQVPSDSLVTFKPSADGKLSFVQLAKSGGWYPRHFSMNQNGSLIAVANQLSKNVDIYARNLETGIIEDSKAVARANNLGPGDLMFVQWVGQQ

SEQ ID NO: 58622 - protein, 342 aa, Glycine max
  peptide (1)..(342): Ceres Seq. ID no. 14308333
  misc_feature (47)..(235): Homolog of NCBI NO: 15599399 NR Description: conserved hypothetical protein [Pseudomonas
  misc_feature (256)..(336): Homolog of NCBI NO: 32039414 NR Description: hypothetical protein [Pseudomonas aeruginosa
  misc_feature (47)..(235): Homolog of NCBI NO: 32039414 NR Description: hypothetical protein [Pseudomonas aeruginosa
  misc_feature (215)..(337): Homolog of NCBI NO: 26988746 NR Description: conserved hypothetical protein [Pseudomonas
  misc_feature (14)..(238): Homolog of NCBI NO: 26988746 NR Description: conserved hypothetical protein [Pseudomonas
  misc_feature (218)..(314): Homolog of NCBI NO: 23102319 NR Description: hypothetical protein [Azotobacter vinelandii]
  misc_feature (47)..(238): Homolog of NCBI NO: 23102319 NR Description: hypothetical protein [Azotobacter vinelandii]
  misc_feature (1)..(314): Homolog of NCBI NO: 32415862 NR Description: predicted protein [Neurospora crassa]
  misc_feature (1)..(333): Homolog of NCBI NO: 40745788 NR Description: hypothetical protein AN2112.2 [Aspergillus
  misc_feature (1)..(339): Homolog of NCBI NO: 32413899 NR Description: hypothetical protein [Neurospora crassa]
MKVTQENHECGTLPTWLDASLGLDRIVCLDESAANASLTMLSLGDDGSLQKVSNTSVLGGAVSSASYNNKSALALAHYGPEPAISLFTIDGENKFSSLQNITFQAPEQIHQAVVDPTGQYMIFPSLGADTVHVYCIDPVSHLLTEHAPLKSKQGYGPRHAVFWTGSNSTKTYLFVVHEKSNKITSYEVCYLEQGGLAFTEVDEVSTYGNQTVPPATFASEMTLSPDNKFLIAANRNGTVFKAENSDPTNSTQVPSDSLVTFKPSADGKLSFVQLAKSGGWYPRHFSMNQNGSLIAVANQLSKNVDIYARNLETGIIEDSKAVARANNLGPGDLMFVQWVGQQ

SEQ ID NO: 58623 - protein, 303 aa, Glycine max
  peptide (1)..(303): Ceres Seq. ID no. 14308334
  misc_feature (8)..(196): Homolog of NCBI NO: 15599399 NR Description: conserved hypothetical protein [Pseudomonas
  misc_feature (217)..(297): Homolog of NCBI NO: 32039414 NR Description: hypothetical protein [Pseudomonas aeruginosa
  misc_feature (8)..(196): Homolog of NCBI NO: 32039414 NR Description: hypothetical protein [Pseudomonas aeruginosa
  misc_feature (176)..(298): Homolog of NCBI NO: 26988746 NR Description: conserved hypothetical protein [Pseudomonas
  misc_feature (1)..(199): Homolog of NCBI NO: 26988746 NR Description: conserved hypothetical protein [Pseudomonas
  misc_feature (179)..(275): Homolog of NCBI NO: 23102319 NR Description: hypothetical protein [Azotobacter vinelandii]
  misc_feature (8)..(199): Homolog of NCBI NO: 23102319 NR Description: hypothetical protein [Azotobacter vinelandii]
  misc_feature (1)..(275): Homolog of NCBI NO: 32415862 NR Description: predicted protein [Neurospora crassa]
  misc_feature (1)..(294): Homolog of NCBI NO: 40745788 NR Description: hypothetical protein AN2112.2 [Aspergillus
  misc_feature (1)..(300): Homolog of NCBI NO: 32413899 NR Description: hypothetical protein [Neurospora crassa]
MLSLGDDGSLQKVSNTSVLGGAVSSASYNNKSALALAHYGPEPAISLFTIDGENKFSSLQNITFQAPEQIHQAVVDPTGQYMIFPSLGADTVHVYCIDPVSHLLTEHAPLKSKQGYGPRHAVFWTGSNSTKTYLFVVHEKSNKITSYEVCYLEQGGLAFTEVDEVSTYGNQTVPPATFASEMTLSPDNKFLIAANRNGTVFKAENSDPTNSTQVPSDSLVTFKPSADGKLSFVQLAKSGGWYPRHFSMNQNGSLIAVANQLSKNVDIYARNLETGIIEDSKAVARANNLGPGDLMFVQWVGQQ

SEQ ID NO: 58624 - DNA, 1710 bp, Glycine max
  misc_feature (1)..(1710): Ceres Seq. ID no. 13594068
aaatttggacagtgaggccattttggtcatggtgtgatcattttctctgctcttattcttaatgaggcttatatccaagtttggccggttgcatattgcacaaggcgtctataaaagtaacatcactgaaatcattgtcaaattgacactgcttttctctaaaaggacttcaaagttctgttagatatacagtgttattctgctttcgatcgctctattattcatttgctaagaccttagagaagacagaggatgggtaccctgcttccagatgaaaaatcagagaatccaaatgctttggaacaacttcaacaccaaaaagatgtggatgcaggcgctctctttgtcctcaaatccaaaggttcttggatgcattgtgggtaccacttgacaacttcgatcgtggcaccacctcttctaagtcttccttatgcattcaccttccttggatggacggctgggatcttaagcttagtgattggagctttggtcactttctattcatacaatttaatatctagggttcttgaacaccacgctcagatgggtatgcgtcagctacgctttagagacatggctcgcgatattttaggtccagggtggggtcgttattttgtcggcccaattcaattcgcagtctgttatggtgctgtagtagcttgtactctcttgggaggacaatgcatgaaggcaatttacttgctgtcaaatccaaacgggaccatgaagctttacgagtttgtaattatatttggatgcttcatgctgattttggctcaaatcccatctttccactctttgaggcacattaatctagtgtccttggttctgtgcttagcctatagtgccggtgctactattggttccatttacattggagactcatcaaaaggaccagaaaaggattattctttgaaaggtgattcagtgaatcgcttatttggaatcttcaatgcaattgctatcattgccacgacttatggaaatggaatcattccagaaattcaggcaacattagcaccacccgtaaaagggaagatgctcaagggactatgtgtttgttatcttgttcttatagttaccttctttagtgtatctgtatccggttattgggcatttggtaatgaatcagaaggcctcatcttaagcaacttcgtggacaatgggaagcctctggtgcccaagtggttcatttacatgaccaacattttcactataacacaattatctgcggttggtgtggtttatttgcaaccaacaaatgaagtgctagagcaaacatttggagacccaaaaagccccgagttctccaaacgcaatgtaatccctagagtgatatctcggtcattagctattgctatttcaaccactatagcagccatgcttccattttttggagacataaactctcttataggagcttttggctttatcccacttgacttcatcttgccaatggttttctacaatttgacatttaagccatctaagcgaagccctgttttctggttgaatgtgataattgttgtggctttctccgcattgggagctatagcagcagttgcagcagttaggcagatagttcttgatgctaaaaattattaattatttgctaatgtatgatcatgttggaccatccaatgaagttttgttgttctatgtatcatggttcatactctagtagtttaaaaccaatcattgagttatttc

SEQ ID NO: 58625 - protein, 450 aa, Glycine max
  peptide (1)..(450): Ceres Seq. ID no. 13594069
  misc_feature (35)..(450): Homolog of NCBI NO: 21069018 NR Description: betaine/proline transporter [Avicennia marina]
  misc_feature (68)..(450): Homolog of NCBI NO: 37534336 NR Description: putative proline transporter 1
  misc_feature (66)..(450): Homolog of NCBI NO: 10177364 NR Description: amino acid permease-like protein
  misc_feature (37)..(114): Homolog of NCBI NO: 34912776 NR Description: P0407B12.25 [Oryza sativa (japonica
  misc_feature (116)..(450): Homolog of NCBI NO: 34912776 NR Description: P0407B12.25 [Oryza sativa (japonica
  misc_feature (24)..(450): Homolog of NCBI NO: 21554158 NR Description: amino acid permease-like protein [Arabidopsis
  misc_feature (24)..(450): Homolog of NCBI NO: 18422139 NR Description: amino acid transporter family [Arabidopsis
  misc_feature (128)..(450): Homolog of NCBI NO: 30680565 NR Description: amino acid transporter family [Arabidopsis
  misc_feature (66)..(450): Homolog of NCBI NO: 6579208 NR Description: T23G18.9 [Arabidopsis thaliana]
  misc_feature (7)..(450): Homolog of NCBI NO: 34908432 NR Description: OJ1402_H07.15 [Oryza sativa (japonica
MGTLLPDEKSENPNALEQLQHQKDVDAGALFVLKSKGSWMHCGYHLTTSIVAPPLLSLPYAFTFLGWTAGILSLVIGALVTFYSYNLISRVLEHHAQMGMRQLRFRDMARDILGPGWGRYFVGPIQFAVCYGAVVACTLLGGQCMKAIYLLSNPNGTMKLYEFVIIFGCFMLILAQIPSFHSLRHINLVSLVLCLAYSAGATIGSIYIGDSSKGPEKDYSLKGDSVNRLFGIFNAIAIIATTYGNGIIPEIQATLAPPVKGKMLKGLCVCYLVLIVTFFSVSVSGYWAFGNESEGLILSNFVDNGKPLVPKWFIYMTNIFTITQLSAVGVVYLQPTNEVLEQTFGDPKSPEFSKRNVIPRVISRSLAIAISTTIAAMLPFFGDINSLIGAFGFIPLDFILPMVFYNLTFKPSKRSPVFWLNVIIVVAFSALGAIAAVAAVRQIVLDAKNY

SEQ ID NO: 58626 - protein, 411 aa, Glycine max
  peptide (1)..(411): Ceres Seq. ID no. 13594070
  misc_feature (1)..(411): Homolog of NCBI NO: 21069018 NR Description: betaine/proline transporter [Avicennia marina]
  misc_feature (29)..(411): Homolog of NCBI NO: 37534336 NR Description: putative proline transporter 1
  misc_feature (27)..(411): Homolog of NCBI NO: 10177364 NR Description: amino acid permease-like protein
  misc_feature (1)..(75): Homolog of NCBI NO: 34912776 NR Description: P0407B12.25 [Oryza sativa (japonica
  misc_feature (77)..(411): Homolog of NCBI NO: 34912776 NR Description: P0407B12.25 [Oryza sativa (japonica
  misc_feature (1)..(411): Homolog of NCBI NO: 21554158 NR Description: amino acid permease-like protein [Arabidopsis
  misc_feature (1)..(411): Homolog of NCBI NO: 18422139 NR Description: amino acid transporter family [Arabidopsis
  misc_feature (89)..(411): Homolog of NCBI NO: 30680565 NR Description: amino acid transporter family [Arabidopsis
  misc_feature (27)..(411): Homolog of NCBI NO: 6579208 NR Description: T23G18.9 [Arabidopsis thaliana]
  misc_feature (1)..(411): Homolog of NCBI NO: 34908432 NR Description: OJ1402_H07.15 [Oryza sativa (japonica
MHCGYHLTTSIVAPPLLSLPYAFTFLGWTAGILSLVIGALVTFYSYNLISRVLEHHAQMGMRQLRFRDMARDILGPGWGRYFVGPIQFAVCYGAVVACTLLGGQCMKAIYLLSNPNGTMKLYEFVIIFGCFMLILAQIPSFHSLRHINLVSLVLCLAYSAGATIGSIYIGDSSKGPEKDYSLKGDSVNRLFGIFNAIAIIATTYGNGIIPEIQATLAPPVKGKMLKGLCVCYLVLIVTFFSVSVSGYWAFGNESEGLILSNFVDNGKPLVPKWFIYMTNIFTITQLSAVGVVYLQPTNEVLEQTFGDPKSPEFSKRNVIPRVISRSLAIAISTTIAAMLPFFGDINSLIGAFGFIPLDFILPMVFYNLTFKPSKRSPVFWLNVIIVVAFSALGAIAAVAAVRQIVLDAKNY

SEQ ID NO: 58627 - protein, 353 aa, Glycine max
  peptide (1)..(353): Ceres Seq. ID no. 13594071
  misc_feature (1)..(353): Homolog of NCBI NO: 21069018 NR Description: betaine/proline transporter [Avicennia marina]
  misc_feature (1)..(353): Homolog of NCBI NO: 37534336 NR Description: putative proline transporter 1
  misc_feature (1)..(353): Homolog of NCBI NO: 10177364 NR Description: amino acid permease-like protein
  misc_feature (1)..(17): Homolog of NCBI NO: 34912776 NR Description: P0407B12.25 [Oryza sativa (japonica
  misc_feature (19)..(353): Homolog of NCBI NO: 34912776 NR Description: P0407B12.25 [Oryza sativa (japonica
  misc_feature (1)..(353): Homolog of NCBI NO: 21554158 NR Description: amino acid permease-like protein [Arabidopsis
  misc_feature (1)..(353): Homolog of NCBI NO: 18422139 NR Description: amino acid transporter family [Arabidopsis
  misc_feature (31)..(353): Homolog of NCBI NO: 30680565 NR Description: amino acid transporter family [Arabidopsis
  misc_feature (1)..(353): Homolog of NCBI NO: 6579208 NR Description: T23G18.9 [Arabidopsis thaliana]
  misc_feature (1)..(353): Homolog of NCBI NO: 34908432 NR Description: OJ1402_H07.15 [Oryza sativa (japonica
MGMRQLRFRDMARDILGPGWGRYFVGPIQFAVCYGAVVACTLLGGQCMKAIYLLSNPNGTMKLYEFVIIFGCFMLILAQIPSFHSLRHINLVSLVLCLAYSAGATIGSIYIGDSSKGPEKDYSLKGDSVNRLFGIFNAIAIIATTYGNGIIPEIQATLAPPVKGKMLKGLCVCYLVLIVTFFSVSVSGYWAFGNESEGLILSNFVDNGKPLVPKWFIYMTNIFTITQLSAVGVVYLQPTNEVLEQTFGDPKSPEFSKRNVIPRVISRSLAIAISTTIAAMLPFFGDINSLIGAFGFIPLDFILPMVFYNLTFKPSKRSPVFWLNVIIVVAFSALGAIAAVAAVRQIVLDAKNY

SEQ ID NO: 58628 - DNA, 1191 bp, Glycine max
  misc_feature (1)..(1191): Ceres Seq. ID no. 15225313
accggggccccnnncgagtcagctacgtaggccccccccccccactttttctttggcagcttagccttcctattttggaaaccctcttcactgctctcccaccttttttgtgtgtatgtgtatgagcttctcttctactctattcactgcactcttattaataaatatcagtgcttggaaagcagaagagaagatccatagctaagatagatctcgagatgggtcgtggcaagattgagataaagttgattgagaaccccaccaacaggcaagtcacctactccaagcgaaggaatggtatcttcaagaaagctcatgaactcagtgttctctgtgatgccaaggtttcactcatcatgttctctaaaaacaacaagatgcatgaatacattagccctggcctcacgacaaaaaagatcattgatcagtatcagaagactttgggggatattgatctgtggcattctcactatgagaaaatgcttgaaaacttgaagaagctgaaagatattaacaataagctcaggagacagatcaggcataggataggtgagggcttggacatggacgacatgagcttccagcaactgcgcactcttgaagaagatatggtttcatccatagggaaaatacgcgaacgaaagtttcacgtgatcaaaactcggactgatacctgtaggaaaaaggttaaaagcctgaagcagatgaatggaaatctgctgcttgaacttgaaaagtgtgtgatccatccacaatttcttttgcacgatgaaggagacgaggaatcagcagcagcagcagcagcagcagcagttgcactggccaacggtgcctccaccctgtatgcattctgtcatcagcaccattctcatctgaaccttttctcccaccattctaatggagaagagcaaccctttaaaactgatcatgaccttcgccttgcttgatccagtgcaacaattaactagcaataatgtaaattaactagctagccagcactaagcacttgttatttatgctttaatttgtattaattggacctgttaaacccaactttgcttgcaacctctctagtttctatccaggtagagaattagctaagcttatatagtgtttggcaagagcgtgctatgaaaaacagaaagactgtactttatttgttattataagtttacattgagtgattatgtt

SEQ ID NO: 58629 - protein, 242 aa, Glycine max
  peptide (1)..(242): Ceres Seq. ID no. 15225314
  misc_feature (71)..(172): Pfam Name: K-box region Pfam Description: K-box region
  misc_feature (4)..(221): Homolog of NCBI NO: 24967132 NR Description: TDR6 transcription factor [Lycopersicon
  misc_feature (4)..(221): Homolog of NCBI NO: 19386 NR Description: TDR6 [Lycopersicon esculentum]
  misc_feature (4)..(221): Homolog of NCBI NO: 542029 NR Description: MADS box protein TDR6 - tomato (fragment)
  misc_feature (1)..(228): Homolog of NCBI NO: 15216293 NR Description: MADS-box protein [Rosa rugosa]
  misc_feature (1)..(241): Homolog of NCBI NO: 28883608 NR Description: APETALA3 [Populus tomentosa]
  misc_feature (1)..(241): Homolog of NCBI NO: 34921973 NR Description: APETALA3 [Populus tomentosa]
  misc_feature (1)..(241): Homolog of NCBI NO: 10835358 NR Description: PTD protein [Populus balsamifera subsp.
  misc_feature (1)..(242): Homolog of NCBI NO: 16973294 NR Description: B-type MADS box protein [Malus x domestica]
  misc_feature (1)..(227): Homolog of NCBI NO: 4218169 NR Description: MADs-box protein, GDEF1 [Gerbera hybrid cv.
  misc_feature (1)..(242): Homolog of NCBI NO: 22775408 NR Description: MADS-box protein [Malus x domestica]
MGRGKIEIKLIENPTNRQVTYSKRRNGIFKKAHELSVLCDAKVSLIMFSKNNKMHEYISPGLTTKKIIDQYQKTLGDIDLWHSHYEKMLENLKKLKDINNKLRRQIRHRIGEGLDMDDMSFQQLRTLEEDMVSSIGKIRERKFHVIKTRTDTCRKKVKSLKQMNGNLLLELEKCVIHPQFLLHDEGDEESAAAAAAAAVALANGASTLYAFCHQHHSHLNLFSHHSNGEEQPFKTDHDLRLA

SEQ ID NO: 58630 - protein, 196 aa, Glycine max
  peptide (1)..(196): Ceres Seq. ID no. 15225315
  misc_feature (25)..(126): Pfam Name: K-box region Pfam Description: K-box region
  misc_feature (1)..(175): Homolog of NCBI NO: 24967132 NR Description: TDR6 transcription factor [Lycopersicon
  misc_feature (1)..(175): Homolog of NCBI NO: 19386 NR Description: TDR6 [Lycopersicon esculentum]
  misc_feature (1)..(175): Homolog of NCBI NO: 542029 NR Description: MADS box protein TDR6 - tomato (fragment)
  misc_feature (1)..(182): Homolog of NCBI NO: 15216293 NR Description: MADS-box protein [Rosa rugosa]
  misc_feature (1)..(195): Homolog of NCBI NO: 28883608 NR Description: APETALA3 [Populus tomentosa]
  misc_feature (1)..(195): Homolog of NCBI NO: 34921973 NR Description: APETALA3 [Populus tomentosa]
  misc_feature (1)..(195): Homolog of NCBI NO: 10835358 NR Description: PTD protein [Populus balsamifera subsp.
  misc_feature (1)..(196): Homolog of NCBI NO: 16973294 NR Description: B-type MADS box protein [Malus x domestica]
  misc_feature (1)..(181): Homolog of NCBI NO: 4218169 NR Description: MADs-box protein, GDEF1 [Gerbera hybrid cv.
  misc_feature (1)..(196): Homolog of NCBI NO: 22775408 NR Description: MADS-box protein [Malus x domestica]
MFSKNNKMHEYISPGLTTKKIIDQYQKTLGDIDLWHSHYEKMLENLKKLKDINNKLRRQIRHRIGEGLDMDDMSFQQLRTLEEDMVSSIGKIRERKFHVIKTRTDTCRKKVKSLKQMNGNLLLELEKCVIHPQFLLHDEGDEESAAAAAAAAVALANGASTLYAFCHQHHSHLNLFSHHSNGEEQPFKTDHDLRLA

SEQ ID NO: 58631 - protein, 189 aa, Glycine max
  peptide (1)..(189): Ceres Seq. ID no. 15225316
  misc_feature (18)..(119): Pfam Name: K-box region Pfam Description: K-box region
  misc_feature (1)..(168): Homolog of NCBI NO: 24967132 NR Description: TDR6 transcription factor [Lycopersicon
  misc_feature (1)..(168): Homolog of NCBI NO: 19386 NR Description: TDR6 [Lycopersicon esculentum]
  misc_feature (1)..(168): Homolog of NCBI NO: 542029 NR Description: MADS box protein TDR6 - tomato (fragment)
  misc_feature (1)..(175): Homolog of NCBI NO: 15216293 NR Description: MADS-box protein [Rosa rugosa]
  misc_feature (1)..(188): Homolog of NCBI NO: 28883608 NR Description: APETALA3 [Populus tomentosa]
  misc_feature (1)..(188): Homolog of NCBI NO: 34921973 NR Description: APETALA3 [Populus tomentosa]
  misc_feature (1)..(188): Homolog of NCBI NO: 10835358 NR Description: PTD protein [Populus balsamifera subsp.
  misc_feature (1)..(189): Homolog of NCBI NO: 16973294 NR Description: B-type MADS box protein [Malus x domestica]
  misc_feature (1)..(174): Homolog of NCBI NO: 4218169 NR Description: MADs-box protein, GDEF1 [Gerbera hybrid cv.
  misc_feature (1)..(189): Homolog of NCBI NO: 22775408 NR Description: MADS-box protein [Malus x domestica]
MHEYISPGLTTKKIIDQYQKTLGDIDLWHSHYEKMLENLKKLKDINNKLRRQIRHRIGEGLDMDDMSFQQLRTLEEDMVSSIGKIRERKFHVIKTRTDTCRKKVKSLKQMNGNLLLELEKCVIHPQFLLHDEGDEESAAAAAAAAVALANGASTLYAFCHQHHSHLNLFSHHSNGEEQPFKTDHDLRLA

SEQ ID NO: 58632 - DNA, 1761 bp, Glycine max
  misc_feature (1)..(1761): Ceres Seq. ID no. 14312300
gagcttgagagacaaatgtggcacataagagaacagattgggagagaaaaaagtacacgacccgagaaagcaaaagggcatgcacgtcatcgtggaaagaaagaaaactcttctcttcttcccagagaaagaaagaaacacatttcccttccaaggaaagaaaataaaaacgtaacatcattggaatcaaaatcaggatgatgggtagttgcccttgtttcgggttgtggagctggaagaccaaagggaagaccgtcaaggctcaggaggaacaaaacaagaatcgcaaatctctcgatgtctctgaaacttcttcaggacttggaccagaagaaaacccaacagagagtgacagttctcataaggctcagatatttaccttccgagagcttgcaacagcaacaaaaaattttagggatgaaacctttattgggcaaggtggatttggcactgtttataaaggaacaatcggaaaaataaatcaggttgtagctgttaaaagacttgatactactgttgtccaaggggagaaagaatttctggtggaagttctcatgctttcccttctacgccattccaaccttgttaatatgattggttactgtgctgaaggggatcaacgtcttcttgtgtatgagtacatggctttaggatctttagaatctcatcttcatgatgtttcacctgatgaagaaccactcgattggaataccagaatgatgatagcttttggggcagcaaaaggactaaattatctgcaccatgaagcaaagccctctgttatatacagggatctgaaatcatccaacatactattggatgaaggtttccatccaaaactttctgattttgggcttgcaaaatttggtccaaccggagaacaatcgtatgttgccactagggtcatgggaacacaaggttactgtgcccctgaatatgccactagtggaaaattaacgatgagatctgacatttacagttttggggttgtgttattggaactaattactggacgcagagcatatgatgataatggtggccctgaaaagcatcttgtagaatgggcacgcccaatgtttagagacaaaaagagttatccaagatttgcagatccgcggcttaaaggttgctacccaggaacagctctctcgaatgccattgaattggcagccatgtgtcttcgtgaagagccacgtcaacggcctaatgcaggtcatatagtggaagctctcaaattcttgtcatccaaaccatataccccgaaagtatccattacagtcaacacaacaggtatggagagtggagattctccaaaagaaacaccagcgattttgcctcaagaatcagaaagagagcgagctgttgcagaggccaagctgtggggtgagacatggaggcagagacgacaaagtgagcaaagtagtcctgaaggaagcaaatagggggtaccagaaagaaaaccttcaaagcagattagaagtggctagtatctaaaaaggtatagggaaagtaaagaaacttcaaaagataatgtgttcaagatttaaatgtagctaataaaattagttggccagctaaatttaaaaagtgtcgtttaggcacttgtgaatttgaggctcaactttacatgctttgacatgagtttttagattttatggttgctcttgctttgctgcattgaaaaatatgatacattactactacttctatgttctaactctaactgctggagcctggaagcaaacacaaattttttaacag

SEQ ID NO: 58633 - protein, 414 aa, Glycine max
  peptide (1)..(414): Ceres Seq. ID no. 14312301
  misc_feature (2)..(355): Homolog of NCBI NO: 11259782 NR Description: protein kinase-like - Arabidopsis thaliana
  misc_feature (368)..(414): Homolog of NCBI NO: 21740745 NR Description: OSJNBa0072K14.3 [Oryza sativa (japonica
  misc_feature (290)..(365): Homolog of NCBI NO: 21740745 NR Description: OSJNBa0072K14.3 [Oryza sativa (japonica
  misc_feature (57)..(289): Homolog of NCBI NO: 21740745 NR Description: OSJNBa0072K14.3 [Oryza sativa (japonica
  misc_feature (361)..(403): Homolog of NCBI NO: 34907210 NR Description: putative serine/threonine kinase PBS1 protein
  misc_feature (25)..(359): Homolog of NCBI NO: 34907210 NR Description: putative serine/threonine kinase PBS1 protein
  misc_feature (365)..(414): Homolog of NCBI NO: 15240038 NR Description: protein kinase family [Arabidopsis thaliana]
  misc_feature (36)..(355): Homolog of NCBI NO: 15240038 NR Description: protein kinase family [Arabidopsis thaliana]
  misc_feature (369)..(405): Homolog of NCBI NO: 15238886 NR Description: protein kinase family [Arabidopsis thaliana]
  misc_feature (1)..(385): Homolog of NCBI NO: 15238886 NR Description: protein kinase family [Arabidopsis thaliana]
MMGSCPCFGLWSWKTKGKTVKAQEEQNKNRKSLDVSETSSGLGPEENPTESDSSHKAQIFTFRELATATKNFRDETFIGQGGFGTVYKGTIGKINQVVAVKRLDTTVVQGEKEFLVEVLMLSLLRHSNLVNMIGYCAEGDQRLLVYEYMALGSLESHLHDVSPDEEPLDWNTRMMIAFGAAKGLNYLHHEAKPSVIYRDLKSSNILLDEGFHPKLSDFGLAKFGPTGEQSYVATRVMGTQGYCAPEYATSGKLTMRSDIYSFGVVLLELITGRRAYDDNGGPEKHLVEWARPMFRDKKSYPRFADPRLKGCYPGTALSNAIELAAMCLREEPRQRPNAGHIVEALKFLSSKPYTPKVSITVNTTGMESGDSPKETPAILPQESERERAVAEAKLWGETWRQRRQSEQSSPEGSK

SEQ ID NO: 58634 - protein, 413 aa, Glycine max
  peptide (1)..(413): Ceres Seq. ID no. 14312302
  misc_feature (1)..(354): Homolog of NCBI NO: 11259782 NR Description: protein kinase-like - Arabidopsis thaliana
  misc_feature (367)..(413): Homolog of NCBI NO: 21740745 NR Description: OSJNBa0072K14.3 [Oryza sativa (japonica
  misc_feature (289)..(364): Homolog of NCBI NO: 21740745 NR Description: OSJNBa0072K14.3 [Oryza sativa (japonica
  misc_feature (56)..(288): Homolog of NCBI NO: 21740745 NR Description: OSJNBa0072K14.3 [Oryza sativa (japonica
  misc_feature (360)..(402): Homolog of NCBI NO: 34907210 NR Description: putative serine/threonine kinase PBS1 protein
  misc_feature (24)..(358): Homolog of NCBI NO: 34907210 NR Description: putative serine/threonine kinase PBS1 protein
  misc_feature (364)..(413): Homolog of NCBI NO: 15240038 NR Description: protein kinase family [Arabidopsis thaliana]
  misc_feature (35)..(354): Homolog of NCBI NO: 15240038 NR Description: protein kinase family [Arabidopsis thaliana]
  misc_feature (368)..(404): Homolog of NCBI NO: 15238886 NR Description: protein kinase family [Arabidopsis thaliana]
  misc_feature (1)..(384): Homolog of NCBI NO: 15238886 NR Description: protein kinase family [Arabidopsis thaliana]
MGSCPCFGLWSWKTKGKTVKAQEEQNKNRKSLDVSETSSGLGPEENPTESDSSHKAQIFTFRELATATKNFRDETFIGQGGFGTVYKGTIGKINQVVAVKRLDTTVVQGEKEFLVEVLMLSLLRHSNLVNMIGYCAEGDQRLLVYEYMALGSLESHLHDVSPDEEPLDWNTRMMIAFGAAKGLNYLHHEAKPSVIYRDLKSSNILLDEGFHPKLSDFGLAKFGPTGEQSYVATRVMGTQGYCAPEYATSGKLTMRSDIYSFGVVLLELITGRRAYDDNGGPEKHLVEWARPMFRDKKSYPRFADPRLKGCYPGTALSNAIELAAMCLREEPRQRPNAGHIVEALKFLSSKPYTPKVSITVNTTGMESGDSPKETPAILPQESERERAVAEAKLWGETWRQRRQSEQSSPEGSK

SEQ ID NO: 58635 - protein, 295 aa, Glycine max
  peptide (1)..(295): Ceres Seq. ID no. 14312303
  misc_feature (1)..(236): Homolog of NCBI NO: 11259782 NR Description: protein kinase-like - Arabidopsis thaliana
  misc_feature (249)..(295): Homolog of NCBI NO: 21740745 NR Description: OSJNBa0072K14.3 [Oryza sativa (japonica
  misc_feature (171)..(246): Homolog of NCBI NO: 21740745 NR Description: OSJNBa0072K14.3 [Oryza sativa (japonica
  misc_feature (1)..(170): Homolog of NCBI NO: 21740745 NR Description: OSJNBa0072K14.3 [Oryza sativa (japonica
  misc_feature (242)..(284): Homolog of NCBI NO: 34907210 NR Description: putative serine/threonine kinase PBS1 protein
  misc_feature (1)..(240): Homolog of NCBI NO: 34907210 NR Description: putative serine/threonine kinase PBS1 protein
  misc_feature (246)..(295): Homolog of NCBI NO: 15240038 NR Description: protein kinase family [Arabidopsis thaliana]
  misc_feature (1)..(236): Homolog of NCBI NO: 15240038 NR Description: protein kinase family [Arabidopsis thaliana]
  misc_feature (250)..(286): Homolog of NCBI NO: 15238886 NR Description: protein kinase family [Arabidopsis thaliana]
  misc_feature (1)..(266): Homolog of NCBI NO: 15238886 NR Description: protein kinase family [Arabidopsis thaliana]
MLSLLRHSNLVNMIGYCAEGDQRLLVYEYMALGSLESHLHDVSPDEEPLDWNTRMMIAFGAAKGLNYLHHEAKPSVIYRDLKSSNILLDEGFHPKLSDFGLAKFGPTGEQSYVATRVMGTQGYCAPEYATSGKLTMRSDIYSFGVVLLELITGRRAYDDNGGPEKHLVEWARPMFRDKKSYPRFADPRLKGCYPGTALSNAIELAAMCLREEPRQRPNAGHIVEALKFLSSKPYTPKVSITVNTTGMESGDSPKETPAILPQESERERAVAEAKLWGETWRQRRQSEQSSPEGSK

SEQ ID NO: 58636 - DNA, 1688 bp, Glycine max
  misc_feature (1)..(1688): Ceres Seq. ID no. 14308091
gaaacaaagtagagagcaaaagaatggtgggaacagaggcagcagaaaaaatgagtgtcaatgaagaaaaagatttgattagcactcttcctgattcagttcttgtctctatcatttctctccttccctgcaacgaaggcgtgagaacctgtgttctttccaaccgatggaaaaccatgtggaaacatgttcctcaccttagcttggatcagagcaaaatgttgaagcttttgatccgagcttatcttcgcgggctataccttagcacgcgtcttgaaatggcttataatcgtcgtaggggagatcaagaaaaagattttgaagacttggatgaaattgctaaagcagaggtgttgattgattcagtgttggattcacacgttgtttctttggaaagttgtactattcggcacctgccagaaagttgtgctagtggcaaagctgttatgtggatcgagaaactccttaagcaaaataaggtgaagaagctttcaatggagcgagatgacactgattatttgggctctgaggaaagtttgccacgggttctgagatatcatggaaggactctagacttgccttttaagattttctcaggctttgaggcacttgagttgaagaactattttctcaagacttcgccctcgagtaatgattcttgccaggttcttacaactttagcctttaggaacatgagtgttaagaaggatgcttgggaagggattttgtcttgttgcctgtgtcttgaaaatttaacacttgaaaatttaacacatgataactgcaagttgatgagagaggttactatcaatagtccaagactcaaatttctcagaatttgtagaatgcagatgaatgggtttaaggtttctgctgtgaaccttgaggtctttgagattgatactgttgtttgtatgccgaaaagactacttacttttgaaatcccaaaggttcatctgcttcgatctcgctctgatttgaaaattagagggcaatatatttgttgggttgggagcaaactgttgcagtcgagaaatattctacacactagcagccagagtcatcaaggaacaacttcgagctttgctggaatatttgagaacctggctactctatgtattgattttgatttgaaaacagtaaaaaatgccataaccctcttttcagctcttaaggcatgcccaaagttgcaaaatcttgaaattaatagcgagattaatgacaacgcagtggattactatgatcaacatgatgaggatgatgcaatggaatactaccgtagaaaggagccatgtgagtgcatcgatcaacaactaaagacccttagcataatgggatttgcaggaaaaaaactgaggtggaattccttaaatatgtaataacaaatggtgaagtaatgaagaagattacaatttggtttgttgatgattgctcatggattcatgccgctgaaactggatgtttgctatcatttcagacagcctctccaaacttgtccatcattctcaatcctgggccattttacatggcaaatgtgggtgggaactttgaaacatggctctcaactctaagggagtaggaaatttaccggtgaccatggccaaactatgtgtttcaaattctattttagtcttgaactttgaatatttctagtattacgtttataacactaaagacagattagtggc

SEQ ID NO: 58637 - protein, 458 aa, Glycine max
  peptide (1)..(458): Ceres Seq. ID no. 14308092
  misc_feature (26)..(66): Pfam Name: F-box domain Pfam Description: F-box domain
  misc_feature (14)..(110): Homolog of NCBI NO: 6979337 NR Description: hypothetical protein [Oryza sativa]
  misc_feature (24)..(103): Homolog of NCBI NO: 30699552 NR Description: expressed protein [Arabidopsis thaliana]
  misc_feature (109)..(346): Homolog of NCBI NO: 30699552 NR Description: expressed protein [Arabidopsis thaliana]
  misc_feature (24)..(103): Homolog of NCBI NO: 25406710 NR Description: hypothetical protein F23A5.32 [imported] -
  misc_feature (109)..(450): Homolog of NCBI NO: 25406710 NR Description: hypothetical protein F23A5.32 [imported] -
NKVESKRMVGTEAAEKMSVNEEKDLISTLPDSVLVSIISLLPCNEGVRTCVLSNRWKTMWKHVPHLSLDQSKMLKLLIRAYLRGLYLSTRLEMAYNRRRGDQEKDFEDLDEIAKAEVLIDSVLDSHVVSLESCTIRHLPESCASGKAVMWIEKLLKQNKVKKLSMERDDTDYLGSEESLPRVLRYHGRTLDLPFKIFSGFEALELKNYFLKTSPSSNDSCQVLTTLAFRNMSVKKDAWEGILSCCLCLENLTLENLTHDNCKLMREVTINSPRLKFLRICRMQMNGFKVSAVNLEVFEIDTVVCMPKRLLTFEIPKVHLLRSRSDLKIRGQYICWVGSKLLQSRNILHTSSQSHQGTTSSFAGIFENLATLCIDFDLKTVKNAITLFSALKACPKLQNLEINSEINDNAVDYYDQHDEDDAMEYYRRKEPCECIDQQLKTLSIMGFAGKKLRWNSLNM

SEQ ID NO: 58638 - protein, 451 aa, Glycine max
  peptide (1)..(451): Ceres Seq. ID no. 14308093
  misc_feature (19)..(59): Pfam Name: F-box domain Pfam Description: F-box domain
  misc_feature (7)..(103): Homolog of NCBI NO: 6979337 NR Description: hypothetical protein [Oryza sativa]
  misc_feature (17)..(96): Homolog of NCBI NO: 30699552 NR Description: expressed protein [Arabidopsis thaliana]
  misc_feature (102)..(339): Homolog of NCBI NO: 30699552 NR Description: expressed protein [Arabidopsis thaliana]
  misc_feature (17)..(96): Homolog of NCBI NO: 25406710 NR Description: hypothetical protein F23A5.32 [imported] -
  misc_feature (102)..(443): Homolog of NCBI NO: 25406710 NR Description: hypothetical protein F23A5.32 [imported] -
MVGTEAAEKMSVNEEKDLISTLPDSVLVSIISLLPCNEGVRTCVLSNRWKTMWKHVPHLSLDQSKMLKLLIRAYLRGLYLSTRLEMAYNRRRGDQEKDFEDLDEIAKAEVLIDSVLDSHVVSLESCTIRHLPESCASGKAVMWIEKLLKQNKVKKLSMERDDTDYLGSEESLPRVLRYHGRTLDLPFKIFSGFEALELKNYFLKTSPSSNDSCQVLTTLAFRNMSVKKDAWEGILSCCLCLENLTLENLTHDNCKLMREVTINSPRLKFLRICRMQMNGFKVSAVNLEVFEIDTVVCMPKRLLTFEIPKVHLLRSRSDLKIRGQYICWVGSKLLQSRNILHTSSQSHQGTTSSFAGIFENLATLCIDFDLKTVKNAITLFSALKACPKLQNLEINSEINDNAVDYYDQHDEDDAMEYYRRKEPCECIDQQLKTLSIMGFAGKKLRWNSLNM

SEQ ID NO: 58639 - protein, 442 aa, Glycine max
  peptide (1)..(442): Ceres Seq. ID no. 14308094
  misc_feature (10)..(50): Pfam Name: F-box domain Pfam Description: F-box domain
  misc_feature (1)..(94): Homolog of NCBI NO: 6979337 NR Description: hypothetical protein [Oryza sativa]
  misc_feature (8)..(87): Homolog of NCBI NO: 30699552 NR Description: expressed protein [Arabidopsis thaliana]
  misc_feature (93)..(330): Homolog of NCBI NO: 30699552 NR Description: expressed protein [Arabidopsis thaliana]
  misc_feature (8)..(87): Homolog of NCBI NO: 25406710 NR Description: hypothetical protein F23A5.32 [imported] -
  misc_feature (93)..(434): Homolog of NCBI NO: 25406710 NR Description: hypothetical protein F23A5.32 [imported] -
MSVNEEKDLISTLPDSVLVSIISLLPCNEGVRTCVLSNRWKTMWKHVPHLSLDQSKMLKLLIRAYLRGLYLSTRLEMAYNRRRGDQEKDFEDLDEIAKAEVLIDSVLDSHVVSLESCTIRHLPESCASGKAVMWIEKLLKQNKVKKLSMERDDTDYLGSEESLPRVLRYHGRTLDLPFKIFSGFEALELKNYFLKTSPSSNDSCQVLTTLAFRNMSVKKDAWEGILSCCLCLENLTLENLTHDNCKLMREVTINSPRLKFLRICRMQMNGFKVSAVNLEVFEIDTVVCMPKRLLTFEIPKVHLLRSRSDLKIRGQYICWVGSKLLQSRNILHTSSQSHQGTTSSFAGIFENLATLCIDFDLKTVKNAITLFSALKACPKLQNLEINSEINDNAVDYYDQHDEDDAMEYYRRKEPCECIDQQLKTLSIMGFAGKKLRWNSLNM

SEQ ID NO: 58640 - DNA, 1387 bp, Glycine max
  misc_feature (1)..(1387): Ceres Seq. ID no. 15176219
gaataatttatctccattaacatcccaagcagtcccaagaaagaacagggcaaaaacagaatagaaacagagatgggttgcaatagctccaaggctgaaccaccgttggaaaactccaatcatcatcatcatcatcatcatcatgcagagttccaaaaacccaaaactctcaaacaagaagtagtgctgcagattccaggatgcaaagttcatctgatggacgaaggcgaagccatagaactggcacaaggtcacttcacaatcatgaagatcatggacaagaacgtgccactagcaaccaccataaaagttggaaacagtgttcagtggcctctaacgaaagatgagccagtggtgaaggtggatgctcttcactacctgttctctctgcctgtaaaagatggtggtgagcctctaagctatggtgtcacctttccagaacagtgctatgggaacatggggatgttagattcttttctgaaggatcaatcttgcttttctggtttggaaaggaataagaagagtgatcttaattgggagaagtttgctccaagggttgaagattacaatcattttctggctagggcaattgcaggagggactggccagattgttaagggtatcttcatgtgcagcaatgcttacaccaaccaggtccaaaaaggaggggaaacgatcctaaatactgctgcagaaaagaacaatggtagcgtggtcacagaaagtatgaaccacaggagtgatgccacaaagaataatgcaacgaacgaaaacctcaaacgagtgagaaagctgacaaatatgacagaaaagttaaccaaatctttgcttgatggtgttggaataatgagtggatcaatgatggctcctgtgctgaaatcccaaccaggacaggcattcctaaagatgctccctggagaggtgctgttggcttcccttgatgcagtcaatagagtttttgaagcagctgaagctgctgaaaaacaaaccttttcagccacctcccaagctgcaaccagaatggtttctaacaggtttggggaagaagcaggggaggctactgagcatgtgtttgcaactgcaggacattctgttaacactgcttggaatgtctctaagatacggaaggccatcaatccagcctcttcagcaaatgctgcaggagcactgagaaattctgccaagaatagaaatgttatatattaaattccaatcatgttgctttatgtttgacaatggtgaaggcataaaattttgcctatatatattgctaaacctttttggctgttatatgtaagtattaatgtaggtattgttcataccttagaagaaacaaactatataaagtgtacacatgaaaaagctaagatagcattattatgctttc

SEQ ID NO: 58641 - protein, 377 aa, Glycine max
  peptide (1)..(377): Ceres Seq. ID no. 15176220
  misc_feature (149)..(359): Homolog of NCBI NO: 7486396 NR Description: hypothetical protein F4B14.250 - Arabidopsis
  misc_feature (30)..(153): Homolog of NCBI NO: 18419759 NR Description: hypothetical protein [Arabidopsis thaliana]
  misc_feature (149)..(373): Homolog of NCBI NO: 18419759 NR Description: hypothetical protein [Arabidopsis thaliana]
  misc_feature (30)..(143): Homolog of NCBI NO: 34910728 NR Description: P0690B02.29 [Oryza sativa (japonica
  misc_feature (151)..(373): Homolog of NCBI NO: 34910728 NR Description: P0690B02.29 [Oryza sativa (japonica
  misc_feature (5)..(313): Homolog of NCBI NO: 30683270 NR Description: expressed protein [Arabidopsis thaliana]
  misc_feature (5)..(371): Homolog of NCBI NO: 25407536 NR Description: hypothetical protein AT4g15450 [imported] -
  misc_feature (5)..(371): Homolog of NCBI NO: 7488048 NR Description: probable allene oxide synthase - Arabidopsis
  misc_feature (5)..(371): Homolog of NCBI NO: 26450712 NR Description: unknown protein [Arabidopsis thaliana]
  misc_feature (1)..(371): Homolog of NCBI NO: 15233098 NR Description: expressed protein [Arabidopsis thaliana]
MGCNSSKAEPPLENSNHHHHHHHHAEFQKPKTLKQEVVLQIPGCKVHLMDEGEAIELAQGHFTIMKIMDKNVPLATTIKVGNSVQWPLTKDEPVVKVDALHYLFSLPVKDGGEPLSYGVTFPEQCYGNMGMLDSFLKDQSCFSGLERNKKSDLNWEKFAPRVEDYNHFLARAIAGGTGQIVKGIFMCSNAYTNQVQKGGETILNTAAEKNNGSVVTESMNHRSDATKNNATNENLKRVRKLTNMTEKLTKSLLDGVGIMSGSMMAPVLKSQPGQAFLKMLPGEVLLASLDAVNRVFEAAEAAEKQTFSATSQAATRMVSNRFGEEAGEATEHVFATAGHSVNTAWNVSKIRKAINPASSANAAGALRNSAKNRNVIY

SEQ ID NO: 58642 - protein, 329 aa, Glycine max
  peptide (1)..(329): Ceres Seq. ID no. 15176221
  misc_feature (101)..(311): Homolog of NCBI NO: 7486396 NR Description: hypothetical protein F4B14.250 - Arabidopsis
  misc_feature (1)..(105): Homolog of NCBI NO: 18419759 NR Description: hypothetical protein [Arabidopsis thaliana]
  misc_feature (101)..(325): Homolog of NCBI NO: 18419759 NR Description: hypothetical protein [Arabidopsis thaliana]
  misc_feature (1)..(95): Homolog of NCBI NO: 34910728 NR Description: P0690B02.29 [Oryza sativa (japonica
  misc_feature (103)..(325): Homolog of NCBI NO: 34910728 NR Description: P0690B02.29 [Oryza sativa (japonica
  misc_feature (1)..(265): Homolog of NCBI NO: 30683270 NR Description: expressed protein [Arabidopsis thaliana]
  misc_feature (1)..(323): Homolog of NCBI NO: 25407536 NR Description: hypothetical protein AT4g15450 [imported] -
  misc_feature (1)..(323): Homolog of NCBI NO: 7488048 NR Description: probable allene oxide synthase - Arabidopsis
  misc_feature (1)..(323): Homolog of NCBI NO: 26450712 NR Description: unknown protein [Arabidopsis thaliana]
  misc_feature (1)..(323): Homolog of NCBI NO: 15233098 NR Description: expressed protein [Arabidopsis thaliana]
MDEGEAIELAQGHFTIMKIMDKNVPLATTIKVGNSVQWPLTKDEPVVKVDALHYLFSLPVKDGGEPLSYGVTFPEQCYGNMGMLDSFLKDQSCFSGLERNKKSDLNWEKFAPRVEDYNHFLARAIAGGTGQIVKGIFMCSNAYTNQVQKGGETILNTAAEKNNGSVVTESMNHRSDATKNNATNENLKRVRKLTNMTEKLTKSLLDGVGIMSGSMMAPVLKSQPGQAFLKMLPGEVLLASLDAVNRVFEAAEAAEKQTFSATSQAATRMVSNRFGEEAGEATEHVFATAGHSVNTAWNVSKIRKAINPASSANAAGALRNSAKNRNVIY

SEQ ID NO: 58643 - protein, 313 aa, Glycine max
  peptide (1)..(313): Ceres Seq. ID no. 15176222
  misc_feature (85)..(295): Homolog of NCBI NO: 7486396 NR Description: hypothetical protein F4B14.250 - Arabidopsis
  misc_feature (1)..(89): Homolog of NCBI NO: 18419759 NR Description: hypothetical protein [Arabidopsis thaliana]
  misc_feature (85)..(309): Homolog of NCBI NO: 18419759 NR Description: hypothetical protein [Arabidopsis thaliana]
  misc_feature (1)..(79): Homolog of NCBI NO: 34910728 NR Description: P0690B02.29 [Oryza sativa (japonica
  misc_feature (87)..(309): Homolog of NCBI NO: 34910728 NR Description: P0690B02.29 [Oryza sativa (japonica
  misc_feature (1)..(249): Homolog of NCBI NO: 30683270 NR Description: expressed protein [Arabidopsis thaliana]
  misc_feature (1)..(307): Homolog of NCBI NO: 25407536 NR Description: hypothetical protein AT4g15450 [imported] -
  misc_feature (1)..(307): Homolog of NCBI NO: 7488048 NR Description: probable allene oxide synthase - Arabidopsis
  misc_feature (1)..(307): Homolog of NCBI NO: 26450712 NR Description: unknown protein [Arabidopsis thaliana]
  misc_feature (1)..(307): Homolog of NCBI NO: 15233098 NR Description: expressed protein [Arabidopsis thaliana]
MKIMDKNVPLATTIKVGNSVQWPLTKDEPVVKVDALHYLFSLPVKDGGEPLSYGVTFPEQCYGNMGMLDSFLKDQSCFSGLERNKKSDLNWEKFAPRVEDYNHFLARAIAGGTGQIVKGIFMCSNAYTNQVQKGGETILNTAAEKNNGSVVTESMNHRSDATKNNATNENLKRVRKLTNMTEKLTKSLLDGVGIMSGSMMAPVLKSQPGQAFLKMLPGEVLLASLDAVNRVFEAAEAAEKQTFSATSQAATRMVSNRFGEEAGEATEHVFATAGHSVNTAWNVSKIRKAINPASSANAAGALRNSAKNRNVIY

SEQ ID NO: 58644 - DNA, 1402 bp, Glycine max
  misc_feature (1)..(1402): Ceres Seq. ID no. 13638136
gatagattatttctcttctcttccctttcttaggttaaaagttggaactgagtgattacccaactaatgttatgatcagttggaagcgttggcaagaaagaatatgtaatagtggtgttgtttgttcattttggtcaaagaaatagtatctgggtacccaggatattgtagttgtaagatgggttatctcaattcagttttgtcatcttcaagccaggttcatgttgcagatgatgcaattgtgagcggcgggggtctaagtcacaatggaaaattcagctacgggtatgctagctctcctggcaagagatcttcaatggaagatttttatgagacaagaattgatggtgttgaaggtgaaattgttggccttttcggagtttttgatggtcatggtggtgctcgtgctgctgagtatgtcaagaaaaacctgtttagtaatttgatcagtcacccaaaattcatttctgacaccaaatcagcaataactgatgcatacaatcatactgacactgagttgctgaaatcagaaaatagccataacagagatgcaggatcaactgcttccactgctattttagttggtgaccgcttgcttgttgcaaatgttggggattccagagctgttatatgcaggggtggtaatgccattgctgtttctcgagatcacaaaccagaccaaactgatgagaggcaaaggattgaagaagcaggaggctttgttatgtgggcaggaacttggagagttggaggtgttcttgctgtttctcgtgcatttggtgatagactcctgaagcagtatgttgttgctgatccagaaattcaggaagaaaaagttgacagctcccttgagtttcttattctggccagtgacgggctatgggatgttgtctctaatgaggaagctgttgctatgataaagccaattgaggatgcagaggaggcagcaaagaggctgatgcaagaagcatatcagagaggtagtgctgacaatatcacatgtgttgttgttcgtttcttgatgaaccaaggtggatccaaagagttagtagcttatcctcataatagtagctctgcgggtaagaatccttcagtagaaggtttgtgtgatatataggtataggtgagttgtggatccaaaagatgctgagacttggtaaaaatcggtttatagttgggttcctgataagcaatctagtagttgtgttgtactacgtcatgcaagaatttatggtcctcttgcataaaactattcattatttgttagctaggaaatgtatgtaaggagtgtgaccagagttctcattgcacctgctctgcatgtaaacatggttcttttattagtccatttaatttccttagggttattagtttattcagtactatttgtctattgtgaatt

SEQ ID NO: 58645 - protein, 312 aa, Glycine max
  peptide (1)..(312): Ceres Seq. ID no. 13638137
  misc_feature (33)..(273): Pfam Name: Protein phosphatase 2C Pfam Description: Protein phosphatase 2C
  misc_feature (10)..(280): Homolog of NCBI NO: 30693757 NR Description: protein phosphatase 2C (PP2C), putative
  misc_feature (47)..(287): Homolog of NCBI NO: 19387276 NR Description: putative protein phosphatase 2C
  misc_feature (1)..(287): Homolog of NCBI NO: 38345197 NR Description: OSJNBa0015K02.7 [Oryza sativa (japonica
  misc_feature (1)..(302): Homolog of NCBI NO: 11358728 NR Description: protein phosphatase 2C-like protein - Arabidopsis
  misc_feature (205)..(286): Homolog of NCBI NO: 7486331 NR Description: hypothetical protein F28M20.60 - Arabidopsis
  misc_feature (28)..(216): Homolog of NCBI NO: 7486331 NR Description: hypothetical protein F28M20.60 - Arabidopsis
  misc_feature (1)..(287): Homolog of NCBI NO: 15238651 NR Description: protein phosphatase 2C (PP2C), putative
  misc_feature (1)..(302): Homolog of NCBI NO: 18416366 NR Description: protein phosphatase 2C (PP2C) -related
  misc_feature (1)..(300): Homolog of NCBI NO: 20146110 NR Description: protein phosphatase 2C [Mesembryanthemum
  misc_feature (1)..(286): Homolog of NCBI NO: 30689144 NR Description: protein phosphatase 2C (PP2C), putative
MGYLNSVLSSSSQVHVADDAIVSGGGLSHNGKFSYGYASSPGKRSSMEDFYETRIDGVEGEIVGLFGVFDGHGGARAAEYVKKNLFSNLISHPKFISDTKSAITDAYNHTDTELLKSENSHNRDAGSTASTAILVGDRLLVANVGDSRAVICRGGNAIAVSRDHKPDQTDERQRIEEAGGFVMWAGTWRVGGVLAVSRAFGDRLLKQYVVADPEIQEEKVDSSLEFLILASDGLWDVVSNEEAVAMIKPIEDAEEAAKRLMQEAYQRGSADNITCVVVRFLMNQGGSKELVAYPHNSSSAGKNPSVEGLCDI

SEQ ID NO: 58646 - protein, 266 aa, Glycine max
  peptide (1)..(266): Ceres Seq. ID no. 13638138
  misc_feature (1)..(227): Pfam Name: Protein phosphatase 2C Pfam Description: Protein phosphatase 2C
  misc_feature (1)..(234): Homolog of NCBI NO: 30693757 NR Description: protein phosphatase 2C (PP2C), putative
  misc_feature (1)..(241): Homolog of NCBI NO: 19387276 NR Description: putative protein phosphatase 2C
  misc_feature (1)..(241): Homolog of NCBI NO: 38345197 NR Description: OSJNBa0015K02.7 [Oryza sativa (japonica
  misc_feature (1)..(256): Homolog of NCBI NO: 11358728 NR Description: protein phosphatase 2C-like protein - Arabidopsis
  misc_feature (159)..(240): Homolog of NCBI NO: 7486331 NR Description: hypothetical protein F28M20.60 - Arabidopsis
  misc_feature (1)..(170): Homolog of NCBI NO: 7486331 NR Description: hypothetical protein F28M20.60 - Arabidopsis
  misc_feature (1)..(241): Homolog of NCBI NO: 15238651 NR Description: protein phosphatase 2C (PP2C), putative
  misc_feature (1)..(256): Homolog of NCBI NO: 18416366 NR Description: protein phosphatase 2C (PP2C) -related
  misc_feature (1)..(254): Homolog of NCBI NO: 20146110 NR Description: protein phosphatase 2C [Mesembryanthemum
  misc_feature (1)..(240): Homolog of NCBI NO: 30689144 NR Description: protein phosphatase 2C (PP2C), putative
MEDFYETRIDGVEGEIVGLFGVFDGHGGARAAEYVKKNLFSNLISHPKFISDTKSAITDAYNHTDTELLKSENSHNRDAGSTASTAILVGDRLLVANVGDSRAVICRGGNAIAVSRDHKPDQTDERQRIEEAGGFVMWAGTWRVGGVLAVSRAFGDRLLKQYVVADPEIQEEKVDSSLEFLILASDGLWDVVSNEEAVAMIKPIEDAEEAAKRLMQEAYQRGSADNITCVVVRFLMNQGGSKELVAYPHNSSSAGKNPSVEGLCDI

SEQ ID NO: 58647 - DNA, 529 bp, Glycine max
  misc_feature (1)..(529): Ceres Seq. ID no. 13644527
tccttcgttcgcattttaggcattgaaaactaattgaaggagttgcagtccagcgttgatcagaatcagagcatggacgggcatgattcagaagacccaaagcaaagcactgctgatatgacagcttttgtgcaaaatcttcttcagcagatgcaacttaggttccagacaatgtctgactccatcatttctaagattgatgagatgggagaccgtataaatgagttggagcaaagcatcaatgatttaagatcagagatgggagtggagagcactccatcacctgtggcccctgctaagccaaaggaagaagagtcaaacaaagaagagggttctgcttgagtaatgttacgtgttcaactgccttgtcttttatttttgggtctcgtgtgattcattcaggattttgttactgtatatctagtgaactctctttgctagctaaaacatactgttcaaactatgtaaaaatcacagcactgttggtttattgtgtttttccaattgaagatgggctagattgggtgcc

SEQ ID NO: 58648 - protein, 89 aa, Glycine max
  peptide (1)..(89): Ceres Seq. ID no. 13644528
  misc_feature (1)..(66): Homolog of NCBI NO: 30523300 NR Description: HSBP1-like protein [Drosophila simulans]
  misc_feature (1)..(66): Homolog of NCBI NO: 31234096 NR Description: ENSANGP00000014808 [Anopheles gambiae]
  misc_feature (1)..(66): Homolog of NCBI NO: 30523296 NR Description: HSBP1-like protein [Drosophila yakuba]
  misc_feature (1)..(66): Homolog of NCBI NO: 24583901 NR Description: CG5446-PA [Drosophila melanogaster]
  misc_feature (1)..(46): Homolog of NCBI NO: 30683411 NR Description: expressed protein [Arabidopsis thaliana]
  misc_feature (5)..(82): Homolog of NCBI NO: 20257532 NR Description: heat shock factor-binding protein 1 [Zea mays]
  misc_feature (5)..(89): Homolog of NCBI NO: 38349095 NR Description: heat shock factor binding protein 2 [Zea mays]
  misc_feature (5)..(89): Homolog of NCBI NO: 32352188 NR Description: hypothetical protein [Oryza sativa (japonica
  misc_feature (5)..(89): Homolog of NCBI NO: 11862947 NR Description: hypothetical protein [Oryza sativa (japonica
  misc_feature (1)..(83): Homolog of NCBI NO: 26453171 NR Description: unknown protein [Arabidopsis thaliana]
MDGHDSEDPKQSTADMTAFVQNLLQQMQLRFQTMSDSIISKIDEMGDRINELEQSINDLRSEMGVESTPSPVAPAKPKEEESNKEEGSA

SEQ ID NO: 58649 - protein, 74 aa, Glycine max
  peptide (1)..(74): Ceres Seq. ID no. 13644529
  misc_feature (1)..(51): Homolog of NCBI NO: 30523300 NR Description: HSBP1-like protein [Drosophila simulans]
  misc_feature (1)..(51): Homolog of NCBI NO: 31234096 NR Description: ENSANGP00000014808 [Anopheles gambiae]
  misc_feature (1)..(51): Homolog of NCBI NO: 30523296 NR Description: HSBP1-like protein [Drosophila yakuba]
  misc_feature (1)..(51): Homolog of NCBI NO: 24583901 NR Description: CG5446-PA [Drosophila melanogaster]
  misc_feature (1)..(31): Homolog of NCBI NO: 30683411 NR Description: expressed protein [Arabidopsis thaliana]
  misc_feature (1)..(67): Homolog of NCBI NO: 20257532 NR Description: heat shock factor-binding protein 1 [Zea mays]
  misc_feature (1)..(74): Homolog of NCBI NO: 38349095 NR Description: heat shock factor binding protein 2 [Zea mays]
  misc_feature (1)..(74): Homolog of NCBI NO: 32352188 NR Description: hypothetical protein [Oryza sativa (japonica
  misc_feature (1)..(74): Homolog of NCBI NO: 11862947 NR Description: hypothetical protein [Oryza sativa (japonica
  misc_feature (1)..(68): Homolog of NCBI NO: 26453171 NR Description: unknown protein [Arabidopsis thaliana]
MTAFVQNLLQQMQLRFQTMSDSIISKIDEMGDRINELEQSINDLRSEMGVESTPSPVAPAKPKEEESNKEEGSA

SEQ ID NO: 58650 - protein, 63 aa, Glycine max
  peptide (1)..(63): Ceres Seq. ID no. 13644530
  misc_feature (1)..(40): Homolog of NCBI NO: 30523300 NR Description: HSBP1-like protein [Drosophila simulans]
  misc_feature (1)..(40): Homolog of NCBI NO: 31234096 NR Description: ENSANGP00000014808 [Anopheles gambiae]
  misc_feature (1)..(40): Homolog of NCBI NO: 30523296 NR Description: HSBP1-like protein [Drosophila yakuba]
  misc_feature (1)..(40): Homolog of NCBI NO: 24583901 NR Description: CG5446-PA [Drosophila melanogaster]
  misc_feature (1)..(20): Homolog of NCBI NO: 30683411 NR Description: expressed protein [Arabidopsis thaliana]
  misc_feature (1)..(56): Homolog of NCBI NO: 20257532 NR Description: heat shock factor-binding protein 1 [Zea mays]
  misc_feature (1)..(63): Homolog of NCBI NO: 38349095 NR Description: heat shock factor binding protein 2 [Zea mays]
  misc_feature (1)..(63): Homolog of NCBI NO: 32352188 NR Description: hypothetical protein [Oryza sativa (japonica
  misc_feature (1)..(63): Homolog of NCBI NO: 11862947 NR Description: hypothetical protein [Oryza sativa (japonica
  misc_feature (1)..(57): Homolog of NCBI NO: 26453171 NR Description: unknown protein [Arabidopsis thaliana]
MQLRFQTMSDSIISKIDEMGDRINELEQSINDLRSEMGVESTPSPVAPAKPKEEESNKEEGSA

SEQ ID NO: 58651 - DNA, 1585 bp, Glycine max
  misc_feature (1)..(1585): Ceres Seq. ID no. 14308099
ccccccgagaacagagtgtgataatagtaagacagagcacctactcactcgtaaatggcgaggaagaagatcagagagtaccactccaagaggcttctcaaggagcatctcaaacgtctcgcctctatcgacctccaaatcctctcagctcaggtgacagaatctacggatttcactgagctgacagaccagcatccatggctttcgtcaaccagattggtcgtcaagccagacatgctgttcgggaagcgcggcaagagtggcttagttgctctcaatttagacatagctcaagtcgccgagttcgtcaaagcacgcctcggcgttgaggttgagatgggaggttgcaaggcgcctataaccacttttattgtcgaaccgtttgttcctcacgaccaagagttttatctgtctattgtttctgaaaggcttggctccactatcagcttctccgaatgtggcggcattgaaattgaagagaattgggataaggtcaaaactatattccttccgacggaaaaaccattgactccggaggcatgtgcgccattgattgctatacttcctttggagattagggggacaattggcgatttcataatgggtgtgtttgctgtcttcaaagatctggacttcagttttttagagatgaatccatttacactggtgaatgaaaagccatatccactggatatgagaggggaattggatgacactgccgcattcaagaacttcaacaagtggggtaatatagaatttccattgccttttggaagaattctgagccctacagaaagcttcattcattccttggatgataagacaagtgcatcattgaaatttactatattgaatccgaaaggacgcatatggacaatggtagcaggaggtggtgcaagtgtaatttatgctgatacggttggagatttaggctatgcatcagagcttggaaactatgctgagtatagtggagctccgaatgaggaggaggtgttgcagtatgcaagagttgtaattgattgtgctactgaagaccccgatggccgtaagagagcccttcttattggaggtggcatagcaaacttcactgatgttgctgccacattcaacgggattattcgagccctgaaagagaaggaatcaaagcttaaagcagcgcaaatgcacatatatgtcagaagaggtggtccaaactaccagactggtttggcaaagatgcgtgcattgggggaggagttgggagtaccaattcaggtttatggaccggaggccacgatgacgggtatctgcaaacaagctattgattgcatcatgtccgaagcataaagaagattaatttttgtctcatcatgtttcatttgtgaaactaatttggtggtgttttgatggatatattgatataagtccataatctgaaccaaagcaaagagtaataaggtgaagatgatagatgttacaagcctgaaactgttaaattcttatcttttcttcctattgtgattttattgttatattttgactaaacattataaaaatccccaatagtatccgtgaaaaatgtaatcttagttggcgatttttcctc

SEQ ID NO: 58652 - protein, 423 aa, Glycine max
  peptide (1)..(423): Ceres Seq. ID no. 14308100
  misc_feature (1)..(415): Homolog of NCBI NO: 8392839 NR Description: ATP citrate lyase [Rattus norvegicus]
  misc_feature (1)..(416): Homolog of NCBI NO: 20141248 NR Description: ATP-citrate synthase (ATP-citrate (pro-S-)-lyase)
  misc_feature (1)..(416): Homolog of NCBI NO: 38569423 NR Description: ATP citrate lyase isoform 2 [Homo sapiens]
  misc_feature (1)..(416): Homolog of NCBI NO: 38569421 NR Description: ATP citrate lyase isoform 1 [Homo sapiens]
  misc_feature (1)..(423): Homolog of NCBI NO: 19698853 NR Description: similar to ATP-citrate-lyase [Arabidopsis
  misc_feature (1)..(423): Homolog of NCBI NO: 15219818 NR Description: ATP citrate-lyase -related [Arabidopsis thaliana]
  misc_feature (1)..(423): Homolog of NCBI NO: 21593129 NR Description: ATP citrate-lyase, putative [Arabidopsis thaliana]
  misc_feature (1)..(423): Homolog of NCBI NO: 15220186 NR Description: ATP citrate-lyase -related [Arabidopsis thaliana]
  misc_feature (1)..(423): Homolog of NCBI NO: 15919089 NR Description: ATP citrate lyase b-subunit [Lupinus albus]
  misc_feature (1)..(420): Homolog of NCBI NO: 15217510 NR Description: expressed protein [Arabidopsis thaliana]
MARKKIREYHSKRLLKEHLKRLASIDLQILSAQVTESTDFTELTDQHPWLSSTRLVVKPDMLFGKRGKSGLVALNLDIAQVAEFVKARLGVEVEMGGCKAPITTFIVEPFVPHDQEFYLSIVSERLGSTISFSECGGIEIEENWDKVKTIFLPTEKPLTPEACAPLIAILPLEIRGTIGDFIMGVFAVFKDLDFSFLEMNPFTLVNEKPYPLDMRGELDDTAAFKNFNKWGNIEFPLPFGRILSPTESFIHSLDDKTSASLKFTILNPKGRIWTMVAGGGASVIYADTVGDLGYASELGNYAEYSGAPNEEEVLQYARVVIDCATEDPDGRKRALLIGGGIANFTDVAATFNGIIRALKEKESKLKAAQMHIYVRRGGPNYQTGLAKMRALGEELGVPIQVYGPEATMTGICKQAIDCIMSEA

SEQ ID NO: 58653 - protein, 363 aa, Glycine max
  peptide (1)..(363): Ceres Seq. ID no. 14308101
  misc_feature (1)..(355): Homolog of NCBI NO: 8392839 NR Description: ATP citrate lyase [Rattus norvegicus]
  misc_feature (1)..(356): Homolog of NCBI NO: 20141248 NR Description: ATP-citrate synthase (ATP-citrate (pro-S-)-lyase)
  misc_feature (1)..(356): Homolog of NCBI NO: 38569423 NR Description: ATP citrate lyase isoform 2 [Homo sapiens]
  misc_feature (1)..(356): Homolog of NCBI NO: 38569421 NR Description: ATP citrate lyase isoform 1 [Homo sapiens]
  misc_feature (1)..(363): Homolog of NCBI NO: 19698853 NR Description: similar to ATP-citrate-lyase [Arabidopsis
  misc_feature (1)..(363): Homolog of NCBI NO: 15219818 NR Description: ATP citrate-lyase -related [Arabidopsis thaliana]
  misc_feature (1)..(363): Homolog of NCBI NO: 21593129 NR Description: ATP citrate-lyase, putative [Arabidopsis thaliana]
  misc_feature (1)..(363): Homolog of NCBI NO: 15220186 NR Description: ATP citrate-lyase -related [Arabidopsis thaliana]
  misc_feature (1)..(363): Homolog of NCBI NO: 15919089 NR Description: ATP citrate lyase b-subunit [Lupinus albus]
  misc_feature (1)..(360): Homolog of NCBI NO: 15217510 NR Description: expressed protein [Arabidopsis thaliana]
MLFGKRGKSGLVALNLDIAQVAEFVKARLGVEVEMGGCKAPITTFIVEPFVPHDQEFYLSIVSERLGSTISFSECGGIEIEENWDKVKTIFLPTEKPLTPEACAPLIAILPLEIRGTIGDFIMGVFAVFKDLDFSFLEMNPFTLVNEKPYPLDMRGELDDTAAFKNFNKWGNIEFPLPFGRILSPTESFIHSLDDKTSASLKFTILNPKGRIWTMVAGGGASVIYADTVGDLGYASELGNYAEYSGAPNEEEVLQYARVVIDCATEDPDGRKRALLIGGGIANFTDVAATFNGIIRALKEKESKLKAAQMHIYVRRGGPNYQTGLAKMRALGEELGVPIQVYGPEATMTGICKQAIDCIMSEA

SEQ ID NO: 58654 - protein, 329 aa, Glycine max
  peptide (1)..(329): Ceres Seq. ID no. 14308102
  misc_feature (1)..(321): Homolog of NCBI NO: 8392839 NR Description: ATP citrate lyase [Rattus norvegicus]
  misc_feature (1)..(322): Homolog of NCBI NO: 20141248 NR Description: ATP-citrate synthase (ATP-citrate (pro-S-)-lyase)
  misc_feature (1)..(322): Homolog of NCBI NO: 38569423 NR Description: ATP citrate lyase isoform 2 [Homo sapiens]
  misc_feature (1)..(322): Homolog of NCBI NO: 38569421 NR Description: ATP citrate lyase isoform 1 [Homo sapiens]
  misc_feature (1)..(329): Homolog of NCBI NO: 19698853 NR Description: similar to ATP-citrate-lyase [Arabidopsis
  misc_feature (1)..(329): Homolog of NCBI NO: 15219818 NR Description: ATP citrate-lyase -related [Arabidopsis thaliana]
  misc_feature (1)..(329): Homolog of NCBI NO: 21593129 NR Description: ATP citrate-lyase, putative [Arabidopsis thaliana]
  misc_feature (1)..(329): Homolog of NCBI NO: 15220186 NR Description: ATP citrate-lyase -related [Arabidopsis thaliana]
  misc_feature (1)..(329): Homolog of NCBI NO: 15919089 NR Description: ATP citrate lyase b-subunit [Lupinus albus]
  misc_feature (1)..(326): Homolog of NCBI NO: 15217510 NR Description: expressed protein [Arabidopsis thaliana]
MGGCKAPITTFIVEPFVPHDQEFYLSIVSERLGSTISFSECGGIEIEENWDKVKTIFLPTEKPLTPEACAPLIAILPLEIRGTIGDFIMGVFAVFKDLDFSFLEMNPFTLVNEKPYPLDMRGELDDTAAFKNFNKWGNIEFPLPFGRILSPTESFIHSLDDKTSASLKFTILNPKGRIWTMVAGGGASVIYADTVGDLGYASELGNYAEYSGAPNEEEVLQYARVVIDCATEDPDGRKRALLIGGGIANFTDVAATFNGIIRALKEKESKLKAAQMHIYVRRGGPNYQTGLAKMRALGEELGVPIQVYGPEATMTGICKQAIDCIMSEA

SEQ ID NO: 58655 - DNA, 1622 bp, Glycine max
  misc_feature (1)..(1622): Ceres Seq. ID no. 15226087
accgggccccccctygagtcagctacgtaggccccccccccccccaaaacccacaaacacttgagtcagacaaaaagatggaaacctctaataacaaccatgatgctcctcctccacctctacttaaagacctgaaggtgaccatccacaatgcctccatgatttttccatccaaagagattgagagaaagtcccttttcttgtcaaacattgacaaggtcctcaactttgatgtggaaacggttcacttctttggtgcccacaaagattttcctcctcatgttgtgaatgagaggctcaagaatgccctagaggatgcccttgtggtttatgacttcttgggtggaagattgaagctcaactatgacaccaaaagattggagatggattgtaatccagagggagctggattcgtggtggcttccagcgagtacaatttggatcagataggggacttggattatccaaatccagcttttgcacaattggtacatcagaataaggattttcttaaagatggtgatgttccactctgtgttgcccaggtgacatccttcaagtgtggtggttttgcaattggcatatctactagccacaccacctttgatggcctcagcttcaaaaccttcctagacaacattgcttcaatagccgctaagaagcccttggttgtcacgccctgtcatgacaggcacctcctagccgcccgatccccaccacgtgtcaccttcccacaccctgagatgctcaagctaagtgaccagctcccaacatgccccgagtccaacatctttgaggcctccaccgaacaacttgatttcaaggtcttcaaactaacattaaacgacatcacaaaattgaaggaagaggctaggaattcttcaattagtggtggcctaagtactaaatgtgtcactggctttaacgttatcactgcctacatatggagatgcaaggcactttcgtgctacaatgatgagaaccgtaataggtcatcaactatactatatgctgtagatatacgttcaagattgaaccctccattgcctaaatcatacgcgggtaacgcagtgttaactgcttatgccacggcaaagtgtaaggagctagaagaatggccttttatgaagctagttgaaatggtgcgtgagggagcaactaggatgacaaatgagtatgcaagatctatcatagattggggagagataaacaatgggtttcccaatggggaggttttggtgtcttcatggtggagattagggtttgaggaagtggagtatccgtgggggaagccaaagtattgttgcccagtggtgtatcataagaaggatattattttgttgtttcctccggttggtggaggtgaaggggtgagtattattgtggctcttcctcctaaggaaatggaaaaattccatgggctcttcaacaagttcttgacttcacattgagggaaatgatgggtctttcttcctcctcctatggaaatggaaagattccatgcatgcttaagttcatgacttgagaattatgtctctccctctattgatatccttattaatatgacatctttagcttttcgctagttgttatgtaataaagtatgattctttytgggtttt

SEQ ID NO: 58656 - protein, 482 aa, Glycine max
  peptide (1)..(482): Ceres Seq. ID no. 15226088
  misc_feature (44)..(475): Pfam Name: Transferase family Pfam Description: Transferase family
  misc_feature (44)..(479): Homolog of NCBI NO: 21536883 NR Description: anthranilate N-benzoyltransferase [Arabidopsis
  misc_feature (44)..(479): Homolog of NCBI NO: 15239747 NR Description: anthranilate
  misc_feature (44)..(479): Homolog of NCBI NO: 27475616 NR Description: hydroxycinnamoyl transferase [Nicotiana tabacum]
  misc_feature (46)..(474): Homolog of NCBI NO: 34222064 NR Description: At3g48720 [Arabidopsis thaliana]
  misc_feature (46)..(474): Homolog of NCBI NO: 15229017 NR Description: transferase family [Arabidopsis thaliana]
  misc_feature (52)..(479): Homolog of NCBI NO: 20161743 NR Description: N-hydroxycinnamoyl/benzoyltransferase-like
  misc_feature (30)..(475): Homolog of NCBI NO: 30693725 NR Description: transferase family [Arabidopsis thaliana]
  misc_feature (30)..(475): Homolog of NCBI NO: 30693723 NR Description: transferase family [Arabidopsis thaliana]
  misc_feature (192)..(479): Homolog of NCBI NO: 18408287 NR Description: anthranilate
  misc_feature (31)..(479): Homolog of NCBI NO: 7487802 NR Description: hypothetical protein T8F5.23 - Arabidopsis
  misc_feature (5)..(5): Xaa is any aa, unknown or other
RAPPXVSYVGPPPPQNPQTLESDKKMETSNNNHDAPPPPLLKDLKVTIHNASMIFPSKEIERKSLFLSNIDKVLNFDVETVHFFGAHKDFPPHVVNERLKNALEDALVVYDFLGGRLKLNYDTKRLEMDCNPEGAGFVVASSEYNLDQIGDLDYPNPAFAQLVHQNKDFLKDGDVPLCVAQVTSFKCGGFAIGISTSHTTFDGLSFKTFLDNIASIAAKKPLVVTPCHDRHLLAARSPPRVTFPHPEMLKLSDQLPTCPESNIFEASTEQLDFKVFKLTLNDITKLKEEARNSSISGGLSTKCVTGFNVITAYIWRCKALSCYNDENRNRSSTILYAVDIRSRLNPPLPKSYAGNAVLTAYATAKCKELEEWPFMKLVEMVREGATRMTNEYARSIIDWGEINNGFPNGEVLVSSWWRLGFEEVEYPWGKPKYCCPVVYHKKDIILLFPPVGGGEGVSIIVALPPKEMEKFHGLFNKFLTSH

SEQ ID NO: 58657 - protein, 457 aa, Glycine max
  peptide (1)..(457): Ceres Seq. ID no. 15226089
  misc_feature (19)..(450): Pfam Name: Transferase family Pfam Description: Transferase family
  misc_feature (19)..(454): Homolog of NCBI NO: 21536883 NR Description: anthranilate N-benzoyltransferase [Arabidopsis
  misc_feature (19)..(454): Homolog of NCBI NO: 15239747 NR Description: anthranilate
  misc_feature (19)..(454): Homolog of NCBI NO: 27475616 NR Description: hydroxycinnamoyl transferase [Nicotiana tabacum]
  misc_feature (21)..(449): Homolog of NCBI NO: 34222064 NR Description: At3g48720 [Arabidopsis thaliana]
  misc_feature (21)..(449): Homolog of NCBI NO: 15229017 NR Description: transferase family [Arabidopsis thaliana]
  misc_feature (27)..(454): Homolog of NCBI NO: 20161743 NR Description: N-hydroxycinnamoyl/benzoyltransferase-like
  misc_feature (5)..(450): Homolog of NCBI NO: 30693725 NR Description: transferase family [Arabidopsis thaliana]
  misc_feature (5)..(450): Homolog of NCBI NO: 30693723 NR Description: transferase family [Arabidopsis thaliana]
  misc_feature (167)..(454): Homolog of NCBI NO: 18408287 NR Description: anthranilate
  misc_feature (6)..(454): Homolog of NCBI NO: 7487802 NR Description: hypothetical protein T8F5.23 - Arabidopsis
METSNNNHDAPPPPLLKDLKVTIHNASMIFPSKEIERKSLFLSNIDKVLNFDVETVHFFGAHKDFPPHVVNERLKNALEDALVVYDFLGGRLKLNYDTKRLEMDCNPEGAGFVVASSEYNLDQIGDLDYPNPAFAQLVHQNKDFLKDGDVPLCVAQVTSFKCGGFAIGISTSHTTFDGLSFKTFLDNIASIAAKKPLVVTPCHDRHLLAARSPPRVTFPHPEMLKLSDQLPTCPESNIFEASTEQLDFKVFKLTLNDITKLKEEARNSSISGGLSTKCVTGFNVITAYIWRCKALSCYNDENRNRSSTILYAVDIRSRLNPPLPKSYAGNAVLTAYATAKCKELEEWPFMKLVEMVREGATRMTNEYARSIIDWGEINNGFPNGEVLVSSWWRLGFEEVEYPWGKPKYCCPVVYHKKDIILLFPPVGGGEGVSIIVALPPKEMEKFHGLFNKFLTSH

SEQ ID NO: 58658 - protein, 430 aa, Glycine max
  peptide (1)..(430): Ceres Seq. ID no. 15226090
  misc_feature (1)..(423): Pfam Name: Transferase family Pfam Description: Transferase family
  misc_feature (1)..(427): Homolog of NCBI NO: 21536883 NR Description: anthranilate N-benzoyltransferase [Arabidopsis
  misc_feature (1)..(427): Homolog of NCBI NO: 15239747 NR Description: anthranilate
  misc_feature (1)..(427): Homolog of NCBI NO: 27475616 NR Description: hydroxycinnamoyl transferase [Nicotiana tabacum]
  misc_feature (1)..(422): Homolog of NCBI NO: 34222064 NR Description: At3g48720 [Arabidopsis thaliana]
  misc_feature (1)..(422): Homolog of NCBI NO: 15229017 NR Description: transferase family [Arabidopsis thaliana]
  misc_feature (1)..(427): Homolog of NCBI NO: 20161743 NR Description: N-hydroxycinnamoyl/benzoyltransferase-like
  misc_feature (1)..(423): Homolog of NCBI NO: 30693725 NR Description: transferase family [Arabidopsis thaliana]
  misc_feature (1)..(423): Homolog of NCBI NO: 30693723 NR Description: transferase family [Arabidopsis thaliana]
  misc_feature (140)..(427): Homolog of NCBI NO: 18408287 NR Description: anthranilate
  misc_feature (1)..(427): Homolog of NCBI NO: 7487802 NR Description: hypothetical protein T8F5.23 - Arabidopsis
MIFPSKEIERKSLFLSNIDKVLNFDVETVHFFGAHKDFPPHVVNERLKNALEDALVVYDFLGGRLKLNYDTKRLEMDCNPEGAGFVVASSEYNLDQIGDLDYPNPAFAQLVHQNKDFLKDGDVPLCVAQVTSFKCGGFAIGISTSHTTFDGLSFKTFLDNIASIAAKKPLVVTPCHDRHLLAARSPPRVTFPHPEMLKLSDQLPTCPESNIFEASTEQLDFKVFKLTLNDITKLKEEARNSSISGGLSTKCVTGFNVITAYIWRCKALSCYNDENRNRSSTILYAVDIRSRLNPPLPKSYAGNAVLTAYATAKCKELEEWPFMKLVEMVREGATRMTNEYARSIIDWGEINNGFPNGEVLVSSWWRLGFEEVEYPWGKPKYCCPVVYHKKDIILLFPPVGGGEGVSIIVALPPKEMEKFHGLFNKFLTSH

SEQ ID NO: 58659 - DNA, 1798 bp, Glycine max
  misc_feature (1)..(1798): Ceres Seq. ID no. 14308232
aaagtctgctcttgcattacaaagactagttcaagctgctgtatggtttcttggggaaaatgcaaattatgctgcttctgaatatgcttgggaatctgctaccccgcctggtactgcattgatgatgttagatgctgataaaatggttgctgctgctagttctcgtaatcctactctagctggtgccttgacaaggctccagaggtgcgcattcaatggcagctgggagattcgaattattgctgctcaagctcttacaacaatggcaattagatctggggaacctttcaggttacagatttatgagtttctgcacactttggcgcaaggtggtattcagtcacagttctctgatatgcatcttagtaatggagaagatcaaggagcaagtggtacaggccttggagttttattaagtcctatgataaaggttctggatgagatgtatagagcacaagatgatttgatcaaggaaatacgcaatcatgacaatgctaagaaagaatggactgatgatgaactgaagaaactatatgaaacccatgaaaggctgctagatcttgtttcattgttttgttatgttccaagaacaaagtatctacctttgggcccaataagtgccaaactcattgacatctatcgtacacgccacaatattagttcatctactggtttgagtgatccagctgttgccactggtatatctgatcttgtctatgaatcccaaccaccacctgctgagcctgatacacttgatgatgacctagtaaatgcttgggcagcaaaccttggtgatgatggcttatggggaaacaatgcaccagcaatgaatagggtaaatgaatttctggcaggtgctggaacagacgccccagaagttgatgaagagaatatgatctctaggccttcagttagctatgatgatatgtgggcaaaaacacttctagaatcttctgagctagaggaagatgatgcaaagtcattgggatcatcatctccagattcaacaggatcagttgaaacttcgatatcatcccactttggaggaatgagctacccttcgctgtttagttcccgaccacaaactacggataaggcaccagcaagccgaggctctatgtatgagggttatggttctccgataagagaagagcctccgtcatactcatcctctgtcatgcaaagacacgagtcatttgagaacccccttgcagggaatggattgcacagttttgggtctcaagatgatgagcgagcttcatctggaaatcctcaacatggaagtgcactttatgacttcacagcaggaggagacgatgaattgagtttaaccgcaggagaagaagtcgacattgagtacgaagtagatggctggttttatgttaagaagaaacgccctggtagggatggcaagatggctggactggttcctgttttatatgttagtcaatcttgaatcatgtacgtaagctattgtaacttccgattcttgcaaaaaggctttttttgctttattttatccagtgttgctttcattcaaagtttccatgttcccatgtagcatgccattctggctgttctccttcaaagtatcttgtatcctggtccctacctaattcgtctagttgtatgctatcaaagtatcatttaccatgctaattggttgcgagtgtctagtcattcatcatagtaggcctttcattctattatatttatattttacatacagctattggtgtacgagtgtttgtttttatacaaggaatttaatatatcaagtgaaagtttcacgtttttc

SEQ ID NO: 58660 - protein, 484 aa, Glycine max
  peptide (1)..(484): Ceres Seq. ID no. 14308233
  misc_feature (427)..(484): Pfam Name: SH3 domain Pfam Description: SH3 domain
  misc_feature (289)..(482): Homolog of NCBI NO: 34902004 NR Description: unknown protein [Oryza sativa (japonica
  misc_feature (241)..(484): Homolog of NCBI NO: 15225702 NR Description: SH3 domain-containing protein [Arabidopsis
  misc_feature (1)..(420): Homolog of NCBI NO: 34902004 NR Description: unknown protein [Oryza sativa (japonica
  misc_feature (14)..(375): Homolog of NCBI NO: 15225702 NR Description: SH3 domain-containing protein [Arabidopsis
  misc_feature (1)..(484): Homolog of NCBI NO: 29824397 NR Description: unknown protein [Arabidopsis thaliana]
KSALALQRLVQAAVWFLGENANYAASEYAWESATPPGTALMMLDADKMVAAASSRNPTLAGALTRLQRCAFNGSWEIRIIAAQALTTMAIRSGEPFRLQIYEFLHTLAQGGIQSQFSDMHLSNGEDQGASGTGLGVLLSPMIKVLDEMYRAQDDLIKEIRNHDNAKKEWTDDELKKLYETHERLLDLVSLFCYVPRTKYLPLGPISAKLIDIYRTRHNISSSTGLSDPAVATGISDLVYESQPPPAEPDTLDDDLVNAWAANLGDDGLWGNNAPAMNRVNEFLAGAGTDAPEVDEENMISRPSVSYDDMWAKTLLESSELEEDDAKSLGSSSPDSTGSVETSISSHFGGMSYPSLFSSRPQTTDKAPASRGSMYEGYGSPIREEPPSYSSSVMQRHESFENPLAGNGLHSFGSQDDERASSGNPQHGSALYDFTAGGDDELSLTAGEEVDIEYEVDGWFYVKKKRPGRDGKMAGLVPVLYVSQS

SEQ ID NO: 58661 - protein, 444 aa, Glycine max
  peptide (1)..(444): Ceres Seq. ID no. 14308234
  misc_feature (387)..(444): Pfam Name: SH3 domain Pfam Description: SH3 domain
  misc_feature (249)..(442): Homolog of NCBI NO: 34902004 NR Description: unknown protein [Oryza sativa (japonica
  misc_feature (201)..(444): Homolog of NCBI NO: 15225702 NR Description: SH3 domain-containing protein [Arabidopsis
  misc_feature (1)..(380): Homolog of NCBI NO: 34902004 NR Description: unknown protein [Oryza sativa (japonica
  misc_feature (1)..(335): Homolog of NCBI NO: 15225702 NR Description: SH3 domain-containing protein [Arabidopsis
  misc_feature (1)..(444): Homolog of NCBI NO: 29824397 NR Description: unknown protein [Arabidopsis thaliana]
MMLDADKMVAAASSRNPTLAGALTRLQRCAFNGSWEIRIIAAQALTTMAIRSGEPFRLQIYEFLHTLAQGGIQSQFSDMHLSNGEDQGASGTGLGVLLSPMIKVLDEMYRAQDDLIKEIRNHDNAKKEWTDDELKKLYETHERLLDLVSLFCYVPRTKYLPLGPISAKLIDIYRTRHNISSSTGLSDPAVATGISDLVYESQPPPAEPDTLDDDLVNAWAANLGDDGLWGNNAPAMNRVNEFLAGAGTDAPEVDEENMISRPSVSYDDMWAKTLLESSELEEDDAKSLGSSSPDSTGSVETSISSHFGGMSYPSLFSSRPQTTDKAPASRGSMYEGYGSPIREEPPSYSSSVMQRHESFENPLAGNGLHSFGSQDDERASSGNPQHGSALYDFTAGGDDELSLTAGEEVDIEYEVDGWFYVKKKRPGRDGKMAGLVPVLYVSQS

SEQ ID NO: 58662 - protein, 443 aa, Glycine max
  peptide (1)..(443): Ceres Seq. ID no. 14308235
  misc_feature (386)..(443): Pfam Name: SH3 domain Pfam Description: SH3 domain
  misc_feature (248)..(441): Homolog of NCBI NO: 34902004 NR Description: unknown protein [Oryza sativa (japonica
  misc_feature (200)..(443): Homolog of NCBI NO: 15225702 NR Description: SH3 domain-containing protein [Arabidopsis
  misc_feature (1)..(379): Homolog of NCBI NO: 34902004 NR Description: unknown protein [Oryza sativa (japonica
  misc_feature (1)..(334): Homolog of NCBI NO: 15225702 NR Description: SH3 domain-containing protein [Arabidopsis
  misc_feature (1)..(443): Homolog of NCBI NO: 29824397 NR Description: unknown protein [Arabidopsis thaliana]
MLDADKMVAAASSRNPTLAGALTRLQRCAFNGSWEIRIIAAQALTTMAIRSGEPFRLQIYEFLHTLAQGGIQSQFSDMHLSNGEDQGASGTGLGVLLSPMIKVLDEMYRAQDDLIKEIRNHDNAKKEWTDDELKKLYETHERLLDLVSLFCYVPRTKYLPLGPISAKLIDIYRTRHNISSSTGLSDPAVATGISDLVYESQPPPAEPDTLDDDLVNAWAANLGDDGLWGNNAPAMNRVNEFLAGAGTDAPEVDEENMISRPSVSYDDMWAKTLLESSELEEDDAKSLGSSSPDSTGSVETSISSHFGGMSYPSLFSSRPQTTDKAPASRGSMYEGYGSPIREEPPSYSSSVMQRHESFENPLAGNGLHSFGSQDDERASSGNPQHGSALYDFTAGGDDELSLTAGEEVDIEYEVDGWFYVKKKRPGRDGKMAGLVPVLYVSQS

SEQ ID NO: 58663 - DNA, 1321 bp, Glycine max
  misc_feature (1)..(1321): Ceres Seq. ID no. 14308698
aacgcgcattttagggacaaaattactggtaacatgtcaaaaaatgagattagagagtgctcattgatgacagttggatcaagttactgtggtagcaatcacatcccccaagatccagatgcaagcagggcatcaagcaatggtgtctggactactactttatccgccgagcctgaagctgttagagaccatgtgccgagaacaagtcctcagaatgaaaaagggaaatcggagatgcttgaaccaactacaacttcatcatccggtggctcaggtagtagtcttggaaaaaattgttcgctatctacgagaaaccagggccaaaaaagaaaaggaatagatgtggaagaatctgaggagcaaagtgaggacacagaacttaaatcagcacttggaaacaagtcatctcaacgtgcagggttggctcgaaggaaccgcgctgctgaagtgcataatctatctgaaaggagaaggagagaccggatcaatgagaagatgaaggcattgcaacaactcatacctcacagtagcaagacagacaaagcatcaatgttggaagaggcaatcgaatacttgaaatcacttcagttacaacttcagctaatgtggatgggatctggcatggcaccaattatgtttccaggaattcagcactatatgtcacaaatgggtatgggaatggctacaccgcctttccctcctattcacaatccgatgcaattaccgagactgccgcttgatcagtctgtatctgcgtctcagacaccaaaccagacattaatgagccaaaatcctattttgggtgcctttaattaccacaatcagatgcaaaatccagctctttcagagcaatatgcgcgttacatgggctatcatcttatgcaaaatgcctctcagccaatgaatgtattcagatatggtccccagggggtacggcatagtcaaacaatgattacacccagcaacagcagtggaaacatgagtggagcagcaaatattgatgaggctgtgagtggcaaaatgggttaattagtttcaaagcatgcttttgagtacctatggcgtaactaacaagataattgcaagatgatagaagcccttgtaaggcttgtatgctttcacaatatgtctgcctgttcatacagtggctgatctacagttatgtgagggtctagggtcagcacttgtacttccttatttttttaaaaattaattaaatttgtaaataaaattttatacttttatattttatttcatctatatttatataattgaacccactgattttattttttataatttacatccatcgatttaaggt

SEQ ID NO: 58664 - protein, 342 aa, Glycine max
  peptide (1)..(342): Ceres Seq. ID no. 14308699
  misc_feature (147)..(196): Pfam Name: Helix-loop-helix DNA-binding domain Pfam Description: Helix-loop-helix DNA-binding domain
  misc_feature (36)..(295): Homolog of NCBI NO: 30680909 NR Description: (bHLH015) putative bHLH transcription factor
  misc_feature (36)..(295): Homolog of NCBI NO: 30680903 NR Description: (bHLH015) putative bHLH transcription factor
  misc_feature (36)..(333): Homolog of NCBI NO: 25411969 NR Description: hypothetical protein At2g20180 [imported] -
  misc_feature (38)..(327): Homolog of NCBI NO: 34899612 NR Description: putative phytochrome interacting factor 4
  misc_feature (21)..(342): Homolog of NCBI NO: 20127070 NR Description: putative bHLH transcription factor [Arabidopsis
  misc_feature (21)..(342): Homolog of NCBI NO: 30694919 NR Description: bHLH protein family [Arabidopsis thaliana]
  misc_feature (69)..(324): Homolog of NCBI NO: 25408828 NR Description: hypothetical protein At2g43010 [imported] -
  misc_feature (21)..(342): Homolog of NCBI NO: 30694924 NR Description: bHLH protein family [Arabidopsis thaliana]
  misc_feature (69)..(324): Homolog of NCBI NO: 30689218 NR Description: transcription factor (BHLH9) -related
  misc_feature (69)..(324): Homolog of NCBI NO: 30689224 NR Description: transcription factor (BHLH9) -related
NAHFRDKITGNMSKNEIRECSLMTVGSSYCGSNHIPQDPDASRASSNGVWTTTLSAEPEAVRDHVPRTSPQNEKGKSEMLEPTTTSSSGGSGSSLGKNCSLSTRNQGQKRKGIDVEESEEQSEDTELKSALGNKSSQRAGLARRNRAAEVHNLSERRRRDRINEKMKALQQLIPHSSKTDKASMLEEAIEYLKSLQLQLQLMWMGSGMAPIMFPGIQHYMSQMGMGMATPPFPPIHNPMQLPRLPLDQSVSASQTPNQTLMSQNPILGAFNYHNQMQNPALSEQYARYMGYHLMQNASQPMNVFRYGPQGVRHSQTMITPSNSSGNMSGAANIDEAVSGKMG

SEQ ID NO: 58665 - protein, 331 aa, Glycine max
  peptide (1)..(331): Ceres Seq. ID no. 14308700
  misc_feature (136)..(185): Pfam Name: Helix-loop-helix DNA-binding domain Pfam Description: Helix-loop-helix DNA-binding domain
  misc_feature (25)..(284): Homolog of NCBI NO: 30680909 NR Description: (bHLH015) putative bHLH transcription factor
  misc_feature (25)..(284): Homolog of NCBI NO: 30680903 NR Description: (bHLH015) putative bHLH transcription factor
  misc_feature (25)..(322): Homolog of NCBI NO: 25411969 NR Description: hypothetical protein At2g20180 [imported] -
  misc_feature (27)..(316): Homolog of NCBI NO: 34899612 NR Description: putative phytochrome interacting factor 4
  misc_feature (10)..(331): Homolog of NCBI NO: 20127070 NR Description: putative bHLH transcription factor [Arabidopsis
  misc_feature (10)..(331): Homolog of NCBI NO: 30694919 NR Description: bHLH protein family [Arabidopsis thaliana]
  misc_feature (58)..(313): Homolog of NCBI NO: 25408828 NR Description: hypothetical protein At2g43010 [imported] -
  misc_feature (10)..(331): Homolog of NCBI NO: 30694924 NR Description: bHLH protein family [Arabidopsis thaliana]
  misc_feature (58)..(313): Homolog of NCBI NO: 30689218 NR Description: transcription factor (BHLH9) -related
  misc_feature (58)..(313): Homolog of NCBI NO: 30689224 NR Description: transcription factor (BHLH9) -related
MSKNEIRECSLMTVGSSYCGSNHIPQDPDASRASSNGVWTTTLSAEPEAVRDHVPRTSPQNEKGKSEMLEPTTTSSSGGSGSSLGKNCSLSTRNQGQKRKGIDVEESEEQSEDTELKSALGNKSSQRAGLARRNRAAEVHNLSERRRRDRINEKMKALQQLIPHSSKTDKASMLEEAIEYLKSLQLQLQLMWMGSGMAPIMFPGIQHYMSQMGMGMATPPFPPIHNPMQLPRLPLDQSVSASQTPNQTLMSQNPILGAFNYHNQMQNPALSEQYARYMGYHLMQNASQPMNVFRYGPQGVRHSQTMITPSNSSGNMSGAANIDEAVSGKMG

SEQ ID NO: 58666 - protein, 320 aa, Glycine max
  peptide (1)..(320): Ceres Seq. ID no. 14308701
  misc_feature (125)..(174): Pfam Name: Helix-loop-helix DNA-binding domain Pfam Description: Helix-loop-helix DNA-binding domain
  misc_feature (14)..(273): Homolog of NCBI NO: 30680909 NR Description: (bHLH015) putative bHLH transcription factor
  misc_feature (14)..(273): Homolog of NCBI NO: 30680903 NR Description: (bHLH015) putative bHLH transcription factor
  misc_feature (14)..(311): Homolog of NCBI NO: 25411969 NR Description: hypothetical protein At2g20180 [imported] -
  misc_feature (16)..(305): Homolog of NCBI NO: 34899612 NR Description: putative phytochrome interacting factor 4
  misc_feature (1)..(320): Homolog of NCBI NO: 20127070 NR Description: putative bHLH transcription factor [Arabidopsis
  misc_feature (1)..(320): Homolog of NCBI NO: 30694919 NR Description: bHLH protein family [Arabidopsis thaliana]
  misc_feature (47)..(302): Homolog of NCBI NO: 25408828 NR Description: hypothetical protein At2g43010 [imported] -
  misc_feature (1)..(320): Homolog of NCBI NO: 30694924 NR Description: bHLH protein family [Arabidopsis thaliana]
  misc_feature (47)..(302): Homolog of NCBI NO: 30689218 NR Description: transcription factor (BHLH9) -related
  misc_feature (47)..(302): Homolog of NCBI NO: 30689224 NR Description: transcription factor (BHLH9) -related
MTVGSSYCGSNHIPQDPDASRASSNGVWTTTLSAEPEAVRDHVPRTSPQNEKGKSEMLEPTTTSSSGGSGSSLGKNCSLSTRNQGQKRKGIDVEESEEQSEDTELKSALGNKSSQRAGLARRNRAAEVHNLSERRRRDRINEKMKALQQLIPHSSKTDKASMLEEAIEYLKSLQLQLQLMWMGSGMAPIMFPGIQHYMSQMGMGMATPPFPPIHNPMQLPRLPLDQSVSASQTPNQTLMSQNPILGAFNYHNQMQNPALSEQYARYMGYHLMQNASQPMNVFRYGPQGVRHSQTMITPSNSSGNMSGAANIDEAVSGKMG

SEQ ID NO: 58667 - DNA, 1699 bp, Glycine max
  misc_feature (1)..(1699): Ceres Seq. ID no. 15171012
gcacatttgggaacaagccttacagtgatgtgtccctctaaagacatttttaaggaagcaactaaacagatggactctgaggatggactaggagaggattggttatctgagtattcaggtgatgaggactatgaccctgaagaaaatgacttcacaagcagcagcctggatagtggtgaagaaagtatatctgatcagtccaattgttcaggaagtccgctttattctccaaacgatgatattccaggctttatatcagcagatttcactgatgcggaaggattctaccacaccaattcaaatttaggaattgattctgatgatgatgatgttgccgagatgcttacctaccaaaggccaaagagagaggaaatgtttggaaagctgactgagaatgaaaagcagagtgaagatgaagattggggtactaataataggagaaagaaaagaagagtggattcagctggtgttggagttaagtctgccgagggttccttagatgtaaaatcgaatgagaaagcccaaccgcagaggagaaaactcttcagaattccacctgaggcagttcaggtactgcgcaaatcttttgctgaaagtgagcttccatcccgggaggtgaaagagaatctctcaacagaattgggtatttcttttgaaaagattgacaagtggttcaaaaatacaaggtgtgctgctctcagagatcggaaggctgaaggaaatagtcgtgttgctggtcccagcaaaagatcgaaacagagtgcagggaaatctggaagtttaggcaagattgattcagtggacaattcatatcttcttcccatgcctgaaatcatcagtgtacctacacatccacaagggattcctgagaggaagcccgaatcaactagtagaactgtgaggaggcgggtacacgataaaggagctcccttgtgtccgcccgcgcccgccgaagtcaaggagagcacatcacctacaaccaagcctggcttgaatcctagccatgtagctgatcgcatcatcaacaccgagcatagagctgcttctcgggaggatccagtggccttctcggatgaccctttcttcgatgcgatcctatcatatcccaccatcaacaccaacgacagagctgtttctcgggaggatccggtggccttctcggacgatcctttcctggacgtgatgctagcaaaccgtgacatctataccgaggagagagccgcttctcacgaggacgtgaggcggccttccagcgaccagcctttcttggatgtgatccagaacgtgtgcgggctcgagcataggctgcagagactcaagggggacatgctatcatcagcagcagcaccaggcggcgctggaaccgcggagcgtgacttgcagaaccaactagtggttctcgtgccgactgccgagctgaaggacaaatcacagcctagcatctgaaattctgatactccatttgcgcgttgtcgataggagttattaaaacatatagaagaaatagtgtagagaaggagaagaaaagaaaagtagtggctccagtctagggttctagcggacaaggggcctcaacagtggtcgttactgtgtgtcacattaaagtgcgtcgtcggtgttactagtatacaagggcagttgttactggtcttaatgggtttgagttatataccgtttggggttcaaaatgttttggatc

SEQ ID NO: 58668 - protein, 481 aa, Glycine max
  peptide (1)..(481): Ceres Seq. ID no. 15171013
  misc_feature (178)..(234): Pfam Name: Homeobox domain Pfam Description: Homeobox domain
  misc_feature (124)..(259): Homolog of NCBI NO: 15233766 NR Description: pathogenesis related homeodomain protein PRHA
AHLGTSLTVMCPSKDIFKEATKQMDSEDGLGEDWLSEYSGDEDYDPEENDFTSSSLDSGEESISDQSNCSGSPLYSPNDDIPGFISADFTDAEGFYHTNSNLGIDSDDDDVAEMLTYQRPKREEMFGKLTENEKQSEDEDWGTNNRRKKRRVDSAGVGVKSAEGSLDVKSNEKAQPQRRKLFRIPPEAVQVLRKSFAESELPSREVKENLSTELGISFEKIDKWFKNTRCAALRDRKAEGNSRVAGPSKRSKQSAGKSGSLGKIDSVDNSYLLPMPEIISVPTHPQGIPERKPESTSRTVRRRVHDKGAPLCPPAPAEVKESTSPTTKPGLNPSHVADRIINTEHRAASREDPVAFSDDPFFDAILSYPTINTNDRAVSREDPVAFSDDPFLDVMLANRDIYTEERAASHEDVRRPSSDQPFLDVIQNVCGLEHRLQRLKGDMLSSAAAPGGAGTAERDLQNQLVVLVPTAELKDKSQPSI

SEQ ID NO: 58669 - protein, 472 aa, Glycine max
  peptide (1)..(472): Ceres Seq. ID no. 15171014
  misc_feature (169)..(225): Pfam Name: Homeobox domain Pfam Description: Homeobox domain
  misc_feature (115)..(250): Homolog of NCBI NO: 15233766 NR Description: pathogenesis related homeodomain protein PRHA
MCPSKDIFKEATKQMDSEDGLGEDWLSEYSGDEDYDPEENDFTSSSLDSGEESISDQSNCSGSPLYSPNDDIPGFISADFTDAEGFYHTNSNLGIDSDDDDVAEMLTYQRPKREEMFGKLTENEKQSEDEDWGTNNRRKKRRVDSAGVGVKSAEGSLDVKSNEKAQPQRRKLFRIPPEAVQVLRKSFAESELPSREVKENLSTELGISFEKIDKWFKNTRCAALRDRKAEGNSRVAGPSKRSKQSAGKSGSLGKIDSVDNSYLLPMPEIISVPTHPQGIPERKPESTSRTVRRRVHDKGAPLCPPAPAEVKESTSPTTKPGLNPSHVADRIINTEHRAASREDPVAFSDDPFFDAILSYPTINTNDRAVSREDPVAFSDDPFLDVMLANRDIYTEERAASHEDVRRPSSDQPFLDVIQNVCGLEHRLQRLKGDMLSSAAAPGGAGTAERDLQNQLVVLVPTAELKDKSQPSI

SEQ ID NO: 58670 - protein, 458 aa, Glycine max
  peptide (1)..(458): Ceres Seq. ID no. 15171015
  misc_feature (155)..(211): Pfam Name: Homeobox domain Pfam Description: Homeobox domain
  misc_feature (101)..(236): Homolog of NCBI NO: 15233766 NR Description: pathogenesis related homeodomain protein PRHA
MDSEDGLGEDWLSEYSGDEDYDPEENDFTSSSLDSGEESISDQSNCSGSPLYSPNDDIPGFISADFTDAEGFYHTNSNLGIDSDDDDVAEMLTYQRPKREEMFGKLTENEKQSEDEDWGTNNRRKKRRVDSAGVGVKSAEGSLDVKSNEKAQPQRRKLFRIPPEAVQVLRKSFAESELPSREVKENLSTELGISFEKIDKWFKNTRCAALRDRKAEGNSRVAGPSKRSKQSAGKSGSLGKIDSVDNSYLLPMPEIISVPTHPQGIPERKPESTSRTVRRRVHDKGAPLCPPAPAEVKESTSPTTKPGLNPSHVADRIINTEHRAASREDPVAFSDDPFFDAILSYPTINTNDRAVSREDPVAFSDDPFLDVMLANRDIYTEERAASHEDVRRPSSDQPFLDVIQNVCGLEHRLQRLKGDMLSSAAAPGGAGTAERDLQNQLVVLVPTAELKDKSQPSI

SEQ ID NO: 58671 - DNA, 2330 bp, Glycine max
  misc_feature (1)..(2330): Ceres Seq. ID no. 14315434
tcacactctttcttcctttcttcttcttcttcttcttcctgtcttcacctaaccaaatgggcgcctccaccacctgatccacctctgtttcttcttcctttcatccgttcatacgggggttagatgatggagtcctgtgattgtatagatacgcagtatccgccggatgaacttcttgtgaagtatcagtatatctcggatgtgctaattgctcttgcgtatttttcgattccggtggagctcatctattttgttcagaagtctgctttctttccgtatagatgggtgcttatgcagtttggtgcctttattgttctctgtggagcaactcatttcataaacctgtggacattctctccgcactctaagtctgttgctgttgtcatgacgattgccaaagtttcgtgtgctattgtgtcatgtgcgacggcactgatgcttgtacacattattcccgatctgttgagtgtcaagaggcgcgaatcgatcctcaagaacaaggctgaagagcttgacagagagatgggacttattcttactcaggaagagacgggaagacatgttagaatgttgactcatgaaattaggagcacacttgacaggcatacaattttaaagactactcttgtggagctggggaggactttgggcttggaggagtgtgcattatggatgccttcgagaagtggtctgaatctgcaactttcccatactttaacctatcatgtgcaagttgggtctacggtgcaaacaaacaattctattgtcaatgaagttttcaacagccctcaagctatgcggataccacccacctgtccattggccaggatcagacctcttgtgggaagatatgtgccccctgaagttgttgctgttcgggtgccgcttttgaatctgtcaaattttcaaattaacgattggcctgatatttcagcaaagagctatgcaatcatggttctcatcctccctactgacagtgttagaaaatggcgagaccatgagttggaacttgttgatgttgttgcagatcaggtagcagttgccctttcacatgctgctattttggaggagtctatgcgtgcccgtgatcaactcatggagcagaatgttgctttagatttagcccggcgagaggcagagatggcaattcatgctcgcaatgattttcttgctgtcatgaatcatgaaatgaggacaccaatgcatgcaattatagcattgtcatcacttctcttggagactgaactgacgccagagcaaagggttatgatagagacagtgttgaagagtagtaatgttttggcaacactcattaatgatgttctagatctttctcgacttgaagatggtagcctcgaattagaaatgggaaaattcaacctccatggagttttgggagagattgttgaactgataaaaccaatagcatccgtgaaaaagttacctatcaccttaattctgtctcctgatctgcctactcatgccattggtgatgaaaagcggcttacacaaactcttttgaatgtcgtgggtaatgctgtcaaattcactaaggagggctatgtttctgtaagagtatcagttgcaaaaccagaatcttcacaggattggcgacctccagagttttatccagcatctagtgatggccatttctacattcgagtccaggttaaggactctggatgtgggattctcccacaagatattccgcatctctttaccaagtttgcccagtctcggagtggaccagctcgacctagcagtggtgcaggtcttgggcttgccatttgtaaaagatttgtaaacctcatgggaggccacatatggattgagagtgagggccttgacaaaggaagcacagctacatttatagtcaaacttgggatttgtggcaatccagatccatccgatcatcaagctgcaaacagaagccaagcatatagtggaagtggtggcctcgctagatttaaacccttcatcacagatgaaaacgacactggtttttctactagacgcaatcaaagaagtttctaatatccaagacaccaaaattgcatacctctcaatcacagtcgacaagatggagtaaacctcctactttcattttgcatgtgctaaattgtataatttgcagtttgcggctgtagaataggattactatgtcaggcatatttctaacaaacaggttttatgcgaactcctgttgtattaactagaatacaatacaacaaaacaaagttgagagacgatctgttacttaatttgacttgtagtatatattgtcagtggcttttgccgtttagcgttcataaaaatgacagtattggcac

SEQ ID NO: 58672 - protein, 636 aa, Glycine max
  peptide (1)..(636): Ceres Seq. ID no. 14315435
  misc_feature (159)..(308): Pfam Name: GAF domain Pfam Description: GAF domain
  misc_feature (2)..(631): Homolog of NCBI NO: 18252341 NR Description: putative ethylene receptor [Pyrus communis]
  misc_feature (2)..(635): Homolog of NCBI NO: 18252335 NR Description: putative ethylene receptor [Pyrus communis]
  misc_feature (2)..(635): Homolog of NCBI NO: 18252345 NR Description: putative ethylene receptor [Pyrus communis]
  misc_feature (1)..(635): Homolog of NCBI NO: 15131531 NR Description: ethylene receptor [Fragaria x ananassa]
  misc_feature (2)..(636): Homolog of NCBI NO: 18496061 NR Description: ethylene receptor 1 [Fagus sylvatica]
  misc_feature (2)..(636): Homolog of NCBI NO: 4164161 NR Description: ethylene response sensor [Passiflora edulis]
  misc_feature (2)..(635): Homolog of NCBI NO: 22036194 NR Description: ethylene-responsive sensor [Prunus persica]
  misc_feature (2)..(636): Homolog of NCBI NO: 11935116 NR Description: ethylene receptor [Carica papaya]
  misc_feature (1)..(636): Homolog of NCBI NO: 7488803 NR Description: ethylene receptor - garden pea
  misc_feature (1)..(636): Homolog of NCBI NO: 2745902 NR Description: ERS-like ethylene receptor [Pisum sativum]
MMESCDCIDTQYPPDELLVKYQYISDVLIALAYFSIPVELIYFVQKSAFFPYRWVLMQFGAFIVLCGATHFINLWTFSPHSKSVAVVMTIAKVSCAIVSCATALMLVHIIPDLLSVKRRESILKNKAEELDREMGLILTQEETGRHVRMLTHEIRSTLDRHTILKTTLVELGRTLGLEECALWMPSRSGLNLQLSHTLTYHVQVGSTVQTNNSIVNEVFNSPQAMRIPPTCPLARIRPLVGRYVPPEVVAVRVPLLNLSNFQINDWPDISAKSYAIMVLILPTDSVRKWRDHELELVDVVADQVAVALSHAAILEESMRARDQLMEQNVALDLARREAEMAIHARNDFLAVMNHEMRTPMHAIIALSSLLLETELTPEQRVMIETVLKSSNVLATLINDVLDLSRLEDGSLELEMGKFNLHGVLGEIVELIKPIASVKKLPITLILSPDLPTHAIGDEKRLTQTLLNVVGNAVKFTKEGYVSVRVSVAKPESSQDWRPPEFYPASSDGHFYIRVQVKDSGCGILPQDIPHLFTKFAQSRSGPARPSSGAGLGLAICKRFVNLMGGHIWIESEGLDKGSTATFIVKLGICGNPDPSDHQAANRSQAYSGSGGLARFKPFITDENDTGFSTRRNQRSF

SEQ ID NO: 58673 - protein, 635 aa, Glycine max
  peptide (1)..(635): Ceres Seq. ID no. 14315436
  misc_feature (158)..(307): Pfam Name: GAF domain Pfam Description: GAF domain
  misc_feature (1)..(630): Homolog of NCBI NO: 18252341 NR Description: putative ethylene receptor [Pyrus communis]
  misc_feature (1)..(634): Homolog of NCBI NO: 18252335 NR Description: putative ethylene receptor [Pyrus communis]
  misc_feature (1)..(634): Homolog of NCBI NO: 18252345 NR Description: putative ethylene receptor [Pyrus communis]
  misc_feature (1)..(634): Homolog of NCBI NO: 15131531 NR Description: ethylene receptor [Fragaria x ananassa]
  misc_feature (1)..(635): Homolog of NCBI NO: 18496061 NR Description: ethylene receptor 1 [Fagus sylvatica]
  misc_feature (1)..(635): Homolog of NCBI NO: 4164161 NR Description: ethylene response sensor [Passiflora edulis]
  misc_feature (1)..(634): Homolog of NCBI NO: 22036194 NR Description: ethylene-responsive sensor [Prunus persica]
  misc_feature (1)..(635): Homolog of NCBI NO: 11935116 NR Description: ethylene receptor [Carica papaya]
  misc_feature (1)..(635): Homolog of NCBI NO: 7488803 NR Description: ethylene receptor - garden pea
  misc_feature (1)..(635): Homolog of NCBI NO: 2745902 NR Description: ERS-like ethylene receptor [Pisum sativum]
MESCDCIDTQYPPDELLVKYQYISDVLIALAYFSIPVELIYFVQKSAFFPYRWVLMQFGAFIVLCGATHFINLWTFSPHSKSVAVVMTIAKVSCAIVSCATALMLVHIIPDLLSVKRRESILKNKAEELDREMGLILTQEETGRHVRMLTHEIRSTLDRHTILKTTLVELGRTLGLEECALWMPSRSGLNLQLSHTLTYHVQVGSTVQTNNSIVNEVFNSPQAMRIPPTCPLARIRPLVGRYVPPEVVAVRVPLLNLSNFQINDWPDISAKSYAIMVLILPTDSVRKWRDHELELVDVVADQVAVALSHAAILEESMRARDQLMEQNVALDLARREAEMAIHARNDFLAVMNHEMRTPMHAIIALSSLLLETELTPEQRVMIETVLKSSNVLATLINDVLDLSRLEDGSLELEMGKFNLHGVLGEIVELIKPIASVKKLPITLILSPDLPTHAIGDEKRLTQTLLNVVGNAVKFTKEGYVSVRVSVAKPESSQDWRPPEFYPASSDGHFYIRVQVKDSGCGILPQDIPHLFTKFAQSRSGPARPSSGAGLGLAICKRFVNLMGGHIWIESEGLDKGSTATFIVKLGICGNPDPSDHQAANRSQAYSGSGGLARFKPFITDENDTGFSTRRNQRSF

SEQ ID NO: 58674 - protein, 580 aa, Glycine max
  peptide (1)..(580): Ceres Seq. ID no. 14315437
  misc_feature (103)..(252): Pfam Name: GAF domain Pfam Description: GAF domain
  misc_feature (1)..(575): Homolog of NCBI NO: 18252341 NR Description: putative ethylene receptor [Pyrus communis]
  misc_feature (1)..(579): Homolog of NCBI NO: 18252335 NR Description: putative ethylene receptor [Pyrus communis]
  misc_feature (1)..(579): Homolog of NCBI NO: 18252345 NR Description: putative ethylene receptor [Pyrus communis]
  misc_feature (1)..(579): Homolog of NCBI NO: 15131531 NR Description: ethylene receptor [Fragaria x ananassa]
  misc_feature (1)..(580): Homolog of NCBI NO: 18496061 NR Description: ethylene receptor 1 [Fagus sylvatica]
  misc_feature (1)..(580): Homolog of NCBI NO: 4164161 NR Description: ethylene response sensor [Passiflora edulis]
  misc_feature (1)..(579): Homolog of NCBI NO: 22036194 NR Description: ethylene-responsive sensor [Prunus persica]
  misc_feature (1)..(580): Homolog of NCBI NO: 11935116 NR Description: ethylene receptor [Carica papaya]
  misc_feature (1)..(580): Homolog of NCBI NO: 7488803 NR Description: ethylene receptor - garden pea
  misc_feature (1)..(580): Homolog of NCBI NO: 2745902 NR Description: ERS-like ethylene receptor [Pisum sativum]
MQFGAFIVLCGATHFINLWTFSPHSKSVAVVMTIAKVSCAIVSCATALMLVHIIPDLLSVKRRESILKNKAEELDREMGLILTQEETGRHVRMLTHEIRSTLDRHTILKTTLVELGRTLGLEECALWMPSRSGLNLQLSHTLTYHVQVGSTVQTNNSIVNEVFNSPQAMRIPPTCPLARIRPLVGRYVPPEVVAVRVPLLNLSNFQINDWPDISAKSYAIMVLILPTDSVRKWRDHELELVDVVADQVAVALSHAAILEESMRARDQLMEQNVALDLARREAEMAIHARNDFLAVMNHEMRTPMHAIIALSSLLLETELTPEQRVMIETVLKSSNVLATLINDVLDLSRLEDGSLELEMGKFNLHGVLGEIVELIKPIASVKKLPITLILSPDLPTHAIGDEKRLTQTLLNVVGNAVKFTKEGYVSVRVSVAKPESSQDWRPPEFYPASSDGHFYIRVQVKDSGCGILPQDIPHLFTKFAQSRSGPARPSSGAGLGLAICKRFVNLMGGHIWIESEGLDKGSTATFIVKLGICGNPDPSDHQAANRSQAYSGSGGLARFKPFITDENDTGFSTRRNQRSF

SEQ ID NO: 58675 - DNA, 1471 bp, Glycine max
  misc_feature (1)..(1471): Ceres Seq. ID no. 15169110
gaaatcatataaagaaacatctaaccaaacaagaagggtccagcaattattcttttctcattttaagaaataattgagtttggatatattgcaattttaaatcagtttcattcagtgcctttttggtgttaatagtttctaaatttgaacaattaaaaagattgtcatgctatcatgtaatcgaatacaattaggcttcatcttcatgctcatattcttgtaccttgaatatgagcaggaagatgaagcctaaatgttaatattcttatgtgaatttcaatattgattgcatatttgcttgaaccttgaatattgtttcaaagtaatgaactttatcaccctcttactaaaggttcagaagggttatcaaaagatttagaagtttctgagcatttggaagacaatcttgaccaagagtggtcacagatttcacagatgcacaagagtatagcttctttcagagacaagtcaatcaacaaatggcagcggatgacacaagtgactactggtgctgctgccattaagggaaaatttcatgcttttaatcaggtcaggttctttaactggtattgggaattttcttatgtgataggtgagtatttaatcctaattttgttgccccatcacacaggatattagcaatcaagttgctgcttatatgagagatcctaatagaatgatcaatcagatgcggctgagaagatcagctgttaatatatttggatctgtaattcattctcttaatctttagttgttttaaattgtgctgcatattccatataaggctgaatgttaggagtgtgttaaaagctgatttatttacctttgtcattgactgccacttgtcttcaggttccagaggttgacgataaacataaagaagctgaaacacgtactgatggtgatcctgaacttctggatgactctgaattttatcagcaattattgaaagaattttttgagacagttgatccttcatcgtctgagaaagcattttatgctttgaagagaatgcaaccaaagaaaagaaaaattgttgatcgtcgtgcctcaaaaagtcggaagataaggtataatgttcacgaaaagatagtaaattttatggcaccactacctgccaatattcctcctatggctccgaagttgtttgagaatctgtttggattgaagacagaaagattatcatcatctgctgcagcctcgtaatcatggttggccgacagcaatatttggcctcacagttttgcccttactttacatatgttgtacactaatttgtcttctacatgatgttgattattgaggaatttgatattttttcctcacaagacaattttgctgtaaatttattcagatgacctcatttctccttaggtgtttgttcaacgaggagtgatacaggttcatgtatgatggtaaccgatgccctagtgcaatggtgctagtataatagattatagttatggattag

SEQ ID NO: 58676 - protein, 67 aa, Glycine max
  peptide (1)..(67): Ceres Seq. ID no. 15169111
  misc_feature (1)..(39): Homolog of NCBI NO: 15240224 NR Description: expressed protein [Arabidopsis thaliana]
  misc_feature (1)..(38): Homolog of NCBI NO: 28416553 NR Description: At5g61330 [Arabidopsis thaliana]
  misc_feature (1)..(38): Homolog of NCBI NO: 9757854 NR Description: contains similarity to apoptosis antagonizing
  misc_feature (1)..(38): Homolog of NCBI NO: 34913376 NR Description: B1147B04.8 [Oryza sativa (japonica
MHKSIASFRDKSINKWQRMTQVTTGAAAIKGKFHAFNQVRFFNWYWEFSYVIGEYLILILLPHHTGY

SEQ ID NO: 58677 - protein, 64 aa, Glycine max
  peptide (1)..(64): Ceres Seq. ID no. 15169112
  misc_feature (1)..(59): Homolog of NCBI NO: 16758536 NR Description: apoptosis antagonizing transcription factor
  misc_feature (1)..(51): Homolog of NCBI NO: 9790013 NR Description: apoptosis antagonizing transcription factor;
  misc_feature (1)..(50): Homolog of NCBI NO: 19920846 NR Description: CG11188-PA [Drosophila melanogaster]
  misc_feature (1)..(61): Homolog of NCBI NO: 19114368 NR Description: similarity to S. cerevisiae protein transport
  misc_feature (1)..(51): Homolog of NCBI NO: 6841204 NR Description: HSPC277 [Homo sapiens]
  misc_feature (1)..(51): Homolog of NCBI NO: 31198981 NR Description: ENSANGP00000017925 [Anopheles gambiae]
  misc_feature (1)..(61): Homolog of NCBI NO: 15240224 NR Description: expressed protein [Arabidopsis thaliana]
  misc_feature (1)..(61): Homolog of NCBI NO: 28416553 NR Description: At5g61330 [Arabidopsis thaliana]
  misc_feature (1)..(61): Homolog of NCBI NO: 9757854 NR Description: contains similarity to apoptosis antagonizing
  misc_feature (1)..(60): Homolog of NCBI NO: 34913376 NR Description: B1147B04.8 [Oryza sativa (japonica
MQPKKRKIVDRRASKSRKIRYNVHEKIVNFMAPLPANIPPMAPKLFENLFGLKTERLSSSAAAS

SEQ ID NO: 58678 - protein, 49 aa, Glycine max
  peptide (1)..(49): Ceres Seq. ID no. 15169113
  misc_feature (1)..(21): Homolog of NCBI NO: 15240224 NR Description: expressed protein [Arabidopsis thaliana]
  misc_feature (1)..(20): Homolog of NCBI NO: 28416553 NR Description: At5g61330 [Arabidopsis thaliana]
  misc_feature (1)..(20): Homolog of NCBI NO: 9757854 NR Description: contains similarity to apoptosis antagonizing
  misc_feature (1)..(20): Homolog of NCBI NO: 34913376 NR Description: B1147B04.8 [Oryza sativa (japonica
MTQVTTGAAAIKGKFHAFNQVRFFNWYWEFSYVIGEYLILILLPHHTGY

SEQ ID NO: 58679 - DNA, 1891 bp, Glycine max
  misc_feature (1)..(1891): Ceres Seq. ID no. 13595747
gagagctagaaagtagagacacacaatccaaaagagtcttattgaagggtgagggtcaccttggaaatccatccatgccatggctcccactcttacatccaattcatcttttttaagcaccagtcctcattcaagggtgagcctccggaatccaaggctgagagtctttgccaagaagtctggatcattcccatcatttggactaggcaagcccaaagatgattcttcttctgctgaagaaaaagataactcatccaattccaacccctttcgtttggactttggaaagatacccgatgtaacgtctttgatcccagttccaagcaacacttctgcgccaggcttttcttttggaaacacaaggcgcaaggacccttcaacagtgtttgttgccggcgcaacggggcaggctggtattcgcattgcacaaacgttgttaagggaaggtttcagtgtacgggctggagtccccgaacttggttctgcccaagaacttgctcgtctcgctactcaatacaagattatatcaaatgaacaggcaaagcgtctgaacgctgtgcaatcaagctttgacaatgcagacacaatagccaaagcaataggcaatgsccggcaaggtggttgtcaccattggtccgacagagaacggtccaaccgcagaggtatctgcatcagatgccttgcaagtggttcaggcagcacagctggcaggagtaggccatgtggccattgtctacgacaagagcagcgctggggcctcaacctacaatgtactggatggcctctcatccttcttcaacaacctcttctccaggtctcaaccgttgaccatacaagagttcttgcagaaagtcattgaaacggatgtcaagtacaccttcatcaagacaagtttgactgatgatttctcaccggagagttcctacaatgtggttgtcttgggcgaaggaagcgccagtgcaaacgactataaagtagcaaagtccaagatcgcatcgttggtggctgaatgttcttctccaacacaagaggtagcaagaaaaacaaggttgtgaaaagtgcactcggatcccagtgcccccttgaaagcgtgtagatgaacttttcaagccctattcctgaggatggaagaaaggaaaagcctatgctgaaatgcaggnaaaaagcaaaaggcagaggaagaagcaagagtggcagctgaaaaggcccgtgaagcttctgaatcagcaaagaagttggaagaagaggtgaaaaggctttcacagcaagaaacacgggctgcaagtctggctcaagaggcccaagagaaggcagaggctggcggggcttcagttgaaaacctcttgaacaaggcaaaagactttggtgcagggttttcctgggaaaagttgagctcacagattactacttcaatccaaaagcctgatgaggatgagaaaccaaaggtgcagctagccactgtaaggggacaggccaaggctcggaatctcgcgcctaacaaagcagtggtcaaacaaacacctcagagaagtgcagctaaaccaaaggtggaaaaaccaaagcagacagagacaccaaaggaggtgaggaatgtatttggtggcctgttcaagcaagagactatctatgttgatgatgactagtggaagcggaacatattatcttgcacggcataaaactatgttgtttgagtctgtgttaacgtagataatttggttgcatgtgtatggtcttgtaaagttctatgtttgaagcagaatatttatgtagttgtactggttcagaaccctattttcgggggaaaacaataaaagggttttcccttatcttctatcctctcctctcttgstaataattaataatatctttggtcacggtyttgccttgcttc

SEQ ID NO: 58680 - protein, 259 aa, Glycine max
  peptide (1)..(259): Ceres Seq. ID no. 15221654
  misc_feature (6)..(176): Homolog of NCBI NO: 18408279 NR Description: expressed protein [Arabidopsis thaliana]
  misc_feature (6)..(176): Homolog of NCBI NO: 7487756 NR Description: hypothetical protein T6H20.190 - Arabidopsis
  misc_feature (177)..(177): Xaa is any aa, unknown or other
MAPTLTSNSSFLSTSPHSRVSLRNPRLRVFAKKSGSFPSFGLGKPKDDSSSAEEKDNSSNSNPFRLDFGKIPDVTSLIPVPSNTSAPGFSFGNTRRKDPSTVFVAGATGQAGIRIAQTLLREGFSVRAGVPELGSAQELARLATQYKIISNEQAKRLNAVQSSFDNADTIAKAIGNXRQGGCHHWSDRERSNRRGICIRCLASGSGSTAGRSRPCGHCLRQEQRWGLNLQCTGWPLILLQQPLLQVSTVDHTRVLAESH

SEQ ID NO: 58681 - protein, 149 aa, Glycine max
  peptide (1)..(149): Ceres Seq. ID no. 15221655
  misc_feature (4)..(120): Homolog of NCBI NO: 18408279 NR Description: expressed protein [Arabidopsis thaliana]
  misc_feature (4)..(149): Homolog of NCBI NO: 7487756 NR Description: hypothetical protein T6H20.190 - Arabidopsis
  misc_feature (2)..(2): Xaa is any aa, unknown or other
MXGKVVVTIGPTENGPTAEVSASDALQVVQAAQLAGVGHVAIVYDKSSAGASTYNVLDGLSSFFNNLFSRSQPLTIQEFLQKVIETDVKYTFIKTSLTDDFSPESSYNVVVLGEGSASANDYKVAKSKIASLVAECSSPTQEVARKTRL

SEQ ID NO: 58682 - DNA, 1457 bp, Glycine max
  misc_feature (1)..(1457): Ceres Seq. ID no. 13577044
gaggtcagtcaatcattcattcctattccttctttctcttccaattccaaatcacaacccttcgttttccctctctagaatcttcttctccattcaattcctactccttttttcctctctgtccctctctctctccctctctcatggcttccgatctcgaagcaaaagccaaagaggccttcgtcgaagaccacttcgaactcgccgtggaccttctctctcaggccattcatctcgaacccaacaaagccgaattctacgccgaccgcgcccaagccaacatcaaactcaacaacttcactgaggctgtggctgatgctaacaaagcaattgaattgaatccttctctaccaaaagcatatttgcggaaaggtactgcttgcatgaagcttgaggaatatgaaactgcaaaggctgctctggaggtgggtgcatcattgtctccagacaactcaaggtttgctactttgatcaaagaatgtgataagctcattgcagaatcttataccccacctattatagaggaaaaggccacaacagaagatgttactccaaaagatgttcagcaacaagatgatcttctagagaagccaacagttacagtgactaaacctaaatataggcatgaattctaccagaaacatgatcaggtggttgtgaccatatttgcaaagaaaatcccaaaggaaagcattactgttgacttcggtgaacaaatactaagtgttagtattaatgtcacaggagaagacacatatgtttttcaacctcgcttatttggaaagatcataccttccaattgtcaatatgaagttttgtccaccaaaattgaaattcgtcttgcaaaagcagaacctattcactggacatctctagaattcaccagagacatcgttgttcaacagagggttaatgcttcttcagttactggaagtcaaagaccttcttacccatcctcaaaacaaacaagagattgggacaagattgaagctcaagtcaagaaagaggagaaagatgaaaagcttgatggcgatgctgcattgaacaaatttttccgcgaaatatatcaagatgcagatgaggatacaagaagagcaatgaaaaagtcatttgttgagtctaatgggacagttctgtctacaaactggaaagaagtgggaacaaagaaggtagagggaagtcctcctgatggcatggagttgaagaaatgggaatattaagacattttctggatcagtgttgcatatatttttatgtgggattattatacttcgtttactttttttttggttagttaactactgaactgaagatactattttctttattttttttttaatgttcatgaggtgttgtgtccgtcttcgctagaacctgaattcatggttgttggttgaggacaaggctcttcactttggtgaatataattcatggttgttgacaaaaaaaaaaaaaaa

SEQ ID NO: 58683 - protein, 405 aa, Glycine max
  peptide (1)..(405): Ceres Seq. ID no. 13577045
  misc_feature (324)..(403): Pfam Name: SGS domain Pfam Description: SGS domain
  misc_feature (48)..(405): Homolog of NCBI NO: 40974917 NR Description: SGT1-like protein [Brassica oleracea]
  misc_feature (49)..(405): Homolog of NCBI NO: 34912836 NR Description: Sgt1 [Oryza sativa (japonica cultivar-group)]
  misc_feature (48)..(404): Homolog of NCBI NO: 15236528 NR Description: phosphatase - related [Arabidopsis thaliana]
  misc_feature (49)..(405): Homolog of NCBI NO: 6581058 NR Description: Sgt1 [Oryza sativa]
  misc_feature (48)..(404): Homolog of NCBI NO: 17017308 NR Description: SGT1a [Arabidopsis thaliana]
  misc_feature (48)..(405): Homolog of NCBI NO: 15237122 NR Description: phosphatase - related [Arabidopsis thaliana]
  misc_feature (48)..(405): Homolog of NCBI NO: 40974915 NR Description: SGT1-like protein [Brassica oleracea]
  misc_feature (80)..(404): Homolog of NCBI NO: 6468695 NR Description: putative protein phosphatase [Rubus idaeus]
  misc_feature (49)..(405): Homolog of NCBI NO: 17017306 NR Description: SGT1 [Hordeum vulgare]
  misc_feature (48)..(404): Homolog of NCBI NO: 29468339 NR Description: SGT1 [Nicotiana benthamiana]
GQSIIHSYSFFLFQFQITTLRFPSLESSSPFNSYSFFPLCPSLSPSLMASDLEAKAKEAFVEDHFELAVDLLSQAIHLEPNKAEFYADRAQANIKLNNFTEAVADANKAIELNPSLPKAYLRKGTACMKLEEYETAKAALEVGASLSPDNSRFATLIKECDKLIAESYTPPIIEEKATTEDVTPKDVQQQDDLLEKPTVTVTKPKYRHEFYQKHDQVVVTIFAKKIPKESITVDFGEQILSVSINVTGEDTYVFQPRLFGKIIPSNCQYEVLSTKIEIRLAKAEPIHWTSLEFTRDIVVQQRVNASSVTGSQRPSYPSSKQTRDWDKIEAQVKKEEKDEKLDGDAALNKFFREIYQDADEDTRRAMKKSFVESNGTVLSTNWKEVGTKKVEGSPPDGMELKKWEY

SEQ ID NO: 58684 - protein, 358 aa, Glycine max
  peptide (1)..(358): Ceres Seq. ID no. 13577046
  misc_feature (277)..(356): Pfam Name: SGS domain Pfam Description: SGS domain
  misc_feature (1)..(358): Homolog of NCBI NO: 40974917 NR Description: SGT1-like protein [Brassica oleracea]
  misc_feature (2)..(358): Homolog of NCBI NO: 34912836 NR Description: Sgt1 [Oryza sativa (japonica cultivar-group)]
  misc_feature (1)..(357): Homolog of NCBI NO: 15236528 NR Description: phosphatase - related [Arabidopsis thaliana]
  misc_feature (2)..(358): Homolog of NCBI NO: 6581058 NR Description: Sgt1 [Oryza sativa]
  misc_feature (1)..(357): Homolog of NCBI NO: 17017308 NR Description: SGT1a [Arabidopsis thaliana]
  misc_feature (1)..(358): Homolog of NCBI NO: 15237122 NR Description: phosphatase - related [Arabidopsis thaliana]
  misc_feature (1)..(358): Homolog of NCBI NO: 40974915 NR Description: SGT1-like protein [Brassica oleracea]
  misc_feature (33)..(357): Homolog of NCBI NO: 6468695 NR Description: putative protein phosphatase [Rubus idaeus]
  misc_feature (2)..(358): Homolog of NCBI NO: 17017306 NR Description: SGT1 [Hordeum vulgare]
  misc_feature (1)..(357): Homolog of NCBI NO: 29468339 NR Description: SGT1 [Nicotiana benthamiana]
MASDLEAKAKEAFVEDHFELAVDLLSQAIHLEPNKAEFYADRAQANIKLNNFTEAVADANKAIELNPSLPKAYLRKGTACMKLEEYETAKAALEVGASLSPDNSRFATLIKECDKLIAESYTPPIIEEKATTEDVTPKDVQQQDDLLEKPTVTVTKPKYRHEFYQKHDQVVVTIFAKKIPKESITVDFGEQILSVSINVTGEDTYVFQPRLFGKIIPSNCQYEVLSTKIEIRLAKAEPIHWTSLEFTRDIVVQQRVNASSVTGSQRPSYPSSKQTRDWDKIEAQVKKEEKDEKLDGDAALNKFFREIYQDADEDTRRAMKKSFVESNGTVLSTNWKEVGTKKVEGSPPDGMELKKWEY

SEQ ID NO: 58685 - protein, 278 aa, Glycine max
  peptide (1)..(278): Ceres Seq. ID no. 13577047
  misc_feature (197)..(276): Pfam Name: SGS domain Pfam Description: SGS domain
  misc_feature (1)..(278): Homolog of NCBI NO: 40974917 NR Description: SGT1-like protein [Brassica oleracea]
  misc_feature (1)..(278): Homolog of NCBI NO: 34912836 NR Description: Sgt1 [Oryza sativa (japonica cultivar-group)]
  misc_feature (1)..(277): Homolog of NCBI NO: 15236528 NR Description: phosphatase - related [Arabidopsis thaliana]
  misc_feature (1)..(278): Homolog of NCBI NO: 6581058 NR Description: Sgt1 [Oryza sativa]
  misc_feature (1)..(277): Homolog of NCBI NO: 17017308 NR Description: SGT1a [Arabidopsis thaliana]
  misc_feature (1)..(278): Homolog of NCBI NO: 15237122 NR Description: phosphatase - related [Arabidopsis thaliana]
  misc_feature (1)..(278): Homolog of NCBI NO: 40974915 NR Description: SGT1-like protein [Brassica oleracea]
  misc_feature (1)..(277): Homolog of NCBI NO: 6468695 NR Description: putative protein phosphatase [Rubus idaeus]
  misc_feature (1)..(278): Homolog of NCBI NO: 17017306 NR Description: SGT1 [Hordeum vulgare]
  misc_feature (1)..(277): Homolog of NCBI NO: 29468339 NR Description: SGT1 [Nicotiana benthamiana]
MKLEEYETAKAALEVGASLSPDNSRFATLIKECDKLIAESYTPPIIEEKATTEDVTPKDVQQQDDLLEKPTVTVTKPKYRHEFYQKHDQVVVTIFAKKIPKESITVDFGEQILSVSINVTGEDTYVFQPRLFGKIIPSNCQYEVLSTKIEIRLAKAEPIHWTSLEFTRDIVVQQRVNASSVTGSQRPSYPSSKQTRDWDKIEAQVKKEEKDEKLDGDAALNKFFREIYQDADEDTRRAMKKSFVESNGTVLSTNWKEVGTKKVEGSPPDGMELKKWEY

SEQ ID NO: 58686 - DNA, 655 bp, Glycine max
  misc_feature (1)..(655): Ceres Seq. ID no. 14312594
acaaacgtgaagacctcactaaagaggttctgattgatgaatggttccatacaggggatattggagagtggcaacctaatggaagcatgaaaattattgatcggaagaagaatatatttaagctttcacaaggagaatatgttgctgtcgaaaacctggagaatatttacggtcaagtttcttctattgaatctatatgggtttatggaaacagttttgaggccttccttgtggctgttgttaaccccagtaagcaagcacttgaacattgggcccaagaaaatggtatatccatggacttcaattctctctgtgaagatgctcgagcaaaaagttacataattgaagagctctcaaagattgcgaaggaaaagaagttgaaaggttttgagtttataaaagcagttcaccttgactcaattccatttgacatggaacgtgaccttatcactccaacatacaagaagaagaggccacagttgcttaaatactatcagaatgccattgacaacatgtataagagtggaagtaaacccagtgcctgagacctgatttgggagataatttattttctgtatgtgatggtgtttgtctccgttcaattgtttccttttggtgactgtatatacgctgagtagttatatagggatacgtc

SEQ ID NO: 58687 - protein, 180 aa, Glycine max
  peptide (1)..(180): Ceres Seq. ID no. 14312595
  misc_feature (1)..(67): Pfam Name: AMP-binding enzyme Pfam Description: AMP-binding enzyme
  misc_feature (1)..(180): Homolog of NCBI NO: 22330132 NR Description: long-chain-fatty-acid--CoA ligase (acyl CoA
  misc_feature (1)..(173): Homolog of NCBI NO: 15217631 NR Description: long-chain-fatty-acid--CoA ligase (acyl-CoA
  misc_feature (1)..(165): Homolog of NCBI NO: 7437841 NR Description: probable long-chain-fatty-acid-CoA ligase (EC
  misc_feature (1)..(173): Homolog of NCBI NO: 34898260 NR Description: similar to long-chain-fatty-acid--CoA ligase 1
  misc_feature (1)..(174): Homolog of NCBI NO: 20805871 NR Description: long chain acyl-CoA synthetase 5 [Arabidopsis
  misc_feature (1)..(174): Homolog of NCBI NO: 15237023 NR Description: long-chain-fatty-acid--CoA ligase (acyl CoA
  misc_feature (1)..(174): Homolog of NCBI NO: 15236634 NR Description: long-chain-fatty-acid--CoA ligase (acyl-CoA
  misc_feature (1)..(180): Homolog of NCBI NO: 7437845 NR Description: probable long-chain-fatty-acid-CoA ligase (EC
  misc_feature (1)..(174): Homolog of NCBI NO: 34911190 NR Description: putative acyl-CoA synthetase
  misc_feature (19)..(180): Homolog of NCBI NO: 3127892 NR Description: acyl-coA synthetase [Cicer arietinum]
KREDLTKEVLIDEWFHTGDIGEWQPNGSMKIIDRKKNIFKLSQGEYVAVENLENIYGQVSSIESIWVYGNSFEAFLVAVVNPSKQALEHWAQENGISMDFNSLCEDARAKSYIIEELSKIAKEKKLKGFEFIKAVHLDSIPFDMERDLITPTYKKKRPQLLKYYQNAIDNMYKSGSKPSA

SEQ ID NO: 58688 - protein, 152 aa, Glycine max
  peptide (1)..(152): Ceres Seq. ID no. 14312596
  misc_feature (1)..(152): Homolog of NCBI NO: 22330132 NR Description: long-chain-fatty-acid--CoA ligase (acyl CoA
  misc_feature (1)..(145): Homolog of NCBI NO: 15217631 NR Description: long-chain-fatty-acid--CoA ligase (acyl-CoA
  misc_feature (1)..(137): Homolog of NCBI NO: 7437841 NR Description: probable long-chain-fatty-acid-CoA ligase (EC
  misc_feature (1)..(145): Homolog of NCBI NO: 34898260 NR Description: similar to long-chain-fatty-acid--CoA ligase 1
  misc_feature (1)..(146): Homolog of NCBI NO: 20805871 NR Description: long chain acyl-CoA synthetase 5 [Arabidopsis
  misc_feature (1)..(146): Homolog of NCBI NO: 15237023 NR Description: long-chain-fatty-acid--CoA ligase (acyl CoA
  misc_feature (1)..(146): Homolog of NCBI NO: 15236634 NR Description: long-chain-fatty-acid--CoA ligase (acyl-CoA
  misc_feature (1)..(152): Homolog of NCBI NO: 7437845 NR Description: probable long-chain-fatty-acid-CoA ligase (EC
  misc_feature (1)..(146): Homolog of NCBI NO: 34911190 NR Description: putative acyl-CoA synthetase
  misc_feature (1)..(152): Homolog of NCBI NO: 3127892 NR Description: acyl-coA synthetase [Cicer arietinum]
MKIIDRKKNIFKLSQGEYVAVENLENIYGQVSSIESIWVYGNSFEAFLVAVVNPSKQALEHWAQENGISMDFNSLCEDARAKSYIIEELSKIAKEKKLKGFEFIKAVHLDSIPFDMERDLITPTYKKKRPQLLKYYQNAIDNMYKSGSKPSA

SEQ ID NO: 58689 - DNA, 1000 bp, Glycine max
  misc_feature (1)..(1000): Ceres Seq. ID no. 15226793
aatcatcaccatcaatggcttccatgggctctctgaagatgatttcgtccctcaaactctcccgttcaagttgttctatctctccccttcaaacccaaaagcaagtaggttcaagtctctttcaatccttcccaaccaaaactttaaaattctcagctacccctcaagtatctacatccagaagaagtaccaacaagaccactaccactgcattcttcttcaataaccaaaagcagcatcaagattcctcacagccagccaaagttcaagaactctttgtctacgagatcaacgaacgcgaccgaggaagtcctgcataccttaggctaagccagaagccagttaactctctaggagacttagtgccattcagcaacaagatatactctggagacttgcaaaagagactagggataactgcaggcttgtgtgtgctcatccagcatgagcctgagaaaaagggtgatagatatgaggccatttacagcttctactttggaaactatggccacatatcagtgcaaggagcctatctcacattccaagacacatatctggcagttacaggaggctctggaatctttgaaggtgcttctggacaagtgaagcttcaccaacttgtgttccctttcaagctgttctacaccttctatttgaagggtgttcctgatttgcctcctgaactgcttgggaaacctgttgaaccttcaccaagtgttgagccttctcctgctgctatggctaccgagcctcatgcctgtttgccaaacttcaccaactgataatgattatgatgatgcaattgagccttttttgtttttcaggaaattttagttttgaacccaaaataaagtctaggtgttgcatattgactgtataccaaaattcgccaactgatgatgatgcaattgagtccttttcttttgcagaaaattttattttggacccaaaataaaatctgggtgttgcagatttactatatcaaaaaaaaaaaaaaaaa

SEQ ID NO: 58690 - protein, 259 aa, Glycine max
  peptide (1)..(259): Ceres Seq. ID no. 15226794
  misc_feature (81)..(259): Pfam Name: Allene oxide cyclase Pfam Description: Allene oxide cyclase
  misc_feature (13)..(259): Homolog of NCBI NO: 15222241 NR Description: allene oxide cyclase family [Arabidopsis
  misc_feature (25)..(259): Homolog of NCBI NO: 40643247 NR Description: allene oxide cyclase [Hordeum vulgare]
  misc_feature (46)..(259): Homolog of NCBI NO: 39980760 NR Description: allene oxide cyclase [Zea mays]
  misc_feature (15)..(257): Homolog of NCBI NO: 23956574 NR Description: allene oxide cyclase [Solanum tuberosum]
  misc_feature (54)..(259): Homolog of NCBI NO: 1362093 NR Description: hypothetical protein (clone TPP15) - tomato
  misc_feature (70)..(259): Homolog of NCBI NO: 21727906 NR Description: allene oxide cyclase [Oryza sativa (japonica
  misc_feature (22)..(259): Homolog of NCBI NO: 8977961 NR Description: allene oxide cyclase [Lycopersicon esculentum]
  misc_feature (19)..(259): Homolog of NCBI NO: 40644130 NR Description: allene oxide cyclase [Nicotiana tabacum]
  misc_feature (7)..(259): Homolog of NCBI NO: 16416376 NR Description: mangrin [Bruguiera sexangula]
  misc_feature (5)..(259): Homolog of NCBI NO: 40644132 NR Description: allene oxide cyclase [Medicago truncatula]
SSPSMASMGSLKMISSLKLSRSSCSISPLQTQKQVGSSLFQSFPTKTLKFSATPQVSTSRRSTNKTTTTAFFFNNQKQHQDSSQPAKVQELFVYEINERDRGSPAYLRLSQKPVNSLGDLVPFSNKIYSGDLQKRLGITAGLCVLIQHEPEKKGDRYEAIYSFYFGNYGHISVQGAYLTFQDTYLAVTGGSGIFEGASGQVKLHQLVFPFKLFYTFYLKGVPDLPPELLGKPVEPSPSVEPSPAAMATEPHACLPNFTN

SEQ ID NO: 58691 - protein, 255 aa, Glycine max
  peptide (1)..(255): Ceres Seq. ID no. 15226795
  misc_feature (77)..(255): Pfam Name: Allene oxide cyclase Pfam Description: Allene oxide cyclase
  misc_feature (9)..(255): Homolog of NCBI NO: 15222241 NR Description: allene oxide cyclase family [Arabidopsis
  misc_feature (21)..(255): Homolog of NCBI NO: 40643247 NR Description: allene oxide cyclase [Hordeum vulgare]
  misc_feature (42)..(255): Homolog of NCBI NO: 39980760 NR Description: allene oxide cyclase [Zea mays]
  misc_feature (11)..(253): Homolog of NCBI NO: 23956574 NR Description: allene oxide cyclase [Solanum tuberosum]
  misc_feature (50)..(255): Homolog of NCBI NO: 1362093 NR Description: hypothetical protein (clone TPP15) - tomato
  misc_feature (66)..(255): Homolog of NCBI NO: 21727906 NR Description: allene oxide cyclase [Oryza sativa (japonica
  misc_feature (18)..(255): Homolog of NCBI NO: 8977961 NR Description: allene oxide cyclase [Lycopersicon esculentum]
  misc_feature (15)..(255): Homolog of NCBI NO: 40644130 NR Description: allene oxide cyclase [Nicotiana tabacum]
  misc_feature (3)..(255): Homolog of NCBI NO: 16416376 NR Description: mangrin [Bruguiera sexangula]
  misc_feature (1)..(255): Homolog of NCBI NO: 40644132 NR Description: allene oxide cyclase [Medicago truncatula]
MASMGSLKMISSLKLSRSSCSISPLQTQKQVGSSLFQSFPTKTLKFSATPQVSTSRRSTNKTTTTAFFFNNQKQHQDSSQPAKVQELFVYEINERDRGSPAYLRLSQKPVNSLGDLVPFSNKIYSGDLQKRLGITAGLCVLIQHEPEKKGDRYEAIYSFYFGNYGHISVQGAYLTFQDTYLAVTGGSGIFEGASGQVKLHQLVFPFKLFYTFYLKGVPDLPPELLGKPVEPSPSVEPSPAAMATEPHACLPNFTN

SEQ ID NO: 58692 - protein, 252 aa, Glycine max
  peptide (1)..(252): Ceres Seq. ID no. 15226796
  misc_feature (74)..(252): Pfam Name: Allene oxide cyclase Pfam Description: Allene oxide cyclase
  misc_feature (6)..(252): Homolog of NCBI NO: 15222241 NR Description: allene oxide cyclase family [Arabidopsis
  misc_feature (18)..(252): Homolog of NCBI NO: 40643247 NR Description: allene oxide cyclase [Hordeum vulgare]
  misc_feature (39)..(252): Homolog of NCBI NO: 39980760 NR Description: allene oxide cyclase [Zea mays]
  misc_feature (8)..(250): Homolog of NCBI NO: 23956574 NR Description: allene oxide cyclase [Solanum tuberosum]
  misc_feature (47)..(252): Homolog of NCBI NO: 1362093 NR Description: hypothetical protein (clone TPP15) - tomato
  misc_feature (63)..(252): Homolog of NCBI NO: 21727906 NR Description: allene oxide cyclase [Oryza sativa (japonica
  misc_feature (15)..(252): Homolog of NCBI NO: 8977961 NR Description: allene oxide cyclase [Lycopersicon esculentum]
  misc_feature (12)..(252): Homolog of NCBI NO: 40644130 NR Description: allene oxide cyclase [Nicotiana tabacum]
  misc_feature (1)..(252): Homolog of NCBI NO: 16416376 NR Description: mangrin [Bruguiera sexangula]
  misc_feature (1)..(252): Homolog of NCBI NO: 40644132 NR Description: allene oxide cyclase [Medicago truncatula]
MGSLKMISSLKLSRSSCSISPLQTQKQVGSSLFQSFPTKTLKFSATPQVSTSRRSTNKTTTTAFFFNNQKQHQDSSQPAKVQELFVYEINERDRGSPAYLRLSQKPVNSLGDLVPFSNKIYSGDLQKRLGITAGLCVLIQHEPEKKGDRYEAIYSFYFGNYGHISVQGAYLTFQDTYLAVTGGSGIFEGASGQVKLHQLVFPFKLFYTFYLKGVPDLPPELLGKPVEPSPSVEPSPAAMATEPHACLPNFTN

SEQ ID NO: 58693 - DNA, 1897 bp, Glycine max
  misc_feature (1)..(1897): Ceres Seq. ID no. 15225226
gaagaaatgacacactattgatgaattaaatagaaatttatgatgctcgcgtctgtataggattggtaatttggtattagtagtggtagtaacagttgtagatgtttttttaaatttgttttcattatcttgtgtggcttctattttgcattattgtccctgctactaatgttttctctcttgcagaaaagccaaggacagagagtgcaatttcaactgtgggttctcttccccacccaactagtacacgatttattgcttatgaagagcttaaagaagcaacaaacaattttgaaccagcgagtgttcttggagaaggagggtttggtagagtttttaaaggtgtcttaaatgatggtactcatgtagcaattaagaggcttacaaatggagggcaacagggtgacaaagagtttttggttgaggttgagatgcttagccggttgcatcatcgtaaccttgtaaaactagtgggatactttagtaatcgtgactcatcacaaaatgtactttgctatgagcttgtccctaatggaagtttggaggcttggcttcatggtcccttgggaatcaattgtcctttggattgggacaccagaatgaagattgcgcttgatgctgcaaggggactttcatacctgcatgaagactcacagccctgtgtaatacatagagacttcaaggcatccaacatattgcttgagaacaattttcatgctaaggttgcagattttggtcttgctaagcaagcacctgaaggcagatctaattatttgtctactcgtgtcatggggacatttgggtacgttgctcctgaatatgccatgactggacacctacttgttaaaagtgacgtttatagctatggtgttgtcttgctggaactgcttactggcaggaagcctgtggatatgtcacagccaactggacaagagaatcttgttacttgggttagttccataccttgtgagacaatgttatttatgtcaagttcagagcaacttcccatgttttctatatttatactaggaaatatgaaagatttaatttaaatccatcctttgaaacttttacattgagtaggtagttagtaagttcatttttcctttcaggctaggccaatccttagagataaggaccggttggaagagattgctgatccaagacttggtggaaagtatccaaaggaagattttgtacgtgtttgcactattgctgcagcctgtgttgctctagaagcaaaccaacgacccacaatgggtgaagtggtacagtcacttaaaatggtgcagcgcgtcacagaataccaagattctgtgttagcctcatccaatgcacgacccaacctacgacagtcctctagcacttttgaatttgatggaacatcttcaatgttctcttcaggtccttactctggtctaagtgcctttgacaatgacaacatttctaggactgtggttttctctgaagatctttgtgaaggacgatgaaaactgagaaaacttagccattcataatgttttctttctttcccatttttgtgagcactttgcaagctttcaaccaaaatgtttttttaacctcatgaagcataaggcacataatttttccaaatagatttaagcattttgttggtgagtggaagggtaatatgattgtaataattgcttgtataaatagaacaaaattcgttagcagattagttatttaaaaagatgagttgggtaattgcttgtataaatagaacaaaatttgccaaaccggctcactagttttatttatcctttgacttgaacaaaggaagacatcacttgtattcttcgattgtgttaattgatttctttgagctgcttttgtcaaaaaaaaaaaaaaaaaaaaaaaaaaaaaaaaaaaaaaa

SEQ ID NO: 58694 - protein, 206 aa, Glycine max
  peptide (1)..(206): Ceres Seq. ID no. 15225227
  misc_feature (1)..(173): Homolog of NCBI NO: 34910468 NR Description: putative protein kinase [Oryza sativa (japonica
  misc_feature (1)..(173): Homolog of NCBI NO: 34903544 NR Description: putative protein kinase APK1AArabidopsis thaliana
  misc_feature (1)..(173): Homolog of NCBI NO: 25287641 NR Description: probable protein kinase [imported] - Arabidopsis
  misc_feature (1)..(173): Homolog of NCBI NO: 30680947 NR Description: protein kinase family [Arabidopsis thaliana]
  misc_feature (1)..(191): Homolog of NCBI NO: 22327898 NR Description: protein kinase family [Arabidopsis thaliana]
  misc_feature (1)..(191): Homolog of NCBI NO: 20453162 NR Description: At5g56885 [Arabidopsis thaliana]
  misc_feature (1)..(173): Homolog of NCBI NO: 32488293 NR Description: OSJNBb0065L13.2 [Oryza sativa (japonica
  misc_feature (1)..(177): Homolog of NCBI NO: 34902828 NR Description: unnamed protein product [Oryza sativa (japonica
  misc_feature (1)..(177): Homolog of NCBI NO: 30679031 NR Description: protein kinase family [Arabidopsis thaliana]
  misc_feature (1)..(177): Homolog of NCBI NO: 7488203 NR Description: probable serine/threonine-specific protein kinase
MLSRLHHRNLVKLVGYFSNRDSSQNVLCYELVPNGSLEAWLHGPLGINCPLDWDTRMKIALDAARGLSYLHEDSQPCVIHRDFKASNILLENNFHAKVADFGLAKQAPEGRSNYLSTRVMGTFGYVAPEYAMTGHLLVKSDVYSYGVVLLELLTGRKPVDMSQPTGQENLVTWVSSIPCETMLFMSSSEQLPMFSIFILGNMKDLI

SEQ ID NO: 58695 - protein, 150 aa, Glycine max
  peptide (1)..(150): Ceres Seq. ID no. 15225228
  misc_feature (1)..(117): Homolog of NCBI NO: 34910468 NR Description: putative protein kinase [Oryza sativa (japonica
  misc_feature (1)..(117): Homolog of NCBI NO: 34903544 NR Description: putative protein kinase APK1AArabidopsis thaliana
  misc_feature (1)..(117): Homolog of NCBI NO: 25287641 NR Description: probable protein kinase [imported] - Arabidopsis
  misc_feature (1)..(117): Homolog of NCBI NO: 30680947 NR Description: protein kinase family [Arabidopsis thaliana]
  misc_feature (1)..(135): Homolog of NCBI NO: 22327898 NR Description: protein kinase family [Arabidopsis thaliana]
  misc_feature (1)..(135): Homolog of NCBI NO: 20453162 NR Description: At5g56885 [Arabidopsis thaliana]
  misc_feature (1)..(117): Homolog of NCBI NO: 32488293 NR Description: OSJNBb0065L13.2 [Oryza sativa (japonica
  misc_feature (1)..(121): Homolog of NCBI NO: 34902828 NR Description: unnamed protein product [Oryza sativa (japonica
  misc_feature (1)..(121): Homolog of NCBI NO: 30679031 NR Description: protein kinase family [Arabidopsis thaliana]
  misc_feature (1)..(121): Homolog of NCBI NO: 7488203 NR Description: probable serine/threonine-specific protein kinase
MKIALDAARGLSYLHEDSQPCVIHRDFKASNILLENNFHAKVADFGLAKQAPEGRSNYLSTRVMGTFGYVAPEYAMTGHLLVKSDVYSYGVVLLELLTGRKPVDMSQPTGQENLVTWVSSIPCETMLFMSSSEQLPMFSIFILGNMKDLI

SEQ ID NO: 58696 - DNA, 1498 bp, Glycine max
  misc_feature (1)..(1498): Ceres Seq. ID no. 14310807
atctagtatatatcttacccttagacacaacaaattccacataacaatttcatctagcaatgttaaaaaaccaaccacaaccagattggcctgagcccattgtccgggttcagtccttatccgaaaactgcatagattcaatccctgaaaggtacatcaagccttctactgatagaccatccataagaagttctaattttgatgatgccaatattccaatcatcgaccttggtggtctgtttggtgctgaccaacgtgtctcagactcaattcttaggcaaatctcagaggcttgcaaagagtggggcttcttccaagtcactaaccatggtgttagccctgatttgatggacaaggctagggaaacttggcgtcaattctttcacatgcccatggaggtgaagcagcaatatgccaactcgccaaaaacctatgaagggtacggaagcagacttggaattgagaaaggtgctattcttgattggagtgattactattttcttcactatcttcccttgccactcaaggactataacaaatggcctgcctcgcctccctcttgcaggaaagtgtttgatgagtatgggagagagttagtgaagctatgtgggaggttgatgaaggctttgtcaataaaccttggattagatgaaaaaattcttcaaaatggttttgggggagaagacataggggcatgtctaagagtgaatttttaccctaaatgtccacggccagagttgacgttgggtttgtcatcacactcagaccctggaggaatgactatgttgcttccagatgatcaagttcctggtcttcaagttcgaaaatgtgataattggattaccgtgaagcctgcacgccatgcttttatcgtcaatatcggagaccaaattcaggttctaagcaatgcaatttacaagagtgtggagcacagagtgatagtaaattcagataaagagagagtttctctggcatttttctacaaccccaaaagtgatatacccattgagccaataaaagagctggtaacaccggaaaagccctcactctacccagcaatgaccttcgatgaatacagactcttcattagaatgagaggacctcgaggcaaatctcaagttgaatctttaaagtctcccagatgatcaattctgctcataggcttttattgcttgcattctatgtccatttcaaatagtaagtcactatatatgacgtgtttggtttcacgtctttacagcgtgcgtgcgtgtttagtttcacgtcttggatgtgattttttttacatcttagatgttattttaagaagttaatagttatatatagttttcatgtctgaaatgtgattccttacttctcaagagtttacaagcacgctataccttattggtgtataattaattgtaaatcttgtaactagatcgggatttgtttgcacattgagccacagagtaaggatatgtaagagagattggatatatagatatgatattgtttt

SEQ ID NO: 58697 - protein, 361 aa, Glycine max
  peptide (1)..(361): Ceres Seq. ID no. 14310808
  misc_feature (210)..(310): Pfam Name: 2OG-Fe(II) oxygenase superfamily Pfam Description: 2OG-Fe(II) oxygenase superfamily
  misc_feature (14)..(339): Homolog of NCBI NO: 31978953 NR Description: flavonol synthase [Petroselinum crispum]
  misc_feature (12)..(339): Homolog of NCBI NO: 14916566 NR Description: Flavonol synthase (FLS) (CitFLS)
  misc_feature (10)..(357): Homolog of NCBI NO: 21554535 NR Description: putative anthocyanidin synthase [Arabidopsis
  misc_feature (10)..(357): Homolog of NCBI NO: 15224472 NR Description: oxidoreductase, 2OG-Fe(II) oxygenase family
  misc_feature (276)..(358): Homolog of NCBI NO: 34907994 NR Description: leucoanthocyanidin dioxygenase-like protein
  misc_feature (9)..(281): Homolog of NCBI NO: 34907994 NR Description: leucoanthocyanidin dioxygenase-like protein
  misc_feature (9)..(361): Homolog of NCBI NO: 15228785 NR Description: oxidoreductase, 2OG-Fe(II) oxygenase family
  misc_feature (10)..(361): Homolog of NCBI NO: 15229694 NR Description: oxidoreductase, 2OG-Fe(II) oxygenase family
  misc_feature (9)..(361): Homolog of NCBI NO: 21537324 NR Description: leucoanthocyanidin dioxygenase-like protein
  misc_feature (3)..(361): Homolog of NCBI NO: 15239179 NR Description: oxidoreductase, 2OG-Fe(II) oxygenase family
MLKNQPQPDWPEPIVRVQSLSENCIDSIPERYIKPSTDRPSIRSSNFDDANIPIIDLGGLFGADQRVSDSILRQISEACKEWGFFQVTNHGVSPDLMDKARETWRQFFHMPMEVKQQYANSPKTYEGYGSRLGIEKGAILDWSDYYFLHYLPLPLKDYNKWPASPPSCRKVFDEYGRELVKLCGRLMKALSINLGLDEKILQNGFGGEDIGACLRVNFYPKCPRPELTLGLSSHSDPGGMTMLLPDDQVPGLQVRKCDNWITVKPARHAFIVNIGDQIQVLSNAIYKSVEHRVIVNSDKERVSLAFFYNPKSDIPIEPIKELVTPEKPSLYPAMTFDEYRLFIRMRGPRGKSQVESLKSPR

SEQ ID NO: 58698 - protein, 265 aa, Glycine max
  peptide (1)..(265): Ceres Seq. ID no. 14310809
  misc_feature (114)..(214): Pfam Name: 2OG-Fe(II) oxygenase superfamily Pfam Description: 2OG-Fe(II) oxygenase superfamily
  misc_feature (1)..(243): Homolog of NCBI NO: 31978953 NR Description: flavonol synthase [Petroselinum crispum]
  misc_feature (1)..(243): Homolog of NCBI NO: 14916566 NR Description: Flavonol synthase (FLS) (CitFLS)
  misc_feature (1)..(261): Homolog of NCBI NO: 21554535 NR Description: putative anthocyanidin synthase [Arabidopsis
  misc_feature (1)..(261): Homolog of NCBI NO: 15224472 NR Description: oxidoreductase, 2OG-Fe(II) oxygenase family
  misc_feature (180)..(262): Homolog of NCBI NO: 34907994 NR Description: leucoanthocyanidin dioxygenase-like protein
  misc_feature (1)..(185): Homolog of NCBI NO: 34907994 NR Description: leucoanthocyanidin dioxygenase-like protein
  misc_feature (1)..(265): Homolog of NCBI NO: 15228785 NR Description: oxidoreductase, 2OG-Fe(II) oxygenase family
  misc_feature (1)..(265): Homolog of NCBI NO: 15229694 NR Description: oxidoreductase, 2OG-Fe(II) oxygenase family
  misc_feature (1)..(265): Homolog of NCBI NO: 21537324 NR Description: leucoanthocyanidin dioxygenase-like protein
  misc_feature (1)..(265): Homolog of NCBI NO: 15239179 NR Description: oxidoreductase, 2OG-Fe(II) oxygenase family
MDKARETWRQFFHMPMEVKQQYANSPKTYEGYGSRLGIEKGAILDWSDYYFLHYLPLPLKDYNKWPASPPSCRKVFDEYGRELVKLCGRLMKALSINLGLDEKILQNGFGGEDIGACLRVNFYPKCPRPELTLGLSSHSDPGGMTMLLPDDQVPGLQVRKCDNWITVKPARHAFIVNIGDQIQVLSNAIYKSVEHRVIVNSDKERVSLAFFYNPKSDIPIEPIKELVTPEKPSLYPAMTFDEYRLFIRMRGPRGKSQVESLKSPR

SEQ ID NO: 58699 - protein, 252 aa, Glycine max
  peptide (1)..(252): Ceres Seq. ID no. 14310810
  misc_feature (101)..(201): Pfam Name: 2OG-Fe(II) oxygenase superfamily Pfam Description: 2OG-Fe(II) oxygenase superfamily
  misc_feature (1)..(230): Homolog of NCBI NO: 31978953 NR Description: flavonol synthase [Petroselinum crispum]
  misc_feature (1)..(230): Homolog of NCBI NO: 14916566 NR Description: Flavonol synthase (FLS) (CitFLS)
  misc_feature (1)..(248): Homolog of NCBI NO: 21554535 NR Description: putative anthocyanidin synthase [Arabidopsis
  misc_feature (1)..(248): Homolog of NCBI NO: 15224472 NR Description: oxidoreductase, 2OG-Fe(II) oxygenase family
  misc_feature (167)..(249): Homolog of NCBI NO: 34907994 NR Description: leucoanthocyanidin dioxygenase-like protein
  misc_feature (1)..(172): Homolog of NCBI NO: 34907994 NR Description: leucoanthocyanidin dioxygenase-like protein
  misc_feature (1)..(252): Homolog of NCBI NO: 15228785 NR Description: oxidoreductase, 2OG-Fe(II) oxygenase family
  misc_feature (1)..(252): Homolog of NCBI NO: 15229694 NR Description: oxidoreductase, 2OG-Fe(II) oxygenase family
  misc_feature (1)..(252): Homolog of NCBI NO: 21537324 NR Description: leucoanthocyanidin dioxygenase-like protein
  misc_feature (1)..(252): Homolog of NCBI NO: 15239179 NR Description: oxidoreductase, 2OG-Fe(II) oxygenase family
MPMEVKQQYANSPKTYEGYGSRLGIEKGAILDWSDYYFLHYLPLPLKDYNKWPASPPSCRKVFDEYGRELVKLCGRLMKALSINLGLDEKILQNGFGGEDIGACLRVNFYPKCPRPELTLGLSSHSDPGGMTMLLPDDQVPGLQVRKCDNWITVKPARHAFIVNIGDQIQVLSNAIYKSVEHRVIVNSDKERVSLAFFYNPKSDIPIEPIKELVTPEKPSLYPAMTFDEYRLFIRMRGPRGKSQVESLKSPR

SEQ ID NO: 58700 - DNA, 1281 bp, Glycine max
  misc_feature (1)..(1281): Ceres Seq. ID no. 15176949
ggcagcaaagtgaataatggcttcactttccaccttcctcacactcactctcttcttcctctcacacgttaacgccaaagaaatcgtcatcaccgaagagggttacaccgtgaccaccgtattcgacggccacaagcctcacatcttccctttcaccgttctccagcgacccttttcctccgatctcatccttctcgattccgtcaacagcactttctacacggcgcaattccccattactgaagaaagcgttttcacgaggctttctggcgatgggtctgtggggtattctgatggggacgtgggttctgctcggttcgccaaacccagaagctttgcttttgatatgagagggaatgtgtatgttgctgataagtccaaccgtgcaataaggaaaattagtgccaagggtgtgaccacgattgctgggggagagttctcagaaaagtcaagaacaaaggatgggcctgcacttaatgcatcattttcaaatgattttgacctgactttcattcctgggctgtgtgctttgctcgtgtcagatcacatgcatagattggtccgccagattaatttgatggaggaggattgcacccttggttctaaacctggactaggtgcagttatgacttggactcttggattaggactttcatgcttacttggcttagtaattggaattgtggtgcgtccttacatcatccctaatacagaaaggcaccaacccttgccacttcaccgagacatggaagcgttacctaaccagtctggggaagctagcacagacgctcttcttcggcgccaaaagcgcaattgctagctgcagttgctcctctgtttacaaaatcctgatgagcttttggagattgagtctctctcatcttgtttgcatgtctagaattagaatcaacatagtttctccaaggccacatctggaatcagtgtctttgctagatttagatgcctgcaatagcggtgaggtaacaaagtcaggtaagtattatgaccaattgaaggatttgatgagttttgatgaagattcaaacaatggcaaggcaacctttaacaaaggaaatgatagcataggaaggaggaatgtgtgctatgaaggtgatgtcatgatgaaggctaacatgggctttgtagagacacctaaagataacaataacattgttcgtcaagaatcttctgtgtgtaaaatgggtattgtgaagcgtagatgaagttatttgtaagacatgaactatgttatgaaactagcatgcatatattttgtcaccg

SEQ ID NO: 58701 - protein, 267 aa, Glycine max
  peptide (1)..(267): Ceres Seq. ID no. 15176950
  misc_feature (101)..(128): Pfam Name: NHL repeat Pfam Description: NHL repeat
  misc_feature (27)..(192): Homolog of NCBI NO: 22331093 NR Description: expressed protein [Arabidopsis thaliana]
  misc_feature (18)..(211): Homolog of NCBI NO: 22329761 NR Description: expressed protein [Arabidopsis thaliana]
  misc_feature (18)..(192): Homolog of NCBI NO: 7485679 NR Description: hypothetical protein F17O7.19 - Arabidopsis
  misc_feature (18)..(216): Homolog of NCBI NO: 9369390 NR Description: T23E23.5 [Arabidopsis thaliana]
  misc_feature (27)..(224): Homolog of NCBI NO: 30698018 NR Description: expressed protein [Arabidopsis thaliana]
  misc_feature (18)..(224): Homolog of NCBI NO: 30698020 NR Description: expressed protein [Arabidopsis thaliana]
  misc_feature (3)..(225): Homolog of NCBI NO: 30685100 NR Description: expressed protein [Arabidopsis thaliana]
  misc_feature (3)..(225): Homolog of NCBI NO: 11357718 NR Description: hypothetical protein F2G14_10 - Arabidopsis
  misc_feature (8)..(208): Homolog of NCBI NO: 25402992 NR Description: protein T23E23.6 [imported] - Arabidopsis
  misc_feature (8)..(260): Homolog of NCBI NO: 18395326 NR Description: expressed protein [Arabidopsis thaliana]
MASLSTFLTLTLFFLSHVNAKEIVITEEGYTVTTVFDGHKPHIFPFTVLQRPFSSDLILLDSVNSTFYTAQFPITEESVFTRLSGDGSVGYSDGDVGSARFAKPRSFAFDMRGNVYVADKSNRAIRKISAKGVTTIAGGEFSEKSRTKDGPALNASFSNDFDLTFIPGLCALLVSDHMHRLVRQINLMEEDCTLGSKPGLGAVMTWTLGLGLSCLLGLVIGIVVRPYIIPNTERHQPLPLHRDMEALPNQSGEASTDALLRRQKRNC

SEQ ID NO: 58702 - protein, 157 aa, Glycine max
  peptide (1)..(157): Ceres Seq. ID no. 15176951
  misc_feature (1)..(82): Homolog of NCBI NO: 22331093 NR Description: expressed protein [Arabidopsis thaliana]
  misc_feature (1)..(101): Homolog of NCBI NO: 22329761 NR Description: expressed protein [Arabidopsis thaliana]
  misc_feature (1)..(82): Homolog of NCBI NO: 7485679 NR Description: hypothetical protein F17O7.19 - Arabidopsis
  misc_feature (1)..(106): Homolog of NCBI NO: 9369390 NR Description: T23E23.5 [Arabidopsis thaliana]
  misc_feature (1)..(114): Homolog of NCBI NO: 30698018 NR Description: expressed protein [Arabidopsis thaliana]
  misc_feature (1)..(114): Homolog of NCBI NO: 30698020 NR Description: expressed protein [Arabidopsis thaliana]
  misc_feature (1)..(115): Homolog of NCBI NO: 30685100 NR Description: expressed protein [Arabidopsis thaliana]
  misc_feature (1)..(115): Homolog of NCBI NO: 11357718 NR Description: hypothetical protein F2G14_10 - Arabidopsis
  misc_feature (1)..(98): Homolog of NCBI NO: 25402992 NR Description: protein T23E23.6 [imported] - Arabidopsis
  misc_feature (1)..(150): Homolog of NCBI NO: 18395326 NR Description: expressed protein [Arabidopsis thaliana]
MRGNVYVADKSNRAIRKISAKGVTTIAGGEFSEKSRTKDGPALNASFSNDFDLTFIPGLCALLVSDHMHRLVRQINLMEEDCTLGSKPGLGAVMTWTLGLGLSCLLGLVIGIVVRPYIIPNTERHQPLPLHRDMEALPNQSGEASTDALLRRQKRNC

SEQ ID NO: 58703 - DNA, 1275 bp, Glycine max
  misc_feature (1)..(1275): Ceres Seq. ID no. 14313575
aaacttatcctaacaggcaatcgaacaactgcttaacatatattacgaatgacaaacttgctcaaagtaattgttagctatgtactacgattgtgtagccttaataactacatcacttgaaatatcattgtttttcctcaaagcccacctagcgggggcaagactttgtcattgatatcgatctttttcatcaattttttaaaatagcattttctacttatctaaaattccattctatgatcaggtgctgataacctaattcctgtggagttggcactgaagatagtcagtaagataagatcgaaggagagattcacagtttatattgtcatcccaatgtggcctgaaggttccccttcttctacttcagtgcaagagatactcttttggcagggacaaacaatgaaaatgatgtatgaaatcatagctctggagttaaaatctatgcagcttgatagtcatccacaagattacctcaatttttactgtcttggaaaccgagagcagttgacaactgaagtttcaagttcaagtaattcaccttcagataatggcgaaacggtttcagcctcacaaaagttccgacggtttatgatttatgtacatgccaaaggaatgattgtggatgatgaatatgtaattcttgggtctgccaatataaatcaacgatctttggctggatccagagatactgagatagcaatgggtgcacatcaaccgcatcatacatggagtcagaaaaagaggcatccacatggtcaggtatatgggtatagaatgtctttgtgggcagaacacatggaaaccatagaagcttgcttcaaggagcctgaaagcttggagtgtgtgaaaagtgtgaacaagattgctgaagacaactggaagaagtacacagctgatgactatactccattgcaagggcacataatgaagtatcccgtgtgtgtaaatgcctatgggaaggtaaagtccttaactggatttgagtctttcccagatgttggtggcaaggtgcttggctcccggtctacccttcctgacgctctaactacatagcataccctcttaatttctacgtgaaaataagtaccaaagtctcagagaagaagagagagggatcaattggattttgctggcgtgcttggtgtaaactgttaaaaagaggccttgcccctgcatttttttaaaccatttacacggtggtatagtatgcaacaggctgcgtatatagtaaattattattaatcagtggactgtatgtcacagccacattgt

SEQ ID NO: 58704 - protein, 239 aa, Glycine max
  peptide (1)..(239): Ceres Seq. ID no. 14313576
  misc_feature (85)..(112): Pfam Name: Phospholipase D. Active site motif Pfam Description: Phospholipase D. Active site motif
  misc_feature (1)..(239): Homolog of NCBI NO: 34394829 NR Description: putative phospholipase D [Oryza sativa (japonica
  misc_feature (1)..(239): Homolog of NCBI NO: 18765909 NR Description: phospholipase D nu-2 [Oryza sativa]
  misc_feature (1)..(239): Homolog of NCBI NO: 18419668 NR Description: phospholipase D -related [Arabidopsis thaliana]
  misc_feature (1)..(239): Homolog of NCBI NO: 15983515 NR Description: AT4g35790/F4B14_60 [Arabidopsis thaliana]
  misc_feature (1)..(239): Homolog of NCBI NO: 30690488 NR Description: phospholipase D -related [Arabidopsis thaliana]
  misc_feature (1)..(239): Homolog of NCBI NO: 15592894 NR Description: phospholipase D-like protein p98 [Arabidopsis
  misc_feature (1)..(239): Homolog of NCBI NO: 7486399 NR Description: hypothetical protein F4B14.60 - Arabidopsis
  misc_feature (1)..(239): Homolog of NCBI NO: 23477711 NR Description: phospholipase D delta isoform [Gossypium hirsutum]
  misc_feature (1)..(239): Homolog of NCBI NO: 22795060 NR Description: phospholipase D delta isoform 1b [Gossypium
  misc_feature (1)..(239): Homolog of NCBI NO: 22795064 NR Description: phospholipase D delta isoform 1a [Gossypium
MWPEGSPSSTSVQEILFWQGQTMKMMYEIIALELKSMQLDSHPQDYLNFYCLGNREQLTTEVSSSSNSPSDNGETVSASQKFRRFMIYVHAKGMIVDDEYVILGSANINQRSLAGSRDTEIAMGAHQPHHTWSQKKRHPHGQVYGYRMSLWAEHMETIEACFKEPESLECVKSVNKIAEDNWKKYTADDYTPLQGHIMKYPVCVNAYGKVKSLTGFESFPDVGGKVLGSRSTLPDALTT

SEQ ID NO: 58705 - protein, 217 aa, Glycine max
  peptide (1)..(217): Ceres Seq. ID no. 14313577
  misc_feature (63)..(90): Pfam Name: Phospholipase D. Active site motif Pfam Description: Phospholipase D. Active site motif
  misc_feature (1)..(217): Homolog of NCBI NO: 34394829 NR Description: putative phospholipase D [Oryza sativa (japonica
  misc_feature (1)..(217): Homolog of NCBI NO: 18765909 NR Description: phospholipase D nu-2 [Oryza sativa]
  misc_feature (1)..(217): Homolog of NCBI NO: 15592894 NR Description: phospholipase D-like protein p98 [Arabidopsis
  misc_feature (1)..(217): Homolog of NCBI NO: 15983515 NR Description: AT4g35790/F4B14_60 [Arabidopsis thaliana]
  misc_feature (1)..(217): Homolog of NCBI NO: 30690488 NR Description: phospholipase D -related [Arabidopsis thaliana]
  misc_feature (1)..(217): Homolog of NCBI NO: 18419668 NR Description: phospholipase D -related [Arabidopsis thaliana]
  misc_feature (1)..(217): Homolog of NCBI NO: 7486399 NR Description: hypothetical protein F4B14.60 - Arabidopsis
  misc_feature (1)..(217): Homolog of NCBI NO: 23477711 NR Description: phospholipase D delta isoform [Gossypium hirsutum]
  misc_feature (1)..(217): Homolog of NCBI NO: 22795060 NR Description: phospholipase D delta isoform 1b [Gossypium
  misc_feature (1)..(217): Homolog of NCBI NO: 22795064 NR Description: phospholipase D delta isoform 1a [Gossypium
MKMMYEIIALELKSMQLDSHPQDYLNFYCLGNREQLTTEVSSSSNSPSDNGETVSASQKFRRFMIYVHAKGMIVDDEYVILGSANINQRSLAGSRDTEIAMGAHQPHHTWSQKKRHPHGQVYGYRMSLWAEHMETIEACFKEPESLECVKSVNKIAEDNWKKYTADDYTPLQGHIMKYPVCVNAYGKVKSLTGFESFPDVGGKVLGSRSTLPDALTT

SEQ ID NO: 58706 - protein, 215 aa, Glycine max
  peptide (1)..(215): Ceres Seq. ID no. 14313578
  misc_feature (61)..(88): Pfam Name: Phospholipase D. Active site motif Pfam Description: Phospholipase D. Active site motif
  misc_feature (1)..(215): Homolog of NCBI NO: 34394829 NR Description: putative phospholipase D [Oryza sativa (japonica
  misc_feature (1)..(215): Homolog of NCBI NO: 18765909 NR Description: phospholipase D nu-2 [Oryza sativa]
  misc_feature (1)..(215): Homolog of NCBI NO: 15592894 NR Description: phospholipase D-like protein p98 [Arabidopsis
  misc_feature (1)..(215): Homolog of NCBI NO: 18419668 NR Description: phospholipase D -related [Arabidopsis thaliana]
  misc_feature (1)..(215): Homolog of NCBI NO: 30690488 NR Description: phospholipase D -related [Arabidopsis thaliana]
  misc_feature (1)..(215): Homolog of NCBI NO: 15983515 NR Description: AT4g35790/F4B14_60 [Arabidopsis thaliana]
  misc_feature (1)..(215): Homolog of NCBI NO: 7486399 NR Description: hypothetical protein F4B14.60 - Arabidopsis
  misc_feature (1)..(215): Homolog of NCBI NO: 23477711 NR Description: phospholipase D delta isoform [Gossypium hirsutum]
  misc_feature (1)..(215): Homolog of NCBI NO: 22795060 NR Description: phospholipase D delta isoform 1b [Gossypium
  misc_feature (1)..(215): Homolog of NCBI NO: 22795064 NR Description: phospholipase D delta isoform 1a [Gossypium
MMYEIIALELKSMQLDSHPQDYLNFYCLGNREQLTTEVSSSSNSPSDNGETVSASQKFRRFMIYVHAKGMIVDDEYVILGSANINQRSLAGSRDTEIAMGAHQPHHTWSQKKRHPHGQVYGYRMSLWAEHMETIEACFKEPESLECVKSVNKIAEDNWKKYTADDYTPLQGHIMKYPVCVNAYGKVKSLTGFESFPDVGGKVLGSRSTLPDALTT

SEQ ID NO: 58707 - DNA, 2647 bp, Glycine max
  misc_feature (1)..(2647): Ceres Seq. ID no. 15226720
cagctacgtaggccccccccccgaattcaacattgcccagaatggaaagccatggtgtccaaatatgtctccgccataccagaatgtcaccacaatatatagcaggttaggcaccagtggaaaaaaattgaatattcacttgagaaaacaaaggattcaagcctacctcccatcataaatgccattgaaatttacagagtaataaacttccagcaatcagatacacaccaaggagatgttgacgcgattgcaaccatcaagtcagtttatgggatgacaagagattggcaaggtgatccatgctcccctgtagcctacttgtggaatggtttgaattgtacttaccgcggaaatgagaacccgagaatcacaactttgaatttatcttcaagcgaattgtcaggaatgatagatccttccatttcatatctcaccatgttggagaagttggatttatcaaacaataacttaaatggtgaagttcctgattttctatctagattacagcacttgaagatcataaatttagataacaacaacctcacgggttcaattccatcagaactagttaaaaaatctaaggaaggtttcctatcactaagtgtgggccaaaatctgtatctatgtgaatctggtcaatgcaacgagaagaaaaagaaaaagaacattgttactcccttgttagcgtcagttagtggggttttgatccttgtggtggctgtggcagctatatcgtggactcttaaaaagagaaagccgaaagaaaagaatcaaagtgagatgtcagctcaatgcacagaacaagatgattcattacatcaattcaaaaaacaaatatactcacactctgatgtccttagaatcacgaacaatttcaatacaattgttggtaaaggtgggttcggaacagtttatctgggttatatcgatggcactccagttgcagtgaaaatgctttctacctcttcagttcatggttatcaacaatttcaggcagaagttaaacttctaatgagagttcatcatgcgaatctcacctcccttgttggttattgtaatgaaggagacaataagggtctcatatatgagtacatggctaatggaaacttacatgaacatctgtctggtaaacacatcaaatcaaaattcctgacctgggaagacagacttcgtatagcagtggatgcagccttaggattggagtaccttcaaactggttgcaagcctcctataatccacagagacgtaaaatctacaaacatcttgttggatgaaaagttacaagcaaagttatctgattttggtctatccaaaattatcccaattgatgggggaactcatgtgtcaactgttgttgctggtactccaggttatctagatcctgagtactacatatccaatagattaacacagaaaagtgacatttatggctttggagttgttcttctagaaataatcacttgtcaaccagtaatagcatggaatgaagaaaggactcacataattcaatgggttagatccctgattgggataggggatatcaagggcattgttgactcaaggttagaaggagattttgacattaactcagcttggaaagccgtagaaatagcaatggcgtgtgtttccttaaatcccagtgaaaggccaatcatgagggtaatagtgactgaactaaaggaaactttagcaaccgaattagctcgaactaaacacaacagtgctgattcaataaattcaatcgaaccggtcaccatgaatctggacactgaattcactccactggctagataaaagataagaataacaaaataatcttgtaataaataatgtgttcaaagatggagatgaactaggtaagaggtcttcctcttgtgcaattccagaatgagatcaagtcacataagaggaattgatgttacataataagaagttggtatatgctcttacttttgaacagtgatacttgtataactggtacacttgcactccgtttgaatctgtgtttgagagtggtgaatgtagtgtagtgtgcaaagttgcaaagagaataagagtaaataacaagaaatgaaaatcagtttttgtttttcaaawrwaaaaaaaaaaaaaaaaaaaaaaaaaaaaaaaaaaaaaaaaaaaaaaaaaaaaaaaaaaaaaaaaaaaaaaaaaaaaaaaaaaattwwaaaaaaaaaaaaaaaaaattttccggcccccgggggaacccctttttttaaaggggcccccccccgggggggaccccccttttttttcccttttagggggggtawttttcgggttggggaaaaatggggaaaaagtttttcccgggggaaatttttttcccccccaaattcccccaaaaataaaagccggaaaaaaaaaggggaaaacccggggggcccaaggggggggcyaacccccctttwttggggggggsccccgggccctttttcaaggggaaaaactkggggggccatttttttwaawaawccccccmccccggggaaaaaggggttttgcaattggggccttttcccttttccccgcaaaaaaaacccggggctcgggggtttggttgggggaaagggaattcttttcctcaaaggggggaaaaaggttttccccaaaaaccggggaaaacccc

SEQ ID NO: 58708 - protein, 506 aa, Glycine max
  peptide (1)..(506): Ceres Seq. ID no. 15226721
  misc_feature (1)..(506): Homolog of NCBI NO: 9294681 NR Description: receptor-like protein kinase [Arabidopsis
  misc_feature (1)..(506): Homolog of NCBI NO: 25387148 NR Description: probable protein kinase [imported] - Arabidopsis
  misc_feature (1)..(506): Homolog of NCBI NO: 15218050 NR Description: leucine rich repeat protein kinase, putative
  misc_feature (1)..(506): Homolog of NCBI NO: 15227015 NR Description: leucine rich repeat protein kinase, putative
  misc_feature (1)..(506): Homolog of NCBI NO: 15233796 NR Description: light repressible receptor protein kinase
  misc_feature (1)..(506): Homolog of NCBI NO: 2129635 NR Description: serine/threonine-specific receptor protein kinase
  misc_feature (1)..(506): Homolog of NCBI NO: 39104601 NR Description: unknown protein [Arabidopsis thaliana]
  misc_feature (1)..(506): Homolog of NCBI NO: 15218033 NR Description: leucine rich repeat protein kinase, putative
  misc_feature (307)..(506): Homolog of NCBI NO: 9837280 NR Description: leaf senescence-associated receptor-like protein
  misc_feature (1)..(308): Homolog of NCBI NO: 9837280 NR Description: leaf senescence-associated receptor-like protein
MTRDWQGDPCSPVAYLWNGLNCTYRGNENPRITTLNLSSSELSGMIDPSISYLTMLEKLDLSNNNLNGEVPDFLSRLQHLKIINLDNNNLTGSIPSELVKKSKEGFLSLSVGQNLYLCESGQCNEKKKKKNIVTPLLASVSGVLILVVAVAAISWTLKKRKPKEKNQSEMSAQCTEQDDSLHQFKKQIYSHSDVLRITNNFNTIVGKGGFGTVYLGYIDGTPVAVKMLSTSSVHGYQQFQAEVKLLMRVHHANLTSLVGYCNEGDNKGLIYEYMANGNLHEHLSGKHIKSKFLTWEDRLRIAVDAALGLEYLQTGCKPPIIHRDVKSTNILLDEKLQAKLSDFGLSKIIPIDGGTHVSTVVAGTPGYLDPEYYISNRLTQKSDIYGFGVVLLEIITCQPVIAWNEERTHIIQWVRSLIGIGDIKGIVDSRLEGDFDINSAWKAVEIAMACVSLNPSERPIMRVIVTELKETLATELARTKHNSADSINSIEPVTMNLDTEFTPLAR

SEQ ID NO: 58709 - protein, 462 aa, Glycine max
  peptide (1)..(462): Ceres Seq. ID no. 15226722
  misc_feature (1)..(462): Homolog of NCBI NO: 9294681 NR Description: receptor-like protein kinase [Arabidopsis
  misc_feature (1)..(462): Homolog of NCBI NO: 25387148 NR Description: probable protein kinase [imported] - Arabidopsis
  misc_feature (1)..(462): Homolog of NCBI NO: 15218050 NR Description: leucine rich repeat protein kinase, putative
  misc_feature (1)..(462): Homolog of NCBI NO: 15227015 NR Description: leucine rich repeat protein kinase, putative
  misc_feature (1)..(462): Homolog of NCBI NO: 15233796 NR Description: light repressible receptor protein kinase
  misc_feature (1)..(462): Homolog of NCBI NO: 2129635 NR Description: serine/threonine-specific receptor protein kinase
  misc_feature (1)..(462): Homolog of NCBI NO: 39104601 NR Description: unknown protein [Arabidopsis thaliana]
  misc_feature (1)..(462): Homolog of NCBI NO: 15218033 NR Description: leucine rich repeat protein kinase, putative
  misc_feature (263)..(462): Homolog of NCBI NO: 9837280 NR Description: leaf senescence-associated receptor-like protein
  misc_feature (1)..(264): Homolog of NCBI NO: 9837280 NR Description: leaf senescence-associated receptor-like protein
MIDPSISYLTMLEKLDLSNNNLNGEVPDFLSRLQHLKIINLDNNNLTGSIPSELVKKSKEGFLSLSVGQNLYLCESGQCNEKKKKKNIVTPLLASVSGVLILVVAVAAISWTLKKRKPKEKNQSEMSAQCTEQDDSLHQFKKQIYSHSDVLRITNNFNTIVGKGGFGTVYLGYIDGTPVAVKMLSTSSVHGYQQFQAEVKLLMRVHHANLTSLVGYCNEGDNKGLIYEYMANGNLHEHLSGKHIKSKFLTWEDRLRIAVDAALGLEYLQTGCKPPIIHRDVKSTNILLDEKLQAKLSDFGLSKIIPIDGGTHVSTVVAGTPGYLDPEYYISNRLTQKSDIYGFGVVLLEIITCQPVIAWNEERTHIIQWVRSLIGIGDIKGIVDSRLEGDFDINSAWKAVEIAMACVSLNPSERPIMRVIVTELKETLATELARTKHNSADSINSIEPVTMNLDTEFTPLAR

SEQ ID NO: 58710 - protein, 452 aa, Glycine max
  peptide (1)..(452): Ceres Seq. ID no. 15226723
  misc_feature (1)..(452): Homolog of NCBI NO: 9294681 NR Description: receptor-like protein kinase [Arabidopsis
  misc_feature (1)..(452): Homolog of NCBI NO: 25387148 NR Description: probable protein kinase [imported] - Arabidopsis
  misc_feature (1)..(452): Homolog of NCBI NO: 15218050 NR Description: leucine rich repeat protein kinase, putative
  misc_feature (1)..(452): Homolog of NCBI NO: 15227015 NR Description: leucine rich repeat protein kinase, putative
  misc_feature (1)..(452): Homolog of NCBI NO: 15233796 NR Description: light repressible receptor protein kinase
  misc_feature (1)..(452): Homolog of NCBI NO: 2129635 NR Description: serine/threonine-specific receptor protein kinase
  misc_feature (1)..(452): Homolog of NCBI NO: 39104601 NR Description: unknown protein [Arabidopsis thaliana]
  misc_feature (1)..(452): Homolog of NCBI NO: 15218033 NR Description: leucine rich repeat protein kinase, putative
  misc_feature (253)..(452): Homolog of NCBI NO: 9837280 NR Description: leaf senescence-associated receptor-like protein
  misc_feature (1)..(254): Homolog of NCBI NO: 9837280 NR Description: leaf senescence-associated receptor-like protein
MLEKLDLSNNNLNGEVPDFLSRLQHLKIINLDNNNLTGSIPSELVKKSKEGFLSLSVGQNLYLCESGQCNEKKKKKNIVTPLLASVSGVLILVVAVAAISWTLKKRKPKEKNQSEMSAQCTEQDDSLHQFKKQIYSHSDVLRITNNFNTIVGKGGFGTVYLGYIDGTPVAVKMLSTSSVHGYQQFQAEVKLLMRVHHANLTSLVGYCNEGDNKGLIYEYMANGNLHEHLSGKHIKSKFLTWEDRLRIAVDAALGLEYLQTGCKPPIIHRDVKSTNILLDEKLQAKLSDFGLSKIIPIDGGTHVSTVVAGTPGYLDPEYYISNRLTQKSDIYGFGVVLLEIITCQPVIAWNEERTHIIQWVRSLIGIGDIKGIVDSRLEGDFDINSAWKAVEIAMACVSLNPSERPIMRVIVTELKETLATELARTKHNSADSINSIEPVTMNLDTEFTPLAR

SEQ ID NO: 58711 - DNA, 1421 bp, Glycine max
  misc_feature (1)..(1421): Ceres Seq. ID no. 15226750
gaaacccaaccgtatccttcattcttctcctaaatcctaatccttcttcactttcagttctcagcatgggaagttctggaacaaccgactatggagcatacacataccaaaaccttgagagggaaccttactggccctctgaaaagctcagaatttccatcactggggctggtggtttcattgcctcacacattgctcgccgcctcaagaccgagggacattacatcattgcttctgattggaagaagaatgagcacatgactgaggacatgttctgccatgaattccatcttgttgaccttagggtcatggataactgcttgacagttaccaagggtgtggaccatgttttcaatcttgctgctgatatgggtgggatgggttttatccagtccaaccactcagtcattatgtacaacaacaccatgattagcttcaacatgattgaggctgccaggatcaatggtgttaagaggtttttttatgcctctagtgcttgtatctatcctgaattcaaacagttggagacaaatgtgagtttgaaggagtctgatgcctggcctgctgagccacaagatgcatatgggctggagaagcttgcaacagaagagttatgcaagcattataacaaggattttggaattgagtgccggattgggagattccataacatatatggtccttatgggacatggaagggtggaagggagaaggctcctgctgctttttgtcgcaagacacttacttccaaagatcgatttgagatgtggggagatggattgcaaacaagatccttcaccttcattgatgagtgtgttgaaggtgtactgagattgactaaatcagacttccgggagccagtgaatattggaagtgatgaaatggtcagtatgaatgagatggcagagattgttcttagctttgaggataagaatataccaatataccatattcctggcccagaaggtgttcggggccgtaattcagacaatacattaatcaaagagaaacttggctgggctccaactatgaagttgaaggatgggctgagaattacatacttttggatcaaagagcagcttgagaaagagaaggcagaaggtgttgatttatcaggctatggatcatccaaagtggttcagactcaagccccagttcaacttggctcgctacgtgctgcagatggcaaagaataaagctgctagtgcaagggatgttcggcagttgcagcagatggcaaagaataagagtgaacaatgcatttccaagtgaagggcaggcttttatgttgctattttgtagagatctatggttacagattagctattgaagttagttttggaacttgttcatgtatttgtaacggatggtgttatgttcttgttttgtttgaggtaataataataactgctgcttaaggt

SEQ ID NO: 58712 - protein, 397 aa, Glycine max
  peptide (1)..(397): Ceres Seq. ID no. 15226751
  misc_feature (51)..(360): Pfam Name: NAD dependent epimerase/dehydratase family Pfam Description: NAD dependent epimerase/dehydratase family
  misc_feature (50)..(357): Homolog of NCBI NO: 32472697 NR Description: dTDP-glucose 4-6-dehydratase [Pirellula sp. 1]
  misc_feature (48)..(363): Homolog of NCBI NO: 23138039 NR Description: COG0451: Nucleoside-diphosphate-sugar epimerases
  misc_feature (48)..(363): Homolog of NCBI NO: 23137167 NR Description: COG0451: Nucleoside-diphosphate-sugar epimerases
  misc_feature (46)..(358): Homolog of NCBI NO: 22298175 NR Description: GDP-fucose synthetase [Thermosynechococcus
  misc_feature (47)..(361): Homolog of NCBI NO: 24212751 NR Description: dTDPglucose 4,6-dehydratase
  misc_feature (53)..(199): Homolog of NCBI NO: 23008810 NR Description: COG0451: Nucleoside-diphosphate-sugar epimerases
  misc_feature (53)..(363): Homolog of NCBI NO: 9937230 NR Description: sugar epimerase BlmG [Streptomyces verticillus]
  misc_feature (32)..(362): Homolog of NCBI NO: 28170704 NR Description: Ata17 protein [Saccharothrix mutabilis subsp.
  misc_feature (22)..(397): Homolog of NCBI NO: 15241945 NR Description: NAD-dependent epimerase/dehydratase family
  misc_feature (22)..(397): Homolog of NCBI NO: 37534380 NR Description: putative epimerase/dehydratase
NPTVSFILLLNPNPSSLSVLSMGSSGTTDYGAYTYQNLEREPYWPSEKLRISITGAGGFIASHIARRLKTEGHYIIASDWKKNEHMTEDMFCHEFHLVDLRVMDNCLTVTKGVDHVFNLAADMGGMGFIQSNHSVIMYNNTMISFNMIEAARINGVKRFFYASSACIYPEFKQLETNVSLKESDAWPAEPQDAYGLEKLATEELCKHYNKDFGIECRIGRFHNIYGPYGTWKGGREKAPAAFCRKTLTSKDRFEMWGDGLQTRSFTFIDECVEGVLRLTKSDFREPVNIGSDEMVSMNEMAEIVLSFEDKNIPIYHIPGPEGVRGRNSDNTLIKEKLGWAPTMKLKDGLRITYFWIKEQLEKEKAEGVDLSGYGSSKVVQTQAPVQLGSLRAADGKE

SEQ ID NO: 58713 - protein, 376 aa, Glycine max
  peptide (1)..(376): Ceres Seq. ID no. 15226752
  misc_feature (30)..(339): Pfam Name: NAD dependent epimerase/dehydratase family Pfam Description: NAD dependent epimerase/dehydratase family
  misc_feature (29)..(336): Homolog of NCBI NO: 32472697 NR Description: dTDP-glucose 4-6-dehydratase [Pirellula sp. 1]
  misc_feature (27)..(342): Homolog of NCBI NO: 23138039 NR Description: COG0451: Nucleoside-diphosphate-sugar epimerases
  misc_feature (27)..(342): Homolog of NCBI NO: 23137167 NR Description: COG0451: Nucleoside-diphosphate-sugar epimerases
  misc_feature (25)..(337): Homolog of NCBI NO: 22298175 NR Description: GDP-fucose synthetase [Thermosynechococcus
  misc_feature (26)..(340): Homolog of NCBI NO: 24212751 NR Description: dTDPglucose 4,6-dehydratase
  misc_feature (32)..(178): Homolog of NCBI NO: 23008810 NR Description: COG0451: Nucleoside-diphosphate-sugar epimerases
  misc_feature (32)..(342): Homolog of NCBI NO: 9937230 NR Description: sugar epimerase BlmG [Streptomyces verticillus]
  misc_feature (11)..(341): Homolog of NCBI NO: 28170704 NR Description: Ata17 protein [Saccharothrix mutabilis subsp.
  misc_feature (1)..(376): Homolog of NCBI NO: 15241945 NR Description: NAD-dependent epimerase/dehydratase family
  misc_feature (1)..(376): Homolog of NCBI NO: 37534380 NR Description: putative epimerase/dehydratase
MGSSGTTDYGAYTYQNLEREPYWPSEKLRISITGAGGFIASHIARRLKTEGHYIIASDWKKNEHMTEDMFCHEFHLVDLRVMDNCLTVTKGVDHVFNLAADMGGMGFIQSNHSVIMYNNTMISFNMIEAARINGVKRFFYASSACIYPEFKQLETNVSLKESDAWPAEPQDAYGLEKLATEELCKHYNKDFGIECRIGRFHNIYGPYGTWKGGREKAPAAFCRKTLTSKDRFEMWGDGLQTRSFTFIDECVEGVLRLTKSDFREPVNIGSDEMVSMNEMAEIVLSFEDKNIPIYHIPGPEGVRGRNSDNTLIKEKLGWAPTMKLKDGLRITYFWIKEQLEKEKAEGVDLSGYGSSKVVQTQAPVQLGSLRAADGKE

SEQ ID NO: 58714 - protein, 312 aa, Glycine max
  peptide (1)..(312): Ceres Seq. ID no. 15226753
  misc_feature (1)..(275): Pfam Name: NAD dependent epimerase/dehydratase family Pfam Description: NAD dependent epimerase/dehydratase family
  misc_feature (1)..(272): Homolog of NCBI NO: 32472697 NR Description: dTDP-glucose 4-6-dehydratase [Pirellula sp. 1]
  misc_feature (1)..(278): Homolog of NCBI NO: 23138039 NR Description: COG0451: Nucleoside-diphosphate-sugar epimerases
  misc_feature (1)..(278): Homolog of NCBI NO: 23137167 NR Description: COG0451: Nucleoside-diphosphate-sugar epimerases
  misc_feature (1)..(273): Homolog of NCBI NO: 22298175 NR Description: GDP-fucose synthetase [Thermosynechococcus
  misc_feature (1)..(276): Homolog of NCBI NO: 24212751 NR Description: dTDPglucose 4,6-dehydratase
  misc_feature (1)..(114): Homolog of NCBI NO: 23008810 NR Description: COG0451: Nucleoside-diphosphate-sugar epimerases
  misc_feature (1)..(278): Homolog of NCBI NO: 9937230 NR Description: sugar epimerase BlmG [Streptomyces verticillus]
  misc_feature (1)..(277): Homolog of NCBI NO: 28170704 NR Description: Ata17 protein [Saccharothrix mutabilis subsp.
  misc_feature (1)..(312): Homolog of NCBI NO: 15241945 NR Description: NAD-dependent epimerase/dehydratase family
  misc_feature (1)..(312): Homolog of NCBI NO: 37534380 NR Description: putative epimerase/dehydratase
MTEDMFCHEFHLVDLRVMDNCLTVTKGVDHVFNLAADMGGMGFIQSNHSVIMYNNTMISFNMIEAARINGVKRFFYASSACIYPEFKQLETNVSLKESDAWPAEPQDAYGLEKLATEELCKHYNKDFGIECRIGRFHNIYGPYGTWKGGREKAPAAFCRKTLTSKDRFEMWGDGLQTRSFTFIDECVEGVLRLTKSDFREPVNIGSDEMVSMNEMAEIVLSFEDKNIPIYHIPGPEGVRGRNSDNTLIKEKLGWAPTMKLKDGLRITYFWIKEQLEKEKAEGVDLSGYGSSKVVQTQAPVQLGSLRAADGKE

SEQ ID NO: 58715 - DNA, 1950 bp, Glycine max
  misc_feature (1)..(1950): Ceres Seq. ID no. 15169037
aaaaaaagttgaaaaccctcacacagaaagagtggtttgtgcggtggtgaagaagcgttcggaatagaagaagaagatgtcgtcggtttacgttctagagcctccgacgaaggggaaggtggtggtgaacactacgcgcggtcctttggacattgagctgtggccgaaagaggctccgaaggccgcgaggaacttcgttcagctctgcctcgaaaactattacggcaacaccatcttccaccgcatcatcaaggacttcctcgtccaaagcggcgaccccaccggcaccggcaccggtggtgaaagcatttatggtggtgtttttgctgatgagtttcattcacgtctgaaattcaagcacagaggaatagttgcaatggccaatgccggaactctgaattccaatggaagtcagtttttcatcactctcgaccgctgtgattggcttgatcgcaagcataccatttttggaaaagtgacgggagatacaatgtataatcttttgaggctgggtgaacttgaaactgataagaatgaccggcctttagatccgccgaagatattatcagttgaggtgttatggaatccatttgaagatattgttccaagaacacttcaaaaacttcagattgaagctaaagctgatacaaaaaataaagaatcagggaaaaaaggcgtaaaaaaattgaacttgctttcatttggggaagaagctgaagaagaggaaaaggaattggcatcggtgaagcaaaagattaagagcagtcacgatgtcttgaacgatcctcgtcttctaaaggaagatactcttaataatgaactgagttcatcaagaagagatatgcaattatctgtaagggatgcacttaactcaaagaaagacgagcctcagaaagattcagatgctggtagcacggcatgtcttgatttcagtgatgatgatgaagcagattttgatgcaagaatgcgcatgcaaatactcaaaaagaggaaggagttgggtgatctccctcccaagccaaagttgcgaaatgcaggaaggtccagtccagagaaccatgatacgtcgtctgcagccaggtccaatgctgtaagtgttgatgaggatcaaccaaaggtggaaaaattgtccttgaagaaaaagggagttggatctgaagcaagagctgaacgaatgtctaatgcagatgcagatttgcaactattgaatcaagctgagagaggaagacaattgcagaagcagaagaaacgcagacttcaagggcgtgaagatgaagttctggctaaacttgaaaaatttaagaattctttatcagcaaaggcgacacccccaactgatgaatctgaagacgttagtaatgaggaattgtcagactggaaaggtgttagtttaaagtttgccccacagactggcaaggaccgcatgtctcgcaatgaagacccaaacgactatgttgtgcatgaccctcttctggagaaggggaaagagaagttcaataggatgatagccaaacaaaagagacgagaacgagagtgggctgggagttcccttacttgaccttacatgtgccaacatggctgtgtaaatatacaaagctgattggttttcaaggctagcacatcactgtgctgctgggaaagtaaacttgccctaataggaacccaggagaaaaatgttgcatggaggagtttagcaaacatggttggcaagtacattgatattggtgagtgagatgtggggttactcatgaaaggacctactttgaattgttcgtatttttggtccaatgtcaaaagatgtattgtgtagattttaacacaccaagttgttgtgttttatatatttaggattcaagagaatattgtattattgtggaactaacgatttcggcagatgaagtcgttactcagaattatgctagttgagatgggttttacgttgcactattt

SEQ ID NO: 58716 - protein, 493 aa, Glycine max
  peptide (1)..(493): Ceres Seq. ID no. 15169038
  misc_feature (1)..(228): Homolog of NCBI NO: 27516689 NR Description: cyclophilin-16; OvCYP-16 [Onchocerca volvulus]
  misc_feature (1)..(472): Homolog of NCBI NO: 39591493 NR Description: Hypothetical protein CBG21016 [Caenorhabditis
  misc_feature (1)..(472): Homolog of NCBI NO: 21357249 NR Description: CG10907-PA [Drosophila melanogaster]
  misc_feature (1)..(436): Homolog of NCBI NO: 31198449 NR Description: ENSANGP00000020743 [Anopheles gambiae]
  misc_feature (1)..(363): Homolog of NCBI NO: 29436797 NR Description: Unknown (protein for MGC:56702) [Danio rerio]
  misc_feature (1)..(485): Homolog of NCBI NO: 37182260 NR Description: SDCCAG10 [Homo sapiens]
  misc_feature (401)..(447): Homolog of NCBI NO: 7486212 NR Description: hypothetical protein F26P21.180 - Arabidopsis
  misc_feature (1)..(401): Homolog of NCBI NO: 7486212 NR Description: hypothetical protein F26P21.180 - Arabidopsis
  misc_feature (1)..(493): Homolog of NCBI NO: 21902020 NR Description: B1097D05.21 [Oryza sativa (japonica
  misc_feature (1)..(492): Homolog of NCBI NO: 30689591 NR Description: expressed protein [Arabidopsis thaliana]
MSSVYVLEPPTKGKVVVNTTRGPLDIELWPKEAPKAARNFVQLCLENYYGNTIFHRIIKDFLVQSGDPTGTGTGGESIYGGVFADEFHSRLKFKHRGIVAMANAGTLNSNGSQFFITLDRCDWLDRKHTIFGKVTGDTMYNLLRLGELETDKNDRPLDPPKILSVEVLWNPFEDIVPRTLQKLQIEAKADTKNKESGKKGVKKLNLLSFGEEAEEEEKELASVKQKIKSSHDVLNDPRLLKEDTLNNELSSSRRDMQLSVRDALNSKKDEPQKDSDAGSTACLDFSDDDEADFDARMRMQILKKRKELGDLPPKPKLRNAGRSSPENHDTSSAARSNAVSVDEDQPKVEKLSLKKKGVGSEARAERMSNADADLQLLNQAERGRQLQKQKKRRLQGREDEVLAKLEKFKNSLSAKATPPTDESEDVSNEELSDWKGVSLKFAPQTGKDRMSRNEDPNDYVVHDPLLEKGKEKFNRMIAKQKRREREWAGSSLT

SEQ ID NO: 58717 - protein, 393 aa, Glycine max
  peptide (1)..(393): Ceres Seq. ID no. 15169039
  misc_feature (1)..(128): Homolog of NCBI NO: 27516689 NR Description: cyclophilin-16; OvCYP-16 [Onchocerca volvulus]
  misc_feature (1)..(372): Homolog of NCBI NO: 39591493 NR Description: Hypothetical protein CBG21016 [Caenorhabditis
  misc_feature (1)..(372): Homolog of NCBI NO: 21357249 NR Description: CG10907-PA [Drosophila melanogaster]
  misc_feature (1)..(336): Homolog of NCBI NO: 31198449 NR Description: ENSANGP00000020743 [Anopheles gambiae]
  misc_feature (1)..(263): Homolog of NCBI NO: 29436797 NR Description: Unknown (protein for MGC:56702) [Danio rerio]
  misc_feature (1)..(385): Homolog of NCBI NO: 37182260 NR Description: SDCCAG10 [Homo sapiens]
  misc_feature (301)..(347): Homolog of NCBI NO: 7486212 NR Description: hypothetical protein F26P21.180 - Arabidopsis
  misc_feature (1)..(301): Homolog of NCBI NO: 7486212 NR Description: hypothetical protein F26P21.180 - Arabidopsis
  misc_feature (1)..(393): Homolog of NCBI NO: 21902020 NR Description: B1097D05.21 [Oryza sativa (japonica
  misc_feature (1)..(392): Homolog of NCBI NO: 30689591 NR Description: expressed protein [Arabidopsis thaliana]
MANAGTLNSNGSQFFITLDRCDWLDRKHTIFGKVTGDTMYNLLRLGELETDKNDRPLDPPKILSVEVLWNPFEDIVPRTLQKLQIEAKADTKNKESGKKGVKKLNLLSFGEEAEEEEKELASVKQKIKSSHDVLNDPRLLKEDTLNNELSSSRRDMQLSVRDALNSKKDEPQKDSDAGSTACLDFSDDDEADFDARMRMQILKKRKELGDLPPKPKLRNAGRSSPENHDTSSAARSNAVSVDEDQPKVEKLSLKKKGVGSEARAERMSNADADLQLLNQAERGRQLQKQKKRRLQGREDEVLAKLEKFKNSLSAKATPPTDESEDVSNEELSDWKGVSLKFAPQTGKDRMSRNEDPNDYVVHDPLLEKGKEKFNRMIAKQKRREREWAGSSLT

SEQ ID NO: 58718 - protein, 355 aa, Glycine max
  peptide (1)..(355): Ceres Seq. ID no. 15169040
  misc_feature (1)..(90): Homolog of NCBI NO: 27516689 NR Description: cyclophilin-16; OvCYP-16 [Onchocerca volvulus]
  misc_feature (1)..(334): Homolog of NCBI NO: 39591493 NR Description: Hypothetical protein CBG21016 [Caenorhabditis
  misc_feature (1)..(334): Homolog of NCBI NO: 21357249 NR Description: CG10907-PA [Drosophila melanogaster]
  misc_feature (1)..(298): Homolog of NCBI NO: 31198449 NR Description: ENSANGP00000020743 [Anopheles gambiae]
  misc_feature (1)..(225): Homolog of NCBI NO: 29436797 NR Description: Unknown (protein for MGC:56702) [Danio rerio]
  misc_feature (1)..(347): Homolog of NCBI NO: 37182260 NR Description: SDCCAG10 [Homo sapiens]
  misc_feature (263)..(309): Homolog of NCBI NO: 7486212 NR Description: hypothetical protein F26P21.180 - Arabidopsis
  misc_feature (1)..(263): Homolog of NCBI NO: 7486212 NR Description: hypothetical protein F26P21.180 - Arabidopsis
  misc_feature (1)..(355): Homolog of NCBI NO: 21902020 NR Description: B1097D05.21 [Oryza sativa (japonica
  misc_feature (1)..(354): Homolog of NCBI NO: 30689591 NR Description: expressed protein [Arabidopsis thaliana]
MYNLLRLGELETDKNDRPLDPPKILSVEVLWNPFEDIVPRTLQKLQIEAKADTKNKESGKKGVKKLNLLSFGEEAEEEEKELASVKQKIKSSHDVLNDPRLLKEDTLNNELSSSRRDMQLSVRDALNSKKDEPQKDSDAGSTACLDFSDDDEADFDARMRMQILKKRKELGDLPPKPKLRNAGRSSPENHDTSSAARSNAVSVDEDQPKVEKLSLKKKGVGSEARAERMSNADADLQLLNQAERGRQLQKQKKRRLQGREDEVLAKLEKFKNSLSAKATPPTDESEDVSNEELSDWKGVSLKFAPQTGKDRMSRNEDPNDYVVHDPLLEKGKEKFNRMIAKQKRREREWAGSSLT

SEQ ID NO: 58719 - DNA, 2107 bp, Glycine max
  misc_feature (1)..(2107): Ceres Seq. ID no. 15172491
gatgcatcacttttcttacctacaaatgaaaaagagaataatacaagagaaaataatgttgctaagattaaagttgtggtacgcaaaagaccattaaataagaaggaacttgctaagaaggaggatgatattgtaactgtatatgacaatgcatatttgacagtccatgaacccaaactaaaggttgatttgacagcttatgtggagaagcatgagttttgttttgatgctgttcttgacgagaatgttaccaatgatgaagtatatcgagttaccgtagaaccaattattcccacaatttttgagaaaaccaaagctacttgttttgcttatggtcagacaggaagtggcaaaacatacacaatgcaaccgttgccgctcagagctgcagaagaccttgttagacaattgcatcgaccagtatatcgaaatcagagatttaaattgtggcttagttactttgagatatatggtggaaaactttttgatcttcttagtgatagaaagaaactctgcatgagagaagatggacggcagcaagtgtgtattgtaggactgcaagaatttgaagtttctgatgtacaaattgtcaaagaattcattgaaaaggggaatgcagcaagaagtacagggtcaaccggtgcaaatgaggagtcctccagatcacatgctatcttacaactggttgtaaagaggcacaatgaggtaaaagagagcaggcggaacaataatgatgtaaatgaggcaaaaagtgggaaggttgtggggaagatttcttttattgatcttgctggaagtgaaagaggtgctgatactactgacaatgatcgtcagacaaggattgaaggtgctgaaatcaacaagagccttttggctttgaaggagtgcattcgtgctttggacaatgaccagatccatattccttttcgtggaagcaagcttacagaagtgctccgggactcctttgttggaaattcaaaaactgttatgatctcttgtatatccccaaatgctgggtcatgtgaacacacacttaataccttgagatatgcagaccgagttaaaagtctatccaagagtggaaatcctagaaaggaccaggccccaaatcctataccaccaccagcaattaaagaggtttcatccacatcttcacttccaggtagtgttggtgcagaggattttaataatggtcaacgtcaagaggtaaaaacaatggacatgagcaggaaagttgtcgaaaaggaaagttctttgtacagctccgctgctgatgttgacaaacaatcaagtttttcttctagttgtcaattcaatgggcgagaggaaaaaagctcagcttctgccccaatggacagggaaaagtttgaagtaaagaattcttacggtggtgattctaccagtcagaagatgaactcttattccctaaatgttacagatgagaaagtgcaaagggtgtctcctccacgcagaaaagggactaaggaggagaaatctgaaagatctgtaaattgggtaaaacgggatgtcgatggttatgatcattccaccacaagctccaaacagcagagcacaggaaattataacattaccactggatcggggcagtctgaaacagaatcctcttctaatgtgaatatcagcgcaatacttgaggaggaagaagcattaattgctgctcataggaaggaaattgaagacacaatggagattgttcgtgaagaaatgaaactactggcagaagtggaccagccgggaagtcttattgacaactacgtgacccagttgagtttcgtgctttctcgcaaagcagctagtctcgtcagtctccaagcacgccttgcaagattccaacatcgactaaaagaacaagagatactaagtagaaaaagagtgccccgttaagagactcggtttctcttgttcagtgatgacgtgtatgttcttgatgtcatttctcagtgtttgttagcgatatagttttaaaggtttttgttcattttataaaaaaaaatggatcttttgttgggtattcaaattaaatttactcaaatgtatatttgtcccttctgtgatattattatgcccaccttattattgcctttgc

SEQ ID NO: 58720 - protein, 634 aa, Glycine max
  peptide (1)..(634): Ceres Seq. ID no. 15172492
  misc_feature (540)..(627): Homolog of NCBI NO: 9294452 NR Description: contains similarity to kinesin heavy
  misc_feature (3)..(416): Homolog of NCBI NO: 18401002 NR Description: kinesin-like protein TBK5, putative [Arabidopsis
  misc_feature (3)..(416): Homolog of NCBI NO: 9294452 NR Description: contains similarity to kinesin heavy
  misc_feature (546)..(633): Homolog of NCBI NO: 34912848 NR Description: kinesin-like protein [Oryza sativa (japonica
  misc_feature (20)..(451): Homolog of NCBI NO: 34912848 NR Description: kinesin-like protein [Oryza sativa (japonica
  misc_feature (498)..(627): Homolog of NCBI NO: 13536983 NR Description: BY-2 kinesin-like protein 10 [Nicotiana tabacum]
  misc_feature (16)..(461): Homolog of NCBI NO: 13536983 NR Description: BY-2 kinesin-like protein 10 [Nicotiana tabacum]
  misc_feature (9)..(233): Homolog of NCBI NO: 34897620 NR Description: kinesin-like protein [Oryza sativa]
  misc_feature (255)..(634): Homolog of NCBI NO: 34897620 NR Description: kinesin-like protein [Oryza sativa]
  misc_feature (6)..(634): Homolog of NCBI NO: 15228274 NR Description: kinesin-related protein TBK5, putative
DASLFLPTNEKENNTRENNVAKIKVVVRKRPLNKKELAKKEDDIVTVYDNAYLTVHEPKLKVDLTAYVEKHEFCFDAVLDENVTNDEVYRVTVEPIIPTIFEKTKATCFAYGQTGSGKTYTMQPLPLRAAEDLVRQLHRPVYRNQRFKLWLSYFEIYGGKLFDLLSDRKKLCMREDGRQQVCIVGLQEFEVSDVQIVKEFIEKGNAARSTGSTGANEESSRSHAILQLVVKRHNEVKESRRNNNDVNEAKSGKVVGKISFIDLAGSERGADTTDNDRQTRIEGAEINKSLLALKECIRALDNDQIHIPFRGSKLTEVLRDSFVGNSKTVMISCISPNAGSCEHTLNTLRYADRVKSLSKSGNPRKDQAPNPIPPPAIKEVSSTSSLPGSVGAEDFNNGQRQEVKTMDMSRKVVEKESSLYSSAADVDKQSSFSSSCQFNGREEKSSASAPMDREKFEVKNSYGGDSTSQKMNSYSLNVTDEKVQRVSPPRRKGTKEEKSERSVNWVKRDVDGYDHSTTSSKQQSTGNYNITTGSGQSETESSSNVNISAILEEEEALIAAHRKEIEDTMEIVREEMKLLAEVDQPGSLIDNYVTQLSFVLSRKAASLVSLQARLARFQHRLKEQEILSRKRVPR

SEQ ID NO: 58721 - protein, 513 aa, Glycine max
  peptide (1)..(513): Ceres Seq. ID no. 15172493
  misc_feature (419)..(506): Homolog of NCBI NO: 9294452 NR Description: contains similarity to kinesin heavy
  misc_feature (1)..(295): Homolog of NCBI NO: 18401002 NR Description: kinesin-like protein TBK5, putative [Arabidopsis
  misc_feature (1)..(295): Homolog of NCBI NO: 9294452 NR Description: contains similarity to kinesin heavy
  misc_feature (425)..(512): Homolog of NCBI NO: 34912848 NR Description: kinesin-like protein [Oryza sativa (japonica
  misc_feature (1)..(330): Homolog of NCBI NO: 34912848 NR Description: kinesin-like protein [Oryza sativa (japonica
  misc_feature (377)..(506): Homolog of NCBI NO: 13536983 NR Description: BY-2 kinesin-like protein 10 [Nicotiana tabacum]
  misc_feature (1)..(340): Homolog of NCBI NO: 13536983 NR Description: BY-2 kinesin-like protein 10 [Nicotiana tabacum]
  misc_feature (1)..(112): Homolog of NCBI NO: 34897620 NR Description: kinesin-like protein [Oryza sativa]
  misc_feature (134)..(513): Homolog of NCBI NO: 34897620 NR Description: kinesin-like protein [Oryza sativa]
  misc_feature (1)..(513): Homolog of NCBI NO: 15228274 NR Description: kinesin-related protein TBK5, putative
MQPLPLRAAEDLVRQLHRPVYRNQRFKLWLSYFEIYGGKLFDLLSDRKKLCMREDGRQQVCIVGLQEFEVSDVQIVKEFIEKGNAARSTGSTGANEESSRSHAILQLVVKRHNEVKESRRNNNDVNEAKSGKVVGKISFIDLAGSERGADTTDNDRQTRIEGAEINKSLLALKECIRALDNDQIHIPFRGSKLTEVLRDSFVGNSKTVMISCISPNAGSCEHTLNTLRYADRVKSLSKSGNPRKDQAPNPIPPPAIKEVSSTSSLPGSVGAEDFNNGQRQEVKTMDMSRKVVEKESSLYSSAADVDKQSSFSSSCQFNGREEKSSASAPMDREKFEVKNSYGGDSTSQKMNSYSLNVTDEKVQRVSPPRRKGTKEEKSERSVNWVKRDVDGYDHSTTSSKQQSTGNYNITTGSGQSETESSSNVNISAILEEEEALIAAHRKEIEDTMEIVREEMKLLAEVDQPGSLIDNYVTQLSFVLSRKAASLVSLQARLARFQHRLKEQEILSRKRVPR

SEQ ID NO: 58722 - protein, 462 aa, Glycine max
  peptide (1)..(462): Ceres Seq. ID no. 15172494
  misc_feature (368)..(455): Homolog of NCBI NO: 9294452 NR Description: contains similarity to kinesin heavy
  misc_feature (1)..(244): Homolog of NCBI NO: 18401002 NR Description: kinesin-like protein TBK5, putative [Arabidopsis
  misc_feature (1)..(244): Homolog of NCBI NO: 9294452 NR Description: contains similarity to kinesin heavy
  misc_feature (374)..(461): Homolog of NCBI NO: 34912848 NR Description: kinesin-like protein [Oryza sativa (japonica
  misc_feature (1)..(279): Homolog of NCBI NO: 34912848 NR Description: kinesin-like protein [Oryza sativa (japonica
  misc_feature (326)..(455): Homolog of NCBI NO: 13536983 NR Description: BY-2 kinesin-like protein 10 [Nicotiana tabacum]
  misc_feature (1)..(289): Homolog of NCBI NO: 13536983 NR Description: BY-2 kinesin-like protein 10 [Nicotiana tabacum]
  misc_feature (1)..(61): Homolog of NCBI NO: 34897620 NR Description: kinesin-like protein [Oryza sativa]
  misc_feature (83)..(462): Homolog of NCBI NO: 34897620 NR Description: kinesin-like protein [Oryza sativa]
  misc_feature (1)..(462): Homolog of NCBI NO: 15228274 NR Description: kinesin-related protein TBK5, putative
MREDGRQQVCIVGLQEFEVSDVQIVKEFIEKGNAARSTGSTGANEESSRSHAILQLVVKRHNEVKESRRNNNDVNEAKSGKVVGKISFIDLAGSERGADTTDNDRQTRIEGAEINKSLLALKECIRALDNDQIHIPFRGSKLTEVLRDSFVGNSKTVMISCISPNAGSCEHTLNTLRYADRVKSLSKSGNPRKDQAPNPIPPPAIKEVSSTSSLPGSVGAEDFNNGQRQEVKTMDMSRKVVEKESSLYSSAADVDKQSSFSSSCQFNGREEKSSASAPMDREKFEVKNSYGGDSTSQKMNSYSLNVTDEKVQRVSPPRRKGTKEEKSERSVNWVKRDVDGYDHSTTSSKQQSTGNYNITTGSGQSETESSSNVNISAILEEEEALIAAHRKEIEDTMEIVREEMKLLAEVDQPGSLIDNYVTQLSFVLSRKAASLVSLQARLARFQHRLKEQEILSRKRVPR

SEQ ID NO: 58723 - DNA, 1228 bp, Glycine max
  misc_feature (1)..(1228): Ceres Seq. ID no. 14308683
gttttatggcagaaataggtgcacggcaggcatgggtttcagcttttgtgactcaatcacccaccataaccattattatcagtacatagtactagttaatctcagtcatgcctattcctaggtttatgctcttttcatcccagcatcgctccactgctgcggccctcgctcttcttcgaaggtgcgttccctctacgacaactcaatctgttaggtattcaaaatcaacaagtcacggtaaaacaaaacattatcttcatcctgtattccaaccagaatccagctccgcctcccaggtttctcgctcatggggtgcctatgttgttccagctgctgttcttggatttgctgggcttgcagctttttttcactataatgatgagagaagagcggttcccaaaggtcatcagggtggtggcctcagaaatgttgccaatggacccataattgggggtccatttacactaattaatacagagaaacaagcaattacagaacgtaattttcttgggaattgggtcctcctctactttggttatacctcatcccccgatcttgggccagagcaagtccaaattatggccaacgcaattgatatattagaatcaaaacagaatctcaagattctaccagtatttgtttccattgatcctcaacgtgatactccctcacaacttcgtgcttaccttaaagagtttgattcaagaatcataggattaactggacctgttgcagctattaggcagatggctcaagaatatcgtgtttactttaaaaaggtagaagaggatggcaatgattatcttgttgactgttcccacaacatgtatttgctgaatcctaaattggaggttacgagatgctttggagtcgagtatagtgcagaggagttgtcagaagcgatagtgaaagagctgaacagaaacccctcttgaatggttacgagatgctttggagtcgagtatagtgcggaggagatgtttctgtttttcgttttcttttaattagatcacagaataatttacatgtgatgaattaagttttactttagacgattggatttagctttgctttattttcaactagacttgcagaaaaatgtagtggcaatctgagcttcattttaagtttcgcgggcatttagttcttggctaacatcttagatggatgttttatacctgaatgttttcacattcaccttcatctaacaagcactttggttttagtt

SEQ ID NO: 58724 - protein, 275 aa, Glycine max
  peptide (1)..(275): Ceres Seq. ID no. 14308684
  misc_feature (75)..(258): Pfam Name: SCO1/SenC Pfam Description: SCO1/SenC
  misc_feature (51)..(267): Homolog of NCBI NO: 12311839 NR Description: possible SCO2 protein precursor [Leishmania major]
  misc_feature (67)..(270): Homolog of NCBI NO: 32420339 NR Description: hypothetical protein [Neurospora crassa]
  misc_feature (67)..(270): Homolog of NCBI NO: 4759068 NR Description: cytochrome oxidase deficient homolog 1 [Homo
  misc_feature (58)..(266): Homolog of NCBI NO: 19112079 NR Description: putative cytochrome C oxidase assembly protein
  misc_feature (1)..(271): Homolog of NCBI NO: 40740887 NR Description: hypothetical protein AN4842.2 [Aspergillus
  misc_feature (19)..(165): Homolog of NCBI NO: 26450269 NR Description: unknown protein [Arabidopsis thaliana]
  misc_feature (67)..(272): Homolog of NCBI NO: 18398306 NR Description: SCO1 protein -related [Arabidopsis thaliana]
  misc_feature (67)..(272): Homolog of NCBI NO: 6403490 NR Description: putative SCO1 protein [Arabidopsis thaliana]
  misc_feature (19)..(270): Homolog of NCBI NO: 7487210 NR Description: hypothetical protein T19P19.130 - Arabidopsis
  misc_feature (19)..(270): Homolog of NCBI NO: 18420515 NR Description: expressed protein [Arabidopsis thaliana]
MPIPRFMLFSSQHRSTAAALALLRRCVPSTTTQSVRYSKSTSHGKTKHYLHPVFQPESSSASQVSRSWGAYVVPAAVLGFAGLAAFFHYNDERRAVPKGHQGGGLRNVANGPIIGGPFTLINTEKQAITERNFLGNWVLLYFGYTSSPDLGPEQVQIMANAIDILESKQNLKILPVFVSIDPQRDTPSQLRAYLKEFDSRIIGLTGPVAAIRQMAQEYRVYFKKVEEDGNDYLVDCSHNMYLLNPKLEVTRCFGVEYSAEELSEAIVKELNRNPS

SEQ ID NO: 58725 - protein, 269 aa, Glycine max
  peptide (1)..(269): Ceres Seq. ID no. 14308685
  misc_feature (69)..(252): Pfam Name: SCO1/SenC Pfam Description: SCO1/SenC
  misc_feature (45)..(261): Homolog of NCBI NO: 12311839 NR Description: possible SCO2 protein precursor [Leishmania major]
  misc_feature (61)..(264): Homolog of NCBI NO: 32420339 NR Description: hypothetical protein [Neurospora crassa]
  misc_feature (61)..(264): Homolog of NCBI NO: 4759068 NR Description: cytochrome oxidase deficient homolog 1 [Homo
  misc_feature (52)..(260): Homolog of NCBI NO: 19112079 NR Description: putative cytochrome C oxidase assembly protein
  misc_feature (1)..(265): Homolog of NCBI NO: 40740887 NR Description: hypothetical protein AN4842.2 [Aspergillus
  misc_feature (13)..(159): Homolog of NCBI NO: 26450269 NR Description: unknown protein [Arabidopsis thaliana]
  misc_feature (61)..(266): Homolog of NCBI NO: 18398306 NR Description: SCO1 protein -related [Arabidopsis thaliana]
  misc_feature (61)..(266): Homolog of NCBI NO: 6403490 NR Description: putative SCO1 protein [Arabidopsis thaliana]
  misc_feature (13)..(264): Homolog of NCBI NO: 7487210 NR Description: hypothetical protein T19P19.130 - Arabidopsis
  misc_feature (13)..(264): Homolog of NCBI NO: 18420515 NR Description: expressed protein [Arabidopsis thaliana]
MLFSSQHRSTAAALALLRRCVPSTTTQSVRYSKSTSHGKTKHYLHPVFQPESSSASQVSRSWGAYVVPAAVLGFAGLAAFFHYNDERRAVPKGHQGGGLRNVANGPIIGGPFTLINTEKQAITERNFLGNWVLLYFGYTSSPDLGPEQVQIMANAIDILESKQNLKILPVFVSIDPQRDTPSQLRAYLKEFDSRIIGLTGPVAAIRQMAQEYRVYFKKVEEDGNDYLVDCSHNMYLLNPKLEVTRCFGVEYSAEELSEAIVKELNRNPS

SEQ ID NO: 58726 - DNA, 1344 bp, Glycine max
  misc_feature (1)..(1344): Ceres Seq. ID no. 14308727
aaaccaaaccaaaccaaacctctctttctcagtttctctctcttagggttttctcctcccccattgacccaccgtccatcgcaaaggaagtcgcgcccaatttccatggtttgtagattaaatcttaaagcagtaagtcatcatggataaatcagagcagactcagcagcaacatcagcatgggatgggcgttgccacaggtgctagccaaatggcctattcttctcactacccgactgctcccatggtggcttctggcacgcctgctgtagctgttccttccccaactcaggctccagctgccttctctagttctgctcaccagcttgcataccagcaagcacagcatttccaccaccaacagcagcaacaccaacaacagcagcttcaaatgttctggtcaaaccaaatgcaagaaattgagcaaacaattgactttaaaaaccacagtcttcctcttgctcggataaaaaagataatgaaagctgatgaagatgtccggatgatttctgcagaagctccagtcatatttgcaaaagcatgtgaaatgttcatattagagttgacgttgagatcttggatccacacagaagagaacaagaggagaactctacaaaagaatgatatagcagctgctatttcgagaaacgatgtttttgatttcttggttgatattatcccaagagatgagttgaaagaggaaggacttggaataaccaaggctactattccattggtgaattctccagctgatatgccatattactatgtccctccacagcatcctgttgtaggacctcctgggatgatcatgggcaagcccgttggtgctgagcaagcaacgctgtattctacacagcagcctcgacctcccatggcgttcatgccatggccccatacacaaccccagcaacagcagccaccccaacatcaacaaacagactcatgatgacaatgcaattcaattaggtcggaaagtagcatgcaccttatgattattacaaatttacttaatgcctttaagtcagctgtagtttagtgttttgcattgaaaaatgccaaagattgtttgaggtttcttgcactcatttatgattgtatgagctcttatgctgagttacttttggttgtgtttatttgaggtactggtgtggtagttaaattagtttgtagctgtccataagtaaacagcgtagctgcttaattaggaggtctgaaatgatgaaatagtttgtattgttattgcagaaggtaggttttattcagtatttcattctattgcaatggctgaatttaatgctcatccgcttagtaccaaaaaaaaaaaaaaaaaagaattcgaga

SEQ ID NO: 58727 - protein, 268 aa, Glycine max
  peptide (1)..(268): Ceres Seq. ID no. 14308728
  misc_feature (102)..(166): Pfam Name: Histone-like transcription factor (CBF/NF-Y) and Pfam Description: Histone-like transcription factor (CBF/NF-Y)
  misc_feature (90)..(213): Homolog of NCBI NO: 25404100 NR Description: transcription factor [imported] - Arabidopsis
  misc_feature (90)..(213): Homolog of NCBI NO: 2398533 NR Description: Transcription factor [Arabidopsis thaliana]
  misc_feature (41)..(253): Homolog of NCBI NO: 15242784 NR Description: transcription factor Hap5a, putative [Arabidopsis
  misc_feature (70)..(227): Homolog of NCBI NO: 15228405 NR Description: transcription factor Hap5a, putative [Arabidopsis
  misc_feature (46)..(260): Homolog of NCBI NO: 15221912 NR Description: transcription factor Hap5a, putative [Arabidopsis
  misc_feature (65)..(265): Homolog of NCBI NO: 25372763 NR Description: hypothetical protein [imported] - Arabidopsis
  misc_feature (10)..(265): Homolog of NCBI NO: 6289057 NR Description: heme activated protein [Arabidopsis thaliana]
  misc_feature (10)..(265): Homolog of NCBI NO: 15223986 NR Description: transcription factor Hap5a, putative [Arabidopsis
  misc_feature (45)..(213): Homolog of NCBI NO: 21554704 NR Description: transcription factor, putative [Arabidopsis
  misc_feature (45)..(213): Homolog of NCBI NO: 15223482 NR Description: transcription factor Hap5a, putative [Arabidopsis
MDKSEQTQQQHQHGMGVATGASQMAYSSHYPTAPMVASGTPAVAVPSPTQAPAAFSSSAHQLAYQQAQHFHHQQQQHQQQQLQMFWSNQMQEIEQTIDFKNHSLPLARIKKIMKADEDVRMISAEAPVIFAKACEMFILELTLRSWIHTEENKRRTLQKNDIAAAISRNDVFDFLVDIIPRDELKEEGLGITKATIPLVNSPADMPYYYVPPQHPVVGPPGMIMGKPVGAEQATLYSTQQPRPPMAFMPWPHTQPQQQQPPQHQQTDS

SEQ ID NO: 58728 - protein, 254 aa, Glycine max
  peptide (1)..(254): Ceres Seq. ID no. 14308729
  misc_feature (88)..(152): Pfam Name: Histone-like transcription factor (CBF/NF-Y) and Pfam Description: Histone-like transcription factor (CBF/NF-Y)
  misc_feature (76)..(199): Homolog of NCBI NO: 25404100 NR Description: transcription factor [imported] - Arabidopsis
  misc_feature (76)..(199): Homolog of NCBI NO: 2398533 NR Description: Transcription factor [Arabidopsis thaliana]
  misc_feature (27)..(239): Homolog of NCBI NO: 15242784 NR Description: transcription factor Hap5a, putative [Arabidopsis
  misc_feature (56)..(213): Homolog of NCBI NO: 15228405 NR Description: transcription factor Hap5a, putative [Arabidopsis
  misc_feature (32)..(246): Homolog of NCBI NO: 15221912 NR Description: transcription factor Hap5a, putative [Arabidopsis
  misc_feature (51)..(251): Homolog of NCBI NO: 25372763 NR Description: hypothetical protein [imported] - Arabidopsis
  misc_feature (1)..(251): Homolog of NCBI NO: 6289057 NR Description: heme activated protein [Arabidopsis thaliana]
  misc_feature (1)..(251): Homolog of NCBI NO: 15223986 NR Description: transcription factor Hap5a, putative [Arabidopsis
  misc_feature (31)..(199): Homolog of NCBI NO: 21554704 NR Description: transcription factor, putative [Arabidopsis
  misc_feature (31)..(199): Homolog of NCBI NO: 15223482 NR Description: transcription factor Hap5a, putative [Arabidopsis
MGVATGASQMAYSSHYPTAPMVASGTPAVAVPSPTQAPAAFSSSAHQLAYQQAQHFHHQQQQHQQQQLQMFWSNQMQEIEQTIDFKNHSLPLARIKKIMKADEDVRMISAEAPVIFAKACEMFILELTLRSWIHTEENKRRTLQKNDIAAAISRNDVFDFLVDIIPRDELKEEGLGITKATIPLVNSPADMPYYYVPPQHPVVGPPGMIMGKPVGAEQATLYSTQQPRPPMAFMPWPHTQPQQQQPPQHQQTDS

SEQ ID NO: 58729 - protein, 245 aa, Glycine max
  peptide (1)..(245): Ceres Seq. ID no. 14308730
  misc_feature (79)..(143): Pfam Name: Histone-like transcription factor (CBF/NF-Y) and Pfam Description: Histone-like transcription factor (CBF/NF-Y)
  misc_feature (67)..(190): Homolog of NCBI NO: 25404100 NR Description: transcription factor [imported] - Arabidopsis
  misc_feature (67)..(190): Homolog of NCBI NO: 2398533 NR Description: Transcription factor [Arabidopsis thaliana]
  misc_feature (18)..(230): Homolog of NCBI NO: 15242784 NR Description: transcription factor Hap5a, putative [Arabidopsis
  misc_feature (47)..(204): Homolog of NCBI NO: 15228405 NR Description: transcription factor Hap5a, putative [Arabidopsis
  misc_feature (23)..(237): Homolog of NCBI NO: 15221912 NR Description: transcription factor Hap5a, putative [Arabidopsis
  misc_feature (42)..(242): Homolog of NCBI NO: 25372763 NR Description: hypothetical protein [imported] - Arabidopsis
  misc_feature (1)..(242): Homolog of NCBI NO: 6289057 NR Description: heme activated protein [Arabidopsis thaliana]
  misc_feature (1)..(242): Homolog of NCBI NO: 15223986 NR Description: transcription factor Hap5a, putative [Arabidopsis
  misc_feature (22)..(190): Homolog of NCBI NO: 21554704 NR Description: transcription factor, putative [Arabidopsis
  misc_feature (22)..(190): Homolog of NCBI NO: 15223482 NR Description: transcription factor Hap5a, putative [Arabidopsis
MAYSSHYPTAPMVASGTPAVAVPSPTQAPAAFSSSAHQLAYQQAQHFHHQQQQHQQQQLQMFWSNQMQEIEQTIDFKNHSLPLARIKKIMKADEDVRMISAEAPVIFAKACEMFILELTLRSWIHTEENKRRTLQKNDIAAAISRNDVFDFLVDIIPRDELKEEGLGITKATIPLVNSPADMPYYYVPPQHPVVGPPGMIMGKPVGAEQATLYSTQQPRPPMAFMPWPHTQPQQQQPPQHQQTDS

SEQ ID NO: 58730 - DNA, 1958 bp, Glycine max
  misc_feature (1)..(1958): Ceres Seq. ID no. 15226288
rvcgggscccccctcgagtcagctacgtaggcccccccccccaggagtttctgcatgtggaaattcagagtcaagcttaccacttcccagtcaaaaccattctgagcaacaagtttttcatgatgagtggccagcaactgaacaaccaattgctagaaatgcacaggaactaaacatgtctgcttcttctaatgccaatgggccatttgagcatcctagcttgcatgtaaatgcaattggtttacacaggaactgtgaattagacacagccccagtttcatggggggatgttgcttgtgataatgatgcttttgaaaaaaatgaatctgcttctatatctagagaacatactgttttgagcagcaacactggactacgatcccattccaactctaacttaaggaatactatttcctctgatcattgtagttcttatgggcatggtgaagacgtgtcatcagccgcttcaattttccagcggctaagtataggagaatccaaacagaaagtgccaacatttgaagatgatcctgcagtggttattccaattcatttacaagccttaggtgctgactgttcacatttgagttttggtacatataatggcagcagtactgcatcttctgtccttcttaattctaatcatctttcaaaaagtgacttggaagagaagtctgcagctgtagatgattcttcggctcagttcctggatgcaagttatgatttccagagagataagcagcatggatttgatgttcttaaaggagcagcaggtgataaaaacagtgacatcctttcatctgataagcaatggtttgtgaagcatattgttcctgaggaaacttttgagaatgaacacatcatcaaggcatctgtatcagatcctagattgcaaaaatcacactgggagaatacttcactgccattgaagcagccaggggtgcagagtggaaaccatttgaattttccaagaggattgtatgctgactcaaattcaatacctggtgatgtgttggcgttgctcatgtcacaatctcaaactgcaagacacagtaacacagtttcatccataagcaatcctgccttctccatgtctaaggtcatggagccaggtgcctttcctctacctatgagatctgcacttccccgggatcctacagtgcattcctcatcacactttcatcaattgcctgacacaaaaggatatttttccctgccccagaataggtcatacaatacaaccataaattctcagttaccattttcaggcaatactgtatacaatcaatctccagcagacatgaagtacaaccttctacaaaatagaaatgaattccttacaaatagattgcctcctgccactgccagagatgcatttggctatggaaatcttggctcttccatttatagttctggaagctttctgtctaatccatctcctggtcatatgatgccttcaagtaactttaatgagattttaccttctcagtataatggtggacgtaacataaactctattcaacagcatggtagcttttctcattgggattacggagccgagccaagatctttgtttatcccgaagagaacccagtcacagtatgctactcctggatatgctgaccttcatcattctgagacacgggttttggaaaaatatcagcagccaggtgattttcaagatttgccatccaagcagttgcatccattttggcaacgcgacaaccttcatcattctgagacacgggttttggaagaacatcagcagccaggtgattttcaagatttgccgtccaagcagttgcatccattttggcagcacgataactaatactatacatcctgcttgttttttcttcccttttttgtatacagaattattttagtaggtttaggtgaattatggtgttattttcattcagatgcttgagcgttaattcaattgtagatcttttttg

SEQ ID NO: 58731 - protein, 609 aa, Glycine max
  peptide (1)..(609): Ceres Seq. ID no. 15226289
  misc_feature (21)..(321): Homolog of NCBI NO: 15236766 NR Description: hypothetical protein [Arabidopsis thaliana]
  misc_feature (356)..(607): Homolog of NCBI NO: 34910870 NR Description: P0003E08.1 [Oryza sativa (japonica
  misc_feature (150)..(397): Homolog of NCBI NO: 34910870 NR Description: P0003E08.1 [Oryza sativa (japonica
  misc_feature (1)..(1): Xaa is any aa, unknown or other
  misc_feature (2)..(2): Xaa is any aa, unknown or other
XXPPSSQLRRPPPPGVSACGNSESSLPLPSQNHSEQQVFHDEWPATEQPIARNAQELNMSASSNANGPFEHPSLHVNAIGLHRNCELDTAPVSWGDVACDNDAFEKNESASISREHTVLSSNTGLRSHSNSNLRNTISSDHCSSYGHGEDVSSAASIFQRLSIGESKQKVPTFEDDPAVVIPIHLQALGADCSHLSFGTYNGSSTASSVLLNSNHLSKSDLEEKSAAVDDSSAQFLDASYDFQRDKQHGFDVLKGAAGDKNSDILSSDKQWFVKHIVPEETFENEHIIKASVSDPRLQKSHWENTSLPLKQPGVQSGNHLNFPRGLYADSNSIPGDVLALLMSQSQTARHSNTVSSISNPAFSMSKVMEPGAFPLPMRSALPRDPTVHSSSHFHQLPDTKGYFSLPQNRSYNTTINSQLPFSGNTVYNQSPADMKYNLLQNRNEFLTNRLPPATARDAFGYGNLGSSIYSSGSFLSNPSPGHMMPSSNFNEILPSQYNGGRNINSIQQHGSFSHWDYGAEPRSLFIPKRTQSQYATPGYADLHHSETRVLEKYQQPGDFQDLPSKQLHPFWQRDNLHHSETRVLEEHQQPGDFQDLPSKQLHPFWQHDN

SEQ ID NO: 58732 - protein, 551 aa, Glycine max
  peptide (1)..(551): Ceres Seq. ID no. 15226290
  misc_feature (1)..(263): Homolog of NCBI NO: 15236766 NR Description: hypothetical protein [Arabidopsis thaliana]
  misc_feature (298)..(549): Homolog of NCBI NO: 34910870 NR Description: P0003E08.1 [Oryza sativa (japonica
  misc_feature (92)..(339): Homolog of NCBI NO: 34910870 NR Description: P0003E08.1 [Oryza sativa (japonica
MSASSNANGPFEHPSLHVNAIGLHRNCELDTAPVSWGDVACDNDAFEKNESASISREHTVLSSNTGLRSHSNSNLRNTISSDHCSSYGHGEDVSSAASIFQRLSIGESKQKVPTFEDDPAVVIPIHLQALGADCSHLSFGTYNGSSTASSVLLNSNHLSKSDLEEKSAAVDDSSAQFLDASYDFQRDKQHGFDVLKGAAGDKNSDILSSDKQWFVKHIVPEETFENEHIIKASVSDPRLQKSHWENTSLPLKQPGVQSGNHLNFPRGLYADSNSIPGDVLALLMSQSQTARHSNTVSSISNPAFSMSKVMEPGAFPLPMRSALPRDPTVHSSSHFHQLPDTKGYFSLPQNRSYNTTINSQLPFSGNTVYNQSPADMKYNLLQNRNEFLTNRLPPATARDAFGYGNLGSSIYSSGSFLSNPSPGHMMPSSNFNEILPSQYNGGRNINSIQQHGSFSHWDYGAEPRSLFIPKRTQSQYATPGYADLHHSETRVLEKYQQPGDFQDLPSKQLHPFWQRDNLHHSETRVLEEHQQPGDFQDLPSKQLHPFWQHDN

SEQ ID NO: 58733 - DNA, 1104 bp, Glycine max
  misc_feature (1)..(1104): Ceres Seq. ID no. 15169184
gcttccctctctcatcctctctgccgcttccccgctctccccaaactactctgtgccccgtcagatcgacctggactttggcgacagctacttctcgacgggcggcacgggcgtgctgctacttctgcttcctctcccacgcttgctgagctgatggctacatcagagccagtacaagagagtttggtggtgcactactcacaacctagtaggccccgggtcctccttgctgcttcaggaagtgtagccgctataaaatttgaaagcctttgccgtagcttctctgagtgggcggatgtccgagctgtggccaccacgtcatccttgcacttcgttgatagatcatctctaccaagtggcatcgttctttacactgatgacgatgaatggtctacctggaagaagataggagatgaagtcttacacatcgagctgcggaaatgggcagacgttatggtgattgctccattgtcagcaaataccctggctaagatcgccggtgggttatgcgacaacctcttgacctgcatcgtgagagcgtgggactacagcaaaccgctctttgttgccccagccatgaacacgttaatgtggaacaacccattcacggagcggcatcttcacacaatcaaccaactgggcatagccttgatccccccagttaccaaaaggctggcctgtggcgattacgggaacggcgcaatggccgaaacctcgcagatccatacttccgtgaggctcgcgtgcaagacgcaaccgcacgatgcgagcagttcactcgcgggtcctgtcagtaataaccggccatctagctgatgcagcggttggccacttgattgtcaagcttaggaatttgttttatctgcagtgtgcatctggagtgttgtaccagattttttttcaactagagtttgtgtgtattgaattagggggaaaggttgttgtcacatgataacaataacttccaatgatgactctattcagtttgtaattgtctgtgggagtacaattatgcagctgtattgtctgctacaatattgtttgtttgtgtgtgtgggagtggggggtgctgttgccacagagatagattcctccctgcccagt

SEQ ID NO: 58734 - protein, 271 aa, Glycine max
  peptide (1)..(271): Ceres Seq. ID no. 15169185
  misc_feature (72)..(192): Pfam Name: Flavoprotein Pfam Description: Flavoprotein
  misc_feature (48)..(246): Homolog of NCBI NO: 34863489 NR Description: similar to RIKEN cDNA 8430432M10 [Rattus
  misc_feature (67)..(246): Homolog of NCBI NO: 28849879 NR Description: RIKEN cDNA 8430432M10 [Mus musculus]
  misc_feature (135)..(248): Homolog of NCBI NO: 12583571 NR Description: putative halotolerance protein HAL3 homolog
  misc_feature (70)..(253): Homolog of NCBI NO: 37590890 NR Description: Unknown (protein for MGC:73297) [Danio rerio]
  misc_feature (73)..(246): Homolog of NCBI NO: 40556079 NR Description: CNPV141 HAL3-like domain protein [Canarypox
  misc_feature (70)..(246): Homolog of NCBI NO: 9634784 NR Description: ORF FPV114 HAL3 domain [Fowlpox virus]
  misc_feature (71)..(252): Homolog of NCBI NO: 13124308 NR Description: Halotolerance protein Hal3b
  misc_feature (71)..(252): Homolog of NCBI NO: 8778701 NR Description: T1N15.24 [Arabidopsis thaliana]
  misc_feature (69)..(254): Homolog of NCBI NO: 28948673 NR Description: Chain A, Ppc Decarboxylase Mutant C175s
  misc_feature (69)..(254): Homolog of NCBI NO: 15229569 NR Description: HAL3A protein [Arabidopsis thaliana]
ASLSHPLCRFPALPKLLCAPSDRPGLWRQLLLDGRHGRAATSASSPTLAELMATSEPVQESLVVHYSQPSRPRVLLAASGSVAAIKFESLCRSFSEWADVRAVATTSSLHFVDRSSLPSGIVLYTDDDEWSTWKKIGDEVLHIELRKWADVMVIAPLSANTLAKIAGGLCDNLLTCIVRAWDYSKPLFVAPAMNTLMWNNPFTERHLHTINQLGIALIPPVTKRLACGDYGNGAMAETSQIHTSVRLACKTQPHDASSSLAGPVSNNRPSS

SEQ ID NO: 58735 - protein, 220 aa, Glycine max
  peptide (1)..(220): Ceres Seq. ID no. 15169186
  misc_feature (21)..(141): Pfam Name: Flavoprotein Pfam Description: Flavoprotein
  misc_feature (1)..(195): Homolog of NCBI NO: 34863489 NR Description: similar to RIKEN cDNA 8430432M10 [Rattus
  misc_feature (16)..(195): Homolog of NCBI NO: 28849879 NR Description: RIKEN cDNA 8430432M10 [Mus musculus]
  misc_feature (84)..(197): Homolog of NCBI NO: 12583571 NR Description: putative halotolerance protein HAL3 homolog
  misc_feature (19)..(202): Homolog of NCBI NO: 37590890 NR Description: Unknown (protein for MGC:73297) [Danio rerio]
  misc_feature (22)..(195): Homolog of NCBI NO: 40556079 NR Description: CNPV141 HAL3-like domain protein [Canarypox
  misc_feature (19)..(195): Homolog of NCBI NO: 9634784 NR Description: ORF FPV114 HAL3 domain [Fowlpox virus]
  misc_feature (20)..(201): Homolog of NCBI NO: 13124308 NR Description: Halotolerance protein Hal3b
  misc_feature (20)..(201): Homolog of NCBI NO: 8778701 NR Description: T1N15.24 [Arabidopsis thaliana]
  misc_feature (18)..(203): Homolog of NCBI NO: 28948673 NR Description: Chain A, Ppc Decarboxylase Mutant C175s
  misc_feature (18)..(203): Homolog of NCBI NO: 15229569 NR Description: HAL3A protein [Arabidopsis thaliana]
MATSEPVQESLVVHYSQPSRPRVLLAASGSVAAIKFESLCRSFSEWADVRAVATTSSLHFVDRSSLPSGIVLYTDDDEWSTWKKIGDEVLHIELRKWADVMVIAPLSANTLAKIAGGLCDNLLTCIVRAWDYSKPLFVAPAMNTLMWNNPFTERHLHTINQLGIALIPPVTKRLACGDYGNGAMAETSQIHTSVRLACKTQPHDASSSLAGPVSNNRPSS

SEQ ID NO: 58736 - DNA, 1891 bp, Glycine max
  misc_feature (1)..(1891): Ceres Seq. ID no. 14310520
aaaacaaaaaagaccatggtaatggtaaaccctctaaattattggggaagacaaaagaatgagaaagaaagctgccctttctctcgctactcctcctaccccaaacaaaactttcccattacaaattgtggaatgaagaaagaatggcaagacaagtgagtagtagtatagtagtaattgacccatcaaacaaacaagcataacccatgtaattgttattgtagatagatagagtgagtgagtgagcactgtgttgtgtatatagtagtgtgtaaactctccccaacagacagacacgccgccactcaattatttctgtccatttcttcttcccatattgttctcgtgtgttgtgtgtgtcagtgttttggtgtgtgtgtgtgtgtgtgtgtgagtgagagaaagagaaaaaaagaaaagaaaaagagtgtcttggggcggttttggtttgagtttaacactttcatttcgaagatgccgcgcccagggccaaggccttacgagtgcgtgagaagggcttggcacagcgagcgccaccaacccgtgagaggttccatcattcagcagattttcagggtcgtcaatgacgctcacagtcccgcaaccaagaagaacaaggaatggcaggagaagctccccgtggtggttctcaaggccgaagaaatcatgtactccaaagccaattccgaggcagagtacttgaatcctgacacgctctgggaccgcctcaatgatgccgttaacacaatcatacggagagatgagacaaccgagacaggaggcctcttgcccccatgtgttgaagctgcacttaacttgggatgcaaagccgtgagaacttccagaagtgatcggcacaataacccaaggacttacctttctccaaggattcaacagcctccttgtctgcctcctaaacctgttgcggggaatcccttgaactatgcaaaagtcacaactcctgctgtgtcaccaattcctgtgccagattctatccacccaaatagcaggctcatgggttcctctaagtaccctttctcagaaggtatcccttctggtcatcaccagccattgacaatggaagctagaccctcattgaacttgggttcagtttaccctttgtactatggttatgaagccagagaacctgaaccttggacgactgctacagataccacgtgttctgatacaatctttgttggcagaccagtcatttcagtccctgagccttcaggaattggtctatcggaaaacttctcctatggtacattccatcacgttgcaaacagaatgagaaaagagactgctgttggcactcaggaggcagcaccagatagggaatgtgacttgtctttgaggttgggtcaatgtctgcatccgtgttcaagcagcaaaagtagttcagcatatgaagtagatgatgttggtttaggagtttcaccggaaagctgcaagtttagccatttatccttgcagagaaatagagagttctgtttttatcctagagagacaggttatggcaccattgagtccacttctggtaaatgtaatgtagagggtgaagatctgaatttagaggcaactcttcggaagcgcaaagcacctttatgtggtaacaacgaggaagatgggcaattttgccggaatccaggggtcccatccaatcgttttactagtaggccaggttcgtagacagtttcttgttgtatcatagtatatgcatttgcatttctagatagatgaatgatccaaaatgttgtttaatcctcttatgtagactctttatgtgtagctctgcttgtgaaaaattttagaagctggcgttgagttgctaattgcattttctcccaatgtgaactgtatataaaatcttagtttgctttgcttaaag

SEQ ID NO: 58737 - protein, 405 aa, Glycine max
  peptide (1)..(405): Ceres Seq. ID no. 14310521
  misc_feature (38)..(218): Homolog of NCBI NO: 11994234 NR Description: gene_id:MUJ8.5~unknown protein [Arabidopsis
  misc_feature (1)..(211): Homolog of NCBI NO: 22329083 NR Description: expressed protein [Arabidopsis thaliana]
  misc_feature (1)..(218): Homolog of NCBI NO: 15230072 NR Description: expressed protein [Arabidopsis thaliana]
MPRPGPRPYECVRRAWHSERHQPVRGSIIQQIFRVVNDAHSPATKKNKEWQEKLPVVVLKAEEIMYSKANSEAEYLNPDTLWDRLNDAVNTIIRRDETTETGGLLPPCVEAALNLGCKAVRTSRSDRHNNPRTYLSPRIQQPPCLPPKPVAGNPLNYAKVTTPAVSPIPVPDSIHPNSRLMGSSKYPFSEGIPSGHHQPLTMEARPSLNLGSVYPLYYGYEAREPEPWTTATDTTCSDTIFVGRPVISVPEPSGIGLSENFSYGTFHHVANRMRKETAVGTQEAAPDRECDLSLRLGQCLHPCSSSKSSSAYEVDDVGLGVSPESCKFSHLSLQRNREFCFYPRETGYGTIESTSGKCNVEGEDLNLEATLRKRKAPLCGNNEEDGQFCRNPGVPSNRFTSRPGS

SEQ ID NO: 58738 - protein, 341 aa, Glycine max
  peptide (1)..(341): Ceres Seq. ID no. 14310522
  misc_feature (1)..(154): Homolog of NCBI NO: 11994234 NR Description: gene_id:MUJ8.5~unknown protein [Arabidopsis
  misc_feature (1)..(147): Homolog of NCBI NO: 22329083 NR Description: expressed protein [Arabidopsis thaliana]
  misc_feature (1)..(154): Homolog of NCBI NO: 15230072 NR Description: expressed protein [Arabidopsis thaliana]
MYSKANSEAEYLNPDTLWDRLNDAVNTIIRRDETTETGGLLPPCVEAALNLGCKAVRTSRSDRHNNPRTYLSPRIQQPPCLPPKPVAGNPLNYAKVTTPAVSPIPVPDSIHPNSRLMGSSKYPFSEGIPSGHHQPLTMEARPSLNLGSVYPLYYGYEAREPEPWTTATDTTCSDTIFVGRPVISVPEPSGIGLSENFSYGTFHHVANRMRKETAVGTQEAAPDRECDLSLRLGQCLHPCSSSKSSSAYEVDDVGLGVSPESCKFSHLSLQRNREFCFYPRETGYGTIESTSGKCNVEGEDLNLEATLRKRKAPLCGNNEEDGQFCRNPGVPSNRFTSRPGS

SEQ ID NO: 58739 - protein, 225 aa, Glycine max
  peptide (1)..(225): Ceres Seq. ID no. 14310523
  misc_feature (1)..(38): Homolog of NCBI NO: 11994234 NR Description: gene_id:MUJ8.5~unknown protein [Arabidopsis
  misc_feature (1)..(31): Homolog of NCBI NO: 22329083 NR Description: expressed protein [Arabidopsis thaliana]
  misc_feature (1)..(38): Homolog of NCBI NO: 15230072 NR Description: expressed protein [Arabidopsis thaliana]
MGSSKYPFSEGIPSGHHQPLTMEARPSLNLGSVYPLYYGYEAREPEPWTTATDTTCSDTIFVGRPVISVPEPSGIGLSENFSYGTFHHVANRMRKETAVGTQEAAPDRECDLSLRLGQCLHPCSSSKSSSAYEVDDVGLGVSPESCKFSHLSLQRNREFCFYPRETGYGTIESTSGKCNVEGEDLNLEATLRKRKAPLCGNNEEDGQFCRNPGVPSNRFTSRPGS

SEQ ID NO: 58740 - DNA, 1503 bp, Glycine max
  misc_feature (1)..(1503): Ceres Seq. ID no. 15178181
gagattaataataataagagagtaaggaagggcactccaagactttggtggagagcaagagctataagtgtgagaagtgattggaaattgttggaacccaccctatcaacaaggagaagctgttttcgttcgtcgccactaacactaatcgtttcttcaatgccttacgagaaggaactcgccgctgcaaagaaagcagtcactctcgctgctcgtctctgccagaaagttcagaaggctcttctgcaatccgatgtgcactcaaagtcagacaaaagtcctgtcacagtggctgattatggttcacaagcattggtcagctttatacttgagagagaacttccttctgaatcattttcattagtagctgaggaggattcaggtgatcttcgtaaggaaagtggccaggatactctgaatcgcattacagaacttgtcaatgatactcttgctagtgaaggatcaaatagcttttctactttaacaacagatgacgtgcttgtggccatcgacagtggtaaatctgaaggtggttcagttggacggcactgggttttggatccgatagatggtactaaagggtttgtaagaggagattaatatgctatagcattagctttgttacatgaaggcaaaattgtattgggtgtcttggcttgtccaaatcttccactggcatccattggctctaatcagcagcattcttcttcaaatgaagttggttgtctcttctttgctaaagttggtgatggaacatatatgcaagcactgggcggttctacacaaactagggtgcatgtctgtgatattgataatccagaggaagcatcatttttcgaatcttttgaagcagcacactccttgcatgacttatctagctcaatcgcagaaaaacttggtgtcaaagcaccaccagtcagaattgatagccaagcaaaatatggagctttgtcaagaggagatggggctatatatttgcgtttccctcacagaggataccgtgaaaaaatatgggatcatgctgctggcagcattgttgtgactgaagctggaggtattgccatggatgctgcggggaaccctttggacttttcaaaaggaaagtttcttgatgttgtatctggtattattgttacaaaccagaaattgatgccatcacttctgacagcagttaaagaagcactcaatgagaaagcatcatccttgtgatttccatttaagcgaatgattctacaaatgagcttgctaacgttgttgtcggctcgtgttatatggggccttcccctcaattgtgctatatttcattctgatgaagttaaacaaatgatgggacttcctctgatacttcctttgtagcagcagatttgtgctctggttttttgcagctgctattttcttctccttctatatacctgtccttttctctccttttctattaataaacagagatgagagatcttatataaacttgtttgataattaattcttctagattaacttgtc

SEQ ID NO: 58741 - protein, 199 aa, Glycine max
  peptide (1)..(199): Ceres Seq. ID no. 15178182
  misc_feature (54)..(199): Homolog of NCBI NO: 40744789 NR Description: hypothetical protein AN1769.2 [Aspergillus
  misc_feature (56)..(199): Homolog of NCBI NO: 15451579 NR Description: Putative PAP-specific phosphatase [Oryza sativa]
  misc_feature (54)..(199): Homolog of NCBI NO: 8777312 NR Description: 3'(2'),5'-bisphosphate nucleotidase [Arabidopsis
  misc_feature (54)..(199): Homolog of NCBI NO: 34395640 NR Description: Probable SAL4 phosphatase (3'(2'),5'-bisphosphate
  misc_feature (54)..(199): Homolog of NCBI NO: 21618152 NR Description: 3(2),5-bisphosphate nucleotidase [Arabidopsis
  misc_feature (54)..(199): Homolog of NCBI NO: 18424775 NR Description: 3(2),5-bisphosphate nucleotidase [Arabidopsis
  misc_feature (54)..(199): Homolog of NCBI NO: 15237589 NR Description: 3(2),5-bisphosphate nucleotidase (emb|CAB05889.1)
  misc_feature (50)..(199): Homolog of NCBI NO: 14268820 NR Description: diphosphonucleotide phosphatase 1 [Zea mays]
  misc_feature (55)..(199): Homolog of NCBI NO: 3913517 NR Description: 3'(2'),5'-BISPHOSPHATE NUCLEOTIDASE
  misc_feature (54)..(199): Homolog of NCBI NO: 15237567 NR Description: 3(2),5-bisphosphate nucleotidase [Arabidopsis
EINNNKRVRKGTPRLWWRARAISVRSDWKLLEPTLSTRRSCFRSSPLTLIVSSMPYEKELAAAKKAVTLAARLCQKVQKALLQSDVHSKSDKSPVTVADYGSQALVSFILERELPSESFSLVAEEDSGDLRKESGQDTLNRITELVNDTLASEGSNSFSTLTTDDVLVAIDSGKSEGGSVGRHWVLDPIDGTKGFVRGD

SEQ ID NO: 58742 - protein, 149 aa, Glycine max
  peptide (1)..(149): Ceres Seq. ID no. 15178183
  misc_feature (1)..(142): Homolog of NCBI NO: 40744789 NR Description: hypothetical protein AN1769.2 [Aspergillus
  misc_feature (1)..(141): Homolog of NCBI NO: 15451579 NR Description: Putative PAP-specific phosphatase [Oryza sativa]
  misc_feature (1)..(145): Homolog of NCBI NO: 8777312 NR Description: 3'(2'),5'-bisphosphate nucleotidase [Arabidopsis
  misc_feature (1)..(145): Homolog of NCBI NO: 34395640 NR Description: Probable SAL4 phosphatase (3'(2'),5'-bisphosphate
  misc_feature (1)..(145): Homolog of NCBI NO: 21618152 NR Description: 3(2),5-bisphosphate nucleotidase [Arabidopsis
  misc_feature (1)..(145): Homolog of NCBI NO: 18424775 NR Description: 3(2),5-bisphosphate nucleotidase [Arabidopsis
  misc_feature (1)..(145): Homolog of NCBI NO: 15237589 NR Description: 3(2),5-bisphosphate nucleotidase (emb|CAB05889.1)
  misc_feature (1)..(149): Homolog of NCBI NO: 14268820 NR Description: diphosphonucleotide phosphatase 1 [Zea mays]
  misc_feature (1)..(145): Homolog of NCBI NO: 3913517 NR Description: 3'(2'),5'-BISPHOSPHATE NUCLEOTIDASE
  misc_feature (1)..(149): Homolog of NCBI NO: 15237567 NR Description: 3(2),5-bisphosphate nucleotidase [Arabidopsis
MQALGGSTQTRVHVCDIDNPEEASFFESFEAAHSLHDLSSSIAEKLGVKAPPVRIDSQAKYGALSRGDGAIYLRFPHRGYREKIWDHAAGSIVVTEAGGIAMDAAGNPLDFSKGKFLDVVSGIIVTNQKLMPSLLTAVKEALNEKASSL

SEQ ID NO: 58743 - protein, 146 aa, Glycine max
  peptide (1)..(146): Ceres Seq. ID no. 15178184
  misc_feature (1)..(146): Homolog of NCBI NO: 40744789 NR Description: hypothetical protein AN1769.2 [Aspergillus
  misc_feature (3)..(146): Homolog of NCBI NO: 15451579 NR Description: Putative PAP-specific phosphatase [Oryza sativa]
  misc_feature (1)..(146): Homolog of NCBI NO: 8777312 NR Description: 3'(2'),5'-bisphosphate nucleotidase [Arabidopsis
  misc_feature (1)..(146): Homolog of NCBI NO: 34395640 NR Description: Probable SAL4 phosphatase (3'(2'),5'-bisphosphate
  misc_feature (1)..(146): Homolog of NCBI NO: 21618152 NR Description: 3(2),5-bisphosphate nucleotidase [Arabidopsis
  misc_feature (1)..(146): Homolog of NCBI NO: 18424775 NR Description: 3(2),5-bisphosphate nucleotidase [Arabidopsis
  misc_feature (1)..(146): Homolog of NCBI NO: 15237589 NR Description: 3(2),5-bisphosphate nucleotidase (emb|CAB05889.1)
  misc_feature (1)..(146): Homolog of NCBI NO: 14268820 NR Description: diphosphonucleotide phosphatase 1 [Zea mays]
  misc_feature (2)..(146): Homolog of NCBI NO: 3913517 NR Description: 3'(2'),5'-BISPHOSPHATE NUCLEOTIDASE
  misc_feature (1)..(146): Homolog of NCBI NO: 15237567 NR Description: 3(2),5-bisphosphate nucleotidase [Arabidopsis
MPYEKELAAAKKAVTLAARLCQKVQKALLQSDVHSKSDKSPVTVADYGSQALVSFILERELPSESFSLVAEEDSGDLRKESGQDTLNRITELVNDTLASEGSNSFSTLTTDDVLVAIDSGKSEGGSVGRHWVLDPIDGTKGFVRGD

SEQ ID NO: 58744 - DNA, 1508 bp, Glycine max
  misc_feature (1)..(1508): Ceres Seq. ID no. 14312293
gattccgcagcttgttactctcttctctctcaaaacaaaacttgaatccatccatactctacataccccttgcccttgctttgcttctttctttctcacaagcaccagcagcactcaaatcaatcaatcgtttttaatgcccttgcttctccctctttccgtgtgtatgtaaaatctttgtttttatcagaggtggtgcagaaagttgtatctcagatccctatatacaccgaaaacgatacaactgtgtgctgtgtacactgtgcactgtgcttctccctctctctctctctctctcacaaaatcataatcattttacatattacacctattaccgaatagagtggtcctcaacctcaacctaaaagcctcactttttttgttttccccgataaccctattcaacccaatcctcctttcccttttcctttgacaaaaggaaaggaagaaatgcaagaaccaagcttgggattgatgggtgaggtctccggcgatcaccaccgtcagctgaaggcggagataacgactcatccgctgtacgagcagcttctggcagcacacgtggcatgcctccgtgtggccaccccgatcgaccagcttccactcatcgatgctcagttatctcagtctcaccatcttctacgctcttatgtctcacacaacactcattctctctcccctcatcaccgccaagaacttgacaacttcctggcacaatatttgatagttctgtgtactttcaaagaacagcttcagcaacatgtaagagtccacgccgtcgaggctgtcatggcctgccgtgatatcgaaaatgccttacaagctctaactggagtgagtttgggagaaggaactggtgcaacaatgtcagatgatgaagatgatttacaaatggatatttctttagatcaatctagcgcggaagggcatgacatgatgggatttggtccattacttcctacagaatctgaaaggtcattgatggaaagagttcgccaggaactaaagattgagctgaaacagggtttcaagtcaagaattgaagatgtcagggaagaaatattaaggaaacgtagagctgggaaattaccaggtgacacaacttctgtgttaaagaactggtggcagcaacatgcaaagtggccttacccaactgaagatgacaaggcaaaacttgtggaggagacagggttgcagctgaagcaaattaataattggttcatcaaccaaaggaaacgcaactggcacagtaactctcaatcggttacctctttgaagtcgaagcgcaagaggtagacatattattttgtccctaactatgtggaacagctagcaagcaacacaactatatataaggacatgcttaatattgctgatagagtgtagtcccactaaggatgcaaaagatggtagatgcatgtgggttactgtaatattgtaagatagctgaaacaaattatagactggctgtaaatttgtggaatttaacgtatgcaaacttttctttt

SEQ ID NO: 58745 - protein, 281 aa, Glycine max
  peptide (1)..(281): Ceres Seq. ID no. 14312294
  misc_feature (73)..(128): Pfam Name: KNOX2 domain Pfam Description: KNOX2 domain
  misc_feature (10)..(280): Homolog of NCBI NO: 21554222 NR Description: KNAT3 homeodomain protein [Arabidopsis thaliana]
  misc_feature (10)..(280): Homolog of NCBI NO: 15238743 NR Description: KNAT3 homeodomain protein [Arabidopsis thaliana]
  misc_feature (10)..(281): Homolog of NCBI NO: 3023961 NR Description: Homeobox protein knotted-1 like 3 (KNAP3)
  misc_feature (18)..(281): Homolog of NCBI NO: 14149141 NR Description: KNOX family class 2 homeodomain protein
  misc_feature (5)..(280): Homolog of NCBI NO: 21618231 NR Description: homeodomain-containing protein HD1, putative
  misc_feature (12)..(280): Homolog of NCBI NO: 26451690 NR Description: putative homeodomain transcription factor KNAT6
  misc_feature (12)..(280): Homolog of NCBI NO: 25386223 NR Description: hypothetical protein F16P17.16 [imported] -
  misc_feature (1)..(280): Homolog of NCBI NO: 1170191 NR Description: Homeobox protein HD1
  misc_feature (1)..(280): Homolog of NCBI NO: 18407708 NR Description: homeodomain-containing protein HD1 -related
  misc_feature (15)..(281): Homolog of NCBI NO: 4098246 NR Description: homeobox 2 protein [Lycopersicon esculentum]
MQEPSLGLMGEVSGDHHRQLKAEITTHPLYEQLLAAHVACLRVATPIDQLPLIDAQLSQSHHLLRSYVSHNTHSLSPHHRQELDNFLAQYLIVLCTFKEQLQQHVRVHAVEAVMACRDIENALQALTGVSLGEGTGATMSDDEDDLQMDISLDQSSAEGHDMMGFGPLLPTESERSLMERVRQELKIELKQGFKSRIEDVREEILRKRRAGKLPGDTTSVLKNWWQQHAKWPYPTEDDKAKLVEETGLQLKQINNWFINQRKRNWHSNSQSVTSLKSKRKR

SEQ ID NO: 58746 - protein, 273 aa, Glycine max
  peptide (1)..(273): Ceres Seq. ID no. 14312295
  misc_feature (65)..(120): Pfam Name: KNOX2 domain Pfam Description: KNOX2 domain
  misc_feature (2)..(272): Homolog of NCBI NO: 21554222 NR Description: KNAT3 homeodomain protein [Arabidopsis thaliana]
  misc_feature (2)..(272): Homolog of NCBI NO: 15238743 NR Description: KNAT3 homeodomain protein [Arabidopsis thaliana]
  misc_feature (2)..(273): Homolog of NCBI NO: 3023961 NR Description: Homeobox protein knotted-1 like 3 (KNAP3)
  misc_feature (10)..(273): Homolog of NCBI NO: 14149141 NR Description: KNOX family class 2 homeodomain protein
  misc_feature (1)..(272): Homolog of NCBI NO: 21618231 NR Description: homeodomain-containing protein HD1, putative
  misc_feature (4)..(272): Homolog of NCBI NO: 26451690 NR Description: putative homeodomain transcription factor KNAT6
  misc_feature (4)..(272): Homolog of NCBI NO: 25386223 NR Description: hypothetical protein F16P17.16 [imported] -
  misc_feature (1)..(272): Homolog of NCBI NO: 1170191 NR Description: Homeobox protein HD1
  misc_feature (1)..(272): Homolog of NCBI NO: 18407708 NR Description: homeodomain-containing protein HD1 -related
  misc_feature (7)..(273): Homolog of NCBI NO: 4098246 NR Description: homeobox 2 protein [Lycopersicon esculentum]
MGEVSGDHHRQLKAEITTHPLYEQLLAAHVACLRVATPIDQLPLIDAQLSQSHHLLRSYVSHNTHSLSPHHRQELDNFLAQYLIVLCTFKEQLQQHVRVHAVEAVMACRDIENALQALTGVSLGEGTGATMSDDEDDLQMDISLDQSSAEGHDMMGFGPLLPTESERSLMERVRQELKIELKQGFKSRIEDVREEILRKRRAGKLPGDTTSVLKNWWQQHAKWPYPTEDDKAKLVEETGLQLKQINNWFINQRKRNWHSNSQSVTSLKSKRKR

SEQ ID NO: 58747 - protein, 168 aa, Glycine max
  peptide (1)..(168): Ceres Seq. ID no. 14312296
  misc_feature (94)..(150): Pfam Name: Homeobox domain Pfam Description: Homeobox domain
  misc_feature (1)..(167): Homolog of NCBI NO: 21554222 NR Description: KNAT3 homeodomain protein [Arabidopsis thaliana]
  misc_feature (1)..(167): Homolog of NCBI NO: 15238743 NR Description: KNAT3 homeodomain protein [Arabidopsis thaliana]
  misc_feature (1)..(168): Homolog of NCBI NO: 3023961 NR Description: Homeobox protein knotted-1 like 3 (KNAP3)
  misc_feature (1)..(168): Homolog of NCBI NO: 14149141 NR Description: KNOX family class 2 homeodomain protein
  misc_feature (1)..(167): Homolog of NCBI NO: 21618231 NR Description: homeodomain-containing protein HD1, putative
  misc_feature (1)..(167): Homolog of NCBI NO: 26451690 NR Description: putative homeodomain transcription factor KNAT6
  misc_feature (1)..(167): Homolog of NCBI NO: 25386223 NR Description: hypothetical protein F16P17.16 [imported] -
  misc_feature (1)..(167): Homolog of NCBI NO: 1170191 NR Description: Homeobox protein HD1
  misc_feature (1)..(167): Homolog of NCBI NO: 18407708 NR Description: homeodomain-containing protein HD1 -related
  misc_feature (1)..(168): Homolog of NCBI NO: 4098246 NR Description: homeobox 2 protein [Lycopersicon esculentum]
MACRDIENALQALTGVSLGEGTGATMSDDEDDLQMDISLDQSSAEGHDMMGFGPLLPTESERSLMERVRQELKIELKQGFKSRIEDVREEILRKRRAGKLPGDTTSVLKNWWQQHAKWPYPTEDDKAKLVEETGLQLKQINNWFINQRKRNWHSNSQSVTSLKSKRKR

SEQ ID NO: 58748 - DNA, 1339 bp, Glycine max
  misc_feature (1)..(1339): Ceres Seq. ID no. 15169142
aattttcatgtatgttagcaattaattttgattaatttatatcttgaattaattaattaatgttcactcattctggtcaatacagttagttaggtaattgtaaaacaatcatagaacatatcttttccatttttatctcatgaaaaatgagttaaaaataagattatatgaaatggaacatgtgcaaggttatgtttgtctaaaatgtctgaggatagaacaacattaactcaactggttgaatttctggtggtctcttcatttgtaagtagtgttatcttgtggcaacttgcctcttctgacgataaagttttatagtcttgagggttatagatgtcacaaatagctttcaataacctaaagtaaacatatgccatgtatgcagaattccaaaaacaattggtgtctcaattccaatgaaggcaactttcttcataacttacataatggtggatgggtgggctggatgtgctggtgagattttaaggttgaagccattgatattttatcacttgaaaaacttcttcttagtgaagactgaaaaggaccgtgaagaagcaatggatccagggacatttggtttcaatacaggcgaacctcaaatacaactgtatttcttacttggccttgtgtatgctgtagtcacaccatttctacttccatacatcatagtgttctttggcttggcatatgtcgtctaccgtcatcagattattaatgtctacaaccaagagtatgagagtgctgcagcattctggcctgatgtccatggacgtattatatttgcgttagtgatctcacagctgctgttaatggggttattgagtacaaaagaagctgctaactcaactccattgctcattactctcccaattctgacaatatcattccatctgtattgcaagggacgatatgaacctgctttcgttaagcatccattacaggaagcaatgatgaaggacacattggagcgtgcaagagagccaaacttcaatttgaaagagttccttcagaatgcatatatccatccggtgtttaagggtgatgatgacagtgacagtgatgtaatgagcgaaaactgggaggagcaagaacctgtacttgtacaaacaaagcgccagtcccggaaaaacacaccattgcctagcaaacatagcggttcattatcatcttgaatgccacttcttatgagcataaaactagagcaatagatagtttgaagttcactattggtggcactgctgcatgatatacccaaactctactctcttttttttctgtatataaatcagaatctagataatctttcaatgaagtatataacagaagtatgcaggtc

SEQ ID NO: 58749 - protein, 252 aa, Glycine max
  peptide (1)..(252): Ceres Seq. ID no. 15169143
  misc_feature (1)..(218): Pfam Name: Domain of unknown function DUF221 Pfam Description: Domain of unknown function DUF221
  misc_feature (1)..(252): Homolog of NCBI NO: 25404887 NR Description: protein F24O1.4 [imported] - Arabidopsis thaliana
  misc_feature (1)..(252): Homolog of NCBI NO: 7486105 NR Description: hypothetical protein F24O1.3 - Arabidopsis
  misc_feature (1)..(252): Homolog of NCBI NO: 25402694 NR Description: hypothetical protein [imported] - Arabidopsis
  misc_feature (1)..(247): Homolog of NCBI NO: 22328665 NR Description: ERD4 protein-related [Arabidopsis thaliana]
  misc_feature (1)..(247): Homolog of NCBI NO: 17381104 NR Description: unknown protein [Arabidopsis thaliana]
  misc_feature (1)..(238): Homolog of NCBI NO: 15233100 NR Description: ERD4 protein-related [Arabidopsis thaliana]
  misc_feature (1)..(252): Homolog of NCBI NO: 15234725 NR Description: ERD4 protein-related [Arabidopsis thaliana]
  misc_feature (1)..(251): Homolog of NCBI NO: 15810533 NR Description: unknown protein [Arabidopsis thaliana]
  misc_feature (1)..(252): Homolog of NCBI NO: 34913548 NR Description: OJ1029_F04.25 [Oryza sativa (japonica
  misc_feature (1)..(251): Homolog of NCBI NO: 15233476 NR Description: ERD4 protein-related [Arabidopsis thaliana]
MKATFFITYIMVDGWAGCAGEILRLKPLIFYHLKNFFLVKTEKDREEAMDPGTFGFNTGEPQIQLYFLLGLVYAVVTPFLLPYIIVFFGLAYVVYRHQIINVYNQEYESAAAFWPDVHGRIIFALVISQLLLMGLLSTKEAANSTPLLITLPILTISFHLYCKGRYEPAFVKHPLQEAMMKDTLERAREPNFNLKEFLQNAYIHPVFKGDDDSDSDVMSENWEEQEPVLVQTKRQSRKNTPLPSKHSGSLSS

SEQ ID NO: 58750 - protein, 242 aa, Glycine max
  peptide (1)..(242): Ceres Seq. ID no. 15169144
  misc_feature (1)..(208): Pfam Name: Domain of unknown function DUF221 Pfam Description: Domain of unknown function DUF221
  misc_feature (1)..(242): Homolog of NCBI NO: 25404887 NR Description: protein F24O1.4 [imported] - Arabidopsis thaliana
  misc_feature (1)..(242): Homolog of NCBI NO: 7486105 NR Description: hypothetical protein F24O1.3 - Arabidopsis
  misc_feature (1)..(242): Homolog of NCBI NO: 25402694 NR Description: hypothetical protein [imported] - Arabidopsis
  misc_feature (1)..(237): Homolog of NCBI NO: 22328665 NR Description: ERD4 protein-related [Arabidopsis thaliana]
  misc_feature (1)..(237): Homolog of NCBI NO: 17381104 NR Description: unknown protein [Arabidopsis thaliana]
  misc_feature (1)..(228): Homolog of NCBI NO: 15233100 NR Description: ERD4 protein-related [Arabidopsis thaliana]
  misc_feature (1)..(242): Homolog of NCBI NO: 15234725 NR Description: ERD4 protein-related [Arabidopsis thaliana]
  misc_feature (1)..(241): Homolog of NCBI NO: 15810533 NR Description: unknown protein [Arabidopsis thaliana]
  misc_feature (1)..(242): Homolog of NCBI NO: 34913548 NR Description: OJ1029_F04.25 [Oryza sativa (japonica
  misc_feature (1)..(241): Homolog of NCBI NO: 15233476 NR Description: ERD4 protein-related [Arabidopsis thaliana]
MVDGWAGCAGEILRLKPLIFYHLKNFFLVKTEKDREEAMDPGTFGFNTGEPQIQLYFLLGLVYAVVTPFLLPYIIVFFGLAYVVYRHQIINVYNQEYESAAAFWPDVHGRIIFALVISQLLLMGLLSTKEAANSTPLLITLPILTISFHLYCKGRYEPAFVKHPLQEAMMKDTLERAREPNFNLKEFLQNAYIHPVFKGDDDSDSDVMSENWEEQEPVLVQTKRQSRKNTPLPSKHSGSLSS

SEQ ID NO: 58751 - protein, 204 aa, Glycine max
  peptide (1)..(204): Ceres Seq. ID no. 15169145
  misc_feature (1)..(170): Pfam Name: Domain of unknown function DUF221 Pfam Description: Domain of unknown function DUF221
  misc_feature (1)..(204): Homolog of NCBI NO: 25404887 NR Description: protein F24O1.4 [imported] - Arabidopsis thaliana
  misc_feature (1)..(204): Homolog of NCBI NO: 7486105 NR Description: hypothetical protein F24O1.3 - Arabidopsis
  misc_feature (1)..(204): Homolog of NCBI NO: 25402694 NR Description: hypothetical protein [imported] - Arabidopsis
  misc_feature (1)..(199): Homolog of NCBI NO: 22328665 NR Description: ERD4 protein-related [Arabidopsis thaliana]
  misc_feature (1)..(199): Homolog of NCBI NO: 17381104 NR Description: unknown protein [Arabidopsis thaliana]
  misc_feature (1)..(190): Homolog of NCBI NO: 15233100 NR Description: ERD4 protein-related [Arabidopsis thaliana]
  misc_feature (1)..(204): Homolog of NCBI NO: 15234725 NR Description: ERD4 protein-related [Arabidopsis thaliana]
  misc_feature (1)..(203): Homolog of NCBI NO: 15810533 NR Description: unknown protein [Arabidopsis thaliana]
  misc_feature (1)..(204): Homolog of NCBI NO: 34913548 NR Description: OJ1029_F04.25 [Oryza sativa (japonica
  misc_feature (1)..(203): Homolog of NCBI NO: 15233476 NR Description: ERD4 protein-related [Arabidopsis thaliana]
MDPGTFGFNTGEPQIQLYFLLGLVYAVVTPFLLPYIIVFFGLAYVVYRHQIINVYNQEYESAAAFWPDVHGRIIFALVISQLLLMGLLSTKEAANSTPLLITLPILTISFHLYCKGRYEPAFVKHPLQEAMMKDTLERAREPNFNLKEFLQNAYIHPVFKGDDDSDSDVMSENWEEQEPVLVQTKRQSRKNTPLPSKHSGSLSS

SEQ ID NO: 58752 - DNA, 1129 bp, Glycine max
  misc_feature (1)..(1129): Ceres Seq. ID no. 14308766
gaatcgattactatactagtaataaattgtacaaaaaataaaaatataaataatataaatataaaaagaacaaacacaaattttatgtgattagtcgcggtatttaaaataaaaaatgaaagtagacaaataaaaaaggaaaggagatgtttgaataaaaataattccccttcaagttcttattttttgagaggacaggacaatatgaatgttttattatgctctatcaacacattaaaaagattatatgatatatctgctgtggaagtaggtcaacatttctattggcaaatagggagtttccaagtacatgcccaagtacttattacttcttgggttgtaattgctctcttattggtttcagccattctaattattcgaaatctgcaaaccattcccgctttcggtcagaatttctttgaatatgttcttgaattcattcgagacgtgagcaaaactcaaattggagaagaatatggtccgtgggttccttttattggaactttgtttctatttatttttgtttctaattggtcgggggctcttttaccttggaaaatcatacaattacctcacggggagttagctgcacccacaaatgatataaatactaccgttgctttagctttacttacatcaattgcatatttctatgcgggtctttcaaaaaaaggattagcttattttaataaatacatccaaccaaccccaatccttttaccgattaacatcttagaagatttcacaaaacccttatctcttagttttcgacttttcggaaatatattagctgatgaattagtagttgttgttcttgtttctttagtacctttagtagttcctatacctgtcatgttccttggattattcacaagcggtattcaagctctcatttttgctactttagctgcggcttatataggtgaatccatggaaggccatcattgaccagtttttatacaaaatagtccttttcgtttagcttgccgcacatatattgcggctcaatataatctacttagtaaacatctatatctatctacctatatctatatagatataggtagatagatatagatagatattcgattagcatatattagcatatattagtatatattggatattc

SEQ ID NO: 58753 - protein, 247 aa, Glycine max
  peptide (1)..(247): Ceres Seq. ID no. 14308767
  misc_feature (91)..(241): Pfam Name: ATP synthase A chain Pfam Description: ATP synthase A chain
  misc_feature (1)..(247): Homolog of NCBI NO: 13518332 NR Description: ATP synthase CF0 A chain [Oenothera elata subsp.
  misc_feature (1)..(247): Homolog of NCBI NO: 11467186 NR Description: ATP synthase CF0 A chain [Zea mays]
  misc_feature (1)..(247): Homolog of NCBI NO: 14017566 NR Description: ATP synthase CF0 A chain [Triticum aestivum]
  misc_feature (1)..(247): Homolog of NCBI NO: 37533318 NR Description: putative ATPase a subunit from chromosome 10
  misc_feature (1)..(247): Homolog of NCBI NO: 32480831 NR Description: ATPase a subunit [Calycanthus fertilis var.
  misc_feature (1)..(247): Homolog of NCBI NO: 11466781 NR Description: ATP synthase CF0 A chain [Oryza sativa (japonica
  misc_feature (1)..(247): Homolog of NCBI NO: 7525021 NR Description: ATP synthase CF0 A chain [Arabidopsis thaliana]
  misc_feature (1)..(247): Homolog of NCBI NO: 11465942 NR Description: ATP synthase CF0 A chain [Nicotiana tabacum]
  misc_feature (1)..(247): Homolog of NCBI NO: 114659 NR Description: ATP synthase A chain precursor (Subunit IV)
  misc_feature (1)..(247): Homolog of NCBI NO: 13518440 NR Description: ATP synthase CF0 A chain [Lotus corniculatus var.
MNVLLCSINTLKRLYDISAVEVGQHFYWQIGSFQVHAQVLITSWVVIALLLVSAILIIRNLQTIPAFGQNFFEYVLEFIRDVSKTQIGEEYGPWVPFIGTLFLFIFVSNWSGALLPWKIIQLPHGELAAPTNDINTTVALALLTSIAYFYAGLSKKGLAYFNKYIQPTPILLPINILEDFTKPLSLSFRLFGNILADELVVVVLVSLVPLVVPIPVMFLGLFTSGIQALIFATLAAAYIGESMEGHH

SEQ ID NO: 58754 - DNA, 1060 bp, Glycine max
  misc_feature (1)..(1060): Ceres Seq. ID no. 14308057
aaaaaactgagtgatgatggactacacctacgacaccaagcatcgcacaatggaacctcatgggataaggggtgtaatggacttggagcatcaaattcactacctggaaactgaggcttatagttctattttgaaggctttcattgctcaatctgatcttcttacttggggcaaagaggggcttatgactgagctgcgaaaggaactaaatgttacagatattgaacatggagaaatcctactgaaaataaattcagaccagttaattaagcagataagggagcagaggaaattggcatctcaagctaaggattatattaaacctagtgctcctgattgtgtttgtgcttcgatgggaaattcagtgataagaatgaaaactccttcctctgctgcattttatactcagaagaaaatgtcacactgccaagcttctctaatttccactcccattccttctccaatgcctccaaaatttaatgatgatccattgaatgctgagtttgcccacggaaatgtgcagcaatctatggaaatgttaaattgtaatgttcagttaccacctgttggaggaggaagaggactgaaaggaaagtatccattgcagaaggatttacacagatctcaccttgtcaagttaaagaaaagatctgatttaattcagcttcgtgcaacagatagggttatccacgatgttaagaagatgcttttcagtagagggaaacctgacccagttgatattgagagagcaaaaaggactcttacggaacaagaaatagctataactgaagcacttggtaaagtggctaatgtgttagagaggggtgatgcacctaatcagatgcaacgttatgaactctctaagaatactcctggaggacaagaaatgatgatacatgctaatttccgtgaactaattggtaatggtaggttgaataaacatggggttcattctgatctgtgcagttagggtgatgatttcatggcatagatatggagcttttaactctgatgaggctatacaacttatatagtgatattgctggattggtttagtgaa

SEQ ID NO: 58755 - protein, 318 aa, Glycine max
  peptide (1)..(318): Ceres Seq. ID no. 14308058
  misc_feature (24)..(96): Pfam Name: ENT domain Pfam Description: ENT domain
  misc_feature (23)..(152): Homolog of NCBI NO: 15224878 NR Description: hypothetical protein [Arabidopsis thaliana]
  misc_feature (24)..(93): Homolog of NCBI NO: 9294111 NR Description: emb|CAB88266.1~gene_id:T23B7.8~similar to unknown
  misc_feature (24)..(93): Homolog of NCBI NO: 15229958 NR Description: expressed protein [Arabidopsis thaliana]
  misc_feature (13)..(153): Homolog of NCBI NO: 19387275 NR Description: unknown [Oryza sativa (japonica cultivar-group)]
  misc_feature (187)..(275): Homolog of NCBI NO: 30684221 NR Description: expressed protein [Arabidopsis thaliana]
  misc_feature (23)..(128): Homolog of NCBI NO: 30684221 NR Description: expressed protein [Arabidopsis thaliana]
  misc_feature (183)..(278): Homolog of NCBI NO: 38637206 NR Description: unknown protein [Oryza sativa (japonica
  misc_feature (23)..(150): Homolog of NCBI NO: 38637206 NR Description: unknown protein [Oryza sativa (japonica
  misc_feature (23)..(128): Homolog of NCBI NO: 11358228 NR Description: hypothetical protein T24H18.190 - Arabidopsis
  misc_feature (187)..(292): Homolog of NCBI NO: 11358228 NR Description: hypothetical protein T24H18.190 - Arabidopsis
MMDYTYDTKHRTMEPHGIRGVMDLEHQIHYLETEAYSSILKAFIAQSDLLTWGKEGLMTELRKELNVTDIEHGEILLKINSDQLIKQIREQRKLASQAKDYIKPSAPDCVCASMGNSVIRMKTPSSAAFYTQKKMSHCQASLISTPIPSPMPPKFNDDPLNAEFAHGNVQQSMEMLNCNVQLPPVGGGRGLKGKYPLQKDLHRSHLVKLKKRSDLIQLRATDRVIHDVKKMLFSRGKPDPVDIERAKRTLTEQEIAITEALGKVANVLERGDAPNQMQRYELSKNTPGGQEMMIHANFRELIGNGRLNKHGVHSDLCS

SEQ ID NO: 58756 - protein, 317 aa, Glycine max
  peptide (1)..(317): Ceres Seq. ID no. 14308059
  misc_feature (23)..(95): Pfam Name: ENT domain Pfam Description: ENT domain
  misc_feature (22)..(151): Homolog of NCBI NO: 15224878 NR Description: hypothetical protein [Arabidopsis thaliana]
  misc_feature (23)..(92): Homolog of NCBI NO: 9294111 NR Description: emb|CAB88266.1~gene_id:T23B7.8~similar to unknown
  misc_feature (23)..(92): Homolog of NCBI NO: 15229958 NR Description: expressed protein [Arabidopsis thaliana]
  misc_feature (12)..(152): Homolog of NCBI NO: 19387275 NR Description: unknown [Oryza sativa (japonica cultivar-group)]
  misc_feature (186)..(274): Homolog of NCBI NO: 30684221 NR Description: expressed protein [Arabidopsis thaliana]
  misc_feature (22)..(127): Homolog of NCBI NO: 30684221 NR Description: expressed protein [Arabidopsis thaliana]
  misc_feature (182)..(277): Homolog of NCBI NO: 38637206 NR Description: unknown protein [Oryza sativa (japonica
  misc_feature (22)..(149): Homolog of NCBI NO: 38637206 NR Description: unknown protein [Oryza sativa (japonica
  misc_feature (22)..(127): Homolog of NCBI NO: 11358228 NR Description: hypothetical protein T24H18.190 - Arabidopsis
  misc_feature (186)..(291): Homolog of NCBI NO: 11358228 NR Description: hypothetical protein T24H18.190 - Arabidopsis
MDYTYDTKHRTMEPHGIRGVMDLEHQIHYLETEAYSSILKAFIAQSDLLTWGKEGLMTELRKELNVTDIEHGEILLKINSDQLIKQIREQRKLASQAKDYIKPSAPDCVCASMGNSVIRMKTPSSAAFYTQKKMSHCQASLISTPIPSPMPPKFNDDPLNAEFAHGNVQQSMEMLNCNVQLPPVGGGRGLKGKYPLQKDLHRSHLVKLKKRSDLIQLRATDRVIHDVKKMLFSRGKPDPVDIERAKRTLTEQEIAITEALGKVANVLERGDAPNQMQRYELSKNTPGGQEMMIHANFRELIGNGRLNKHGVHSDLCS

SEQ ID NO: 58757 - protein, 306 aa, Glycine max
  peptide (1)..(306): Ceres Seq. ID no. 14308060
  misc_feature (12)..(84): Pfam Name: ENT domain Pfam Description: ENT domain
  misc_feature (11)..(140): Homolog of NCBI NO: 15224878 NR Description: hypothetical protein [Arabidopsis thaliana]
  misc_feature (12)..(81): Homolog of NCBI NO: 9294111 NR Description: emb|CAB88266.1~gene_id:T23B7.8~similar to unknown
  misc_feature (12)..(81): Homolog of NCBI NO: 15229958 NR Description: expressed protein [Arabidopsis thaliana]
  misc_feature (1)..(141): Homolog of NCBI NO: 19387275 NR Description: unknown [Oryza sativa (japonica cultivar-group)]
  misc_feature (175)..(263): Homolog of NCBI NO: 30684221 NR Description: expressed protein [Arabidopsis thaliana]
  misc_feature (11)..(116): Homolog of NCBI NO: 30684221 NR Description: expressed protein [Arabidopsis thaliana]
  misc_feature (171)..(266): Homolog of NCBI NO: 38637206 NR Description: unknown protein [Oryza sativa (japonica
  misc_feature (11)..(138): Homolog of NCBI NO: 38637206 NR Description: unknown protein [Oryza sativa (japonica
  misc_feature (11)..(116): Homolog of NCBI NO: 11358228 NR Description: hypothetical protein T24H18.190 - Arabidopsis
  misc_feature (175)..(280): Homolog of NCBI NO: 11358228 NR Description: hypothetical protein T24H18.190 - Arabidopsis
MEPHGIRGVMDLEHQIHYLETEAYSSILKAFIAQSDLLTWGKEGLMTELRKELNVTDIEHGEILLKINSDQLIKQIREQRKLASQAKDYIKPSAPDCVCASMGNSVIRMKTPSSAAFYTQKKMSHCQASLISTPIPSPMPPKFNDDPLNAEFAHGNVQQSMEMLNCNVQLPPVGGGRGLKGKYPLQKDLHRSHLVKLKKRSDLIQLRATDRVIHDVKKMLFSRGKPDPVDIERAKRTLTEQEIAITEALGKVANVLERGDAPNQMQRYELSKNTPGGQEMMIHANFRELIGNGRLNKHGVHSDLCS

SEQ ID NO: 58758 - DNA, 1553 bp, Glycine max
  misc_feature (1)..(1553): Ceres Seq. ID no. 14308723
aaattttcaagtcccagcctatggactctgcttcattcgctcatcctttgatttcccacgtcatcactagctcaagcttgcatcgttcctacggtattcatcacagtgcaagactaggcctatggaagaacaaagtctggaactcagcttgttgtgctgctggagtagaagacttgtttgacgatagtaatttgaagagaaatgagaatggttccctcttagtgatgccgaaggtgatccagattgtccctctaaaggctactcttccattgaacgagcgcttaatgcattacgccaaggcaagtttgtgattgtggtagatgatgaaaacggcgatattgaaggaaatcttatcatggctgcatctcttactagtcccaaggatattgccttcatgattaagcacggatcagggatcgtttctgttggcatgaaagaggaggatcttcaaagactgaacctccctttaatgtcaccagagactgaagatgaggactcttctgctcccaccttcactatcacagtggatgtgaaatctggaacttctacgggtgtatcagctgctgatagagcgaaaactgttcttgctctgtcatctcctgagtccaaatcagaggatttcagaaaaccgggtcatgtgtttcctcttaagtacagaaatggtggggttcttagaagagcaggtcacactgaggcctcactggacttagttgcactggctggcttgcccccaatttctgttctttcggctcttgttgatgaaaatgatggctctatgcaatctttgctcaatttaagaaagttagcatcggaatacaccttaccaattgtctcaataactgatttgataaggtatcggagaaagagagaaaaattggttgaaagaacctcagtttctcgcctgcctactaaatggggcctatttcaagcatattgctacagctcaaagttggatggaactgaacatgtggctgttgtaaagggagatatgggagatggacaagatgtgctagtacgagtacattcagaatgtttaactggggatatatttggatcagctcggtgtgactgtggcaaccagttagatttggcaatgcggttaatagaagaagcaggtaggggagtagttgtgtatcttcgaggtcatgagggaagaggcattggccttggtcacaaacttaaagcgtataatttgcaggatcaaggtcatgacacggtccaagcaaacatagaactcggcttagctgttgatgctcgtgaatatgggattggtgcacagattttgagggatataggagttcgaacaatgcggcttatgacaaacaacccagcaaagtttgttggtcttaaaggatatggtttggcagtggtagggcgagttcctgtgttgacaccaatcacagaggaaaacaagagatacctggaaacaaaaaggaccaaaatgggtcatatttatggctctgatttacaaggatcattacctggattcaacggttctactgtaaataacggagactcactggagaacacatagtctacacaaaaacttacag

SEQ ID NO: 58759 - protein, 392 aa, Glycine max
  peptide (1)..(392): Ceres Seq. ID no. 14308724
  misc_feature (173)..(344): Pfam Name: GTP cyclohydrolase II Pfam Description: GTP cyclohydrolase II
  misc_feature (1)..(381): Homolog of NCBI NO: 15827210 NR Description: putative GTP cyclohydrolase
  misc_feature (1)..(381): Homolog of NCBI NO: 15608553 NR Description: ribA2 [Mycobacterium tuberculosis H37Rv]
  misc_feature (1)..(365): Homolog of NCBI NO: 23018011 NR Description: hypothetical protein [Thermobifida fusca]
  misc_feature (1)..(346): Homolog of NCBI NO: 30681714 NR Description: GTP cyclohydrolase -related [Arabidopsis thaliana]
  misc_feature (1)..(346): Homolog of NCBI NO: 25290324 NR Description: probable GTP cyclohydrolase [imported] -
  misc_feature (1)..(392): Homolog of NCBI NO: 7436011 NR Description: GTP cyclohydrolase II (EC 3.5.4.25) / 3,
  misc_feature (1)..(375): Homolog of NCBI NO: 30697989 NR Description: GTP cyclohydrolase II
  misc_feature (1)..(375): Homolog of NCBI NO: 27735197 NR Description: Riboflavin biosynthesis protein ribA
  misc_feature (1)..(376): Homolog of NCBI NO: 29367375 NR Description: GTP cyclohydrolase
  misc_feature (1)..(370): Homolog of NCBI NO: 18424277 NR Description: GTP cyclohydrolase II /
MAASLTSPKDIAFMIKHGSGIVSVGMKEEDLQRLNLPLMSPETEDEDSSAPTFTITVDVKSGTSTGVSAADRAKTVLALSSPESKSEDFRKPGHVFPLKYRNGGVLRRAGHTEASLDLVALAGLPPISVLSALVDENDGSMQSLLNLRKLASEYTLPIVSITDLIRYRRKREKLVERTSVSRLPTKWGLFQAYCYSSKLDGTEHVAVVKGDMGDGQDVLVRVHSECLTGDIFGSARCDCGNQLDLAMRLIEEAGRGVVVYLRGHEGRGIGLGHKLKAYNLQDQGHDTVQANIELGLAVDAREYGIGAQILRDIGVRTMRLMTNNPAKFVGLKGYGLAVVGRVPVLTPITEENKRYLETKRTKMGHIYGSDLQGSLPGFNGSTVNNGDSLENT

SEQ ID NO: 58760 - protein, 379 aa, Glycine max
  peptide (1)..(379): Ceres Seq. ID no. 14308725
  misc_feature (160)..(331): Pfam Name: GTP cyclohydrolase II Pfam Description: GTP cyclohydrolase II
  misc_feature (1)..(368): Homolog of NCBI NO: 15827210 NR Description: putative GTP cyclohydrolase
  misc_feature (1)..(368): Homolog of NCBI NO: 15608553 NR Description: ribA2 [Mycobacterium tuberculosis H37Rv]
  misc_feature (1)..(352): Homolog of NCBI NO: 23018011 NR Description: hypothetical protein [Thermobifida fusca]
  misc_feature (1)..(333): Homolog of NCBI NO: 30681714 NR Description: GTP cyclohydrolase -related [Arabidopsis thaliana]
  misc_feature (1)..(333): Homolog of NCBI NO: 25290324 NR Description: probable GTP cyclohydrolase [imported] -
  misc_feature (1)..(379): Homolog of NCBI NO: 7436011 NR Description: GTP cyclohydrolase II (EC 3.5.4.25) / 3,
  misc_feature (1)..(362): Homolog of NCBI NO: 30697989 NR Description: GTP cyclohydrolase II
  misc_feature (1)..(362): Homolog of NCBI NO: 27735197 NR Description: Riboflavin biosynthesis protein ribA
  misc_feature (1)..(363): Homolog of NCBI NO: 29367375 NR Description: GTP cyclohydrolase
  misc_feature (1)..(357): Homolog of NCBI NO: 18424277 NR Description: GTP cyclohydrolase II /
MIKHGSGIVSVGMKEEDLQRLNLPLMSPETEDEDSSAPTFTITVDVKSGTSTGVSAADRAKTVLALSSPESKSEDFRKPGHVFPLKYRNGGVLRRAGHTEASLDLVALAGLPPISVLSALVDENDGSMQSLLNLRKLASEYTLPIVSITDLIRYRRKREKLVERTSVSRLPTKWGLFQAYCYSSKLDGTEHVAVVKGDMGDGQDVLVRVHSECLTGDIFGSARCDCGNQLDLAMRLIEEAGRGVVVYLRGHEGRGIGLGHKLKAYNLQDQGHDTVQANIELGLAVDAREYGIGAQILRDIGVRTMRLMTNNPAKFVGLKGYGLAVVGRVPVLTPITEENKRYLETKRTKMGHIYGSDLQGSLPGFNGSTVNNGDSLENT

SEQ ID NO: 58761 - protein, 367 aa, Glycine max
  peptide (1)..(367): Ceres Seq. ID no. 14308726
  misc_feature (148)..(319): Pfam Name: GTP cyclohydrolase II Pfam Description: GTP cyclohydrolase II
  misc_feature (1)..(356): Homolog of NCBI NO: 15827210 NR Description: putative GTP cyclohydrolase
  misc_feature (1)..(356): Homolog of NCBI NO: 15608553 NR Description: ribA2 [Mycobacterium tuberculosis H37Rv]
  misc_feature (1)..(340): Homolog of NCBI NO: 23018011 NR Description: hypothetical protein [Thermobifida fusca]
  misc_feature (1)..(321): Homolog of NCBI NO: 30681714 NR Description: GTP cyclohydrolase -related [Arabidopsis thaliana]
  misc_feature (1)..(321): Homolog of NCBI NO: 25290324 NR Description: probable GTP cyclohydrolase [imported] -
  misc_feature (1)..(367): Homolog of NCBI NO: 7436011 NR Description: GTP cyclohydrolase II (EC 3.5.4.25) / 3,
  misc_feature (1)..(350): Homolog of NCBI NO: 30697989 NR Description: GTP cyclohydrolase II
  misc_feature (1)..(350): Homolog of NCBI NO: 27735197 NR Description: Riboflavin biosynthesis protein ribA
  misc_feature (1)..(351): Homolog of NCBI NO: 29367375 NR Description: GTP cyclohydrolase
  misc_feature (1)..(345): Homolog of NCBI NO: 18424277 NR Description: GTP cyclohydrolase II /
MKEEDLQRLNLPLMSPETEDEDSSAPTFTITVDVKSGTSTGVSAADRAKTVLALSSPESKSEDFRKPGHVFPLKYRNGGVLRRAGHTEASLDLVALAGLPPISVLSALVDENDGSMQSLLNLRKLASEYTLPIVSITDLIRYRRKREKLVERTSVSRLPTKWGLFQAYCYSSKLDGTEHVAVVKGDMGDGQDVLVRVHSECLTGDIFGSARCDCGNQLDLAMRLIEEAGRGVVVYLRGHEGRGIGLGHKLKAYNLQDQGHDTVQANIELGLAVDAREYGIGAQILRDIGVRTMRLMTNNPAKFVGLKGYGLAVVGRVPVLTPITEENKRYLETKRTKMGHIYGSDLQGSLPGFNGSTVNNGDSLENT

SEQ ID NO: 58762 - DNA, 1215 bp, Glycine max
  misc_feature (1)..(1215): Ceres Seq. ID no. 15169278
ggagtgcaataattctgattctaccgtcatcaactaggagaagaagcttcattttctgcaaaatggatccctctgcgccattgctatttaaccacctcaagggtgcagacccgttcttcctgctggcgggtcctaatgtgattgaatcggaggagcacattctccggatggctaagaacatcaagagtgttgcatctgaagttggaataccattggttttcaagtcaagctttgacaaagctaaccgaacatcatcaaaatcatttcgtggcccggggatggctgagggattgaagatactcgagaaggtaaaaatagcttatgacattcctatagtgacagatgtgcatgagaccatccagtgtgaagcagttggcagagttgcagatatcattcagattccagcattcttgtgtcgccaaacagatcttctagttgcagcagccaaaactgggaaaattatcaacattaagaagggccagttctgtgctccttctgtgatgacaaattcagctgaaaaggttcggttagctggaaatcctaatgtgatggtttgtgagagaggaacaatgtttggatacaatgatttgattgttgatccacgtaacttggagtggatgagagaagccaattgtcccattgtagctgatataactcactcactacaacagcctgctggaaagatgttggatgggggaggtgttgcaagtggaggtcttcgagaactaataccttgcattgcaaggacagcagttgccgttggagtggatgggatcttcatggaggtgcatgatgatccactgaatgcacctgttgatggcccaacacagtggcctttgcgccactttaaggagctacttgaagagcttgtagccattgctagggtaagcaaagggaagcaacggttcaacattgatctcacaccatttcgtgaataaaaaaaatggtgatggttttcagttattctgaatgtaatttctttaccattggtcttttaagattgttcaagggtgaatgcaaaactgtctcctctcacaagttccttataaggagagtttatcttaaaaatattatttgatgatcaatgcatgttacaatgaagtggtaacactataccaactcaagtttgtcacatatcctgtgtagccttaatcatgtcagttactaaagttgaggcaattaattgaatattaagatataggtagattaattatt

SEQ ID NO: 58763 - protein, 311 aa, Glycine max
  peptide (1)..(311): Ceres Seq. ID no. 15169279
  misc_feature (30)..(297): Homolog of NCBI NO: 22999110 NR Description: hypothetical protein [Magnetococcus sp. MC-1]
  misc_feature (75)..(257): Homolog of NCBI NO: 32169731 NR Description: 3-deoxy-D-manno-2-octulosonic acid-8-phosphate
  misc_feature (21)..(311): Homolog of NCBI NO: 29367487 NR Description: putative 2-dehydro-3-deoxyphosphooctonate
  misc_feature (24)..(309): Homolog of NCBI NO: 13509333 NR Description: 3-desoxy-D-manno octulosonic acid-8-phosphate
  misc_feature (21)..(311): Homolog of NCBI NO: 25291179 NR Description: hypothetical protein F3O9.14 [imported] -
  misc_feature (21)..(311): Homolog of NCBI NO: 15219214 NR Description: 3-deoxy-D-manno-2-octulosonate-8-phosphate
  misc_feature (27)..(311): Homolog of NCBI NO: 13620976 NR Description: 2-dehydro-3-deoxyphosphooctonate aldolase
  misc_feature (27)..(311): Homolog of NCBI NO: 21360537 NR Description: AT5g09730/F17I14_80 [Arabidopsis thaliana]
  misc_feature (27)..(311): Homolog of NCBI NO: 15219400 NR Description: 2-dehydro-3-deoxyphosphooctonate aldolase
  misc_feature (21)..(311): Homolog of NCBI NO: 6647535 NR Description: 2-dehydro-3-deoxyphosphooctonate aldolase aldolase) (3-deoxy-D-manno-octulosonic acid 8-phosphate
SAIILILPSSTRRRSFIFCKMDPSAPLLFNHLKGADPFFLLAGPNVIESEEHILRMAKNIKSVASEVGIPLVFKSSFDKANRTSSKSFRGPGMAEGLKILEKVKIAYDIPIVTDVHETIQCEAVGRVADIIQIPAFLCRQTDLLVAAAKTGKIINIKKGQFCAPSVMTNSAEKVRLAGNPNVMVCERGTMFGYNDLIVDPRNLEWMREANCPIVADITHSLQQPAGKMLDGGGVASGGLRELIPCIARTAVAVGVDGIFMEVHDDPLNAPVDGPTQWPLRHFKELLEELVAIARVSKGKQRFNIDLTPFRE

SEQ ID NO: 58764 - protein, 291 aa, Glycine max
  peptide (1)..(291): Ceres Seq. ID no. 15169280
  misc_feature (10)..(277): Homolog of NCBI NO: 22999110 NR Description: hypothetical protein [Magnetococcus sp. MC-1]
  misc_feature (55)..(237): Homolog of NCBI NO: 32169731 NR Description: 3-deoxy-D-manno-2-octulosonic acid-8-phosphate
  misc_feature (1)..(291): Homolog of NCBI NO: 29367487 NR Description: putative 2-dehydro-3-deoxyphosphooctonate
  misc_feature (4)..(289): Homolog of NCBI NO: 13509333 NR Description: 3-desoxy-D-manno octulosonic acid-8-phosphate
  misc_feature (1)..(291): Homolog of NCBI NO: 25291179 NR Description: hypothetical protein F3O9.14 [imported] -
  misc_feature (1)..(291): Homolog of NCBI NO: 15219214 NR Description: 3-deoxy-D-manno-2-octulosonate-8-phosphate
  misc_feature (7)..(291): Homolog of NCBI NO: 13620976 NR Description: 2-dehydro-3-deoxyphosphooctonate aldolase
  misc_feature (7)..(291): Homolog of NCBI NO: 21360537 NR Description: AT5g09730/F17I14_80 [Arabidopsis thaliana]
  misc_feature (7)..(291): Homolog of NCBI NO: 15219400 NR Description: 2-dehydro-3-deoxyphosphooctonate aldolase
  misc_feature (1)..(291): Homolog of NCBI NO: 6647535 NR Description: 2-dehydro-3-deoxyphosphooctonate aldolase aldolase) (3-deoxy-D-manno-octulosonic acid 8-phosphate
MDPSAPLLFNHLKGADPFFLLAGPNVIESEEHILRMAKNIKSVASEVGIPLVFKSSFDKANRTSSKSFRGPGMAEGLKILEKVKIAYDIPIVTDVHETIQCEAVGRVADIIQIPAFLCRQTDLLVAAAKTGKIINIKKGQFCAPSVMTNSAEKVRLAGNPNVMVCERGTMFGYNDLIVDPRNLEWMREANCPIVADITHSLQQPAGKMLDGGGVASGGLRELIPCIARTAVAVGVDGIFMEVHDDPLNAPVDGPTQWPLRHFKELLEELVAIARVSKGKQRFNIDLTPFRE

SEQ ID NO: 58765 - protein, 256 aa, Glycine max
  peptide (1)..(256): Ceres Seq. ID no. 15169281
  misc_feature (1)..(242): Homolog of NCBI NO: 22999110 NR Description: hypothetical protein [Magnetococcus sp. MC-1]
  misc_feature (20)..(202): Homolog of NCBI NO: 32169731 NR Description: 3-deoxy-D-manno-2-octulosonic acid-8-phosphate
  misc_feature (1)..(256): Homolog of NCBI NO: 29367487 NR Description: putative 2-dehydro-3-deoxyphosphooctonate
  misc_feature (1)..(254): Homolog of NCBI NO: 13509333 NR Description: 3-desoxy-D-manno octulosonic acid-8-phosphate
  misc_feature (1)..(256): Homolog of NCBI NO: 25291179 NR Description: hypothetical protein F3O9.14 [imported] -
  misc_feature (1)..(256): Homolog of NCBI NO: 15219214 NR Description: 3-deoxy-D-manno-2-octulosonate-8-phosphate
  misc_feature (1)..(256): Homolog of NCBI NO: 13620976 NR Description: 2-dehydro-3-deoxyphosphooctonate aldolase
  misc_feature (1)..(256): Homolog of NCBI NO: 21360537 NR Description: AT5g09730/F17I14_80 [Arabidopsis thaliana]
  misc_feature (1)..(256): Homolog of NCBI NO: 15219400 NR Description: 2-dehydro-3-deoxyphosphooctonate aldolase
  misc_feature (1)..(256): Homolog of NCBI NO: 6647535 NR Description: 2-dehydro-3-deoxyphosphooctonate aldolase aldolase) (3-deoxy-D-manno-octulosonic acid 8-phosphate
MAKNIKSVASEVGIPLVFKSSFDKANRTSSKSFRGPGMAEGLKILEKVKIAYDIPIVTDVHETIQCEAVGRVADIIQIPAFLCRQTDLLVAAAKTGKIINIKKGQFCAPSVMTNSAEKVRLAGNPNVMVCERGTMFGYNDLIVDPRNLEWMREANCPIVADITHSLQQPAGKMLDGGGVASGGLRELIPCIARTAVAVGVDGIFMEVHDDPLNAPVDGPTQWPLRHFKELLEELVAIARVSKGKQRFNIDLTPFRE

SEQ ID NO: 58766 - DNA, 1392 bp, Glycine max
  misc_feature (1)..(1392): Ceres Seq. ID no. 14313413
acggtctctccatacaccgccaccacatagaaccactgatcgacacgtttgcgccttcattaagctgaggaatagttgtaacttagggacaatgacgtcttcagtggttgaaggtggacgcgacgaggggaaacacgaaccctcggatttcatcacggaaaccatgaatctgacgtctccaaacctttcacttcttcccagtgaaactgaaacattcttgagcgcagcaatttccctcaaggacaaggtggtggaggagacttggaaccggagagatcaagtggttgatccgacggtgtacacgggtctgttgggcaccgccttcacttgcttgcggtcgtaccaggttaccggttgccggaacgacttgatattatgcagcgatatcattgacacgtgtgtcaccgctgcacgtgcctccctcaggcacgtgacttttttgtgtggtagaggaggcgtttatgcgcttggtgctgtcgttgccaattacatggaggaccttccaaagcgtgacctgtttttgggtctattctttgaggtggcaaaagagagagccctaccagttggaccagaggaaggtggttttggaatgtcatatgatcttctgtatggacgagctggattcttatggggtgcattgtttgtgaacaagcacctaggagatgatgcagtgcccaaagacattttgatgcctattattgatgcagtgttggcgggtggtagagcaggagcatctgatgttgaagactgtccattgatgtatagatggcatggaactaggtacttgggtgcagcaaatggccttgctggtatccttcatgtgctgctacattttccacttcctagagaggatgctgaggatgtcaagggaactttgaggtacctcatgagtaagcgtttccctcacagtggaaactacccctccagtgaagggaatccgagggataagttagtgcaatggggtcatggtgcaactggcatggccatcacattgtctaaagcagcacaggtatttccaaatgacagagaactacgagatgctgcaatagaagcaggagaagttgtatggaagagtggattggtgaagaaggtgggacttgcagatggggtatctggaaatgcctatgccttcctttccctctacagactcactaaagagagcatatacgaagagagagcaaagtcattcgcttccttcatgtatgataatgcaaaatctctggcttctgccaatggctattcactttcccaaggacttgctgggacagtatgcctctggtttgatctacttgcacccgacagctctaggttcccaggttatgaactatagatggttccagtagagatggaaaatgttaggtagacaccaatcataagtgatatgatcttgac

SEQ ID NO: 58767 - protein, 442 aa, Glycine max
  peptide (1)..(442): Ceres Seq. ID no. 14313414
  misc_feature (79)..(442): Pfam Name: Lanthionine synthetase C-like protein Pfam Description: Lanthionine synthetase C-like protein
  misc_feature (96)..(442): Homolog of NCBI NO: 8923911 NR Description: LanC lantibiotic synthetase component C-like 2
  misc_feature (60)..(442): Homolog of NCBI NO: 19526936 NR Description: RIKEN cDNA 1700003F10 [Mus musculus]
  misc_feature (79)..(442): Homolog of NCBI NO: 25411993 NR Description: hypothetical protein At2g20770 [imported] -
  misc_feature (49)..(442): Homolog of NCBI NO: 30681129 NR Description: expressed protein [Arabidopsis thaliana]
  misc_feature (62)..(442): Homolog of NCBI NO: 21742091 NR Description: OSJNBa0074L08.13 [Oryza sativa (japonica
  misc_feature (51)..(442): Homolog of NCBI NO: 15219126 NR Description: G protein-coupled receptor -related [Arabidopsis
  misc_feature (49)..(442): Homolog of NCBI NO: 37535720 NR Description: putative lanthionine synthetase
  misc_feature (57)..(442): Homolog of NCBI NO: 15451140 NR Description: G protein-coupled receptor-like protein
  misc_feature (57)..(442): Homolog of NCBI NO: 15238395 NR Description: G protein-coupled receptor-related protein
  misc_feature (31)..(442): Homolog of NCBI NO: 8489877 NR Description: putative 7-transmembrane G-protein-coupled
RSLHTPPPHRTTDRHVCAFIKLRNSCNLGTMTSSVVEGGRDEGKHEPSDFITETMNLTSPNLSLLPSETETFLSAAISLKDKVVEETWNRRDQVVDPTVYTGLLGTAFTCLRSYQVTGCRNDLILCSDIIDTCVTAARASLRHVTFLCGRGGVYALGAVVANYMEDLPKRDLFLGLFFEVAKERALPVGPEEGGFGMSYDLLYGRAGFLWGALFVNKHLGDDAVPKDILMPIIDAVLAGGRAGASDVEDCPLMYRWHGTRYLGAANGLAGILHVLLHFPLPREDAEDVKGTLRYLMSKRFPHSGNYPSSEGNPRDKLVQWGHGATGMAITLSKAAQVFPNDRELRDAAIEAGEVVWKSGLVKKVGLADGVSGNAYAFLSLYRLTKESIYEERAKSFASFMYDNAKSLASANGYSLSQGLAGTVCLWFDLLAPDSSRFPGYEL

SEQ ID NO: 58768 - protein, 412 aa, Glycine max
  peptide (1)..(412): Ceres Seq. ID no. 14313415
  misc_feature (49)..(412): Pfam Name: Lanthionine synthetase C-like protein Pfam Description: Lanthionine synthetase C-like protein
  misc_feature (66)..(412): Homolog of NCBI NO: 8923911 NR Description: LanC lantibiotic synthetase component C-like 2
  misc_feature (30)..(412): Homolog of NCBI NO: 19526936 NR Description: RIKEN cDNA 1700003F10 [Mus musculus]
  misc_feature (49)..(412): Homolog of NCBI NO: 25411993 NR Description: hypothetical protein At2g20770 [imported] -
  misc_feature (19)..(412): Homolog of NCBI NO: 30681129 NR Description: expressed protein [Arabidopsis thaliana]
  misc_feature (32)..(412): Homolog of NCBI NO: 21742091 NR Description: OSJNBa0074L08.13 [Oryza sativa (japonica
  misc_feature (21)..(412): Homolog of NCBI NO: 15219126 NR Description: G protein-coupled receptor -related [Arabidopsis
  misc_feature (19)..(412): Homolog of NCBI NO: 37535720 NR Description: putative lanthionine synthetase
  misc_feature (27)..(412): Homolog of NCBI NO: 15451140 NR Description: G protein-coupled receptor-like protein
  misc_feature (27)..(412): Homolog of NCBI NO: 15238395 NR Description: G protein-coupled receptor-related protein
  misc_feature (1)..(412): Homolog of NCBI NO: 8489877 NR Description: putative 7-transmembrane G-protein-coupled
MTSSVVEGGRDEGKHEPSDFITETMNLTSPNLSLLPSETETFLSAAISLKDKVVEETWNRRDQVVDPTVYTGLLGTAFTCLRSYQVTGCRNDLILCSDIIDTCVTAARASLRHVTFLCGRGGVYALGAVVANYMEDLPKRDLFLGLFFEVAKERALPVGPEEGGFGMSYDLLYGRAGFLWGALFVNKHLGDDAVPKDILMPIIDAVLAGGRAGASDVEDCPLMYRWHGTRYLGAANGLAGILHVLLHFPLPREDAEDVKGTLRYLMSKRFPHSGNYPSSEGNPRDKLVQWGHGATGMAITLSKAAQVFPNDRELRDAAIEAGEVVWKSGLVKKVGLADGVSGNAYAFLSLYRLTKESIYEERAKSFASFMYDNAKSLASANGYSLSQGLAGTVCLWFDLLAPDSSRFPGYEL

SEQ ID NO: 58769 - protein, 388 aa, Glycine max
  peptide (1)..(388): Ceres Seq. ID no. 14313416
  misc_feature (25)..(388): Pfam Name: Lanthionine synthetase C-like protein Pfam Description: Lanthionine synthetase C-like protein
  misc_feature (42)..(388): Homolog of NCBI NO: 8923911 NR Description: LanC lantibiotic synthetase component C-like 2
  misc_feature (6)..(388): Homolog of NCBI NO: 19526936 NR Description: RIKEN cDNA 1700003F10 [Mus musculus]
  misc_feature (25)..(388): Homolog of NCBI NO: 25411993 NR Description: hypothetical protein At2g20770 [imported] -
  misc_feature (1)..(388): Homolog of NCBI NO: 30681129 NR Description: expressed protein [Arabidopsis thaliana]
  misc_feature (8)..(388): Homolog of NCBI NO: 21742091 NR Description: OSJNBa0074L08.13 [Oryza sativa (japonica
  misc_feature (1)..(388): Homolog of NCBI NO: 15219126 NR Description: G protein-coupled receptor -related [Arabidopsis
  misc_feature (1)..(388): Homolog of NCBI NO: 37535720 NR Description: putative lanthionine synthetase
  misc_feature (3)..(388): Homolog of NCBI NO: 15451140 NR Description: G protein-coupled receptor-like protein
  misc_feature (3)..(388): Homolog of NCBI NO: 15238395 NR Description: G protein-coupled receptor-related protein
  misc_feature (1)..(388): Homolog of NCBI NO: 8489877 NR Description: putative 7-transmembrane G-protein-coupled
MNLTSPNLSLLPSETETFLSAAISLKDKVVEETWNRRDQVVDPTVYTGLLGTAFTCLRSYQVTGCRNDLILCSDIIDTCVTAARASLRHVTFLCGRGGVYALGAVVANYMEDLPKRDLFLGLFFEVAKERALPVGPEEGGFGMSYDLLYGRAGFLWGALFVNKHLGDDAVPKDILMPIIDAVLAGGRAGASDVEDCPLMYRWHGTRYLGAANGLAGILHVLLHFPLPREDAEDVKGTLRYLMSKRFPHSGNYPSSEGNPRDKLVQWGHGATGMAITLSKAAQVFPNDRELRDAAIEAGEVVWKSGLVKKVGLADGVSGNAYAFLSLYRLTKESIYEERAKSFASFMYDNAKSLASANGYSLSQGLAGTVCLWFDLLAPDSSRFPGYEL

SEQ ID NO: 58770 - DNA, 1716 bp, Glycine max
  misc_feature (1)..(1716): Ceres Seq. ID no. 14310588
tatatatatatatataatccaggtccaagataaagatggagagaaaagatggaagcaagttgatgtaaacttgacggaccatgtcaacatccccacattccccgaaggaaaaacagcggaatcttatgataaatattttcatgattatttatcaagcatagcaatggagcaattaccacaaagcagaccattatgggatattcacataatcaattaccttacaagtgatgcatccagcactataatatttaagcttcaccatgcacttggagatggctattctctcatgggtgcttttctttcttgtcttcaacgagccgatgacccttctcttcccttgtcctttccttctctcaaacaatctaaacaagaaccttcttccactaaaagcttttgcagaaaattttcttggatgtgttcctctgccttcaacactgtctcagattttggatggagtgtattgaagagtagcatcattagtgatgataaaacaccgataaggtttggagacgaaggagccgactatcaaccaatttccatatcaagcatgacattctccattgaccacatcagggacatcaaatcaaggctcggagtgacaataaatgatgtggtcactggaattgtcttctatggaactagattatatatgcaagatatggactccaaatcaaagaccgcacactccacagcattggtattactgaatacgagaaacgttgaaggttaccaatcgatcaatgatatgctaaatactaaagccacgggtccatgggggaacagaattaccttcttgcatgttccaataccgaaattaaatgaaacaagaactacaaaccctcttgaatttatttgggacacacataacataatcaagaggaagaaacaatctctaggagttgtactcaccgggacacttttgaagatagagggcaaattgaggggacaagaggcagtagctaaacgcattcgtggcacattgacaaaatcaagtgcagtgatttcaaacttggctggaccaatacaacaaatggctttagctaaccatcctgtgaaaggcttgtatttcacattggccggtggacctgaagtatgtattctgaatccctttcatttttcaattaatcatcaattcaacatgtgagaatctgaattgaggtgggtggggtgaaataaggcaaaaaaaaaattataatcaatttataatagcgaaaattggaatggtcattttaagaaggctttaatttctaatttattttgcttaaggaaaaaagtttttaacccaacagatctctctttgttcctttacttaactagttgcagtgatacataagaaatatttaaacatcatttgattgtatttgcagagtctagtcatttcagttatgagctatatgggagtcctaagtgttaccctcaaaacggaaaaagacttcatagacgaacataaattgaagttgtgcatgcaaagtgcatttgagataattctccaagcagctatggaaattcctcaggaaaccaaaccttagtatttggtttggatgattggaacagcttattacgaaaattagagagagagagagatatggagaatttaccatattatttctccggatttatcaacgccttaagtaattgcttgtctatagtatatttgtcgtatgtttggaaagatcaatacacgaggcccaccttattttggatctgtttaggcct

SEQ ID NO: 58771 - protein, 380 aa, Glycine max
  peptide (1)..(380): Ceres Seq. ID no. 14310589
  misc_feature (8)..(217): Pfam Name: Condensation domain Pfam Description: Condensation domain
  misc_feature (11)..(372): Homolog of NCBI NO: 9758716 NR Description: emb|CAB66398.1~gene_id:MNJ8.9~strong similarity
  misc_feature (11)..(372): Homolog of NCBI NO: 18421632 NR Description: expressed protein [Arabidopsis thaliana]
  misc_feature (13)..(366): Homolog of NCBI NO: 15218351 NR Description: expressed protein [Arabidopsis thaliana]
  misc_feature (10)..(368): Homolog of NCBI NO: 15242259 NR Description: hypothetical protein [Arabidopsis thaliana]
  misc_feature (11)..(368): Homolog of NCBI NO: 30687731 NR Description: hypothetical protein [Arabidopsis thaliana]
  misc_feature (17)..(368): Homolog of NCBI NO: 34911182 NR Description: P0019E03.6 [Oryza sativa (japonica
  misc_feature (12)..(368): Homolog of NCBI NO: 26451548 NR Description: unknown protein [Arabidopsis thaliana]
  misc_feature (12)..(368): Homolog of NCBI NO: 30696326 NR Description: expressed protein [Arabidopsis thaliana]
  misc_feature (12)..(368): Homolog of NCBI NO: 9759186 NR Description: emb|CAB66399.1~gene_id:K19E1.19~strong similarity
  misc_feature (6)..(375): Homolog of NCBI NO: 34909900 NR Description: P0665A11.10 [Oryza sativa (japonica
IYIYIIQVQDKDGEKRWKQVDVNLTDHVNIPTFPEGKTAESYDKYFHDYLSSIAMEQLPQSRPLWDIHIINYLTSDASSTIIFKLHHALGDGYSLMGAFLSCLQRADDPSLPLSFPSLKQSKQEPSSTKSFCRKFSWMCSSAFNTVSDFGWSVLKSSIISDDKTPIRFGDEGADYQPISISSMTFSIDHIRDIKSRLGVTINDVVTGIVFYGTRLYMQDMDSKSKTAHSTALVLLNTRNVEGYQSINDMLNTKATGPWGNRITFLHVPIPKLNETRTTNPLEFIWDTHNIIKRKKQSLGVVLTGTLLKIEGKLRGQEAVAKRIRGTLTKSSAVISNLAGPIQQMALANHPVKGLYFTLAGGPEVCILNPFHFSINHQFNM

SEQ ID NO: 58772 - protein, 326 aa, Glycine max
  peptide (1)..(326): Ceres Seq. ID no. 14310590
  misc_feature (1)..(163): Pfam Name: Condensation domain Pfam Description: Condensation domain
  misc_feature (1)..(318): Homolog of NCBI NO: 9758716 NR Description: emb|CAB66398.1~gene_id:MNJ8.9~strong similarity
  misc_feature (1)..(318): Homolog of NCBI NO: 18421632 NR Description: expressed protein [Arabidopsis thaliana]
  misc_feature (1)..(312): Homolog of NCBI NO: 15218351 NR Description: expressed protein [Arabidopsis thaliana]
  misc_feature (1)..(314): Homolog of NCBI NO: 15242259 NR Description: hypothetical protein [Arabidopsis thaliana]
  misc_feature (1)..(314): Homolog of NCBI NO: 30687731 NR Description: hypothetical protein [Arabidopsis thaliana]
  misc_feature (1)..(314): Homolog of NCBI NO: 34911182 NR Description: P0019E03.6 [Oryza sativa (japonica
  misc_feature (1)..(314): Homolog of NCBI NO: 26451548 NR Description: unknown protein [Arabidopsis thaliana]
  misc_feature (1)..(314): Homolog of NCBI NO: 30696326 NR Description: expressed protein [Arabidopsis thaliana]
  misc_feature (1)..(314): Homolog of NCBI NO: 9759186 NR Description: emb|CAB66399.1~gene_id:K19E1.19~strong similarity
  misc_feature (1)..(321): Homolog of NCBI NO: 34909900 NR Description: P0665A11.10 [Oryza sativa (japonica
MEQLPQSRPLWDIHIINYLTSDASSTIIFKLHHALGDGYSLMGAFLSCLQRADDPSLPLSFPSLKQSKQEPSSTKSFCRKFSWMCSSAFNTVSDFGWSVLKSSIISDDKTPIRFGDEGADYQPISISSMTFSIDHIRDIKSRLGVTINDVVTGIVFYGTRLYMQDMDSKSKTAHSTALVLLNTRNVEGYQSINDMLNTKATGPWGNRITFLHVPIPKLNETRTTNPLEFIWDTHNIIKRKKQSLGVVLTGTLLKIEGKLRGQEAVAKRIRGTLTKSSAVISNLAGPIQQMALANHPVKGLYFTLAGGPEVCILNPFHFSINHQFNM

SEQ ID NO: 58773 - protein, 285 aa, Glycine max
  peptide (1)..(285): Ceres Seq. ID no. 14310591
  misc_feature (1)..(122): Pfam Name: Condensation domain Pfam Description: Condensation domain
  misc_feature (1)..(277): Homolog of NCBI NO: 9758716 NR Description: emb|CAB66398.1~gene_id:MNJ8.9~strong similarity
  misc_feature (1)..(277): Homolog of NCBI NO: 18421632 NR Description: expressed protein [Arabidopsis thaliana]
  misc_feature (1)..(271): Homolog of NCBI NO: 15218351 NR Description: expressed protein [Arabidopsis thaliana]
  misc_feature (1)..(273): Homolog of NCBI NO: 15242259 NR Description: hypothetical protein [Arabidopsis thaliana]
  misc_feature (1)..(273): Homolog of NCBI NO: 30687731 NR Description: hypothetical protein [Arabidopsis thaliana]
  misc_feature (1)..(273): Homolog of NCBI NO: 34911182 NR Description: P0019E03.6 [Oryza sativa (japonica
  misc_feature (1)..(273): Homolog of NCBI NO: 26451548 NR Description: unknown protein [Arabidopsis thaliana]
  misc_feature (1)..(273): Homolog of NCBI NO: 30696326 NR Description: expressed protein [Arabidopsis thaliana]
  misc_feature (1)..(273): Homolog of NCBI NO: 9759186 NR Description: emb|CAB66399.1~gene_id:K19E1.19~strong similarity
  misc_feature (1)..(280): Homolog of NCBI NO: 34909900 NR Description: P0665A11.10 [Oryza sativa (japonica
MGAFLSCLQRADDPSLPLSFPSLKQSKQEPSSTKSFCRKFSWMCSSAFNTVSDFGWSVLKSSIISDDKTPIRFGDEGADYQPISISSMTFSIDHIRDIKSRLGVTINDVVTGIVFYGTRLYMQDMDSKSKTAHSTALVLLNTRNVEGYQSINDMLNTKATGPWGNRITFLHVPIPKLNETRTTNPLEFIWDTHNIIKRKKQSLGVVLTGTLLKIEGKLRGQEAVAKRIRGTLTKSSAVISNLAGPIQQMALANHPVKGLYFTLAGGPEVCILNPFHFSINHQFNM

SEQ ID NO: 58774 - DNA, 1141 bp, Glycine max
  misc_feature (1)..(1141): Ceres Seq. ID no. 14313397
gagccatacaaaaggtctcaaaaactgcggttcctgagtagagaggtttgtttgttgtcgtttgagaggattcgatcaagcgaatcttgttttcgaagctcaaattgaattgaacagtaaattcctggaagggaacgaagcagaaaatgggagacacaaaccacgcgtccaccgtcgatgacgatttgcttctcaaaaacttcttcgccgaagttagcgaagttgaaagagacaacgaagtgcttaggattctctcttgttttaagttgaatccatttgagtatctaaacctaccatttgattcatcaattgatgatgtgaaaaagcagtaccgcaagttatcattaatggttcacccggataaatgtaagcatccacaagcaaaggaggcttttggagcattagcgaaagctcaacagttactaatggatcaaaatgaaagagattatattcttagccaagttaattcagctaaagaagaacttagagcaaagaggaagaagcagctgaagaaagatacagcttcaaaaatgaaatctttggttgaagagggaaaatatgacaaacagtatgaacaatcagaggaattccggcaggagctcaaagtcaaagttcgtgaactattaacagaacaagaatggaggagaagaaaaatgcaaatgaggatatctgaggaggaaggcagattaaaaagggatgaagaggaacagaaagaaatgtggaaaagaaagcgtgaacatgaggaggaatgggaaggaacacgagaaaagagggtatccagttggagagattttatgaagggtggaaagaagaataagaaaggagaaattcggccaccgaagctgaagacagaagatcccaacaaatcctacgttcaaaggcctgtaaaaagaggttaggggttctgccgttgagtttgaagatcacagcaatcaattgaaaccaggagttcgagagaacttatttatgcaggccatcttttgtgtatcagttagatacttttaaacagatttattactggagtcatttgaggcatgttaatggtgtagacctccgacgaatgactctatccactttgcatcccaatactgataaataggaattactggtcatccgcagcgagccattttagtgttaggtt

SEQ ID NO: 58775 - protein, 250 aa, Glycine max
  peptide (1)..(250): Ceres Seq. ID no. 14313398
  misc_feature (42)..(105): Pfam Name: DnaJ domain Pfam Description: DnaJ domain
  misc_feature (19)..(203): Homolog of NCBI NO: 34871854 NR Description: similar to DnaJ homolog subfamily C member 8
  misc_feature (22)..(225): Homolog of NCBI NO: 23619009 NR Description: DNAJ protein, putative [Plasmodium falciparum
  misc_feature (26)..(230): Homolog of NCBI NO: 19112214 NR Description: DNA J domain containing protein
  misc_feature (12)..(219): Homolog of NCBI NO: 31200283 NR Description: ENSANGP00000019596 [Anopheles gambiae]
  misc_feature (17)..(236): Homolog of NCBI NO: 21355117 NR Description: CG10375-PA [Drosophila melanogaster]
  misc_feature (19)..(225): Homolog of NCBI NO: 27369493 NR Description: DnaJ (Hsp40) homolog, subfamily C, member 8 [Mus
  misc_feature (19)..(236): Homolog of NCBI NO: 34784000 NR Description: Unknown (protein for IMAGE:5148567) [Mus musculus]
  misc_feature (19)..(236): Homolog of NCBI NO: 21620116 NR Description: similar to DnaJ (Hsp40) homolog, subfamily C,
  misc_feature (1)..(236): Homolog of NCBI NO: 7657611 NR Description: DnaJ (Hsp40) homolog, subfamily C, member 8 [Homo
  misc_feature (10)..(250): Homolog of NCBI NO: 22326960 NR Description: DnaJ protein family [Arabidopsis thaliana]
MGDTNHASTVDDDLLLKNFFAEVSEVERDNEVLRILSCFKLNPFEYLNLPFDSSIDDVKKQYRKLSLMVHPDKCKHPQAKEAFGALAKAQQLLMDQNERDYILSQVNSAKEELRAKRKKQLKKDTASKMKSLVEEGKYDKQYEQSEEFRQELKVKVRELLTEQEWRRRKMQMRISEEEGRLKRDEEEQKEMWKRKREHEEEWEGTREKRVSSWRDFMKGGKKNKKGEIRPPKLKTEDPNKSYVQRPVKRG

SEQ ID NO: 58776 - protein, 183 aa, Glycine max
  peptide (1)..(183): Ceres Seq. ID no. 14313399
  misc_feature (11)..(183): Pfam Name: Caldesmon Pfam Description: Caldesmon
  misc_feature (1)..(136): Homolog of NCBI NO: 34871854 NR Description: similar to DnaJ homolog subfamily C member 8
  misc_feature (1)..(158): Homolog of NCBI NO: 23619009 NR Description: DNAJ protein, putative [Plasmodium falciparum
  misc_feature (1)..(163): Homolog of NCBI NO: 19112214 NR Description: DNA J domain containing protein
  misc_feature (1)..(152): Homolog of NCBI NO: 31200283 NR Description: ENSANGP00000019596 [Anopheles gambiae]
  misc_feature (1)..(169): Homolog of NCBI NO: 21355117 NR Description: CG10375-PA [Drosophila melanogaster]
  misc_feature (1)..(158): Homolog of NCBI NO: 27369493 NR Description: DnaJ (Hsp40) homolog, subfamily C, member 8 [Mus
  misc_feature (1)..(169): Homolog of NCBI NO: 34784000 NR Description: Unknown (protein for IMAGE:5148567) [Mus musculus]
  misc_feature (1)..(169): Homolog of NCBI NO: 21620116 NR Description: similar to DnaJ (Hsp40) homolog, subfamily C,
  misc_feature (1)..(169): Homolog of NCBI NO: 7657611 NR Description: DnaJ (Hsp40) homolog, subfamily C, member 8 [Homo
  misc_feature (1)..(183): Homolog of NCBI NO: 22326960 NR Description: DnaJ protein family [Arabidopsis thaliana]
MVHPDKCKHPQAKEAFGALAKAQQLLMDQNERDYILSQVNSAKEELRAKRKKQLKKDTASKMKSLVEEGKYDKQYEQSEEFRQELKVKVRELLTEQEWRRRKMQMRISEEEGRLKRDEEEQKEMWKRKREHEEEWEGTREKRVSSWRDFMKGGKKNKKGEIRPPKLKTEDPNKSYVQRPVKRG

SEQ ID NO: 58777 - protein, 157 aa, Glycine max
  peptide (1)..(157): Ceres Seq. ID no. 14313400
  misc_feature (1)..(157): Pfam Name: Caldesmon Pfam Description: Caldesmon
  misc_feature (1)..(110): Homolog of NCBI NO: 34871854 NR Description: similar to DnaJ homolog subfamily C member 8
  misc_feature (1)..(132): Homolog of NCBI NO: 23619009 NR Description: DNAJ protein, putative [Plasmodium falciparum
  misc_feature (1)..(137): Homolog of NCBI NO: 19112214 NR Description: DNA J domain containing protein
  misc_feature (1)..(126): Homolog of NCBI NO: 31200283 NR Description: ENSANGP00000019596 [Anopheles gambiae]
  misc_feature (1)..(143): Homolog of NCBI NO: 21355117 NR Description: CG10375-PA [Drosophila melanogaster]
  misc_feature (1)..(132): Homolog of NCBI NO: 27369493 NR Description: DnaJ (Hsp40) homolog, subfamily C, member 8 [Mus
  misc_feature (1)..(143): Homolog of NCBI NO: 34784000 NR Description: Unknown (protein for IMAGE:5148567) [Mus musculus]
  misc_feature (1)..(143): Homolog of NCBI NO: 21620116 NR Description: similar to DnaJ (Hsp40) homolog, subfamily C,
  misc_feature (1)..(143): Homolog of NCBI NO: 7657611 NR Description: DnaJ (Hsp40) homolog, subfamily C, member 8 [Homo
  misc_feature (1)..(157): Homolog of NCBI NO: 22326960 NR Description: DnaJ protein family [Arabidopsis thaliana]
MDQNERDYILSQVNSAKEELRAKRKKQLKKDTASKMKSLVEEGKYDKQYEQSEEFRQELKVKVRELLTEQEWRRRKMQMRISEEEGRLKRDEEEQKEMWKRKREHEEEWEGTREKRVSSWRDFMKGGKKNKKGEIRPPKLKTEDPNKSYVQRPVKRG

SEQ ID NO: 58778 - DNA, 1314 bp, Glycine max
  misc_feature (1)..(1314): Ceres Seq. ID no. 15169372
aaggcttcatttgtgtcacaactcagaaaggaaagctttgaggtttcttccgcattttagagtggtgagaggatggtgggtgttatttcgttggtaacagggatggctggtcctagtgggtttggatcagcttccactgcagaacaggttactgatggaattgatgccagcaacctcactgcaattatcacaggaggagcaagtggtataggcttggagacagcaagagtgttggctcttcgaaaggtccatgtgatcattgcagttcggaacatggtgtctgcaaaggaggctaaacaacaaatactagaggagaatgagtctgcacgagtggacgtaatgaagctcgacctttgctcagtgaattctattacatcatttgtggacaacttcatagctcttgatcttcctctcaacattttaataaacaatgctggagtaatgttctgcccattcaagctctcagaggatggcattgagatgcaatttgcaacaaaccatcttggtcatttccacttgacaaacctgcttcttgacaaaatgcaacaaactgcaaaagccactggaatagagggcaggatcataaatctgtcatcaattgcccataactacacttatagaaaggggattagatttaataagatcaatgaacgaaaaggttatggtaacaagaaggcgtatgggcagtccaagttagcaaacatattacatacaaatgagctttctcgtcgcctgcaggaagagggtgtgaatatcacagccaactcggtccatccaggagtgataatgactcctcttatgagacactcatcttaccttatgcatttcttaaaggtcttcaccttttacatatggaagaacgtcccccagggagcagccacgacatgctatgttgctctccacccaagcgtgaaaggtgtaactgggaagtactttgtggattgcaatcaatgcaaaccaagttcacacgccaaaaacaaacagcttgcaaagaaactctgggatttcagtaacgatttgatcaaatcaatttcgaaagcttgagtgcacttgcagctaggtggttttctccttagggaaattaaaagccttcgttgtggtcaccagtttatgaaaactagctcgttatgcaataaaaagcacgttacagttatagttataatttgtcgttgtctgaggatgtttccaaacattttattccccactgaaccaccaggaggtgtttcatttcttttcatccaaacatttctgtatcaaacgtttcgtttcatccataagttagttgtgtagttacaatcaaataaaattgtttgt

SEQ ID NO: 58779 - protein, 323 aa, Glycine max
  peptide (1)..(323): Ceres Seq. ID no. 15169373
  misc_feature (1)..(322): Homolog of NCBI NO: 15233666 NR Description: short-chain dehydrogenase/reductase family
  misc_feature (13)..(313): Homolog of NCBI NO: 15233359 NR Description: short-chain dehydrogenase/reductase family
  misc_feature (10)..(319): Homolog of NCBI NO: 23297050 NR Description: unknown protein [Arabidopsis thaliana]
  misc_feature (10)..(321): Homolog of NCBI NO: 30686197 NR Description: short-chain dehydrogenase/reductase family
  misc_feature (4)..(320): Homolog of NCBI NO: 629592 NR Description: hypothetical protein - rape
  misc_feature (2)..(322): Homolog of NCBI NO: 15224306 NR Description: short-chain dehydrogenase/reductase family
  misc_feature (2)..(322): Homolog of NCBI NO: 34895876 NR Description: P0009G03.18 [Oryza sativa (japonica
  misc_feature (2)..(322): Homolog of NCBI NO: 21554820 NR Description: putativepod-specific dehydrogenase SAC25
  misc_feature (2)..(322): Homolog of NCBI NO: 20260302 NR Description: putative protein [Arabidopsis thaliana]
  misc_feature (2)..(322): Homolog of NCBI NO: 18413950 NR Description: short-chain dehydrogenase/reductase family
MVGVISLVTGMAGPSGFGSASTAEQVTDGIDASNLTAIITGGASGIGLETARVLALRKVHVIIAVRNMVSAKEAKQQILEENESARVDVMKLDLCSVNSITSFVDNFIALDLPLNILINNAGVMFCPFKLSEDGIEMQFATNHLGHFHLTNLLLDKMQQTAKATGIEGRIINLSSIAHNYTYRKGIRFNKINERKGYGNKKAYGQSKLANILHTNELSRRLQEEGVNITANSVHPGVIMTPLMRHSSYLMHFLKVFTFYIWKNVPQGAATTCYVALHPSVKGVTGKYFVDCNQCKPSSHAKNKQLAKKLWDFSNDLIKSISKA

SEQ ID NO: 58780 - protein, 313 aa, Glycine max
  peptide (1)..(313): Ceres Seq. ID no. 15169374
  misc_feature (1)..(312): Homolog of NCBI NO: 15233666 NR Description: short-chain dehydrogenase/reductase family
  misc_feature (3)..(303): Homolog of NCBI NO: 15233359 NR Description: short-chain dehydrogenase/reductase family
  misc_feature (1)..(309): Homolog of NCBI NO: 23297050 NR Description: unknown protein [Arabidopsis thaliana]
  misc_feature (1)..(311): Homolog of NCBI NO: 30686197 NR Description: short-chain dehydrogenase/reductase family
  misc_feature (1)..(310): Homolog of NCBI NO: 629592 NR Description: hypothetical protein - rape
  misc_feature (1)..(312): Homolog of NCBI NO: 15224306 NR Description: short-chain dehydrogenase/reductase family
  misc_feature (1)..(312): Homolog of NCBI NO: 34895876 NR Description: P0009G03.18 [Oryza sativa (japonica
  misc_feature (1)..(312): Homolog of NCBI NO: 21554820 NR Description: putativepod-specific dehydrogenase SAC25
  misc_feature (1)..(312): Homolog of NCBI NO: 20260302 NR Description: putative protein [Arabidopsis thaliana]
  misc_feature (1)..(312): Homolog of NCBI NO: 18413950 NR Description: short-chain dehydrogenase/reductase family
MAGPSGFGSASTAEQVTDGIDASNLTAIITGGASGIGLETARVLALRKVHVIIAVRNMVSAKEAKQQILEENESARVDVMKLDLCSVNSITSFVDNFIALDLPLNILINNAGVMFCPFKLSEDGIEMQFATNHLGHFHLTNLLLDKMQQTAKATGIEGRIINLSSIAHNYTYRKGIRFNKINERKGYGNKKAYGQSKLANILHTNELSRRLQEEGVNITANSVHPGVIMTPLMRHSSYLMHFLKVFTFYIWKNVPQGAATTCYVALHPSVKGVTGKYFVDCNQCKPSSHAKNKQLAKKLWDFSNDLIKSISKA

SEQ ID NO: 58781 - protein, 256 aa, Glycine max
  peptide (1)..(256): Ceres Seq. ID no. 15169375
  misc_feature (1)..(255): Homolog of NCBI NO: 15233666 NR Description: short-chain dehydrogenase/reductase family
  misc_feature (1)..(246): Homolog of NCBI NO: 15233359 NR Description: short-chain dehydrogenase/reductase family
  misc_feature (1)..(252): Homolog of NCBI NO: 23297050 NR Description: unknown protein [Arabidopsis thaliana]
  misc_feature (1)..(254): Homolog of NCBI NO: 30686197 NR Description: short-chain dehydrogenase/reductase family
  misc_feature (1)..(253): Homolog of NCBI NO: 629592 NR Description: hypothetical protein - rape
  misc_feature (1)..(255): Homolog of NCBI NO: 15224306 NR Description: short-chain dehydrogenase/reductase family
  misc_feature (1)..(255): Homolog of NCBI NO: 34895876 NR Description: P0009G03.18 [Oryza sativa (japonica
  misc_feature (1)..(255): Homolog of NCBI NO: 21554820 NR Description: putativepod-specific dehydrogenase SAC25
  misc_feature (1)..(255): Homolog of NCBI NO: 20260302 NR Description: putative protein [Arabidopsis thaliana]
  misc_feature (1)..(255): Homolog of NCBI NO: 18413950 NR Description: short-chain dehydrogenase/reductase family
MVSAKEAKQQILEENESARVDVMKLDLCSVNSITSFVDNFIALDLPLNILINNAGVMFCPFKLSEDGIEMQFATNHLGHFHLTNLLLDKMQQTAKATGIEGRIINLSSIAHNYTYRKGIRFNKINERKGYGNKKAYGQSKLANILHTNELSRRLQEEGVNITANSVHPGVIMTPLMRHSSYLMHFLKVFTFYIWKNVPQGAATTCYVALHPSVKGVTGKYFVDCNQCKPSSHAKNKQLAKKLWDFSNDLIKSISKA

SEQ ID NO: 58782 - DNA, 1108 bp, Glycine max
  misc_feature (1)..(1108): Ceres Seq. ID no. 14308575
tttgtgttttcaaccgaaaacttggccttcatttttatttgatttgttacacataagctaagcaagtgccaattcactcgtccatctgtagatttttcttcacatgaacacttttgtttttatacttgctttacataagaatatttggccatataacttcccttttaaccctccctttcaggtcttcttcgttgtggtaagagctgccggttaagatggacaaactacctcagaccagatattaaacgtggttcctttacacttgaggatgaaaaactaatcatacagcttcatggtatccttggaaataggtgggctgctatagcctctcagctaccaggaagaacagacaatgagataaaaaacttatggaacacccacttgaagaaacgtctcatttgcatgggccttgacccacaaacccaccaaccactagcctctccacataaccctaatgacaaggctcatgcatcatcatccacttcaacccgccacatggcccagtgggagagtgcaaggcttgaagcagaggcaaggctctcaagggaaccacacttatactacaacaacaacaaaactgactctgactacttcctacgaatttggaactctgatcttggagaatcttttcgtgatgtccacaaattagaatcttcaatcaaatgtgagtcacagtctgccacaacggatttggcttccttaaccccagcaagcattgtgaaagaggagtttctgtggggtgttaagaaaattgtctcggattcatcatcaagctctagtgaactacaccatgactcttgtgacacttctttgcagctcttgttagactttcctatgaacaatgacatgagcttcttagaattatgagacaccaacagccccttccttacccttaattagtgcatgtatgatgttgttgatatgctgacatgtagctttttgttggctattttgtagacttatagcatgttaggataattaactatcataattgattttggaaggaaattatgctgaaaattgaaaaaagtgaaagcaactatttgttgcttggactttcaatgagaatttggaattgattcggggaaaaaaaaaaaaaaaaaaaaag

SEQ ID NO: 58783 - protein, 154 aa, Glycine max
  peptide (1)..(154): Ceres Seq. ID no. 14308576
  misc_feature (1)..(132): Homolog of NCBI NO: 13346188 NR Description: GHMYB25 [Gossypium hirsutum]
  misc_feature (1)..(61): Homolog of NCBI NO: 15242272 NR Description: myb family transcription factor [Arabidopsis
  misc_feature (1)..(58): Homolog of NCBI NO: 629737 NR Description: myb-related protein MIXTA - garden snapdragon
  misc_feature (1)..(49): Homolog of NCBI NO: 27125807 NR Description: MYB27 protein [Oryza sativa (japonica
  misc_feature (1)..(57): Homolog of NCBI NO: 15232045 NR Description: myb family transcription factor [Arabidopsis
  misc_feature (1)..(52): Homolog of NCBI NO: 28628947 NR Description: MYB1 [Dendrobium sp. XMW-2002-1]
  misc_feature (1)..(56): Homolog of NCBI NO: 282964 NR Description: myb-related protein 1 - garden petunia
  misc_feature (1)..(153): Homolog of NCBI NO: 11358681 NR Description: probable transcription factor MYB17
  misc_feature (1)..(152): Homolog of NCBI NO: 4115565 NR Description: MYB homologue [Perilla frutescens]
  misc_feature (1)..(153): Homolog of NCBI NO: 15233066 NR Description: myb DNA-binding protein (MYB17) [Arabidopsis
MGLDPQTHQPLASPHNPNDKAHASSSTSTRHMAQWESARLEAEARLSREPHLYYNNNKTDSDYFLRIWNSDLGESFRDVHKLESSIKCESQSATTDLASLTPASIVKEEFLWGVKKIVSDSSSSSSELHHDSCDTSLQLLLDFPMNNDMSFLEL

SEQ ID NO: 58784 - protein, 123 aa, Glycine max
  peptide (1)..(123): Ceres Seq. ID no. 14308577
  misc_feature (1)..(101): Homolog of NCBI NO: 13346188 NR Description: GHMYB25 [Gossypium hirsutum]
  misc_feature (1)..(30): Homolog of NCBI NO: 15242272 NR Description: myb family transcription factor [Arabidopsis
  misc_feature (1)..(27): Homolog of NCBI NO: 629737 NR Description: myb-related protein MIXTA - garden snapdragon
  misc_feature (1)..(18): Homolog of NCBI NO: 27125807 NR Description: MYB27 protein [Oryza sativa (japonica
  misc_feature (1)..(26): Homolog of NCBI NO: 15232045 NR Description: myb family transcription factor [Arabidopsis
  misc_feature (1)..(21): Homolog of NCBI NO: 28628947 NR Description: MYB1 [Dendrobium sp. XMW-2002-1]
  misc_feature (1)..(25): Homolog of NCBI NO: 282964 NR Description: myb-related protein 1 - garden petunia
  misc_feature (1)..(122): Homolog of NCBI NO: 11358681 NR Description: probable transcription factor MYB17
  misc_feature (1)..(121): Homolog of NCBI NO: 4115565 NR Description: MYB homologue [Perilla frutescens]
  misc_feature (1)..(122): Homolog of NCBI NO: 15233066 NR Description: myb DNA-binding protein (MYB17) [Arabidopsis
MAQWESARLEAEARLSREPHLYYNNNKTDSDYFLRIWNSDLGESFRDVHKLESSIKCESQSATTDLASLTPASIVKEEFLWGVKKIVSDSSSSSSELHHDSCDTSLQLLLDFPMNNDMSFLEL

SEQ ID NO: 58785 - DNA, 613 bp, Glycine max
  misc_feature (1)..(613): Ceres Seq. ID no. 15169443
gacgttcattcggcttgcttgattgttccaggtattcgcagtcgaccgtgtcctcggagcacgatgaaggttgttgctgcctacctgcttgctgtcctcgctgggaatgccagcccctccgctgaggatttgactggcattctggagtcagttggctgtgaagttgacaatgaaaggatggaactgctgctgtcccaactgagcggtaaggacatcaccgagctcattgccgcgggcagagagaagtttgcttcagtcccatgtggcggcggcggtgtggctgttgcggcaggtgcacctgctgctggcggagctgctcctgcagctgaggcaaagaaagaagagaaggtggaagagaaggaagaaagcgatgatgatatgggcttcagcctcttcgactaggttgcacagtcatcacagtattgtttcgggcagtgaaatcaaagggaaaccagagtcatgtttagattttaaccttattttatgttggaaagtactgcaaagactgctaattgtctctgtatttggtaattcagctgtagattgctatgatggttgggatttactcgtgaaccagagtttttctatcttatatcctgaattggttatcccg

SEQ ID NO: 58786 - protein, 133 aa, Glycine max
  peptide (1)..(133): Ceres Seq. ID no. 15169444
  misc_feature (38)..(132): Pfam Name: 60s Acidic ribosomal protein Pfam Description: 60s Acidic ribosomal protein
  misc_feature (22)..(133): Homolog of NCBI NO: 39587678 NR Description: Hypothetical protein CBG01783 [Caenorhabditis
  misc_feature (22)..(133): Homolog of NCBI NO: 24473796 NR Description: 60s acidic ribosomal protein [Prunus dulcis]
  misc_feature (14)..(133): Homolog of NCBI NO: 32400796 NR Description: acidic ribosomal protein [Triticum aestivum]
  misc_feature (40)..(133): Homolog of NCBI NO: 4204376 NR Description: acidic ribosomal protein P2a-4 [Zea mays]
  misc_feature (23)..(133): Homolog of NCBI NO: 32400774 NR Description: acidic ribosomal protein P2 [Triticum aestivum]
  misc_feature (13)..(133): Homolog of NCBI NO: 34906408 NR Description: putative 60S acidic ribosomal protein P2A
  misc_feature (30)..(133): Homolog of NCBI NO: 4204374 NR Description: acidic ribosomal protein P2a-3 [Zea mays]
  misc_feature (22)..(133): Homolog of NCBI NO: 899610 NR Description: acidic ribosomal protein P2
  misc_feature (22)..(133): Homolog of NCBI NO: 4204372 NR Description: acidic ribosomal protein P2a-2 [Zea mays]
  misc_feature (22)..(133): Homolog of NCBI NO: 1173073 NR Description: 60S ACIDIC RIBOSOMAL PROTEIN P2A (P2)
DVHSACLIVPGIRSRPCPRSTMKVVAAYLLAVLAGNASPSAEDLTGILESVGCEVDNERMELLLSQLSGKDITELIAAGREKFASVPCGGGGVAVAAGAPAAGGAAPAAEAKKEEKVEEKEESDDDMGFSLFD

SEQ ID NO: 58787 - protein, 112 aa, Glycine max
  peptide (1)..(112): Ceres Seq. ID no. 15169445
  misc_feature (17)..(111): Pfam Name: 60s Acidic ribosomal protein Pfam Description: 60s Acidic ribosomal protein
  misc_feature (1)..(112): Homolog of NCBI NO: 39587678 NR Description: Hypothetical protein CBG01783 [Caenorhabditis
  misc_feature (1)..(112): Homolog of NCBI NO: 24473796 NR Description: 60s acidic ribosomal protein [Prunus dulcis]
  misc_feature (1)..(112): Homolog of NCBI NO: 32400796 NR Description: acidic ribosomal protein [Triticum aestivum]
  misc_feature (19)..(112): Homolog of NCBI NO: 4204376 NR Description: acidic ribosomal protein P2a-4 [Zea mays]
  misc_feature (2)..(112): Homolog of NCBI NO: 32400774 NR Description: acidic ribosomal protein P2 [Triticum aestivum]
  misc_feature (1)..(112): Homolog of NCBI NO: 34906408 NR Description: putative 60S acidic ribosomal protein P2A
  misc_feature (9)..(112): Homolog of NCBI NO: 4204374 NR Description: acidic ribosomal protein P2a-3 [Zea mays]
  misc_feature (1)..(112): Homolog of NCBI NO: 899610 NR Description: acidic ribosomal protein P2
  misc_feature (1)..(112): Homolog of NCBI NO: 4204372 NR Description: acidic ribosomal protein P2a-2 [Zea mays]
  misc_feature (1)..(112): Homolog of NCBI NO: 1173073 NR Description: 60S ACIDIC RIBOSOMAL PROTEIN P2A (P2)
MKVVAAYLLAVLAGNASPSAEDLTGILESVGCEVDNERMELLLSQLSGKDITELIAAGREKFASVPCGGGGVAVAAGAPAAGGAAPAAEAKKEEKVEEKEESDDDMGFSLFD

SEQ ID NO: 58788 - protein, 81 aa, Glycine max
  peptide (1)..(81): Ceres Seq. ID no. 15169446
MMIWASASSTRLHSHHSIVSGSEIKGKPESCLDFNLILCWKVLQRLLIVSVFGNSAVDCYDGWDLLVNQSFSILYPELVIP

SEQ ID NO: 58789 - DNA, 1565 bp, Glycine max
  misc_feature (1)..(1565): Ceres Seq. ID no. 15176349
atagcagcaccgcaccgcaccgcaccaggtcttctttttttctttcatggcggaggaaattacttctcaattaaaaaaaaatttgctggatgaagaaaatggaacatcaagtcatgttgtagaaggggctgctgatgctgatgctgatgctgagctttctccaccatcacaaaaaggagatgacgctaaagaagtttcaaagaagaaaaagaagaaatctaaaagcaagaaaaagaaagaactcttacaacagactgatccaccatcaatttctgttattaaccttttcccatctggagattttcctgaaggtgaaattcagcagtacaaagacgataacctatggagaactacttcagaggagaagagagaactggagcgcctgcagaaaccattatataattcagttcgtcgagcggcagaagttcatcgtcaggttcgcaaatatattaaaggcattttaaagcccggaatgttgatgactgacatatgtgaaacattggagaacactgttcgtaagctaatatcagaggatggccttcaagcaggcattgcattccccacaggatgctctttaaattgggttgctgctcactggaccccaaattcaggggataagactatactttagtatgatgatgtgatgaaattggattttggtacccatgttgatggatatatagttgactgtgcttttaccgtggcattcaaccccatgtttgatccactgcttgaagcctctcgtgaagcaaccaatacgggtattaaggaagctggaatcgatgtgcgcctttgtgacattggtgccgcaattcaagaggtcatggaatcttatgaagttgagattaatgggaaggtgtatcaagttaagagtatacggaatttgaatggacatagcattggtcgctaccaaatccatgctggaaaatctgttcccattgtgaagggtggggagcagacaaagatggaagagggtgaattttttgctattgaaacctttgcatcaacggggaaaggatatgtacgagaagacctggaatgcagccactacatgaaaaattttgatgttggtcatatcccactgagattgcctagagcgaagcaactgttagcaactattaacaagaacttctctactttggccttttgtaggcggtatttagatcgcctaggggagactaaatacttaatggcattaaagaacttgtgtgactctggcattgttcagccttatcctcctctatgtgatgtgaaaggaagctatgtatcacaattcgagcatacaatcttactccgaccaacatgcaaagaagttatatcaaagggtgacgattactaatgtggatttgaagtttttttgctttgttttatatatatatatatatatatatatatatatatatatatatatatatatatttaatactcactgtaccattatctttgtgaactgttttcattataccatcaacacttcggttttatatatgtgcctatggaggacgccattactagtttaataattggatatttccccaatagataaacatcgtattagaaggtcc

SEQ ID NO: 58790 - protein, 231 aa, Glycine max
  peptide (1)..(231): Ceres Seq. ID no. 15176350
  misc_feature (1)..(231): Homolog of NCBI NO: 5821855 NR Description: Human Methionine Aminopeptidase 2
  misc_feature (1)..(231): Homolog of NCBI NO: 1703275 NR Description: Methionine aminopeptidase 2 (MetAP 2) (Peptidase
  misc_feature (1)..(231): Homolog of NCBI NO: 5803092 NR Description: methionyl aminopeptidase 2
  misc_feature (1)..(231): Homolog of NCBI NO: 38636687 NR Description: putative methionyl aminopeptidase (EC 3.4.11.18)
  misc_feature (1)..(231): Homolog of NCBI NO: 18406472 NR Description: methionine aminopeptidase -related [Arabidopsis
  misc_feature (1)..(231): Homolog of NCBI NO: 7435570 NR Description: methionyl aminopeptidase (EC 3.4.11.18) F6E13.31
  misc_feature (1)..(231): Homolog of NCBI NO: 11320962 NR Description: methionine aminopeptidase-like protein
  misc_feature (1)..(231): Homolog of NCBI NO: 11264654 NR Description: hypothetical protein F24G16.260 - Arabidopsis
  misc_feature (1)..(231): Homolog of NCBI NO: 17473819 NR Description: putative protein [Arabidopsis thaliana]
  misc_feature (1)..(231): Homolog of NCBI NO: 18411408 NR Description: methionine aminopeptidase 2 -related [Arabidopsis
MKLDFGTHVDGYIVDCAFTVAFNPMFDPLLEASREATNTGIKEAGIDVRLCDIGAAIQEVMESYEVEINGKVYQVKSIRNLNGHSIGRYQIHAGKSVPIVKGGEQTKMEEGEFFAIETFASTGKGYVREDLECSHYMKNFDVGHIPLRLPRAKQLLATINKNFSTLAFCRRYLDRLGETKYLMALKNLCDSGIVQPYPPLCDVKGSYVSQFEHTILLRPTCKEVISKGDDY

SEQ ID NO: 58791 - protein, 207 aa, Glycine max
  peptide (1)..(207): Ceres Seq. ID no. 15176351
  misc_feature (1)..(207): Homolog of NCBI NO: 5821855 NR Description: Human Methionine Aminopeptidase 2
  misc_feature (1)..(207): Homolog of NCBI NO: 1703275 NR Description: Methionine aminopeptidase 2 (MetAP 2) (Peptidase
  misc_feature (1)..(207): Homolog of NCBI NO: 5803092 NR Description: methionyl aminopeptidase 2
  misc_feature (1)..(207): Homolog of NCBI NO: 38636687 NR Description: putative methionyl aminopeptidase (EC 3.4.11.18)
  misc_feature (1)..(207): Homolog of NCBI NO: 18406472 NR Description: methionine aminopeptidase -related [Arabidopsis
  misc_feature (1)..(207): Homolog of NCBI NO: 7435570 NR Description: methionyl aminopeptidase (EC 3.4.11.18) F6E13.31
  misc_feature (1)..(207): Homolog of NCBI NO: 11320962 NR Description: methionine aminopeptidase-like protein
  misc_feature (1)..(207): Homolog of NCBI NO: 11264654 NR Description: hypothetical protein F24G16.260 - Arabidopsis
  misc_feature (1)..(207): Homolog of NCBI NO: 17473819 NR Description: putative protein [Arabidopsis thaliana]
  misc_feature (1)..(207): Homolog of NCBI NO: 18411408 NR Description: methionine aminopeptidase 2 -related [Arabidopsis
MFDPLLEASREATNTGIKEAGIDVRLCDIGAAIQEVMESYEVEINGKVYQVKSIRNLNGHSIGRYQIHAGKSVPIVKGGEQTKMEEGEFFAIETFASTGKGYVREDLECSHYMKNFDVGHIPLRLPRAKQLLATINKNFSTLAFCRRYLDRLGETKYLMALKNLCDSGIVQPYPPLCDVKGSYVSQFEHTILLRPTCKEVISKGDDY

SEQ ID NO: 58792 - protein, 194 aa, Glycine max
  peptide (1)..(194): Ceres Seq. ID no. 15176352
  misc_feature (15)..(194): Homolog of NCBI NO: 5821855 NR Description: Human Methionine Aminopeptidase 2
  misc_feature (14)..(194): Homolog of NCBI NO: 1703275 NR Description: Methionine aminopeptidase 2 (MetAP 2) (Peptidase
  misc_feature (15)..(194): Homolog of NCBI NO: 5803092 NR Description: methionyl aminopeptidase 2
  misc_feature (32)..(194): Homolog of NCBI NO: 38636687 NR Description: putative methionyl aminopeptidase (EC 3.4.11.18)
  misc_feature (1)..(194): Homolog of NCBI NO: 18406472 NR Description: methionine aminopeptidase -related [Arabidopsis
  misc_feature (1)..(194): Homolog of NCBI NO: 7435570 NR Description: methionyl aminopeptidase (EC 3.4.11.18) F6E13.31
  misc_feature (4)..(194): Homolog of NCBI NO: 11320962 NR Description: methionine aminopeptidase-like protein
  misc_feature (34)..(194): Homolog of NCBI NO: 11264654 NR Description: hypothetical protein F24G16.260 - Arabidopsis
  misc_feature (34)..(194): Homolog of NCBI NO: 17473819 NR Description: putative protein [Arabidopsis thaliana]
  misc_feature (34)..(194): Homolog of NCBI NO: 18411408 NR Description: methionine aminopeptidase 2 -related [Arabidopsis
MAEEITSQLKKNLLDEENGTSSHVVEGAADADADAELSPPSQKGDDAKEVSKKKKKKSKSKKKKELLQQTDPPSISVINLFPSGDFPEGEIQQYKDDNLWRTTSEEKRELERLQKPLYNSVRRAAEVHRQVRKYIKGILKPGMLMTDICETLENTVRKLISEDGLQAGIAFPTGCSLNWVAAHWTPNSGDKTIL

SEQ ID NO: 58793 - DNA, 499 bp, Glycine max
  misc_feature (1)..(499): Ceres Seq. ID no. 14308880
ttacctcggaggagactgccaaggtcaaggctgccggcaaggcgtggtacaagaccatgatctcggacagtgactacaccgagtttgagaacttcaccaagtggctcggagtgacgcagtgaagcggcctttgagacctagttaagttttgattagttgtgtcgctgaacttgtattgagacgaaatagtattttatcaatctgtcttatcctgcatcttcacaacaagttacctatctgtggactttaagcctgcatgttcgttttatttctccattgccgtgggagcatagtatttgcatgttcgaaccaattatctggattatggtatggatttgtgcacataatgtctgttcatgatgcttgtggtctagtgccgtttggccttgtagtagtactacttccgtatccgtctcagagataattgatgttttagaaagtaagtgatgttttaggtttgttgaacaatcgactaaatttataagatttttttttgacc

SEQ ID NO: 58794 - protein, 55 aa, Glycine max
  peptide (1)..(55): Ceres Seq. ID no. 14308881
MFVLFLHCRGSIVFACSNQLSGLWYGFVHIMSVHDACGLVPFGLVVVLLPYPSQR

SEQ ID NO: 58795 - protein, 39 aa, Glycine max
  peptide (1)..(39): Ceres Seq. ID no. 14308882
  misc_feature (1)..(39): Homolog of NCBI NO: 25403525 NR Description: probable 60S ribosomal protein
  misc_feature (1)..(39): Homolog of NCBI NO: 26450328 NR Description: putative 60S ribosomal protein [Arabidopsis
  misc_feature (1)..(39): Homolog of NCBI NO: 15242558 NR Description: 60S ribosomal protein L4/L1 (RPL4D) [Arabidopsis
  misc_feature (1)..(39): Homolog of NCBI NO: 21593543 NR Description: 60S ribosomal protein L4-B (L1) [Arabidopsis
  misc_feature (1)..(39): Homolog of NCBI NO: 15232723 NR Description: 60S ribosomal protein L4/L1 (RPL4A) [Arabidopsis
  misc_feature (1)..(39): Homolog of NCBI NO: 17367847 NR Description: 60S ribosomal protein L4 (L1)
  misc_feature (1)..(39): Homolog of NCBI NO: 13605831 NR Description: AT5g02870/F9G14_180 [Arabidopsis thaliana]
  misc_feature (3)..(39): Homolog of NCBI NO: 34393487 NR Description: putative 60S ribosomal protein L4/L1
  misc_feature (3)..(39): Homolog of NCBI NO: 34897236 NR Description: putative 60S ribosomal protein L1
TSEETAKVKAAGKAWYKTMISDSDYTEFENFTKWLGVTQ

SEQ ID NO: 58796 - DNA, 1372 bp, Glycine max
  misc_feature (1)..(1372): Ceres Seq. ID no. 15176230
agagtgctacttgaaaaattgttctcaccgtgtgtgtgttgtgtgtgtgtgtgagagagagagagagagagagagagaaagagagagagagagaggttaggctatggctgatgagagcgtcgttgagtccccagtgaagaggcagagagatgatgatgaagaaaatgaggtctctgtttccatggatgtggagggtggcaaagaccctcttagtaacggtttatcatctgtgattcctgggtggttctctgaaattagttcaatgtggcctggagaggctcactccttgaaggtggaaaagattttgtttcaaggaaagtctgaataccagaatgtcatggtcttccagtcatcaacatatggcaaggttcttgttttagatggagtaattcagctaacagaaagggatgaatgtgcctaccaagaaatgatcactcatcttcctctttgctctattccaaaccccaaaaaggttttggttatcggtggaggtgatggaggggtcatacgagaagtagcacaccattcttcagttgaaaagatagacatttgtgaaattgacaagatggttgttgatgtctccaaacaatacttccctgatgtagctgttgggtatgatgatcctcgtgtgacacttcatattggtgatggagttgcatttctgaaggaagttcctgaaggaacttatgatgctgttatagtggattcatccgatcctattggtcctgctcaagagctttttgaaaagcccttcttttcgtcagttgcaaaggctcttcgtccaggtggagttgtgtgcactcaggcagaaagcatatggcttcatatggatataattgaggacattgtggctaattgtcgccagatttttaaaggctctgtcaactatgcttggactactgttcctacatacccaagtgggatgattggttttatgctttgctcaactgagggaccacctgttgatttcaagcatccagtgaatcccatagatgaaaatgagagtcagaagtcagtaagaccgctgaaattttacaactctgagattcataccgcagctttctgcttgccgtcgtttgcgaagaggaagattggttctaaagcaaattaagaagattttctaaacctttgaaggagctcatgtggctgttgtagaagtccaacattcatcctttctgtattggtccatctatcaatgagctatggaataagtcagattaaatttggcattgaatattaacgtttatttctggaaatgagttttaggtgataaaggtataattgatggattcagttgtcagtgactttcctcataaacacatttaaaaatgtggaactatgaatatctgtttaggaaaattttgtttaatgc

SEQ ID NO: 58797 - protein, 335 aa, Glycine max
  peptide (1)..(335): Ceres Seq. ID no. 15176231
  misc_feature (46)..(291): Pfam Name: Spermine/spermidine synthase Pfam Description: Spermine/spermidine synthase
  misc_feature (40)..(333): Homolog of NCBI NO: 6094328 NR Description: Spermidine synthase 1 (Putrescine
  misc_feature (39)..(335): Homolog of NCBI NO: 12229998 NR Description: Spermidine synthase 1 (Putrescine
  misc_feature (11)..(335): Homolog of NCBI NO: 15220885 NR Description: spermidine synthase -related [Arabidopsis
  misc_feature (1)..(333): Homolog of NCBI NO: 15150055 NR Description: spermidine synthase [Solanum tuberosum]
  misc_feature (1)..(333): Homolog of NCBI NO: 12230013 NR Description: Spermidine synthase (Putrescine
  misc_feature (36)..(335): Homolog of NCBI NO: 6094335 NR Description: Spermidine synthase (Putrescine
  misc_feature (1)..(334): Homolog of NCBI NO: 23495352 NR Description: spermidine synthase [Malus x domestica]
  misc_feature (1)..(334): Homolog of NCBI NO: 23495354 NR Description: spermidine synthase [Malus x domestica]
  misc_feature (8)..(335): Homolog of NCBI NO: 12229958 NR Description: Spermidine synthase 1 (Putrescine
  misc_feature (1)..(333): Homolog of NCBI NO: 12229957 NR Description: Spermidine synthase 2 (Putrescine
MADESVVESPVKRQRDDDEENEVSVSMDVEGGKDPLSNGLSSVIPGWFSEISSMWPGEAHSLKVEKILFQGKSEYQNVMVFQSSTYGKVLVLDGVIQLTERDECAYQEMITHLPLCSIPNPKKVLVIGGGDGGVIREVAHHSSVEKIDICEIDKMVVDVSKQYFPDVAVGYDDPRVTLHIGDGVAFLKEVPEGTYDAVIVDSSDPIGPAQELFEKPFFSSVAKALRPGGVVCTQAESIWLHMDIIEDIVANCRQIFKGSVNYAWTTVPTYPSGMIGFMLCSTEGPPVDFKHPVNPIDENESQKSVRPLKFYNSEIHTAAFCLPSFAKRKIGSKAN

SEQ ID NO: 58798 - protein, 309 aa, Glycine max
  peptide (1)..(309): Ceres Seq. ID no. 15176232
  misc_feature (20)..(265): Pfam Name: Spermine/spermidine synthase Pfam Description: Spermine/spermidine synthase
  misc_feature (14)..(307): Homolog of NCBI NO: 6094328 NR Description: Spermidine synthase 1 (Putrescine
  misc_feature (13)..(309): Homolog of NCBI NO: 12229998 NR Description: Spermidine synthase 1 (Putrescine
  misc_feature (1)..(309): Homolog of NCBI NO: 15220885 NR Description: spermidine synthase -related [Arabidopsis
  misc_feature (1)..(307): Homolog of NCBI NO: 15150055 NR Description: spermidine synthase [Solanum tuberosum]
  misc_feature (1)..(307): Homolog of NCBI NO: 12230013 NR Description: Spermidine synthase (Putrescine
  misc_feature (10)..(309): Homolog of NCBI NO: 6094335 NR Description: Spermidine synthase (Putrescine
  misc_feature (1)..(308): Homolog of NCBI NO: 23495352 NR Description: spermidine synthase [Malus x domestica]
  misc_feature (1)..(308): Homolog of NCBI NO: 23495354 NR Description: spermidine synthase [Malus x domestica]
  misc_feature (1)..(309): Homolog of NCBI NO: 12229958 NR Description: Spermidine synthase 1 (Putrescine
  misc_feature (1)..(307): Homolog of NCBI NO: 12229957 NR Description: Spermidine synthase 2 (Putrescine
MDVEGGKDPLSNGLSSVIPGWFSEISSMWPGEAHSLKVEKILFQGKSEYQNVMVFQSSTYGKVLVLDGVIQLTERDECAYQEMITHLPLCSIPNPKKVLVIGGGDGGVIREVAHHSSVEKIDICEIDKMVVDVSKQYFPDVAVGYDDPRVTLHIGDGVAFLKEVPEGTYDAVIVDSSDPIGPAQELFEKPFFSSVAKALRPGGVVCTQAESIWLHMDIIEDIVANCRQIFKGSVNYAWTTVPTYPSGMIGFMLCSTEGPPVDFKHPVNPIDENESQKSVRPLKFYNSEIHTAAFCLPSFAKRKIGSKAN

SEQ ID NO: 58799 - protein, 282 aa, Glycine max
  peptide (1)..(282): Ceres Seq. ID no. 15176233
  misc_feature (1)..(238): Pfam Name: Spermine/spermidine synthase Pfam Description: Spermine/spermidine synthase
  misc_feature (1)..(280): Homolog of NCBI NO: 6094328 NR Description: Spermidine synthase 1 (Putrescine
  misc_feature (1)..(282): Homolog of NCBI NO: 12229998 NR Description: Spermidine synthase 1 (Putrescine
  misc_feature (1)..(282): Homolog of NCBI NO: 15220885 NR Description: spermidine synthase -related [Arabidopsis
  misc_feature (1)..(280): Homolog of NCBI NO: 15150055 NR Description: spermidine synthase [Solanum tuberosum]
  misc_feature (1)..(280): Homolog of NCBI NO: 12230013 NR Description: Spermidine synthase (Putrescine
  misc_feature (1)..(282): Homolog of NCBI NO: 6094335 NR Description: Spermidine synthase (Putrescine
  misc_feature (1)..(281): Homolog of NCBI NO: 23495352 NR Description: spermidine synthase [Malus x domestica]
  misc_feature (1)..(281): Homolog of NCBI NO: 23495354 NR Description: spermidine synthase [Malus x domestica]
  misc_feature (1)..(282): Homolog of NCBI NO: 12229958 NR Description: Spermidine synthase 1 (Putrescine
  misc_feature (1)..(280): Homolog of NCBI NO: 12229957 NR Description: Spermidine synthase 2 (Putrescine
MWPGEAHSLKVEKILFQGKSEYQNVMVFQSSTYGKVLVLDGVIQLTERDECAYQEMITHLPLCSIPNPKKVLVIGGGDGGVIREVAHHSSVEKIDICEIDKMVVDVSKQYFPDVAVGYDDPRVTLHIGDGVAFLKEVPEGTYDAVIVDSSDPIGPAQELFEKPFFSSVAKALRPGGVVCTQAESIWLHMDIIEDIVANCRQIFKGSVNYAWTTVPTYPSGMIGFMLCSTEGPPVDFKHPVNPIDENESQKSVRPLKFYNSEIHTAAFCLPSFAKRKIGSKAN

SEQ ID NO: 58800 - DNA, 1486 bp, Glycine max
  misc_feature (1)..(1486): Ceres Seq. ID no. 14308209
acacaagattgagacacgaaacagaaaatgccaggactcacagcaccttccgattactcccaagaacccccccgccactcttctcttctcatcaacgccaaggaacctttcaatgcggagccaccgcgtgctgcgttggttgcttcctacgtcaccccttccgatttcttctataagaggaaccacggtccaatccccatcgttgagaacatcaacagatattccgtgaacgtgtccggcttggtggagcgtcccaaacagctcttcatgaaagatatatggatgcttccaaagtataatgtcactgccacgttgcagtgtgcaggtaatcgaaggactgctatgagcaagaccaaaacagtgaagggagttggctgggatgtttctgctattggaaatgctatttggggtggagccaaattgtctgatgttcttgaactcattggaattccaaagttgactagtgtcactgaatttggtggaagacatgtggaattcgtaagcattgataagtgcaaggaggaaaatggaggcccatacaaggcttcaataccactcagtcaggccacaaatcctgaagcagatgttctactagcttatgaaatgaatggtgaacctcttaacagggatcatgggtatccattacgtgtggttgttcctggtgtcattggagcccggtctgttaaatggctggaagatatcaatatcattgaagaagaatgtcagggtttcttcatgcaaaaggactacaaaatgtttccaccatcagtgaattgggataatattgattggtctacccggagaccccaaatggatttcccagttcagtgtgttatatgttctcttgaagacgtgagcacaataaagcctgggaaggtaaaaattagtggatatgcagcatcaggaggtggcagaggcattgagagagtagatgtgtctgttgatggaggcaaaacatggatggaagcctcaagaattcagaaaagtggggttccttatatatcagaacatgccagcagtgacaaatgggcatgggtgctgtttgaagtcacagctgatatccttcacagcactgagataattgcaaaagcggtagattctgctgcaaatgtccaacctgaaaaggttgaagacatttggaaccttagaggtattttaaacacttcatggcatcgagtgaaagttcaagcgagttactcaaacctgtaaaagtagcaccaacttcccaatcgagcctttatgactctctcccccaacaatgcttggtggattttgaagcttctctgtttgaactatgaacactgaaaacacctgaacaggcatcgcaatcagttgtaaaaaagtctttatacaaataagctataggcaagggattataagaaaaatccttgggtttctcagagtttttcatggaatatctgttcttcgtttcttcgaggaaataatttgagatcgtaaacatgattcgtctggcactttgaatttc

SEQ ID NO: 58801 - protein, 393 aa, Glycine max
  peptide (1)..(393): Ceres Seq. ID no. 14308210
  misc_feature (3)..(237): Pfam Name: Oxidoreductase molybdopterin binding domain Pfam Description: Oxidoreductase molybdopterin binding domain
  misc_feature (2)..(389): Homolog of NCBI NO: 4557867 NR Description: SUOX gene product [Homo sapiens]
  misc_feature (2)..(387): Homolog of NCBI NO: 30424565 NR Description: sulfite oxidase [Mus musculus]
  misc_feature (2)..(387): Homolog of NCBI NO: 40254758 NR Description: sulfite oxidase [Rattus norvegicus]
  misc_feature (2)..(387): Homolog of NCBI NO: 586053 NR Description: Sulfite oxidase, mitochondrial precursor
  misc_feature (6)..(383): Homolog of NCBI NO: 86440 NR Description: sulfite oxidase (EC 1.8.3.1), hepatic - chicken
  misc_feature (6)..(383): Homolog of NCBI NO: 28558813 NR Description: Sulfite oxidase
  misc_feature (6)..(386): Homolog of NCBI NO: 3212610 NR Description: Chain A, Sulfite Oxidase From Chicken Liver
  misc_feature (1)..(389): Homolog of NCBI NO: 22759584 NR Description: Moco containing protein [Oryza sativa (japonica
  misc_feature (1)..(393): Homolog of NCBI NO: 6468008 NR Description: sulfite oxidase [Arabidopsis thaliana]
  misc_feature (1)..(393): Homolog of NCBI NO: 15232230 NR Description: sulfite oxidase, putative [Arabidopsis thaliana]
MPGLTAPSDYSQEPPRHSSLLINAKEPFNAEPPRAALVASYVTPSDFFYKRNHGPIPIVENINRYSVNVSGLVERPKQLFMKDIWMLPKYNVTATLQCAGNRRTAMSKTKTVKGVGWDVSAIGNAIWGGAKLSDVLELIGIPKLTSVTEFGGRHVEFVSIDKCKEENGGPYKASIPLSQATNPEADVLLAYEMNGEPLNRDHGYPLRVVVPGVIGARSVKWLEDINIIEEECQGFFMQKDYKMFPPSVNWDNIDWSTRRPQMDFPVQCVICSLEDVSTIKPGKVKISGYAASGGGRGIERVDVSVDGGKTWMEASRIQKSGVPYISEHASSDKWAWVLFEVTADILHSTEIIAKAVDSAANVQPEKVEDIWNLRGILNTSWHRVKVQASYSNL

SEQ ID NO: 58802 - protein, 313 aa, Glycine max
  peptide (1)..(313): Ceres Seq. ID no. 14308211
  misc_feature (1)..(157): Pfam Name: Oxidoreductase molybdopterin binding domain Pfam Description: Oxidoreductase molybdopterin binding domain
  misc_feature (1)..(309): Homolog of NCBI NO: 4557867 NR Description: SUOX gene product [Homo sapiens]
  misc_feature (1)..(307): Homolog of NCBI NO: 30424565 NR Description: sulfite oxidase [Mus musculus]
  misc_feature (1)..(307): Homolog of NCBI NO: 40254758 NR Description: sulfite oxidase [Rattus norvegicus]
  misc_feature (1)..(307): Homolog of NCBI NO: 586053 NR Description: Sulfite oxidase, mitochondrial precursor
  misc_feature (1)..(303): Homolog of NCBI NO: 86440 NR Description: sulfite oxidase (EC 1.8.3.1), hepatic - chicken
  misc_feature (1)..(303): Homolog of NCBI NO: 28558813 NR Description: Sulfite oxidase
  misc_feature (1)..(306): Homolog of NCBI NO: 3212610 NR Description: Chain A, Sulfite Oxidase From Chicken Liver
  misc_feature (1)..(309): Homolog of NCBI NO: 22759584 NR Description: Moco containing protein [Oryza sativa (japonica
  misc_feature (1)..(313): Homolog of NCBI NO: 6468008 NR Description: sulfite oxidase [Arabidopsis thaliana]
  misc_feature (1)..(313): Homolog of NCBI NO: 15232230 NR Description: sulfite oxidase, putative [Arabidopsis thaliana]
MKDIWMLPKYNVTATLQCAGNRRTAMSKTKTVKGVGWDVSAIGNAIWGGAKLSDVLELIGIPKLTSVTEFGGRHVEFVSIDKCKEENGGPYKASIPLSQATNPEADVLLAYEMNGEPLNRDHGYPLRVVVPGVIGARSVKWLEDINIIEEECQGFFMQKDYKMFPPSVNWDNIDWSTRRPQMDFPVQCVICSLEDVSTIKPGKVKISGYAASGGGRGIERVDVSVDGGKTWMEASRIQKSGVPYISEHASSDKWAWVLFEVTADILHSTEIIAKAVDSAANVQPEKVEDIWNLRGILNTSWHRVKVQASYSNL

SEQ ID NO: 58803 - protein, 308 aa, Glycine max
  peptide (1)..(308): Ceres Seq. ID no. 14308212
  misc_feature (1)..(152): Pfam Name: Oxidoreductase molybdopterin binding domain Pfam Description: Oxidoreductase molybdopterin binding domain
  misc_feature (1)..(304): Homolog of NCBI NO: 4557867 NR Description: SUOX gene product [Homo sapiens]
  misc_feature (1)..(302): Homolog of NCBI NO: 30424565 NR Description: sulfite oxidase [Mus musculus]
  misc_feature (1)..(302): Homolog of NCBI NO: 40254758 NR Description: sulfite oxidase [Rattus norvegicus]
  misc_feature (1)..(302): Homolog of NCBI NO: 586053 NR Description: Sulfite oxidase, mitochondrial precursor
  misc_feature (1)..(298): Homolog of NCBI NO: 86440 NR Description: sulfite oxidase (EC 1.8.3.1), hepatic - chicken
  misc_feature (1)..(298): Homolog of NCBI NO: 28558813 NR Description: Sulfite oxidase
  misc_feature (1)..(301): Homolog of NCBI NO: 3212610 NR Description: Chain A, Sulfite Oxidase From Chicken Liver
  misc_feature (1)..(304): Homolog of NCBI NO: 22759584 NR Description: Moco containing protein [Oryza sativa (japonica
  misc_feature (1)..(308): Homolog of NCBI NO: 6468008 NR Description: sulfite oxidase [Arabidopsis thaliana]
  misc_feature (1)..(308): Homolog of NCBI NO: 15232230 NR Description: sulfite oxidase, putative [Arabidopsis thaliana]
MLPKYNVTATLQCAGNRRTAMSKTKTVKGVGWDVSAIGNAIWGGAKLSDVLELIGIPKLTSVTEFGGRHVEFVSIDKCKEENGGPYKASIPLSQATNPEADVLLAYEMNGEPLNRDHGYPLRVVVPGVIGARSVKWLEDINIIEEECQGFFMQKDYKMFPPSVNWDNIDWSTRRPQMDFPVQCVICSLEDVSTIKPGKVKISGYAASGGGRGIERVDVSVDGGKTWMEASRIQKSGVPYISEHASSDKWAWVLFEVTADILHSTEIIAKAVDSAANVQPEKVEDIWNLRGILNTSWHRVKVQASYSNL

SEQ ID NO: 58804 - DNA, 1353 bp, Glycine max
  misc_feature (1)..(1353): Ceres Seq. ID no. 15176887
gttgtgaatcttgtgatcatcgaaagtcactgtagtctattttgtctacaaaatatctggactgacggagtagaaacaactgcaccacaaggggattggggataatttcaagtcagtcttcttctctatcttccgttttttctgagaaagtaacaaatgtgagtcgctaagcgtatcaaactcgtgaacacagttagttaattagttttctcattctcattcaaagtacgtctagtgtttgcaaaaatggaagaagaaagtgcgttgaggccgatggacgctgagcaactgagagagcaggctcataagatggtcgacttcattgccgattactacaaaaccatcgaagacttccccgttctaagccaagttcagccaggttatcttgggaagcttttaccagattctgcacctgattctcctgagtcattgcaaaatgttttggatgatgtgcaggaaaaaatactgccaggggtgacgcactggcaaagcccaaattattttgcgtattttccttccaacagtagcattgctgggtttctaggagagatgctcagtgcgggtcttaacatcgtgggtttcagctggataacttctcctgctgcaattgaacttgagacgattgttctggattggcttgcaaaggctttccagctgcctgattatttctattctagtgggaaaggtggtggagttatacagggaactgcaagtgaagctgtactagttgtcttattagctgcccgtgacaagatcttaaggagggttggaaggaatgcccttcctaagcttgtgatgtatgcatctgatcaaacacactctgctttactaaaagcttgccagatagcaggaattaatccagagctatgcaggttgcttaaaactgattcttccacaaattatgcactttctcctgatgtgctttctgaagcaatttcaaatgacattgctggcggtcttgtaccctttttcttatgtgctactgtaagaattgaaggcttatatgaatttgtgaatttgtaacaaattgctatataatgcgttaacttaactgcccattgtctatgtgtgtgtgtcttatgtccaatattttatcatacatgtttactgaatttttaaattagaaattgctcaactcatctgagtatcagataaagggataacatatccttcttcatgttgttcagagctctgtctcttcattatttgttgctggggaacagattgttttatacctgttaatatggtatatgtttggactaataaaggggagagagcaagggactgagatccctgtctgatcctaaaagaaataactgtctgatagacagttaactgttatgtaacacatgg

SEQ ID NO: 58805 - protein, 258 aa, Glycine max
  peptide (1)..(258): Ceres Seq. ID no. 15176888
  misc_feature (44)..(247): Pfam Name: Pyridoxal-dependent decarboxylase conserved domain Pfam Description: Pyridoxal-dependent decarboxylase conserved
  misc_feature (1)..(247): Homolog of NCBI NO: 1174828 NR Description: TYROSINE DECARBOXYLASE 2
  misc_feature (9)..(247): Homolog of NCBI NO: 3282527 NR Description: tyrosine/dopa decarboxylase [Papaver somniferum]
  misc_feature (9)..(247): Homolog of NCBI NO: 3282523 NR Description: tyrosine/dopa decarboxylase [Papaver somniferum]
  misc_feature (9)..(247): Homolog of NCBI NO: 12620328 NR Description: tyrosine/dopa decarboxylase [Thalictrum flavum
  misc_feature (7)..(247): Homolog of NCBI NO: 15235393 NR Description: aromatic amino-acid decarboxylase - like protein
  misc_feature (4)..(247): Homolog of NCBI NO: 33147039 NR Description: putative tyrosine decarboxylase
  misc_feature (10)..(247): Homolog of NCBI NO: 25290992 NR Description: probable tyrosine decarboxylase [imported] -
  misc_feature (1)..(247): Homolog of NCBI NO: 30680963 NR Description: tyrosine decarboxylase -related [Arabidopsis
  misc_feature (1)..(247): Homolog of NCBI NO: 5911780 NR Description: tyrosine decarboxylase [Arabidopsis thaliana]
  misc_feature (1)..(247): Homolog of NCBI NO: 5911778 NR Description: tyrosine decarboxylase [Arabidopsis thaliana]
MEEESALRPMDAEQLREQAHKMVDFIADYYKTIEDFPVLSQVQPGYLGKLLPDSAPDSPESLQNVLDDVQEKILPGVTHWQSPNYFAYFPSNSSIAGFLGEMLSAGLNIVGFSWITSPAAIELETIVLDWLAKAFQLPDYFYSSGKGGGVIQGTASEAVLVVLLAARDKILRRVGRNALPKLVMYASDQTHSALLKACQIAGINPELCRLLKTDSSTNYALSPDVLSEAISNDIAGGLVPFFLCATVRIEGLYEFVNL

SEQ ID NO: 58806 - protein, 249 aa, Glycine max
  peptide (1)..(249): Ceres Seq. ID no. 15176889
  misc_feature (35)..(238): Pfam Name: Pyridoxal-dependent decarboxylase conserved domain Pfam Description: Pyridoxal-dependent decarboxylase conserved
  misc_feature (1)..(238): Homolog of NCBI NO: 1174828 NR Description: TYROSINE DECARBOXYLASE 2
  misc_feature (1)..(238): Homolog of NCBI NO: 3282527 NR Description: tyrosine/dopa decarboxylase [Papaver somniferum]
  misc_feature (1)..(238): Homolog of NCBI NO: 3282523 NR Description: tyrosine/dopa decarboxylase [Papaver somniferum]
  misc_feature (1)..(238): Homolog of NCBI NO: 12620328 NR Description: tyrosine/dopa decarboxylase [Thalictrum flavum
  misc_feature (1)..(238): Homolog of NCBI NO: 15235393 NR Description: aromatic amino-acid decarboxylase - like protein
  misc_feature (1)..(238): Homolog of NCBI NO: 33147039 NR Description: putative tyrosine decarboxylase
  misc_feature (1)..(238): Homolog of NCBI NO: 25290992 NR Description: probable tyrosine decarboxylase [imported] -
  misc_feature (1)..(238): Homolog of NCBI NO: 5911780 NR Description: tyrosine decarboxylase [Arabidopsis thaliana]
  misc_feature (1)..(238): Homolog of NCBI NO: 30680963 NR Description: tyrosine decarboxylase -related [Arabidopsis
  misc_feature (1)..(238): Homolog of NCBI NO: 5911778 NR Description: tyrosine decarboxylase [Arabidopsis thaliana]
MDAEQLREQAHKMVDFIADYYKTIEDFPVLSQVQPGYLGKLLPDSAPDSPESLQNVLDDVQEKILPGVTHWQSPNYFAYFPSNSSIAGFLGEMLSAGLNIVGFSWITSPAAIELETIVLDWLAKAFQLPDYFYSSGKGGGVIQGTASEAVLVVLLAARDKILRRVGRNALPKLVMYASDQTHSALLKACQIAGINPELCRLLKTDSSTNYALSPDVLSEAISNDIAGGLVPFFLCATVRIEGLYEFVNL

SEQ ID NO: 58807 - protein, 237 aa, Glycine max
  peptide (1)..(237): Ceres Seq. ID no. 15176890
  misc_feature (23)..(226): Pfam Name: Pyridoxal-dependent decarboxylase conserved domain Pfam Description: Pyridoxal-dependent decarboxylase conserved
  misc_feature (1)..(226): Homolog of NCBI NO: 1174828 NR Description: TYROSINE DECARBOXYLASE 2
  misc_feature (1)..(226): Homolog of NCBI NO: 3282527 NR Description: tyrosine/dopa decarboxylase [Papaver somniferum]
  misc_feature (1)..(226): Homolog of NCBI NO: 3282523 NR Description: tyrosine/dopa decarboxylase [Papaver somniferum]
  misc_feature (1)..(226): Homolog of NCBI NO: 12620328 NR Description: tyrosine/dopa decarboxylase [Thalictrum flavum
  misc_feature (1)..(226): Homolog of NCBI NO: 15235393 NR Description: aromatic amino-acid decarboxylase - like protein
  misc_feature (1)..(226): Homolog of NCBI NO: 33147039 NR Description: putative tyrosine decarboxylase
  misc_feature (1)..(226): Homolog of NCBI NO: 25290992 NR Description: probable tyrosine decarboxylase [imported] -
  misc_feature (1)..(226): Homolog of NCBI NO: 30680963 NR Description: tyrosine decarboxylase -related [Arabidopsis
  misc_feature (1)..(226): Homolog of NCBI NO: 5911780 NR Description: tyrosine decarboxylase [Arabidopsis thaliana]
  misc_feature (1)..(226): Homolog of NCBI NO: 5911778 NR Description: tyrosine decarboxylase [Arabidopsis thaliana]
MVDFIADYYKTIEDFPVLSQVQPGYLGKLLPDSAPDSPESLQNVLDDVQEKILPGVTHWQSPNYFAYFPSNSSIAGFLGEMLSAGLNIVGFSWITSPAAIELETIVLDWLAKAFQLPDYFYSSGKGGGVIQGTASEAVLVVLLAARDKILRRVGRNALPKLVMYASDQTHSALLKACQIAGINPELCRLLKTDSSTNYALSPDVLSEAISNDIAGGLVPFFLCATVRIEGLYEFVNL

SEQ ID NO: 58808 - DNA, 1185 bp, Glycine max
  misc_feature (1)..(1185): Ceres Seq. ID no. 15224330
actacctacctacccttttgcagccacttaaacaaagtcattgacaaaagcacacaaagtctcttcccctcataaagcactgattttcacgcagaactcagctttagttcgtgcttcattaacatgggtgctggtgactactacaaaatactgaaggtgaagcatgatgccactgatgaagaagtgaagaaggcttataagaaattggcaatgaaatggcacccagataagaaccttgaagaccctcttaggaaagaagagtttgaggccaagtttaaacaagtttctgaggcctatgatgtgcttagtgacccaaagaagcgccagatctatgacttgtacggtcactatccccttaactctcaacgcttcaccaaggaatatggctatgggaacatgaaggatgcaggggtggttgaaagcagcttgctttgtacccttgaagagctttacaacggttgcaaaaagaagttgaaggtctcaaggattgttcctgatgaattcggagagttaaggtctgtagaagaaatcttgaagatagacataaagcctggttggaagaagggcacaaaaataacttttcctgggaaaggcaaccaagaaccaggatttgctccatctgatctaatttttgagttggatgagaagcctcatgctattttcaagagggatggaaatgatcttgtagtgatgcataagatattacttgtggatgctctcacaggaaagactctcaacttgactactttggatggaagagatctcacaatcaaagtggctgatattgtgaaacctggctatgagctggtggtcccaaatgaaggcatgcccatctcaaaggaacctggcaagaaaggaaacctcagaatcatgtttgatgttatgtttccatcaaggctgaccacacaacagaagtatgatctgaaaaggattctcagtgatgttgattactaagccaattaatggctgtaactatccattaacatcctctttcacatgaagatcagtttacactgtaaataacttaaaagtaattccacttatctataagaagtttgtgcatattacaaattatacctagcatagttgctactgctaccatatatgaagcatgatgtagctttgtaaacaagtctatatcaatatttttacagttttagtaattttactctgctgttttagatt

SEQ ID NO: 58809 - protein, 276 aa, Glycine max
  peptide (1)..(276): Ceres Seq. ID no. 15224331
  misc_feature (149)..(271): Pfam Name: DnaJ C terminal region Pfam Description: DnaJ C terminal region
  misc_feature (1)..(96): Homolog of NCBI NO: 15240968 NR Description: DnaJ protein family [Arabidopsis thaliana]
  misc_feature (98)..(272): Homolog of NCBI NO: 15240968 NR Description: DnaJ protein family [Arabidopsis thaliana]
  misc_feature (1)..(80): Homolog of NCBI NO: 15228294 NR Description: heat shock protein, putative [Arabidopsis
  misc_feature (88)..(274): Homolog of NCBI NO: 15228294 NR Description: heat shock protein, putative [Arabidopsis
  misc_feature (1)..(84): Homolog of NCBI NO: 15218901 NR Description: DnaJ protein family [Arabidopsis thaliana]
  misc_feature (93)..(271): Homolog of NCBI NO: 15218901 NR Description: DnaJ protein family [Arabidopsis thaliana]
  misc_feature (1)..(80): Homolog of NCBI NO: 21593202 NR Description: putative heat-shock protein [Arabidopsis thaliana]
  misc_feature (1)..(80): Homolog of NCBI NO: 15218515 NR Description: heat shock protein, putative [Arabidopsis
  misc_feature (93)..(271): Homolog of NCBI NO: 21593202 NR Description: putative heat-shock protein [Arabidopsis thaliana]
  misc_feature (93)..(271): Homolog of NCBI NO: 15218515 NR Description: heat shock protein, putative [Arabidopsis
MGAGDYYKILKVKHDATDEEVKKAYKKLAMKWHPDKNLEDPLRKEEFEAKFKQVSEAYDVLSDPKKRQIYDLYGHYPLNSQRFTKEYGYGNMKDAGVVESSLLCTLEELYNGCKKKLKVSRIVPDEFGELRSVEEILKIDIKPGWKKGTKITFPGKGNQEPGFAPSDLIFELDEKPHAIFKRDGNDLVVMHKILLVDALTGKTLNLTTLDGRDLTIKVADIVKPGYELVVPNEGMPISKEPGKKGNLRIMFDVMFPSRLTTQQKYDLKRILSDVDY

SEQ ID NO: 58810 - protein, 247 aa, Glycine max
  peptide (1)..(247): Ceres Seq. ID no. 15224332
  misc_feature (120)..(242): Pfam Name: DnaJ C terminal region Pfam Description: DnaJ C terminal region
  misc_feature (1)..(67): Homolog of NCBI NO: 15240968 NR Description: DnaJ protein family [Arabidopsis thaliana]
  misc_feature (69)..(243): Homolog of NCBI NO: 15240968 NR Description: DnaJ protein family [Arabidopsis thaliana]
  misc_feature (1)..(51): Homolog of NCBI NO: 15228294 NR Description: heat shock protein, putative [Arabidopsis
  misc_feature (59)..(245): Homolog of NCBI NO: 15228294 NR Description: heat shock protein, putative [Arabidopsis
  misc_feature (1)..(55): Homolog of NCBI NO: 15218901 NR Description: DnaJ protein family [Arabidopsis thaliana]
  misc_feature (64)..(242): Homolog of NCBI NO: 15218901 NR Description: DnaJ protein family [Arabidopsis thaliana]
  misc_feature (1)..(51): Homolog of NCBI NO: 21593202 NR Description: putative heat-shock protein [Arabidopsis thaliana]
  misc_feature (1)..(51): Homolog of NCBI NO: 15218515 NR Description: heat shock protein, putative [Arabidopsis
  misc_feature (64)..(242): Homolog of NCBI NO: 21593202 NR Description: putative heat-shock protein [Arabidopsis thaliana]
  misc_feature (64)..(242): Homolog of NCBI NO: 15218515 NR Description: heat shock protein, putative [Arabidopsis
MKWHPDKNLEDPLRKEEFEAKFKQVSEAYDVLSDPKKRQIYDLYGHYPLNSQRFTKEYGYGNMKDAGVVESSLLCTLEELYNGCKKKLKVSRIVPDEFGELRSVEEILKIDIKPGWKKGTKITFPGKGNQEPGFAPSDLIFELDEKPHAIFKRDGNDLVVMHKILLVDALTGKTLNLTTLDGRDLTIKVADIVKPGYELVVPNEGMPISKEPGKKGNLRIMFDVMFPSRLTTQQKYDLKRILSDVDY

SEQ ID NO: 58811 - protein, 185 aa, Glycine max
  peptide (1)..(185): Ceres Seq. ID no. 15224333
  misc_feature (58)..(180): Pfam Name: DnaJ C terminal region Pfam Description: DnaJ C terminal region
  misc_feature (7)..(180): Homolog of NCBI NO: 11863723 NR Description: DnaJ like protein [Lycopersicon esculentum]
  misc_feature (7)..(180): Homolog of NCBI NO: 15235310 NR Description: heat shock protein, putative [Arabidopsis
  misc_feature (7)..(180): Homolog of NCBI NO: 34905276 NR Description: putative heat shock protein
  misc_feature (7)..(180): Homolog of NCBI NO: 6179940 NR Description: DnaJ-like protein [Nicotiana tabacum]
  misc_feature (1)..(180): Homolog of NCBI NO: 15225377 NR Description: heat shock protein, putative [Arabidopsis
  misc_feature (7)..(181): Homolog of NCBI NO: 15240968 NR Description: DnaJ protein family [Arabidopsis thaliana]
  misc_feature (1)..(183): Homolog of NCBI NO: 15228294 NR Description: heat shock protein, putative [Arabidopsis
  misc_feature (2)..(180): Homolog of NCBI NO: 15218901 NR Description: DnaJ protein family [Arabidopsis thaliana]
  misc_feature (2)..(180): Homolog of NCBI NO: 21593202 NR Description: putative heat-shock protein [Arabidopsis thaliana]
  misc_feature (2)..(180): Homolog of NCBI NO: 15218515 NR Description: heat shock protein, putative [Arabidopsis
MKDAGVVESSLLCTLEELYNGCKKKLKVSRIVPDEFGELRSVEEILKIDIKPGWKKGTKITFPGKGNQEPGFAPSDLIFELDEKPHAIFKRDGNDLVVMHKILLVDALTGKTLNLTTLDGRDLTIKVADIVKPGYELVVPNEGMPISKEPGKKGNLRIMFDVMFPSRLTTQQKYDLKRILSDVDY

SEQ ID NO: 58812 - DNA, 1191 bp, Glycine max
  misc_feature (1)..(1191): Ceres Seq. ID no. 14306381
aatacgaaattctttgaaaaagaattgtaaccgttattagcaaaaagaagatgatactttttcaaatatctatttcaagctatagtttagattcttattccatcattaatttccacttatgccttgtagatttatcctattttgcttatcaaggcttcaagcctatttacttggtattttatttttatgttctgttttatatccctatctactcacttgtgatattttctttgacttccatacaccagatcaaattttcttggtacaaagttcattatatacgatacacagcctccatactcttctgcccatatatgccctcctgggactgggaagacgagccgcagattttattccaaaaaggtctcgcctaaggtcccatctgggagttacaacatagctcaggtaacatatgaattaaatgtgcttgggactcgaggaccaagaaagatgcactgcgttatgcattcaataccagcttcagcactagatgcaggtggcactgttcctggccagccagagcttcttccccgttccctggaggactcgtttcggagcatctcgttttcaaagtctctagatcattctattgagttcagcagttcgcgattttctgagattggggaatcctgcatcgaagatgatgatggcaagatgagacccttggttctgaaaaacaagcttccaagatggcatgaacagttacaatgttggtgccttaatttccgtggacgagtaacagttgcgtctgttaaaaactttcagttgattgctgccacccaaccagctgctggtgcacctacaccatctcaaccagctccaccggagcacgataagatcattcttcagtttggcaaagttgggaaggacatgttcaccatggattatcggtaccctttatctgcattccaagcttttgcaatatgcttgagcagctttgacaccaaattggcttgtgaataagataaatcatgaatcagaagggttataagtgagctaatgaaacaatgatgttgatggtatatttccctttgtttttcttttcttttcctattttcattatcagtatcatgggagtaggcaattgttgttactcagcttttgtatgactaaattgtaaccgtagtgcatctctgatgtaataggattttagagcatttttaacatacaatgttgctatgtttctttctc

SEQ ID NO: 58813 - protein, 170 aa, Glycine max
  peptide (1)..(170): Ceres Seq. ID no. 14306382
  misc_feature (1)..(170): Pfam Name: Tub family Pfam Description: Tub family
  misc_feature (1)..(170): Homolog of NCBI NO: 15223772 NR Description: F-box containing tubby family protein
  misc_feature (1)..(157): Homolog of NCBI NO: 28188615 NR Description: unknown protein [Arabidopsis thaliana]
  misc_feature (1)..(157): Homolog of NCBI NO: 28188613 NR Description: unknown protein [Arabidopsis thaliana]
  misc_feature (1)..(157): Homolog of NCBI NO: 28188595 NR Description: unknown protein [Arabidopsis thaliana]
  misc_feature (110)..(170): Homolog of NCBI NO: 32480039 NR Description: OSJNBa0039K24.2 [Oryza sativa (japonica
  misc_feature (1)..(121): Homolog of NCBI NO: 32480039 NR Description: OSJNBa0039K24.2 [Oryza sativa (japonica
  misc_feature (110)..(170): Homolog of NCBI NO: 5777631 NR Description: CAA303719.1 protein [Oryza sativa]
  misc_feature (1)..(121): Homolog of NCBI NO: 5777631 NR Description: CAA303719.1 protein [Oryza sativa]
  misc_feature (1)..(170): Homolog of NCBI NO: 25082857 NR Description: unknown protein [Arabidopsis thaliana]
  misc_feature (1)..(170): Homolog of NCBI NO: 15222543 NR Description: F-box containing tubby family protein
MHCVMHSIPASALDAGGTVPGQPELLPRSLEDSFRSISFSKSLDHSIEFSSSRFSEIGESCIEDDDGKMRPLVLKNKLPRWHEQLQCWCLNFRGRVTVASVKNFQLIAATQPAAGAPTPSQPAPPEHDKIILQFGKVGKDMFTMDYRYPLSAFQAFAICLSSFDTKLACE

SEQ ID NO: 58814 - protein, 166 aa, Glycine max
  peptide (1)..(166): Ceres Seq. ID no. 14306383
  misc_feature (1)..(166): Pfam Name: Tub family Pfam Description: Tub family
  misc_feature (1)..(166): Homolog of NCBI NO: 15223772 NR Description: F-box containing tubby family protein
  misc_feature (1)..(153): Homolog of NCBI NO: 28188615 NR Description: unknown protein [Arabidopsis thaliana]
  misc_feature (1)..(153): Homolog of NCBI NO: 28188613 NR Description: unknown protein [Arabidopsis thaliana]
  misc_feature (1)..(153): Homolog of NCBI NO: 28188595 NR Description: unknown protein [Arabidopsis thaliana]
  misc_feature (106)..(166): Homolog of NCBI NO: 32480039 NR Description: OSJNBa0039K24.2 [Oryza sativa (japonica
  misc_feature (1)..(117): Homolog of NCBI NO: 32480039 NR Description: OSJNBa0039K24.2 [Oryza sativa (japonica
  misc_feature (106)..(166): Homolog of NCBI NO: 5777631 NR Description: CAA303719.1 protein [Oryza sativa]
  misc_feature (1)..(117): Homolog of NCBI NO: 5777631 NR Description: CAA303719.1 protein [Oryza sativa]
  misc_feature (1)..(166): Homolog of NCBI NO: 25082857 NR Description: unknown protein [Arabidopsis thaliana]
  misc_feature (1)..(166): Homolog of NCBI NO: 15222543 NR Description: F-box containing tubby family protein
MHSIPASALDAGGTVPGQPELLPRSLEDSFRSISFSKSLDHSIEFSSSRFSEIGESCIEDDDGKMRPLVLKNKLPRWHEQLQCWCLNFRGRVTVASVKNFQLIAATQPAAGAPTPSQPAPPEHDKIILQFGKVGKDMFTMDYRYPLSAFQAFAICLSSFDTKLACE

SEQ ID NO: 58815 - protein, 107 aa, Glycine max
  peptide (1)..(107): Ceres Seq. ID no. 14306384
MILFQISISSYSLDSYSIINFHLCLVDLSYFAYQGFKPIYLVFYFYVLFYIPIYSLVIFSLTSIHQIKFSWYKVHYIRYTASILFCPYMPSWDWEDEPQILFQKGLA

SEQ ID NO: 58816 - DNA, 1319 bp, Glycine max
  misc_feature (1)..(1319): Ceres Seq. ID no. 13523550
ttttattatgcatggtcactgatactaacatccaacacttggtgccctaggttcttatttgccaaatgcttcatggcacaataggaaaatccaaaaagaatataattttttgaggtttcggtggccaagtttgaaccaccattacaaaagcattgaaggagggtgtacatgtaaaaaatgtaatataaaatttgttgtgaaagcgacctctgaaaaatcttttgagtctgaacctcaagcttttgatccaaaaagcattttggactctgtcaagaattccttggatgctttctacaggttttccagacctcacacagttattggcacagcattaagcataatttctgtgtccctccttgctgttgagaaaatatcagatatatctccattattttttactggtgtgttggaggctgtggttgctgccctgtttatgaatatttatattgttggtttgaatcaattgtctgatgttgaaatagacaagataaacaagccgtatcttccattagcatctggggaatattcctttgaaactggtgtcactattgttgcatctttttcaattctgagtttttggcttggctgggttgtaggttcatggccattattttgggccctttttgtaagctttgtgctaggaactgcttattcaatcaatgtgcctctgttgagatggaagaggtttgcagtgcttgcagcgatgtgcattctagctgttcgggcagtaatagttcaacttgcatttttccttcacatccagactcatgtatacaagaggccacctgtcttttcaagatcattgatttttgctactgcattcatgagcttcttctctgtagttatagcactgtttaaggatatacctgacattgaaggagataaagtatttggcatccaatctttttcagtgcgtttaggtcagaagccggtattctggacttgtgttatccttcttgaaatagcttatggagtcgccctcctggtgggagctgcatctccttgtctttggagcaaaattgtcacgggtctgggacacgctgttctggcttcaattctctggtttcatgccaaatctgtagatttgaawgyttaagcwaaagcttcgataacatccttctatatgtttatttggaagctattttatgcagaatacttactcattccttttgttagatgaggatgcagcggcaatattgacttgagaattagttttgtttaaatggtgctgcctttgtcacaggccggcttggagtcgctacattagttttaagtttttaattgctaatttaaawgaagawatatttcttttkggatgg

SEQ ID NO: 58817 - protein, 220 aa, Glycine max
  peptide (1)..(220): Ceres Seq. ID no. 15222846
  misc_feature (1)..(220): Pfam Name: UbiA prenyltransferase family Pfam Description: UbiA prenyltransferase family
  misc_feature (1)..(220): Homolog of NCBI NO: 37519852 NR Description: unknown protein [Gloeobacter violaceus]
  misc_feature (1)..(220): Homolog of NCBI NO: 17230940 NR Description: hypothetical protein [Nostoc sp. PCC 7120]
  misc_feature (1)..(220): Homolog of NCBI NO: 16330366 NR Description: unknown protein [Synechocystis sp. PCC 6803]
  misc_feature (1)..(220): Homolog of NCBI NO: 23125851 NR Description: hypothetical protein [Nostoc punctiforme]
  misc_feature (125)..(220): Homolog of NCBI NO: 7485781 NR Description: hypothetical protein F19F24.15 - Arabidopsis
  misc_feature (1)..(78): Homolog of NCBI NO: 7485781 NR Description: hypothetical protein F19F24.15 - Arabidopsis
  misc_feature (1)..(220): Homolog of NCBI NO: 33391144 NR Description: homogentisic acid geranylgeranyl transferase
  misc_feature (1)..(220): Homolog of NCBI NO: 33391142 NR Description: homogentisic acid geranylgeranyl transferase
  misc_feature (1)..(220): Homolog of NCBI NO: 33391138 NR Description: homogentisic acid geranylgeranyl transferase
  misc_feature (1)..(220): Homolog of NCBI NO: 30680535 NR Description: tocopherol polyprenyltransferase (homogentisate
  misc_feature (219)..(219): Xaa is any aa, unknown or other
  misc_feature (220)..(220): Xaa is any aa, unknown or other
MNIYIVGLNQLSDVEIDKINKPYLPLASGEYSFETGVTIVASFSILSFWLGWVVGSWPLFWALFVSFVLGTAYSINVPLLRWKRFAVLAAMCILAVRAVIVQLAFFLHIQTHVYKRPPVFSRSLIFATAFMSFFSVVIALFKDIPDIEGDKVFGIQSFSVRLGQKPVFWTCVILLEIAYGVALLVGAASPCLWSKIVTGLGHAVLASILWFHAKSVDLXX

SEQ ID NO: 58818 - protein, 130 aa, Glycine max
  peptide (1)..(130): Ceres Seq. ID no. 15222847
  misc_feature (1)..(130): Pfam Name: UbiA prenyltransferase family Pfam Description: UbiA prenyltransferase family
  misc_feature (1)..(17): Homolog of NCBI NO: 23039416 NR Description: hypothetical protein [Trichodesmium erythraeum
  misc_feature (1)..(130): Homolog of NCBI NO: 37519852 NR Description: unknown protein [Gloeobacter violaceus]
  misc_feature (1)..(130): Homolog of NCBI NO: 17230940 NR Description: hypothetical protein [Nostoc sp. PCC 7120]
  misc_feature (1)..(130): Homolog of NCBI NO: 16330366 NR Description: unknown protein [Synechocystis sp. PCC 6803]
  misc_feature (1)..(130): Homolog of NCBI NO: 23125851 NR Description: hypothetical protein [Nostoc punctiforme]
  misc_feature (35)..(130): Homolog of NCBI NO: 7485781 NR Description: hypothetical protein F19F24.15 - Arabidopsis
  misc_feature (1)..(130): Homolog of NCBI NO: 33391144 NR Description: homogentisic acid geranylgeranyl transferase
  misc_feature (1)..(130): Homolog of NCBI NO: 33391142 NR Description: homogentisic acid geranylgeranyl transferase
  misc_feature (1)..(130): Homolog of NCBI NO: 33391138 NR Description: homogentisic acid geranylgeranyl transferase
  misc_feature (1)..(130): Homolog of NCBI NO: 30680535 NR Description: tocopherol polyprenyltransferase (homogentisate
  misc_feature (129)..(129): Xaa is any aa, unknown or other
  misc_feature (130)..(130): Xaa is any aa, unknown or other
MCILAVRAVIVQLAFFLHIQTHVYKRPPVFSRSLIFATAFMSFFSVVIALFKDIPDIEGDKVFGIQSFSVRLGQKPVFWTCVILLEIAYGVALLVGAASPCLWSKIVTGLGHAVLASILWFHAKSVDLXX

SEQ ID NO: 58819 - DNA, 1248 bp, Glycine max
  misc_feature (1)..(1248): Ceres Seq. ID no. 15175949
aaaaacaccatcagcatcttcactcaccacgaaggttccgttctctgtggatctatatctctagggcacgttacgtggaaggaagctcttcaccgacttcaatcgaagaagatggattacagtgctggttcgagtctgtttccgttgcaccgttgcaaaaccattcacctggtgaggcacgcgcaggggattcacaatgtggagggtgacaaaaactacaaagcctacatgaaccccgattacttcgatgctcatctcactcccttgggatggcaacaggttgacaatttgcgtaagcatgttcgcgactctggccttatcaacaccattgatctagtcattgcatcttctctgatgaggactctacaaacatctgttggcgtatttggaggtgagggctacacagataaaacagacgtccttcctcttatggttgcaaatgcaggaaatagctaccgtgctgcaatttcaagtctaaattccccaccaattgttactgttgaactttgtcgtgaacatttgggagttcatccctgtgacagaagaagaagtgttagcgagtatcaatttctttttcccgctgttgatttttcactgttagatagtgatgaggatacctggtggaaggccaatgttagagagacaaaggaagaacttgcagctagggggatgaagttccttaactggttgtggacacgaaaagagaaggagatagcaattgtgacacatagtggattcttgtttcatactctgaatgcctttggaagtgattgccaccccttggtaaagaaagaaatatccaagcactttgctaattgtgaacttcgctccatggtcattgtggatagaggtatgataggattggaacaatcaaccactaactatccaggcaagataccttcagggctggacctccctagtgatgttgcagatgagaagtctgagaaataatggatttggcttcttctacttgtttgtatgtgttcaggaccattcaagcattggttcttctatttgaagttcactattacaaaatctaacatgattatgtcagattatacaaactgtgctgattctgtcttgaaatttatcaattattgtctgcagaaaatatttgttaacaattataaccttgttggaaatcagatgacccatgtgtggcaacacagtcacaaaacacttctgtttgttgatggaacagtttcggaagaggattggttgcctcactcgtgtcacaaattcattgtt

SEQ ID NO: 58820 - protein, 316 aa, Glycine max
  peptide (1)..(316): Ceres Seq. ID no. 15175950
  misc_feature (53)..(291): Pfam Name: Phosphoglycerate mutase family Pfam Description: Phosphoglycerate mutase family
  misc_feature (38)..(316): Homolog of NCBI NO: 15237708 NR Description: ZW10-related protein [Arabidopsis thaliana]
KNTISIFTHHEGSVLCGSISLGHVTWKEALHRLQSKKMDYSAGSSLFPLHRCKTIHLVRHAQGIHNVEGDKNYKAYMNPDYFDAHLTPLGWQQVDNLRKHVRDSGLINTIDLVIASSLMRTLQTSVGVFGGEGYTDKTDVLPLMVANAGNSYRAAISSLNSPPIVTVELCREHLGVHPCDRRRSVSEYQFLFPAVDFSLLDSDEDTWWKANVRETKEELAARGMKFLNWLWTRKEKEIAIVTHSGFLFHTLNAFGSDCHPLVKKEISKHFANCELRSMVIVDRGMIGLEQSTTNYPGKIPSGLDLPSDVADEKSEK

SEQ ID NO: 58821 - protein, 279 aa, Glycine max
  peptide (1)..(279): Ceres Seq. ID no. 15175951
  misc_feature (16)..(254): Pfam Name: Phosphoglycerate mutase family Pfam Description: Phosphoglycerate mutase family
  misc_feature (1)..(279): Homolog of NCBI NO: 15237708 NR Description: ZW10-related protein [Arabidopsis thaliana]
MDYSAGSSLFPLHRCKTIHLVRHAQGIHNVEGDKNYKAYMNPDYFDAHLTPLGWQQVDNLRKHVRDSGLINTIDLVIASSLMRTLQTSVGVFGGEGYTDKTDVLPLMVANAGNSYRAAISSLNSPPIVTVELCREHLGVHPCDRRRSVSEYQFLFPAVDFSLLDSDEDTWWKANVRETKEELAARGMKFLNWLWTRKEKEIAIVTHSGFLFHTLNAFGSDCHPLVKKEISKHFANCELRSMVIVDRGMIGLEQSTTNYPGKIPSGLDLPSDVADEKSEK

SEQ ID NO: 58822 - protein, 240 aa, Glycine max
  peptide (1)..(240): Ceres Seq. ID no. 15175952
  misc_feature (1)..(215): Pfam Name: Phosphoglycerate mutase family Pfam Description: Phosphoglycerate mutase family
  misc_feature (1)..(240): Homolog of NCBI NO: 15237708 NR Description: ZW10-related protein [Arabidopsis thaliana]
MNPDYFDAHLTPLGWQQVDNLRKHVRDSGLINTIDLVIASSLMRTLQTSVGVFGGEGYTDKTDVLPLMVANAGNSYRAAISSLNSPPIVTVELCREHLGVHPCDRRRSVSEYQFLFPAVDFSLLDSDEDTWWKANVRETKEELAARGMKFLNWLWTRKEKEIAIVTHSGFLFHTLNAFGSDCHPLVKKEISKHFANCELRSMVIVDRGMIGLEQSTTNYPGKIPSGLDLPSDVADEKSEK

SEQ ID NO: 58823 - DNA, 1591 bp, Glycine max
  misc_feature (1)..(1591): Ceres Seq. ID no. 15177969
gaatgaacaaagagcccatttatgtcttcaatgtagaaacttgatttggacaagctcaagagcattccatcagtgtcttgagctccaaatggagaacacctggatcctgacttttcaccttctcctcctcctgctccatccaaatgcagcaaaaggggccattggtgttggtgttggtgttggtggcagaggtggcataggtgttggcattggcattgggggcagtgttaacaccccagggccctctggatcaaacctcaagagtgccttcacagcactccaggcatggaaatctgccatgaccgatgacccattgaagattctggatacttgggttggtcccaatgtgtgttcctacagaggtgtcttctgtgcaaactctcaggatgataatggaattgtcacaacagcagcaactgagtcttctattgttgcaggaatagatctcaaccatgcaaacctccaagggacccttgtcaaagatctctctttgctctctgacatcactcttttccatctcaacagtaacaggttttctggctcactccctgacacattcagggacctcacttcactccaagagttggacctcagcaacaaccagctctcaggccctttccccatggtcactctctccatgccaagcctcatctacttggacctcagattcaacaacttctcaggccaacttcctgatcaactcttcaacaagaaacttgatgctatattcctcaacaacaacaactttggaggtgaaattccagacagtttgggaaattcacctgcctcagtcatcaacttggccaacaacaagttgagtggaagcatccctttcagctttggcttcatgggttcaggactgaaggagattctcttccttaacaaccagttaacaggttgcattccacaaggagtagggatcttcactgagatgcaagtttttgatgtgagcttcaactcactcatgggccatttgcctgacactatgagttgcttgcaagacatagaggttcttaatttggcacataacaagctttctggggagttatccgatgtggtatgctctttgagaagcctattaaatctaactgttgcttacaacttcttctctgggctgagccaggaatgttcaaggctattcagtgtggggtttgatttctcggataattgtattcctggaagggatatgcaaagaccccaaccggactgctctataatccctggtggtagtctcaattgtcttagaattcctactccaaaacctcttgtttgcgctgctctggctgcaactttgtctaagcacacaaattcacgttccttttctccctgatgctgggtggctactacagcttggttagttggtcgtggcttttacattaattaatgctgctatcaatttaattcatatatagtcacagtcacagctttctgctaattttattcgatcttcatggattcggtattcttggcccgcacggataagatgtgccttgatttgagaaacttctatgatggtgttaacaaacaagataatttatgtgtctcgtggcatgcttgcttgcttcatttgattgccactggtttttacttc

SEQ ID NO: 58824 - protein, 442 aa, Glycine max
  peptide (1)..(442): Ceres Seq. ID no. 15177970
  misc_feature (75)..(413): Homolog of NCBI NO: 15222149 NR Description: leucine-rich repeat extensin family [Arabidopsis
  misc_feature (82)..(413): Homolog of NCBI NO: 30685162 NR Description: leucine-rich repeat extensin family [Arabidopsis
  misc_feature (82)..(413): Homolog of NCBI NO: 20259488 NR Description: unknown protein [Arabidopsis thaliana]
  misc_feature (84)..(413): Homolog of NCBI NO: 5917664 NR Description: extensin-like protein [Lycopersicon esculentum]
  misc_feature (61)..(413): Homolog of NCBI NO: 34912294 NR Description: putative extensin-like protein
  misc_feature (86)..(425): Homolog of NCBI NO: 15230120 NR Description: leucine-rich repeat extensin family [Arabidopsis
  misc_feature (68)..(427): Homolog of NCBI NO: 15235668 NR Description: leucine-rich repeat extensin family [Arabidopsis
  misc_feature (79)..(421): Homolog of NCBI NO: 15228861 NR Description: leucine-rich repeat extensin family [Arabidopsis
  misc_feature (38)..(431): Homolog of NCBI NO: 15224840 NR Description: leucine rich repeat protein family [Arabidopsis
  misc_feature (32)..(436): Homolog of NCBI NO: 15233499 NR Description: extensin-related protein [Arabidopsis thaliana]
NEQRAHLCLQCRNLIWTSSRAFHQCLELQMENTWILTFHLLLLLLHPNAAKGAIGVGVGVGGRGGIGVGIGIGGSVNTPGPSGSNLKSAFTALQAWKSAMTDDPLKILDTWVGPNVCSYRGVFCANSQDDNGIVTTAATESSIVAGIDLNHANLQGTLVKDLSLLSDITLFHLNSNRFSGSLPDTFRDLTSLQELDLSNNQLSGPFPMVTLSMPSLIYLDLRFNNFSGQLPDQLFNKKLDAIFLNNNNFGGEIPDSLGNSPASVINLANNKLSGSIPFSFGFMGSGLKEILFLNNQLTGCIPQGVGIFTEMQVFDVSFNSLMGHLPDTMSCLQDIEVLNLAHNKLSGELSDVVCSLRSLLNLTVAYNFFSGLSQECSRLFSVGFDFSDNCIPGRDMQRPQPDCSIIPGGSLNCLRIPTPKPLVCAALAATLSKHTNSRSFSP

SEQ ID NO: 58825 - protein, 413 aa, Glycine max
  peptide (1)..(413): Ceres Seq. ID no. 15177971
  misc_feature (46)..(384): Homolog of NCBI NO: 15222149 NR Description: leucine-rich repeat extensin family [Arabidopsis
  misc_feature (53)..(384): Homolog of NCBI NO: 30685162 NR Description: leucine-rich repeat extensin family [Arabidopsis
  misc_feature (53)..(384): Homolog of NCBI NO: 20259488 NR Description: unknown protein [Arabidopsis thaliana]
  misc_feature (55)..(384): Homolog of NCBI NO: 5917664 NR Description: extensin-like protein [Lycopersicon esculentum]
  misc_feature (32)..(384): Homolog of NCBI NO: 34912294 NR Description: putative extensin-like protein
  misc_feature (57)..(396): Homolog of NCBI NO: 15230120 NR Description: leucine-rich repeat extensin family [Arabidopsis
  misc_feature (39)..(398): Homolog of NCBI NO: 15235668 NR Description: leucine-rich repeat extensin family [Arabidopsis
  misc_feature (50)..(392): Homolog of NCBI NO: 15228861 NR Description: leucine-rich repeat extensin family [Arabidopsis
  misc_feature (9)..(402): Homolog of NCBI NO: 15224840 NR Description: leucine rich repeat protein family [Arabidopsis
  misc_feature (3)..(407): Homolog of NCBI NO: 15233499 NR Description: extensin-related protein [Arabidopsis thaliana]
MENTWILTFHLLLLLLHPNAAKGAIGVGVGVGGRGGIGVGIGIGGSVNTPGPSGSNLKSAFTALQAWKSAMTDDPLKILDTWVGPNVCSYRGVFCANSQDDNGIVTTAATESSIVAGIDLNHANLQGTLVKDLSLLSDITLFHLNSNRFSGSLPDTFRDLTSLQELDLSNNQLSGPFPMVTLSMPSLIYLDLRFNNFSGQLPDQLFNKKLDAIFLNNNNFGGEIPDSLGNSPASVINLANNKLSGSIPFSFGFMGSGLKEILFLNNQLTGCIPQGVGIFTEMQVFDVSFNSLMGHLPDTMSCLQDIEVLNLAHNKLSGELSDVVCSLRSLLNLTVAYNFFSGLSQECSRLFSVGFDFSDNCIPGRDMQRPQPDCSIIPGGSLNCLRIPTPKPLVCAALAATLSKHTNSRSFSP

SEQ ID NO: 58826 - protein, 343 aa, Glycine max
  peptide (1)..(343): Ceres Seq. ID no. 15177972
  misc_feature (1)..(314): Homolog of NCBI NO: 15222149 NR Description: leucine-rich repeat extensin family [Arabidopsis
  misc_feature (1)..(314): Homolog of NCBI NO: 30685162 NR Description: leucine-rich repeat extensin family [Arabidopsis
  misc_feature (1)..(314): Homolog of NCBI NO: 20259488 NR Description: unknown protein [Arabidopsis thaliana]
  misc_feature (1)..(314): Homolog of NCBI NO: 5917664 NR Description: extensin-like protein [Lycopersicon esculentum]
  misc_feature (1)..(314): Homolog of NCBI NO: 34912294 NR Description: putative extensin-like protein
  misc_feature (1)..(326): Homolog of NCBI NO: 15230120 NR Description: leucine-rich repeat extensin family [Arabidopsis
  misc_feature (1)..(328): Homolog of NCBI NO: 15235668 NR Description: leucine-rich repeat extensin family [Arabidopsis
  misc_feature (1)..(322): Homolog of NCBI NO: 15228861 NR Description: leucine-rich repeat extensin family [Arabidopsis
  misc_feature (1)..(332): Homolog of NCBI NO: 15224840 NR Description: leucine rich repeat protein family [Arabidopsis
  misc_feature (1)..(337): Homolog of NCBI NO: 15233499 NR Description: extensin-related protein [Arabidopsis thaliana]
MTDDPLKILDTWVGPNVCSYRGVFCANSQDDNGIVTTAATESSIVAGIDLNHANLQGTLVKDLSLLSDITLFHLNSNRFSGSLPDTFRDLTSLQELDLSNNQLSGPFPMVTLSMPSLIYLDLRFNNFSGQLPDQLFNKKLDAIFLNNNNFGGEIPDSLGNSPASVINLANNKLSGSIPFSFGFMGSGLKEILFLNNQLTGCIPQGVGIFTEMQVFDVSFNSLMGHLPDTMSCLQDIEVLNLAHNKLSGELSDVVCSLRSLLNLTVAYNFFSGLSQECSRLFSVGFDFSDNCIPGRDMQRPQPDCSIIPGGSLNCLRIPTPKPLVCAALAATLSKHTNSRSFSP

SEQ ID NO: 58827 - DNA, 1116 bp, Glycine max
  misc_feature (1)..(1116): Ceres Seq. ID no. 13594100
tttgaattttattagaatatggaaattgagcattatggttagtgccaaaatgatatgaaaatttagaattgagactgtacaactcctttgcagtttggttatttctgtgttctgtctcaatttgaatatgcagagtgtggaaaacggacatggtttggggacaaaagagaggaacaagctccaattgagtcaaatgaatttcttccaaggttaaggaggcaaaagtcagtaacttctaggtctcagtatataaacaaaaaggaactaagagtttgtgttggaacatggaatgttggaggaaagcttccacctgatgacctagatattgaggggggggggggcattaacgagctagctgatatctatgttcttagtcttcaggagattgtaccattaaatccgggtaacattttttgtgttgaagacactcgaccgagacagaaatgggaaaacattattcgagatgcacttaatagagttagatcaaaagcaccaaagatgaaatccttcagtgatcccccatcaccatcaaaatttaagccatcaaatgatgcgccagacatagaagaagaaacattacttgaaagtgatggtgatattggtgaggaagtccatcctttggatgaagaacacaatgtttatgatggaggtgcaaataaaccaaccacatatgaagaagccttgaatactaattttcaggcttcagatgttgttgatattgccaacacaaaagagccaataggcaatgatttaaagagacagatttatgatggaaagaggtgatgccttggctgtattgaagaatagtatgagtgaccctaacaatgttcttcaaagttggaattgtacccttgtcactccttgcacatggtttcatgttaattgcaacagtgaaaatagcgtgacccgtgttgatcttggaaatgcaaacctttcgggtcatcttgttccacagcttggtcagctcctaattttggaatgcttgtaagttacaaaacagatatgacattattggctcaaatatgcttaattttactagtaattcttgattgttggctgaaatagatatgaccaggcaaaggttatgctaaaagtaaatatgataacggttatttt

SEQ ID NO: 58828 - protein, 94 aa, Glycine max
  peptide (1)..(94): Ceres Seq. ID no. 13594101
  misc_feature (1)..(33): Homolog of NCBI NO: 34906250 NR Description: P0489A01.10 [Oryza sativa (japonica
  misc_feature (1)..(61): Homolog of NCBI NO: 34910610 NR Description: P0683B11.14 [Oryza sativa (japonica
  misc_feature (1)..(88): Homolog of NCBI NO: 18399139 NR Description: inositol polyphosphate 5-phosphatase II, putative
  misc_feature (1)..(88): Homolog of NCBI NO: 10444261 NR Description: inositol polyphosphate 5-phosphatase I
  misc_feature (1)..(88): Homolog of NCBI NO: 4204695 NR Description: putative inositol polyphosphate 5-phosphatase
  misc_feature (1)..(88): Homolog of NCBI NO: 30693006 NR Description: inositol polyphosphate 5-phosphatase I (IP5PI)
  misc_feature (1)..(44): Homolog of NCBI NO: 12323727 NR Description: putative inositol polyphosphate phosphatase, 5'
  misc_feature (1)..(44): Homolog of NCBI NO: 15081807 NR Description: At1g71710/F14O23_9 [Arabidopsis thaliana]
  misc_feature (1)..(44): Homolog of NCBI NO: 25352249 NR Description: hypothetical protein F14O23.9 [imported] -
  misc_feature (1)..(44): Homolog of NCBI NO: 18409892 NR Description: inositol polyphosphate 5-phosphatase, putative
MKSFSDPPSPSKFKPSNDAPDIEEETLLESDGDIGEEVHPLDEEHNVYDGGANKPTTYEEALNTNFQASDVVDIANTKEPIGNDLKRQIYDGKR

SEQ ID NO: 58829 - protein, 73 aa, Glycine max
  peptide (1)..(73): Ceres Seq. ID no. 13594102
  misc_feature (5)..(73): Homolog of NCBI NO: 24461285 NR Description: leucine-rich repeat protein [Capsicum annuum]
  misc_feature (2)..(73): Homolog of NCBI NO: 15218543 NR Description: somatic embryogenesis receptor-related kinase
  misc_feature (5)..(73): Homolog of NCBI NO: 29468120 NR Description: leucine-rich repeat protein [Oryza sativa]
  misc_feature (5)..(73): Homolog of NCBI NO: 30385250 NR Description: leucine-rich repeat protein [x Citrofortunella
  misc_feature (5)..(73): Homolog of NCBI NO: 15242153 NR Description: leucine rich repeat protein (LRP), putative
  misc_feature (5)..(73): Homolog of NCBI NO: 15229760 NR Description: leucine rich repeat protein family [Arabidopsis
  misc_feature (5)..(73): Homolog of NCBI NO: 7489030 NR Description: leucine-rich repeat protein LRP - tomato
  misc_feature (5)..(73): Homolog of NCBI NO: 30678986 NR Description: leucine-rich repeat protein kinase family
  misc_feature (5)..(73): Homolog of NCBI NO: 18418211 NR Description: somatic embryogenesis receptor-related kinase
  misc_feature (5)..(73): Homolog of NCBI NO: 14573459 NR Description: somatic embryogenesis receptor-like kinase 3
MMERGDALAVLKNSMSDPNNVLQSWNCTLVTPCTWFHVNCNSENSVTRVDLGNANLSGHLVPQLGQLLILECL

SEQ ID NO: 58830 - protein, 72 aa, Glycine max
  peptide (1)..(72): Ceres Seq. ID no. 13594103
  misc_feature (4)..(72): Homolog of NCBI NO: 24461285 NR Description: leucine-rich repeat protein [Capsicum annuum]
  misc_feature (1)..(72): Homolog of NCBI NO: 15218543 NR Description: somatic embryogenesis receptor-related kinase
  misc_feature (4)..(72): Homolog of NCBI NO: 29468120 NR Description: leucine-rich repeat protein [Oryza sativa]
  misc_feature (4)..(72): Homolog of NCBI NO: 15242153 NR Description: leucine rich repeat protein (LRP), putative
  misc_feature (4)..(72): Homolog of NCBI NO: 30385250 NR Description: leucine-rich repeat protein [x Citrofortunella
  misc_feature (4)..(72): Homolog of NCBI NO: 15229760 NR Description: leucine rich repeat protein family [Arabidopsis
  misc_feature (4)..(72): Homolog of NCBI NO: 7489030 NR Description: leucine-rich repeat protein LRP - tomato
  misc_feature (4)..(72): Homolog of NCBI NO: 30678986 NR Description: leucine-rich repeat protein kinase family
  misc_feature (4)..(72): Homolog of NCBI NO: 18418211 NR Description: somatic embryogenesis receptor-related kinase
  misc_feature (4)..(72): Homolog of NCBI NO: 14573459 NR Description: somatic embryogenesis receptor-like kinase 3
MERGDALAVLKNSMSDPNNVLQSWNCTLVTPCTWFHVNCNSENSVTRVDLGNANLSGHLVPQLGQLLILECL

SEQ ID NO: 58831 - DNA, 1575 bp, Glycine max
  misc_feature (1)..(1575): Ceres Seq. ID no. 15226870
aaggaacctttgtttttgttgttgttgttgttgttcgtctggattgggttggctttagggctttgaatgccatctggggttttgctctcaggcaatcaagctccaaagctgacccctttctctcacttctaactcacataccttgttccattcttcactttctctctctagaactacaatggtagaagacatgtgtttcctctacaaggaaattcttgttatgaagcctccaaagagatcaccaatgttgttaaggacggcagtcataatattttcgatggtttgtggcgtttttatcttctctgtatgtctaaagcagataagcacccaagctaggactacatttatggacttcaaagtcattgacaaccattctcagagtatattgaagctaatgaatactcacctactacattatcccaaaccttcatcctttagcaggaacgagtgcgctcataatcctgtattattctttgccatattgtccaatcagagatctggtagtgggtggtttgagacccttttgaatagccacgttaatgtaagctcctatggggagatattttctgttagagagagaaggcaaaatgtttcttcaattttgctgactttagataaagtttacaatttggactggttcaatagtgcttccaagaatgagtgctctgctgcaactggtttgaagtggatgcttaatcagggattggtggagcaccataaggaaatagcagaatatttcaatcatagacgtgtttcaattatatttcttttccggagaaacttgctacgcaggatggtatcaatgctagccaattcatatgatcgttatgccaagctattgaatggaacgcacaaggctcatgtacactctgcagaagaggctgagattctttcgaagtacaagcctatcataaattctacatcattgctggatgacttgaaagatatggagatgagatctgctaaggctttagaatacttcaacagcactcggcatataattgtgtactatgaggatcttatgagaaatcacactctaaaagacgtgcaagagtttttaggattgccacagatggagttaacgagccgtcacgttaagatacatagaggaccattgtcagaccacattcagaactgggatgacgttaacaagacactgaaaggaaccatttatgagagttttcttgaagctgactattagtcgttatctcttctattctaactgctggagaaaggtgtaaataccatgccaactttgctgatcttttgccccctcaggaaagcctcagggttcaaaagttttggttttggttctggaacattacctcagtgttctgatgcctttttttgtcaccacctcgtgatcaattaacaccgttgataaatgaatgcttcttgtttctttgtagtatttttttttgttttttcttcttttttttttacctttctttagtgaacatgtatatggctttgccactaattgatttaagtaaagacgagcattgttttgttcaaaccggtgttcaatgatttgtttgtttgttcaattttaacccaatagatagataatacttg

SEQ ID NO: 58832 - protein, 340 aa, Glycine max
  peptide (1)..(340): Ceres Seq. ID no. 15226871
  misc_feature (234)..(340): Homolog of NCBI NO: 25411661 NR Description: hypothetical protein At2g15730 [imported] -
  misc_feature (90)..(308): Homolog of NCBI NO: 15229813 NR Description: expressed protein [Arabidopsis thaliana]
  misc_feature (15)..(175): Homolog of NCBI NO: 34904786 NR Description: contains ESTs
  misc_feature (149)..(340): Homolog of NCBI NO: 34904786 NR Description: contains ESTs
  misc_feature (265)..(340): Homolog of NCBI NO: 14029013 NR Description: Unknown protein [Oryza sativa]
  misc_feature (10)..(234): Homolog of NCBI NO: 14029013 NR Description: Unknown protein [Oryza sativa]
  misc_feature (15)..(340): Homolog of NCBI NO: 33146729 NR Description: unknown protein [Oryza sativa (japonica
  misc_feature (10)..(340): Homolog of NCBI NO: 29824462 NR Description: unknown protein [Oryza sativa (japonica
  misc_feature (1)..(340): Homolog of NCBI NO: 22329158 NR Description: hypothetical protein [Arabidopsis thaliana]
  misc_feature (1)..(340): Homolog of NCBI NO: 40823013 NR Description: At2g15730 [Arabidopsis thaliana]
MVEDMCFLYKEILVMKPPKRSPMLLRTAVIIFSMVCGVFIFSVCLKQISTQARTTFMDFKVIDNHSQSILKLMNTHLLHYPKPSSFSRNECAHNPVLFFAILSNQRSGSGWFETLLNSHVNVSSYGEIFSVRERRQNVSSILLTLDKVYNLDWFNSASKNECSAATGLKWMLNQGLVEHHKEIAEYFNHRRVSIIFLFRRNLLRRMVSMLANSYDRYAKLLNGTHKAHVHSAEEAEILSKYKPIINSTSLLDDLKDMEMRSAKALEYFNSTRHIIVYYEDLMRNHTLKDVQEFLGLPQMELTSRHVKIHRGPLSDHIQNWDDVNKTLKGTIYESFLEADY

SEQ ID NO: 58833 - protein, 336 aa, Glycine max
  peptide (1)..(336): Ceres Seq. ID no. 15226872
  misc_feature (230)..(336): Homolog of NCBI NO: 25411661 NR Description: hypothetical protein At2g15730 [imported] -
  misc_feature (86)..(304): Homolog of NCBI NO: 15229813 NR Description: expressed protein [Arabidopsis thaliana]
  misc_feature (11)..(171): Homolog of NCBI NO: 34904786 NR Description: contains ESTs
  misc_feature (145)..(336): Homolog of NCBI NO: 34904786 NR Description: contains ESTs
  misc_feature (261)..(336): Homolog of NCBI NO: 14029013 NR Description: Unknown protein [Oryza sativa]
  misc_feature (6)..(230): Homolog of NCBI NO: 14029013 NR Description: Unknown protein [Oryza sativa]
  misc_feature (11)..(336): Homolog of NCBI NO: 33146729 NR Description: unknown protein [Oryza sativa (japonica
  misc_feature (6)..(336): Homolog of NCBI NO: 29824462 NR Description: unknown protein [Oryza sativa (japonica
  misc_feature (1)..(336): Homolog of NCBI NO: 22329158 NR Description: hypothetical protein [Arabidopsis thaliana]
  misc_feature (1)..(336): Homolog of NCBI NO: 40823013 NR Description: At2g15730 [Arabidopsis thaliana]
MCFLYKEILVMKPPKRSPMLLRTAVIIFSMVCGVFIFSVCLKQISTQARTTFMDFKVIDNHSQSILKLMNTHLLHYPKPSSFSRNECAHNPVLFFAILSNQRSGSGWFETLLNSHVNVSSYGEIFSVRERRQNVSSILLTLDKVYNLDWFNSASKNECSAATGLKWMLNQGLVEHHKEIAEYFNHRRVSIIFLFRRNLLRRMVSMLANSYDRYAKLLNGTHKAHVHSAEEAEILSKYKPIINSTSLLDDLKDMEMRSAKALEYFNSTRHIIVYYEDLMRNHTLKDVQEFLGLPQMELTSRHVKIHRGPLSDHIQNWDDVNKTLKGTIYESFLEADY

SEQ ID NO: 58834 - protein, 326 aa, Glycine max
  peptide (1)..(326): Ceres Seq. ID no. 15226873
  misc_feature (220)..(326): Homolog of NCBI NO: 25411661 NR Description: hypothetical protein At2g15730 [imported] -
  misc_feature (76)..(294): Homolog of NCBI NO: 15229813 NR Description: expressed protein [Arabidopsis thaliana]
  misc_feature (1)..(161): Homolog of NCBI NO: 34904786 NR Description: contains ESTs
  misc_feature (135)..(326): Homolog of NCBI NO: 34904786 NR Description: contains ESTs
  misc_feature (251)..(326): Homolog of NCBI NO: 14029013 NR Description: Unknown protein [Oryza sativa]
  misc_feature (1)..(220): Homolog of NCBI NO: 14029013 NR Description: Unknown protein [Oryza sativa]
  misc_feature (1)..(326): Homolog of NCBI NO: 33146729 NR Description: unknown protein [Oryza sativa (japonica
  misc_feature (1)..(326): Homolog of NCBI NO: 29824462 NR Description: unknown protein [Oryza sativa (japonica
  misc_feature (1)..(326): Homolog of NCBI NO: 22329158 NR Description: hypothetical protein [Arabidopsis thaliana]
  misc_feature (1)..(326): Homolog of NCBI NO: 40823013 NR Description: At2g15730 [Arabidopsis thaliana]
MKPPKRSPMLLRTAVIIFSMVCGVFIFSVCLKQISTQARTTFMDFKVIDNHSQSILKLMNTHLLHYPKPSSFSRNECAHNPVLFFAILSNQRSGSGWFETLLNSHVNVSSYGEIFSVRERRQNVSSILLTLDKVYNLDWFNSASKNECSAATGLKWMLNQGLVEHHKEIAEYFNHRRVSIIFLFRRNLLRRMVSMLANSYDRYAKLLNGTHKAHVHSAEEAEILSKYKPIINSTSLLDDLKDMEMRSAKALEYFNSTRHIIVYYEDLMRNHTLKDVQEFLGLPQMELTSRHVKIHRGPLSDHIQNWDDVNKTLKGTIYESFLEADY

SEQ ID NO: 58835 - protein, 307 aa, Glycine max
  peptide (1)..(307): Ceres Seq. ID no. 15226874
  misc_feature (201)..(307): Homolog of NCBI NO: 25411661 NR Description: hypothetical protein At2g15730 [imported] -
  misc_feature (57)..(275): Homolog of NCBI NO: 15229813 NR Description: expressed protein [Arabidopsis thaliana]
  misc_feature (1)..(142): Homolog of NCBI NO: 34904786 NR Description: contains ESTs
  misc_feature (116)..(307): Homolog of NCBI NO: 34904786 NR Description: contains ESTs
  misc_feature (232)..(307): Homolog of NCBI NO: 14029013 NR Description: Unknown protein [Oryza sativa]
  misc_feature (1)..(201): Homolog of NCBI NO: 14029013 NR Description: Unknown protein [Oryza sativa]
  misc_feature (1)..(307): Homolog of NCBI NO: 33146729 NR Description: unknown protein [Oryza sativa (japonica
  misc_feature (1)..(307): Homolog of NCBI NO: 29824462 NR Description: unknown protein [Oryza sativa (japonica
  misc_feature (1)..(307): Homolog of NCBI NO: 22329158 NR Description: hypothetical protein [Arabidopsis thaliana]
  misc_feature (1)..(307): Homolog of NCBI NO: 40823013 NR Description: At2g15730 [Arabidopsis thaliana]
MVCGVFIFSVCLKQISTQARTTFMDFKVIDNHSQSILKLMNTHLLHYPKPSSFSRNECAHNPVLFFAILSNQRSGSGWFETLLNSHVNVSSYGEIFSVRERRQNVSSILLTLDKVYNLDWFNSASKNECSAATGLKWMLNQGLVEHHKEIAEYFNHRRVSIIFLFRRNLLRRMVSMLANSYDRYAKLLNGTHKAHVHSAEEAEILSKYKPIINSTSLLDDLKDMEMRSAKALEYFNSTRHIIVYYEDLMRNHTLKDVQEFLGLPQMELTSRHVKIHRGPLSDHIQNWDDVNKTLKGTIYESFLEADY

SEQ ID NO: 58836 - DNA, 1379 bp, Glycine max
  misc_feature (1)..(1379): Ceres Seq. ID no. 14312277
aaaaaccccttcccttccacatacactcttctccaatctcaccccaaaaaaacttgcaacaaaccaaaaaccatgcttgatgaatcagtctcatccaccccaacattcttgggcagcctgtacagctggttcacccccactgtcttcttcctcctcctccaactagtcattggcaccattttcatcatctcaaaccttaccaacacccacaaacaccaacaacaagaaccacaacaagcacatgactttccacaccaccatcttcccagatccccttccatgctccaaagactcaaatccatcaacttttacccttcttcccctttcagatcccaagaccttcaaaaccctcattttcacaacgctcatgaaaatgaacaacctcaacttgctagatctccctccgttctccagagactcaaatccatcaacctctacagttacttccctaccgaacccttcacttccaaactcacacccgaccagcacgtgccggagaaaccgtacgtgcgagaacaaaaccaaccgcaacaagtggtggaaacggacgaggaaaaagaagagggttatgatgactatgttgtcgaagatgacaacaacatcattatgagcacgcacaattacaattataacctcggagtctccgaagagggtggtgctggttcttcctcgctggacgagatttactgcaagctgcagcagcagggacaagagggtcatttcgagcggacgcactccgacacgaagccggcgtccggggaggttccggtgaagcttccgaggaagatgaagaagtcggcgagcagcaagtcggcgttctcgcacttcaaggaggacgacatcgtggagactcgccggccggccaccgtgagggaggccaaggtaaccggcggcgccgccgaggacgacgccgaggtggacgccaaggccgacgacttcatcaacaagttcaagcaacagctgaagctccagaggctggattccatcatcaggtacaaggaaatgattggcagagggtctgctaagtaagtactagttattaacaattattattattatcataatactatttttgttttactatgttattgataacaattatctactagttttatggatgagtaatctaattttcattggataacttaattggtcacgtctagcaggattatccgtttattacattttagtgtaatattttatttttttgttagtttttaattaggtttttttgtttctttttttgtaaaattagtgagcttttttggggggttggttatgtgaagtagggtgctgagtgtggcttgttcattttcagccactacttgtgggatgttgggaattagttgtaagttgttgctttatgttgatgactcctc

SEQ ID NO: 58837 - protein, 342 aa, Glycine max
  peptide (1)..(342): Ceres Seq. ID no. 14312278
  misc_feature (37)..(163): Homolog of NCBI NO: 14326479 NR Description: AT5g56980/MHM17_10 [Arabidopsis thaliana]
  misc_feature (240)..(336): Homolog of NCBI NO: 21592758 NR Description: unknown [Arabidopsis thaliana]
  misc_feature (37)..(163): Homolog of NCBI NO: 21592758 NR Description: unknown [Arabidopsis thaliana]
  misc_feature (243)..(336): Homolog of NCBI NO: 15236117 NR Description: uncharacterized protein [Arabidopsis thaliana]
  misc_feature (37)..(150): Homolog of NCBI NO: 15236117 NR Description: uncharacterized protein [Arabidopsis thaliana]
  misc_feature (240)..(336): Homolog of NCBI NO: 18423922 NR Description: expressed protein [Arabidopsis thaliana]
  misc_feature (37)..(163): Homolog of NCBI NO: 18423922 NR Description: expressed protein [Arabidopsis thaliana]
  misc_feature (243)..(336): Homolog of NCBI NO: 549977 NR Description: cDNA-5-encoded protein
  misc_feature (32)..(150): Homolog of NCBI NO: 549977 NR Description: cDNA-5-encoded protein
  misc_feature (122)..(342): Homolog of NCBI NO: 15225251 NR Description: expressed protein [Arabidopsis thaliana]
KNPFPSTYTLLQSHPKKTCNKPKTMLDESVSSTPTFLGSLYSWFTPTVFFLLLQLVIGTIFIISNLTNTHKHQQQEPQQAHDFPHHHLPRSPSMLQRLKSINFYPSSPFRSQDLQNPHFHNAHENEQPQLARSPSVLQRLKSINLYSYFPTEPFTSKLTPDQHVPEKPYVREQNQPQQVVETDEEKEEGYDDYVVEDDNNIIMSTHNYNYNLGVSEEGGAGSSSLDEIYCKLQQQGQEGHFERTHSDTKPASGEVPVKLPRKMKKSASSKSAFSHFKEDDIVETRRPATVREAKVTGGAAEDDAEVDAKADDFINKFKQQLKLQRLDSIIRYKEMIGRGSAK

SEQ ID NO: 58838 - protein, 318 aa, Glycine max
  peptide (1)..(318): Ceres Seq. ID no. 14312279
  misc_feature (13)..(139): Homolog of NCBI NO: 14326479 NR Description: AT5g56980/MHM17_10 [Arabidopsis thaliana]
  misc_feature (216)..(312): Homolog of NCBI NO: 21592758 NR Description: unknown [Arabidopsis thaliana]
  misc_feature (13)..(139): Homolog of NCBI NO: 21592758 NR Description: unknown [Arabidopsis thaliana]
  misc_feature (219)..(312): Homolog of NCBI NO: 15236117 NR Description: uncharacterized protein [Arabidopsis thaliana]
  misc_feature (13)..(126): Homolog of NCBI NO: 15236117 NR Description: uncharacterized protein [Arabidopsis thaliana]
  misc_feature (216)..(312): Homolog of NCBI NO: 18423922 NR Description: expressed protein [Arabidopsis thaliana]
  misc_feature (13)..(139): Homolog of NCBI NO: 18423922 NR Description: expressed protein [Arabidopsis thaliana]
  misc_feature (219)..(312): Homolog of NCBI NO: 549977 NR Description: cDNA-5-encoded protein
  misc_feature (8)..(126): Homolog of NCBI NO: 549977 NR Description: cDNA-5-encoded protein
  misc_feature (98)..(318): Homolog of NCBI NO: 15225251 NR Description: expressed protein [Arabidopsis thaliana]
MLDESVSSTPTFLGSLYSWFTPTVFFLLLQLVIGTIFIISNLTNTHKHQQQEPQQAHDFPHHHLPRSPSMLQRLKSINFYPSSPFRSQDLQNPHFHNAHENEQPQLARSPSVLQRLKSINLYSYFPTEPFTSKLTPDQHVPEKPYVREQNQPQQVVETDEEKEEGYDDYVVEDDNNIIMSTHNYNYNLGVSEEGGAGSSSLDEIYCKLQQQGQEGHFERTHSDTKPASGEVPVKLPRKMKKSASSKSAFSHFKEDDIVETRRPATVREAKVTGGAAEDDAEVDAKADDFINKFKQQLKLQRLDSIIRYKEMIGRGSAK

SEQ ID NO: 58839 - protein, 249 aa, Glycine max
  peptide (1)..(249): Ceres Seq. ID no. 14312280
  misc_feature (1)..(70): Homolog of NCBI NO: 14326479 NR Description: AT5g56980/MHM17_10 [Arabidopsis thaliana]
  misc_feature (147)..(243): Homolog of NCBI NO: 21592758 NR Description: unknown [Arabidopsis thaliana]
  misc_feature (1)..(70): Homolog of NCBI NO: 21592758 NR Description: unknown [Arabidopsis thaliana]
  misc_feature (150)..(243): Homolog of NCBI NO: 15236117 NR Description: uncharacterized protein [Arabidopsis thaliana]
  misc_feature (1)..(57): Homolog of NCBI NO: 15236117 NR Description: uncharacterized protein [Arabidopsis thaliana]
  misc_feature (147)..(243): Homolog of NCBI NO: 18423922 NR Description: expressed protein [Arabidopsis thaliana]
  misc_feature (1)..(70): Homolog of NCBI NO: 18423922 NR Description: expressed protein [Arabidopsis thaliana]
  misc_feature (150)..(243): Homolog of NCBI NO: 549977 NR Description: cDNA-5-encoded protein
  misc_feature (1)..(57): Homolog of NCBI NO: 549977 NR Description: cDNA-5-encoded protein
  misc_feature (29)..(249): Homolog of NCBI NO: 15225251 NR Description: expressed protein [Arabidopsis thaliana]
MLQRLKSINFYPSSPFRSQDLQNPHFHNAHENEQPQLARSPSVLQRLKSINLYSYFPTEPFTSKLTPDQHVPEKPYVREQNQPQQVVETDEEKEEGYDDYVVEDDNNIIMSTHNYNYNLGVSEEGGAGSSSLDEIYCKLQQQGQEGHFERTHSDTKPASGEVPVKLPRKMKKSASSKSAFSHFKEDDIVETRRPATVREAKVTGGAAEDDAEVDAKADDFINKFKQQLKLQRLDSIIRYKEMIGRGSAK

SEQ ID NO: 58840 - DNA, 1455 bp, Glycine max
  misc_feature (1)..(1455): Ceres Seq. ID no. 14310524
acattttctacgtattgaatctcaagattctaagagagattttgctgctctttgaagaagggtgtttgcttgattttggtgatgtcgctgctctcagatctcatcaaccttaacctctcagacactactgagaaggtgatcgcagagtacatatggatcggtggatcaggaatggacctgaggagcaaagcaaggactctcccaggaccagttagcgacccttcaaagcttcccaagtggaactatgatggttccagcacaggccaagctcctggagaagacagtgaagtgattatatacccacaagccattttcagggatccattcagaaggggcaacaatatcttggttatctgtgatgcttacactccagctggagaacccattcccactaacaagaggcacgatgctgccaaggttttcagccatcctgatgttgttgctgaagagacatggtatggtattgagcaggaatacaccttgttgcagaaagatatccaatggcctcttgggtggcctgttggtggtttccctggaccacagggtccatactactgtggtgttggcgctgacaaggcttttggccgtgacattgttgacgcacattacaaagcctgtctttatgctggcatcaacatcagtggaattaatggagaagtgatgcccggtcagtgggaattccaagttggaccttcagttggaatctcagctggtgacgaggtgtgggcagctcgttacatcttggagaggatcactgagattgctggtgtggtggtttcctttgatcccaagccaattcagggtgattggaatggtgctggtgctcacacaaactacagcactaagtccatgagaaatgatggtggctatgaagtgatcaaaaccgccattgagaagttggggaagagacacaaggagcacattgctgcttatggagaaggcaacgagcgtcgtttgacagggcgccacgaaaccgctgacatcaacaccttcttatggggagttgcaaaccgtggagcttcagttagggttgggagggacacagagaaagcagggaagggatattttgaggacagaaggccagcttctaacatggacccatatgtggttacttccatgattgcagacacaaccattctgtggaagccatgagcaaaacttgcatgttgtctccctttggatggaacaaggaacaaggaacaaggaacagttatgcttttctaagtagggtttggtcctttttattttttaccttttgatttttctaggatttcgatttgtggctactttggttggtgcaaccaactgccaagggttgttcattgttttctattcctttccctcgttttccgattgttacaataataataataataatgtaatatggttattttcagtctcaaacaaaagtaatgctgattgtgaagtataataatatatgaaattgtcatgtcc

SEQ ID NO: 58841 - protein, 356 aa, Glycine max
  peptide (1)..(356): Ceres Seq. ID no. 14310525
  misc_feature (103)..(355): Pfam Name: Glutamine synthetase, catalytic domain Pfam Description: Glutamine synthetase, catalytic domain
MSLLSDLINLNLSDTTEKVIAEYIWIGGSGMDLRSKARTLPGPVSDPSKLPKWNYDGSSTGQAPGEDSEVIIYPQAIFRDPFRRGNNILVICDAYTPAGEPIPTNKRHDAAKVFSHPDVVAEETWYGIEQEYTLLQKDIQWPLGWPVGGFPGPQGPYYCGVGADKAFGRDIVDAHYKACLYAGINISGINGEVMPGQWEFQVGPSVGISAGDEVWAARYILERITEIAGVVVSFDPKPIQGDWNGAGAHTNYSTKSMRNDGGYEVIKTAIEKLGKRHKEHIAAYGEGNERRLTGRHETADINTFLWGVANRGASVRVGRDTEKAGKGYFEDRRPASNMDPYVVTSMIADTTILWKP

SEQ ID NO: 58842 - protein, 326 aa, Glycine max
  peptide (1)..(326): Ceres Seq. ID no. 14310526
  misc_feature (73)..(325): Pfam Name: Glutamine synthetase, catalytic domain Pfam Description: Glutamine synthetase, catalytic domain
MDLRSKARTLPGPVSDPSKLPKWNYDGSSTGQAPGEDSEVIIYPQAIFRDPFRRGNNILVICDAYTPAGEPIPTNKRHDAAKVFSHPDVVAEETWYGIEQEYTLLQKDIQWPLGWPVGGFPGPQGPYYCGVGADKAFGRDIVDAHYKACLYAGINISGINGEVMPGQWEFQVGPSVGISAGDEVWAARYILERITEIAGVVVSFDPKPIQGDWNGAGAHTNYSTKSMRNDGGYEVIKTAIEKLGKRHKEHIAAYGEGNERRLTGRHETADINTFLWGVANRGASVRVGRDTEKAGKGYFEDRRPASNMDPYVVTSMIADTTILWKP

SEQ ID NO: 58843 - DNA, 1722 bp, Glycine max
  misc_feature (1)..(1722): Ceres Seq. ID no. 14311808
atcccggaaatggagggtggtggtgacgttaagggttgggcgttggagtttcttctccgggctcagaacccagtcgttcccagtaacctaattaagaaagtcattctaatagtccccctttcagacttttattccaggctcaagaagacgcttcttctccgagcccttcaagatcacttgttcgctgtctctgtccctgagtccgttctcgaaaccctcgagcaagtcgaggaactccaccgcctcggcgatgacgacgacggagctctggtcaccacctcatccgccatgagcgccgcctactgtgccgtcgcggtggagtgcactctcaagcacctgctgctggagctacacaacaaccctgcttatctcggcgcggtgaacaggatatggcgcggtagggttcggctcatgagcggttccggggaggggagcctcctgctctcgccagagctggagcggtggagaaccgacattgaagcttcccttctggattcgtcggtgagggagaggttggcctccattgatacaagaagggatgccgtcttcaagctccgggattatttgaaggaagcttggaccgatttggggccttcatttcttgagcgagcggcgttggcgcatataaacaacaatgccctagccgcgaatcactctgaggattctcaacagccggagagagaaattgagaagtgcactgctgctcctgctgaggaagtgcatccctcaacagatgttgagatccaaaaggttggggagtgcggttctgtggagttgcaaaagttggctgaggattctctacttgatttgttggaagtgaatgaggaggcatcgatggaagaacaaagtagagatgtagatgtaccttgcccacatgctattaatgacaatgaggctgatctgatggaaaaggatcaaacttctgccgaggaagtgcttccctcaacaactgttgaggtccaaaaggttagggaatgtggttccgtggagttgcaaaagttggctaaggattctctacttaattcgttggaagtgaatgaggaggcacatattgaaagtagagatgcagatgtaccttgcccacttgttattagtaacaatgaggctgatctgatggaaaaggatcaaacttctatccctcataatcatgaccataagccaagtttaatggaaagaaatagttctgctcgtatttatgagtgggatgattcaatagatggcttggaggatggaacatcagatcatgcaactagatttaatttgcctagtcccaaggggagaaaagtttctccattgaataagtacaaacctgcaaacattacaaagaggagaaaagtgaaaaaatggagtcagttggaagaggagactctaaggactgctgtagacaagtttggcaggggaaattggaagttaatcctagattctcacaaagatatatttgaagagagaactgaagttgatttgaaggacaagtggagaaatatgacgtaatatgggtgcaaatgaatcacaatgtggaatattgcagagggcggtagatcgtgtggatatctttttggcttaagcagagtctacttcctaaatttctttaatttagctcttcaaactattgtctcctaatttgatgtctgtggttgtattttggattaagtaatattcatactattttcatgtttgtacttttaatgacactaacgatggtaaaatgacaggagtttatat

SEQ ID NO: 58844 - protein, 496 aa, Glycine max
  peptide (1)..(496): Ceres Seq. ID no. 14311809
  misc_feature (446)..(495): Pfam Name: Myb-like DNA-binding domain Pfam Description: Myb-like DNA-binding domain
  misc_feature (207)..(493): Homolog of NCBI NO: 25406946 NR Description: hypothetical protein [imported] - Arabidopsis
  misc_feature (376)..(495): Homolog of NCBI NO: 15218285 NR Description: expressed protein [Arabidopsis thaliana]
  misc_feature (207)..(493): Homolog of NCBI NO: 22329375 NR Description: myb family transcription factor [Arabidopsis
  misc_feature (386)..(496): Homolog of NCBI NO: 34394040 NR Description: unknown protein [Oryza sativa (japonica
  misc_feature (13)..(205): Homolog of NCBI NO: 15237172 NR Description: unknown protein (gb|AAF63134.1) -related
  misc_feature (13)..(314): Homolog of NCBI NO: 15218285 NR Description: expressed protein [Arabidopsis thaliana]
  misc_feature (234)..(495): Homolog of NCBI NO: 40388419 NR Description: ANTHER INDEHISCENCE1 [Oryza sativa (japonica
IPEMEGGGDVKGWALEFLLRAQNPVVPSNLIKKVILIVPLSDFYSRLKKTLLLRALQDHLFAVSVPESVLETLEQVEELHRLGDDDDGALVTTSSAMSAAYCAVAVECTLKHLLLELHNNPAYLGAVNRIWRGRVRLMSGSGEGSLLLSPELERWRTDIEASLLDSSVRERLASIDTRRDAVFKLRDYLKEAWTDLGPSFLERAALAHINNNALAANHSEDSQQPEREIEKCTAAPAEEVHPSTDVEIQKVGECGSVELQKLAEDSLLDLLEVNEEASMEEQSRDVDVPCPHAINDNEADLMEKDQTSAEEVLPSTTVEVQKVRECGSVELQKLAKDSLLNSLEVNEEAHIESRDADVPCPLVISNNEADLMEKDQTSIPHNHDHKPSLMERNSSARIYEWDDSIDGLEDGTSDHATRFNLPSPKGRKVSPLNKYKPANITKRRKVKKWSQLEEETLRTAVDKFGRGNWKLILDSHKDIFEERTEVDLKDKWRNMT

SEQ ID NO: 58845 - protein, 493 aa, Glycine max
  peptide (1)..(493): Ceres Seq. ID no. 14311810
  misc_feature (443)..(492): Pfam Name: Myb-like DNA-binding domain Pfam Description: Myb-like DNA-binding domain
  misc_feature (204)..(490): Homolog of NCBI NO: 25406946 NR Description: hypothetical protein [imported] - Arabidopsis
  misc_feature (373)..(492): Homolog of NCBI NO: 15218285 NR Description: expressed protein [Arabidopsis thaliana]
  misc_feature (204)..(490): Homolog of NCBI NO: 22329375 NR Description: myb family transcription factor [Arabidopsis
  misc_feature (383)..(493): Homolog of NCBI NO: 34394040 NR Description: unknown protein [Oryza sativa (japonica
  misc_feature (10)..(202): Homolog of NCBI NO: 15237172 NR Description: unknown protein (gb|AAF63134.1) -related
  misc_feature (10)..(311): Homolog of NCBI NO: 15218285 NR Description: expressed protein [Arabidopsis thaliana]
  misc_feature (231)..(492): Homolog of NCBI NO: 40388419 NR Description: ANTHER INDEHISCENCE1 [Oryza sativa (japonica
MEGGGDVKGWALEFLLRAQNPVVPSNLIKKVILIVPLSDFYSRLKKTLLLRALQDHLFAVSVPESVLETLEQVEELHRLGDDDDGALVTTSSAMSAAYCAVAVECTLKHLLLELHNNPAYLGAVNRIWRGRVRLMSGSGEGSLLLSPELERWRTDIEASLLDSSVRERLASIDTRRDAVFKLRDYLKEAWTDLGPSFLERAALAHINNNALAANHSEDSQQPEREIEKCTAAPAEEVHPSTDVEIQKVGECGSVELQKLAEDSLLDLLEVNEEASMEEQSRDVDVPCPHAINDNEADLMEKDQTSAEEVLPSTTVEVQKVRECGSVELQKLAKDSLLNSLEVNEEAHIESRDADVPCPLVISNNEADLMEKDQTSIPHNHDHKPSLMERNSSARIYEWDDSIDGLEDGTSDHATRFNLPSPKGRKVSPLNKYKPANITKRRKVKKWSQLEEETLRTAVDKFGRGNWKLILDSHKDIFEERTEVDLKDKWRNMT

SEQ ID NO: 58846 - protein, 400 aa, Glycine max
  peptide (1)..(400): Ceres Seq. ID no. 14311811
  misc_feature (350)..(399): Pfam Name: Myb-like DNA-binding domain Pfam Description: Myb-like DNA-binding domain
  misc_feature (111)..(397): Homolog of NCBI NO: 25406946 NR Description: hypothetical protein [imported] - Arabidopsis
  misc_feature (280)..(399): Homolog of NCBI NO: 15218285 NR Description: expressed protein [Arabidopsis thaliana]
  misc_feature (111)..(397): Homolog of NCBI NO: 22329375 NR Description: myb family transcription factor [Arabidopsis
  misc_feature (290)..(400): Homolog of NCBI NO: 34394040 NR Description: unknown protein [Oryza sativa (japonica
  misc_feature (1)..(109): Homolog of NCBI NO: 15237172 NR Description: unknown protein (gb|AAF63134.1) -related
  misc_feature (1)..(218): Homolog of NCBI NO: 15218285 NR Description: expressed protein [Arabidopsis thaliana]
  misc_feature (138)..(399): Homolog of NCBI NO: 40388419 NR Description: ANTHER INDEHISCENCE1 [Oryza sativa (japonica
MSAAYCAVAVECTLKHLLLELHNNPAYLGAVNRIWRGRVRLMSGSGEGSLLLSPELERWRTDIEASLLDSSVRERLASIDTRRDAVFKLRDYLKEAWTDLGPSFLERAALAHINNNALAANHSEDSQQPEREIEKCTAAPAEEVHPSTDVEIQKVGECGSVELQKLAEDSLLDLLEVNEEASMEEQSRDVDVPCPHAINDNEADLMEKDQTSAEEVLPSTTVEVQKVRECGSVELQKLAKDSLLNSLEVNEEAHIESRDADVPCPLVISNNEADLMEKDQTSIPHNHDHKPSLMERNSSARIYEWDDSIDGLEDGTSDHATRFNLPSPKGRKVSPLNKYKPANITKRRKVKKWSQLEEETLRTAVDKFGRGNWKLILDSHKDIFEERTEVDLKDKWRNMT

SEQ ID NO: 58847 - DNA, 1368 bp, Glycine max
  misc_feature (1)..(1368): Ceres Seq. ID no. 13638160
ctctttcgttatctggtcatggttgtttgcgacttctgggagctcagtctcgctcagagtcagagaaaaacacccaaatcaaatattatcatggagcccagcttggatttgagactgggctttgtccccaaacccctttccctgtttttcggcgacgtttctgggaacagagacaagtgcgacaaagtggtcacactcgatggcttcgtgcagagattggaggaagagttgacaaaggtcgaggctttcaaacgcgagcttcctctctgcattctcctcctaaacgatgctatagcgagattgaaggaggaaaaagtgaagtgttcgggaatgcaagatccgcctcttaaaaccagttcaggaggaaatgaaaatgaaaactctgagaagaagaattggatgagttcagcacagctttggagcactcagaaatccaaatcgaggaatgaggaagatgataggtctgtgccagcgaactcaattaatgggaattcgtgtgtccccgagaaggagggctcgcaagttccgagctttggtttgatggctcgtgcttctgaactgagtcatagcaattccaagagtgttggtggagatactagttctggctcctctttgctccgtgttgaggtacagagtcagccacagccgccgcagcatatgcagcagaatccgaggaaacaacggcggtgctggtcgccggagcttcaccggcgctttgtggacgcccttcaacaacttggtggagcacaagtggccactcctaaacagattagagaactgatgcaggtggaaggccttacaaatgatgaagtgaaaagtcatttgcaaaagtacaggcttcatgttaggagattcccagttttttcaattggccaggttgataatggctcatggatgacacaggatgaatgtggggataaatcaaagggaaacatgtcacagtctggttctccacagggtcctctcacacctctgctcctaggaggagcaggatccgctaagggtctctcaagccctggacggaacagtgtggatgcagaagatgagcaatcatcagattgccggaattggaaaggagggctccaccaccagcagcttgaaactgataatcacagcctctaaaattttgcagataaatgataatacaatacataaaatgatgaggagttgaaggcccagaatttgacaacataagaataatagagatctaacacataaaagaactatagggatcaagtttatgctaccagtattttaaactgtttggtagagagcaactgaggttttgcagatttttcaaggtttcttcttttctatttttaaactcagtatagttgtatggagcttaaattttactgggcaattttc

SEQ ID NO: 58848 - protein, 373 aa, Glycine max
  peptide (1)..(373): Ceres Seq. ID no. 13638161
  misc_feature (228)..(279): Pfam Name: Myb-like DNA-binding domain Pfam Description: Myb-like DNA-binding domain
  misc_feature (31)..(164): Homolog of NCBI NO: 18395562 NR Description: myb family transcription factor [Arabidopsis
  misc_feature (47)..(347): Homolog of NCBI NO: 21554992 NR Description: unknown [Arabidopsis thaliana]
  misc_feature (47)..(347): Homolog of NCBI NO: 18402692 NR Description: myb family transcription factor [Arabidopsis
  misc_feature (34)..(178): Homolog of NCBI NO: 34915398 NR Description: contains ESTs
  misc_feature (200)..(358): Homolog of NCBI NO: 34915398 NR Description: contains ESTs
  misc_feature (34)..(356): Homolog of NCBI NO: 30690890 NR Description: cytoskeletal protein -related [Arabidopsis
  misc_feature (34)..(356): Homolog of NCBI NO: 14532434 NR Description: AT4g37180/C7A10_180 [Arabidopsis thaliana]
  misc_feature (34)..(178): Homolog of NCBI NO: 33146555 NR Description: putative cytoskeletal protein-like protein
  misc_feature (200)..(358): Homolog of NCBI NO: 33146555 NR Description: putative cytoskeletal protein-like protein
  misc_feature (34)..(356): Homolog of NCBI NO: 18419989 NR Description: cytoskeletal protein -related [Arabidopsis
LFRYLVMVVCDFWELSLAQSQRKTPKSNIIMEPSLDLRLGFVPKPLSLFFGDVSGNRDKCDKVVTLDGFVQRLEEELTKVEAFKRELPLCILLLNDAIARLKEEKVKCSGMQDPPLKTSSGGNENENSEKKNWMSSAQLWSTQKSKSRNEEDDRSVPANSINGNSCVPEKEGSQVPSFGLMARASELSHSNSKSVGGDTSSGSSLLRVEVQSQPQPPQHMQQNPRKQRRCWSPELHRRFVDALQQLGGAQVATPKQIRELMQVEGLTNDEVKSHLQKYRLHVRRFPVFSIGQVDNGSWMTQDECGDKSKGNMSQSGSPQGPLTPLLLGGAGSAKGLSSPGRNSVDAEDEQSSDCRNWKGGLHHQQLETDNHSL

SEQ ID NO: 58849 - protein, 367 aa, Glycine max
  peptide (1)..(367): Ceres Seq. ID no. 13638162
  misc_feature (222)..(273): Pfam Name: Myb-like DNA-binding domain Pfam Description: Myb-like DNA-binding domain
  misc_feature (25)..(158): Homolog of NCBI NO: 18395562 NR Description: myb family transcription factor [Arabidopsis
  misc_feature (41)..(341): Homolog of NCBI NO: 21554992 NR Description: unknown [Arabidopsis thaliana]
  misc_feature (41)..(341): Homolog of NCBI NO: 18402692 NR Description: myb family transcription factor [Arabidopsis
  misc_feature (28)..(172): Homolog of NCBI NO: 34915398 NR Description: contains ESTs
  misc_feature (194)..(352): Homolog of NCBI NO: 34915398 NR Description: contains ESTs
  misc_feature (28)..(350): Homolog of NCBI NO: 30690890 NR Description: cytoskeletal protein -related [Arabidopsis
  misc_feature (28)..(350): Homolog of NCBI NO: 14532434 NR Description: AT4g37180/C7A10_180 [Arabidopsis thaliana]
  misc_feature (28)..(172): Homolog of NCBI NO: 33146555 NR Description: putative cytoskeletal protein-like protein
  misc_feature (194)..(352): Homolog of NCBI NO: 33146555 NR Description: putative cytoskeletal protein-like protein
  misc_feature (28)..(350): Homolog of NCBI NO: 18419989 NR Description: cytoskeletal protein -related [Arabidopsis
MVVCDFWELSLAQSQRKTPKSNIIMEPSLDLRLGFVPKPLSLFFGDVSGNRDKCDKVVTLDGFVQRLEEELTKVEAFKRELPLCILLLNDAIARLKEEKVKCSGMQDPPLKTSSGGNENENSEKKNWMSSAQLWSTQKSKSRNEEDDRSVPANSINGNSCVPEKEGSQVPSFGLMARASELSHSNSKSVGGDTSSGSSLLRVEVQSQPQPPQHMQQNPRKQRRCWSPELHRRFVDALQQLGGAQVATPKQIRELMQVEGLTNDEVKSHLQKYRLHVRRFPVFSIGQVDNGSWMTQDECGDKSKGNMSQSGSPQGPLTPLLLGGAGSAKGLSSPGRNSVDAEDEQSSDCRNWKGGLHHQQLETDNHSL

SEQ ID NO: 58850 - protein, 343 aa, Glycine max
  peptide (1)..(343): Ceres Seq. ID no. 13638163
  misc_feature (198)..(249): Pfam Name: Myb-like DNA-binding domain Pfam Description: Myb-like DNA-binding domain
  misc_feature (1)..(134): Homolog of NCBI NO: 18395562 NR Description: myb family transcription factor [Arabidopsis
  misc_feature (17)..(317): Homolog of NCBI NO: 21554992 NR Description: unknown [Arabidopsis thaliana]
  misc_feature (17)..(317): Homolog of NCBI NO: 18402692 NR Description: myb family transcription factor [Arabidopsis
  misc_feature (4)..(148): Homolog of NCBI NO: 34915398 NR Description: contains ESTs
  misc_feature (170)..(328): Homolog of NCBI NO: 34915398 NR Description: contains ESTs
  misc_feature (4)..(326): Homolog of NCBI NO: 30690890 NR Description: cytoskeletal protein -related [Arabidopsis
  misc_feature (4)..(326): Homolog of NCBI NO: 14532434 NR Description: AT4g37180/C7A10_180 [Arabidopsis thaliana]
  misc_feature (4)..(148): Homolog of NCBI NO: 33146555 NR Description: putative cytoskeletal protein-like protein
  misc_feature (170)..(328): Homolog of NCBI NO: 33146555 NR Description: putative cytoskeletal protein-like protein
  misc_feature (4)..(326): Homolog of NCBI NO: 18419989 NR Description: cytoskeletal protein -related [Arabidopsis
MEPSLDLRLGFVPKPLSLFFGDVSGNRDKCDKVVTLDGFVQRLEEELTKVEAFKRELPLCILLLNDAIARLKEEKVKCSGMQDPPLKTSSGGNENENSEKKNWMSSAQLWSTQKSKSRNEEDDRSVPANSINGNSCVPEKEGSQVPSFGLMARASELSHSNSKSVGGDTSSGSSLLRVEVQSQPQPPQHMQQNPRKQRRCWSPELHRRFVDALQQLGGAQVATPKQIRELMQVEGLTNDEVKSHLQKYRLHVRRFPVFSIGQVDNGSWMTQDECGDKSKGNMSQSGSPQGPLTPLLLGGAGSAKGLSSPGRNSVDAEDEQSSDCRNWKGGLHHQQLETDNHSL

SEQ ID NO: 58851 - DNA, 1430 bp, Glycine max
  misc_feature (1)..(1430): Ceres Seq. ID no. 15227289
ccgggccccccctcgagtcagctacgtaggcccccccccccaattttcataattatttttttctttgaaaccagccaagagggttatttttgatccctcaaagctaatttctctctctctttttttatttccgggactgaagaggttgtctatttgaaatctccttcatcctttcctttcttgtagaaaactttttaaatttttttgtcagtgggtgttttaattaaccacctgttcttcaagttttagaaagacgcaggttgaattaattagtatcatggcagctttgatggatttttacagcagcagcccagagtttcaacttcactcagatccattcaggggagaactaatggaagttcttgaaccttttatgaaaagtccttctcccaactatttcccttcctccccctccctccctaatctttactcaaacgggttatccagcaacacccaaagcttaattggcttcgggcaagcgcaacccacatctcttgtgggcctgaaccacctaaccccatctcagatctctcagatccaagcccaaatccagatccaggcccagcagcatcagaatcgcagcaacaccctgagcttccttgggccgaagcccatccccatgaagcacgcgggcatgcctccgaagcccacgaagctttacagaggggtgagacagaggcactggggaaagtgggtggctgagatcagacttcccaagaaccggaccaggctgtggctgggaaccttcgacaccgccgaggaagccgctctggcatacgacaaggccgcgtacaagctccgaggtgacttcgccaggctcaacttcccaaacctgcgacaccagggttcctccgtcggtggtgatttcggggagtacaagcctcttcattccgctgttgacgccaagcttcaggccatttgcgaaggcctggctgagctgcagaaacaggggaagaccgagaagcctccgaggaagtcgcgttccaaactcgcggagaaggttgtttccgacaaggagaacaacaactcttgtaaggtggaagctgcgtcctggtcgtcggaaggttcttcgccgctttcggatctgacgtttgctgacgtgagcgaggctcagtgggaaggtgattcggataattataatctccagaagtacccctcttatgagatcgattgggattctctgtgaagtgtcctattatgtatggtctagtctaggtcttagtgtctcttaggtggctgctactgcaatggagtttttggcaattgcagggctagtactattctgtgtataatctctctaccttgctcacagctggtttttttcttgcttgaccagggagaattagtccgcttaatatgtttttcaagtgcatcgctgtaatctacttcaatttcatcatcttataaaatatattattctactannnnaa

SEQ ID NO: 58852 - protein, 302 aa, Glycine max
  peptide (1)..(302): Ceres Seq. ID no. 15227290
  misc_feature (125)..(189): Pfam Name: AP2 domain Pfam Description: AP2 domain
  misc_feature (26)..(302): Homolog of NCBI NO: 15236020 NR Description: AP2 domain transcription factor, putative
  misc_feature (102)..(251): Homolog of NCBI NO: 8571476 NR Description: apetala2 domain-containing protein [Atriplex
  misc_feature (126)..(302): Homolog of NCBI NO: 12324244 NR Description: putative AP2 domain transcriptional regulator, 5'
  misc_feature (1)..(84): Homolog of NCBI NO: 15219839 NR Description: AP2 domain transcription factor, putative
  misc_feature (108)..(302): Homolog of NCBI NO: 15219839 NR Description: AP2 domain transcription factor, putative
  misc_feature (98)..(302): Homolog of NCBI NO: 2281633 NR Description: AP2 domain containing protein RAP2.4 [Arabidopsis
  misc_feature (64)..(302): Homolog of NCBI NO: 27436378 NR Description: dehydration-responsive element binding protein 3
  misc_feature (1)..(302): Homolog of NCBI NO: 13877779 NR Description: putative AP2 domain-containing protein
  misc_feature (1)..(302): Homolog of NCBI NO: 15218204 NR Description: AP2 domain transcription factor RAP2.4
  misc_feature (1)..(302): Homolog of NCBI NO: 6573771 NR Description: F28K19.29 [Arabidopsis thaliana]
MAALMDFYSSSPEFQLHSDPFRGELMEVLEPFMKSPSPNYFPSSPSLPNLYSNGLSSNTQSLIGFGQAQPTSLVGLNHLTPSQISQIQAQIQIQAQQHQNRSNTLSFLGPKPIPMKHAGMPPKPTKLYRGVRQRHWGKWVAEIRLPKNRTRLWLGTFDTAEEAALAYDKAAYKLRGDFARLNFPNLRHQGSSVGGDFGEYKPLHSAVDAKLQAICEGLAELQKQGKTEKPPRKSRSKLAEKVVSDKENNNSCKVEAASWSSEGSSPLSDLTFADVSEAQWEGDSDNYNLQKYPSYEIDWDSL

SEQ ID NO: 58853 - protein, 298 aa, Glycine max
  peptide (1)..(298): Ceres Seq. ID no. 15227291
  misc_feature (121)..(185): Pfam Name: AP2 domain Pfam Description: AP2 domain
  misc_feature (22)..(298): Homolog of NCBI NO: 15236020 NR Description: AP2 domain transcription factor, putative
  misc_feature (98)..(247): Homolog of NCBI NO: 8571476 NR Description: apetala2 domain-containing protein [Atriplex
  misc_feature (122)..(298): Homolog of NCBI NO: 12324244 NR Description: putative AP2 domain transcriptional regulator, 5'
  misc_feature (1)..(80): Homolog of NCBI NO: 15219839 NR Description: AP2 domain transcription factor, putative
  misc_feature (104)..(298): Homolog of NCBI NO: 15219839 NR Description: AP2 domain transcription factor, putative
  misc_feature (94)..(298): Homolog of NCBI NO: 2281633 NR Description: AP2 domain containing protein RAP2.4 [Arabidopsis
  misc_feature (60)..(298): Homolog of NCBI NO: 27436378 NR Description: dehydration-responsive element binding protein 3
  misc_feature (1)..(298): Homolog of NCBI NO: 13877779 NR Description: putative AP2 domain-containing protein
  misc_feature (1)..(298): Homolog of NCBI NO: 15218204 NR Description: AP2 domain transcription factor RAP2.4
  misc_feature (1)..(298): Homolog of NCBI NO: 6573771 NR Description: F28K19.29 [Arabidopsis thaliana]
MDFYSSSPEFQLHSDPFRGELMEVLEPFMKSPSPNYFPSSPSLPNLYSNGLSSNTQSLIGFGQAQPTSLVGLNHLTPSQISQIQAQIQIQAQQHQNRSNTLSFLGPKPIPMKHAGMPPKPTKLYRGVRQRHWGKWVAEIRLPKNRTRLWLGTFDTAEEAALAYDKAAYKLRGDFARLNFPNLRHQGSSVGGDFGEYKPLHSAVDAKLQAICEGLAELQKQGKTEKPPRKSRSKLAEKVVSDKENNNSCKVEAASWSSEGSSPLSDLTFADVSEAQWEGDSDNYNLQKYPSYEIDWDSL

SEQ ID NO: 58854 - protein, 277 aa, Glycine max
  peptide (1)..(277): Ceres Seq. ID no. 15227292
  misc_feature (100)..(164): Pfam Name: AP2 domain Pfam Description: AP2 domain
  misc_feature (1)..(277): Homolog of NCBI NO: 15236020 NR Description: AP2 domain transcription factor, putative
  misc_feature (77)..(226): Homolog of NCBI NO: 8571476 NR Description: apetala2 domain-containing protein [Atriplex
  misc_feature (101)..(277): Homolog of NCBI NO: 12324244 NR Description: putative AP2 domain transcriptional regulator, 5'
  misc_feature (1)..(59): Homolog of NCBI NO: 15219839 NR Description: AP2 domain transcription factor, putative
  misc_feature (83)..(277): Homolog of NCBI NO: 15219839 NR Description: AP2 domain transcription factor, putative
  misc_feature (73)..(277): Homolog of NCBI NO: 2281633 NR Description: AP2 domain containing protein RAP2.4 [Arabidopsis
  misc_feature (39)..(277): Homolog of NCBI NO: 27436378 NR Description: dehydration-responsive element binding protein 3
  misc_feature (1)..(277): Homolog of NCBI NO: 13877779 NR Description: putative AP2 domain-containing protein
  misc_feature (1)..(277): Homolog of NCBI NO: 15218204 NR Description: AP2 domain transcription factor RAP2.4
  misc_feature (1)..(277): Homolog of NCBI NO: 6573771 NR Description: F28K19.29 [Arabidopsis thaliana]
MEVLEPFMKSPSPNYFPSSPSLPNLYSNGLSSNTQSLIGFGQAQPTSLVGLNHLTPSQISQIQAQIQIQAQQHQNRSNTLSFLGPKPIPMKHAGMPPKPTKLYRGVRQRHWGKWVAEIRLPKNRTRLWLGTFDTAEEAALAYDKAAYKLRGDFARLNFPNLRHQGSSVGGDFGEYKPLHSAVDAKLQAICEGLAELQKQGKTEKPPRKSRSKLAEKVVSDKENNNSCKVEAASWSSEGSSPLSDLTFADVSEAQWEGDSDNYNLQKYPSYEIDWDSL

SEQ ID NO: 58855 - DNA, 1413 bp, Glycine max
  misc_feature (1)..(1413): Ceres Seq. ID no. 14308608
gagggacaacaacaacaattctgcaccaattagctcacaaaactttcaagggtttgatgatcataataataactcttcttctgatcatcatcacaccactttcactgactgcttacatggttccatggattacaacaccctctctagagtctttgacatgtcttgttcatcttctgaagtgatctcctccattgatgaaaaccccaagaagcctagtgcaggaggagactctgtgggggtcagggggaaccaatcaacacctaattcatctgtctcttcgccatccaatgaagctgaagcaattatagaagaagactcaaccaagagccagaaagataagcagccaaaagcgtgtgaagctgatggagatgaaaagcctaagaaagagaacaaacccaaaaagaaagagaaaaagccaagggagcctcgttttgccttcttgactaaaagtgagatcgatcatcttgaagatggatacagatggagaaaatatggacagaaagcggtcaagaatagtccatacccaaggagctattatagatgcacgagtcagaagtgcggtgtaaagaaaagggtggagaggtcattccaggacccaacaattgtgatcacaacatacgaagggcaacacaaccatcactgtccagcaactctgaggggcagtgctgcaagcatgttgtcatcaccttccttttttggttcctcttatatggcgtcaagcttaccccaagattttcttgctcagttggttccaagttatagccaaattaatgatcaccaaagtccaatgtttcaccaaaacctttcccataatctccatccacagcctcaacagcagcaccagttccaactctctcatgaccatggtttgttgcaagacctactaccatcattccctggcaaacacgagccatgaactcactaaaaacctagtgcatgttttgatttatttattttaggaaaaataatggttttatatttcatcactactagaaaaattaaaattagtaacggaataatctatgtaggttttttaaaaaatccgttactaaaatttggtgatctgatctcaaattaattagtgaaggaaaattaattttctatcactaattttgatcaccaatttattgatttttagaagtatttctaggagtttttaaaagaaaaaacaattgctttttcaagataaaccagaatcaaacatgcacttaacccatttctattagcgtatggtggagcttgcagtgtattgcacactgtctatatataagtatgtgtagtaattaagtagtagtagattccctcttggttaattacctcctctctttaagtcacatgtatgtacctagatttgtatggaaatgaaaaacattgattattcttaaatgagtatttagaattacttcagatggc

SEQ ID NO: 58856 - protein, 304 aa, Glycine max
  peptide (1)..(304): Ceres Seq. ID no. 14308609
  misc_feature (155)..(212): Pfam Name: WRKY DNA -binding domain Pfam Description: WRKY DNA -binding domain
  misc_feature (56)..(221): Homolog of NCBI NO: 34910900 NR Description: P0003E08.17 [Oryza sativa (japonica
  misc_feature (85)..(279): Homolog of NCBI NO: 21536889 NR Description: putative WRKY-type DNA binding protein
  misc_feature (85)..(279): Homolog of NCBI NO: 15226550 NR Description: WRKY family transcription factor [Arabidopsis
  misc_feature (18)..(282): Homolog of NCBI NO: 15239913 NR Description: WRKY family transcription factor [Arabidopsis
  misc_feature (51)..(304): Homolog of NCBI NO: 15237428 NR Description: WRKY family transcription factor [Arabidopsis
  misc_feature (42)..(303): Homolog of NCBI NO: 25518132 NR Description: F1N18.10 protein - Arabidopsis thaliana
  misc_feature (33)..(304): Homolog of NCBI NO: 7484934 NR Description: DNA-binding protein homolog T9A21.10 -
  misc_feature (31)..(225): Homolog of NCBI NO: 34912866 NR Description: putative DNA-binding protein homolog
  misc_feature (33)..(304): Homolog of NCBI NO: 15236785 NR Description: WRKY family transcription factor [Arabidopsis
  misc_feature (20)..(303): Homolog of NCBI NO: 15220582 NR Description: WRKY family transcription factor [Arabidopsis
RDNNNNSAPISSQNFQGFDDHNNNSSSDHHHTTFTDCLHGSMDYNTLSRVFDMSCSSSEVISSIDENPKKPSAGGDSVGVRGNQSTPNSSVSSPSNEAEAIIEEDSTKSQKDKQPKACEADGDEKPKKENKPKKKEKKPREPRFAFLTKSEIDHLEDGYRWRKYGQKAVKNSPYPRSYYRCTSQKCGVKKRVERSFQDPTIVITTYEGQHNHHCPATLRGSAASMLSSPSFFGSSYMASSLPQDFLAQLVPSYSQINDHQSPMFHQNLSHNLHPQPQQQHQFQLSHDHGLLQDLLPSFPGKHEP

SEQ ID NO: 58857 - protein, 263 aa, Glycine max
  peptide (1)..(263): Ceres Seq. ID no. 14308610
  misc_feature (114)..(171): Pfam Name: WRKY DNA -binding domain Pfam Description: WRKY DNA -binding domain
  misc_feature (15)..(180): Homolog of NCBI NO: 34910900 NR Description: P0003E08.17 [Oryza sativa (japonica
  misc_feature (44)..(238): Homolog of NCBI NO: 21536889 NR Description: putative WRKY-type DNA binding protein
  misc_feature (44)..(238): Homolog of NCBI NO: 15226550 NR Description: WRKY family transcription factor [Arabidopsis
  misc_feature (1)..(241): Homolog of NCBI NO: 15239913 NR Description: WRKY family transcription factor [Arabidopsis
  misc_feature (10)..(263): Homolog of NCBI NO: 15237428 NR Description: WRKY family transcription factor [Arabidopsis
  misc_feature (1)..(262): Homolog of NCBI NO: 25518132 NR Description: F1N18.10 protein - Arabidopsis thaliana
  misc_feature (1)..(263): Homolog of NCBI NO: 7484934 NR Description: DNA-binding protein homolog T9A21.10 -
  misc_feature (1)..(184): Homolog of NCBI NO: 34912866 NR Description: putative DNA-binding protein homolog
  misc_feature (1)..(263): Homolog of NCBI NO: 15236785 NR Description: WRKY family transcription factor [Arabidopsis
  misc_feature (1)..(262): Homolog of NCBI NO: 15220582 NR Description: WRKY family transcription factor [Arabidopsis
MDYNTLSRVFDMSCSSSEVISSIDENPKKPSAGGDSVGVRGNQSTPNSSVSSPSNEAEAIIEEDSTKSQKDKQPKACEADGDEKPKKENKPKKKEKKPREPRFAFLTKSEIDHLEDGYRWRKYGQKAVKNSPYPRSYYRCTSQKCGVKKRVERSFQDPTIVITTYEGQHNHHCPATLRGSAASMLSSPSFFGSSYMASSLPQDFLAQLVPSYSQINDHQSPMFHQNLSHNLHPQPQQQHQFQLSHDHGLLQDLLPSFPGKHEP

SEQ ID NO: 58858 - protein, 252 aa, Glycine max
  peptide (1)..(252): Ceres Seq. ID no. 14308611
  misc_feature (103)..(160): Pfam Name: WRKY DNA -binding domain Pfam Description: WRKY DNA -binding domain
  misc_feature (4)..(169): Homolog of NCBI NO: 34910900 NR Description: P0003E08.17 [Oryza sativa (japonica
  misc_feature (33)..(227): Homolog of NCBI NO: 21536889 NR Description: putative WRKY-type DNA binding protein
  misc_feature (33)..(227): Homolog of NCBI NO: 15226550 NR Description: WRKY family transcription factor [Arabidopsis
  misc_feature (1)..(230): Homolog of NCBI NO: 15239913 NR Description: WRKY family transcription factor [Arabidopsis
  misc_feature (1)..(252): Homolog of NCBI NO: 15237428 NR Description: WRKY family transcription factor [Arabidopsis
  misc_feature (1)..(251): Homolog of NCBI NO: 25518132 NR Description: F1N18.10 protein - Arabidopsis thaliana
  misc_feature (1)..(252): Homolog of NCBI NO: 7484934 NR Description: DNA-binding protein homolog T9A21.10 -
  misc_feature (1)..(173): Homolog of NCBI NO: 34912866 NR Description: putative DNA-binding protein homolog
  misc_feature (1)..(252): Homolog of NCBI NO: 15236785 NR Description: WRKY family transcription factor [Arabidopsis
  misc_feature (1)..(251): Homolog of NCBI NO: 15220582 NR Description: WRKY family transcription factor [Arabidopsis
MSCSSSEVISSIDENPKKPSAGGDSVGVRGNQSTPNSSVSSPSNEAEAIIEEDSTKSQKDKQPKACEADGDEKPKKENKPKKKEKKPREPRFAFLTKSEIDHLEDGYRWRKYGQKAVKNSPYPRSYYRCTSQKCGVKKRVERSFQDPTIVITTYEGQHNHHCPATLRGSAASMLSSPSFFGSSYMASSLPQDFLAQLVPSYSQINDHQSPMFHQNLSHNLHPQPQQQHQFQLSHDHGLLQDLLPSFPGKHEP

SEQ ID NO: 58859 - DNA, 1686 bp, Glycine max
  misc_feature (1)..(1686): Ceres Seq. ID no. 14307548
ctggtagtgtgctccgttgagataaacctgagtgagagtgaggcgaagggggagaaagctaaaactaaaaaatgtcatcttctaagctcacactgtacggaatcggaaccgcactcttccgcacccgtagaactgcacccgtaactgtaactccccactctccctttctcttcttcaaacccattcccttcccgccgtgcttcctccgcccggattcctcttcctcctcctccttctccgcagctgcagccgccgcagaaaccctaccctccgtcgaccacccctggccggaatgggtctccttcgtcgaccgcttgaacaccaaaggctacctccccaaaacctcctcttccgacgacaccgtaagcctttacgccaacatgaactctctcaaggacgcttgtctcagcttcgcgcgtgaccgttacgaccttttcaatttgctgcctacaaatgatatccaagcagtggttgagggtgggtgccctaatcttctccgtaaagctgttaattcagctaagaggctgagagcacacctgcaattagatgaaggggatgattttgaaactgatgcccgaactgttgatatagttcgaatacttttgttctacgcactagatccacttgtgctttctggaggagacaaaccaccgggccgggaagttattgaatcatctgtcagaaaacttctctctcagctaattgagttgagtgagtcccctgctcctgcccctgctcctgctcgttcaaagcctactgcacaggatggtgtggtagaaggccaatctctaagtgttacgactaatcaattgtttaaagatgttgagatgaagaaaggtgactggatgtgtccaaaatgcaatttcatgaacttttctagaaatacacaatgcctgaattgtaaggaagacaagcctaaggatattaacccgtttactgttcaaatgaagccaggagattggacctgtcctgaatgcaattatttaaattttgccagaaacagactatgtctagaatgcaaaatagaggggccggcgaaggaagctaataccattgaagttgaaaggaaaaaaggagattggacttgcccacaatgtgggttcatgaattatgctaggaacacgaaatgtttgcgttgtcctgagacaaggcctaagaaacatcctggggactggaattgtcccgggtgtgggttcatgaattttgctagtaaaatgaagtgtttgcattgtcaagagccaaacccaagttccaagaaatatagtggggattggagttgccccaaatgcgatttctacaattatgcaagaaatatggcttgcctgaagtgcaatgctgaacgccctaaagaacaaccaaccgttgactatgaggaccatgaatggagacgatcaaactgattaggggaaaaaacgccatcgggctatatcatatagggaggtcacaattgtgctggtgggctgtaacaaatattttgttattgatgcattctctgcccatttttctttctcaatcttccaattaatggtgctaagtgcttcttcacttattggaaatggtacaaaaacgataattagagatactttaaagttatttgattgcatatgaatgtgttttaatataatcatgtacagatctaaaagtaaatttacagagattgaatcttgtgaatgttgttatagcttt

SEQ ID NO: 58860 - protein, 442 aa, Glycine max
  peptide (1)..(442): Ceres Seq. ID no. 14307549
  misc_feature (254)..(283): Pfam Name: Zn-finger in Ran binding protein and others Pfam Description: Zn-finger in Ran binding protein and others
  misc_feature (44)..(381): Homolog of NCBI NO: 25372841 NR Description: hypothetical protein F5A18.17 [imported] -
  misc_feature (323)..(394): Homolog of NCBI NO: 13702809 NR Description: putative ARP protein [Oryza sativa]
  misc_feature (66)..(362): Homolog of NCBI NO: 21593408 NR Description: unknown [Arabidopsis thaliana]
  misc_feature (46)..(362): Homolog of NCBI NO: 13324787 NR Description: hypothetical protein [Oryza sativa]
  misc_feature (44)..(362): Homolog of NCBI NO: 18409643 NR Description: expressed protein [Arabidopsis thaliana]
  misc_feature (92)..(162): Homolog of NCBI NO: 13702809 NR Description: putative ARP protein [Oryza sativa]
  misc_feature (24)..(96): Homolog of NCBI NO: 13702809 NR Description: putative ARP protein [Oryza sativa]
  misc_feature (165)..(337): Homolog of NCBI NO: 13702809 NR Description: putative ARP protein [Oryza sativa]
  misc_feature (1)..(162): Homolog of NCBI NO: 15221905 NR Description: expressed protein [Arabidopsis thaliana]
  misc_feature (163)..(440): Homolog of NCBI NO: 15221905 NR Description: expressed protein [Arabidopsis thaliana]
MSSSKLTLYGIGTALFRTRRTAPVTVTPHSPFLFFKPIPFPPCFLRPDSSSSSSFSAAAAAAETLPSVDHPWPEWVSFVDRLNTKGYLPKTSSSDDTVSLYANMNSLKDACLSFARDRYDLFNLLPTNDIQAVVEGGCPNLLRKAVNSAKRLRAHLQLDEGDDFETDARTVDIVRILLFYALDPLVLSGGDKPPGREVIESSVRKLLSQLIELSESPAPAPAPARSKPTAQDGVVEGQSLSVTTNQLFKDVEMKKGDWMCPKCNFMNFSRNTQCLNCKEDKPKDINPFTVQMKPGDWTCPECNYLNFARNRLCLECKIEGPAKEANTIEVERKKGDWTCPQCGFMNYARNTKCLRCPETRPKKHPGDWNCPGCGFMNFASKMKCLHCQEPNPSSKKYSGDWSCPKCDFYNYARNMACLKCNAERPKEQPTVDYEDHEWRRSN

SEQ ID NO: 58861 - protein, 339 aa, Glycine max
  peptide (1)..(339): Ceres Seq. ID no. 14307550
  misc_feature (151)..(180): Pfam Name: Zn-finger in Ran binding protein and others Pfam Description: Zn-finger in Ran binding protein and others
  misc_feature (255)..(338): Homolog of NCBI NO: 13702809 NR Description: putative ARP protein [Oryza sativa]
  misc_feature (1)..(278): Homolog of NCBI NO: 25372841 NR Description: hypothetical protein F5A18.17 [imported] -
  misc_feature (220)..(291): Homolog of NCBI NO: 13702809 NR Description: putative ARP protein [Oryza sativa]
  misc_feature (1)..(259): Homolog of NCBI NO: 21593408 NR Description: unknown [Arabidopsis thaliana]
  misc_feature (1)..(259): Homolog of NCBI NO: 13324787 NR Description: hypothetical protein [Oryza sativa]
  misc_feature (1)..(259): Homolog of NCBI NO: 18409643 NR Description: expressed protein [Arabidopsis thaliana]
  misc_feature (1)..(59): Homolog of NCBI NO: 13702809 NR Description: putative ARP protein [Oryza sativa]
  misc_feature (62)..(234): Homolog of NCBI NO: 13702809 NR Description: putative ARP protein [Oryza sativa]
  misc_feature (1)..(59): Homolog of NCBI NO: 15221905 NR Description: expressed protein [Arabidopsis thaliana]
  misc_feature (60)..(337): Homolog of NCBI NO: 15221905 NR Description: expressed protein [Arabidopsis thaliana]
MNSLKDACLSFARDRYDLFNLLPTNDIQAVVEGGCPNLLRKAVNSAKRLRAHLQLDEGDDFETDARTVDIVRILLFYALDPLVLSGGDKPPGREVIESSVRKLLSQLIELSESPAPAPAPARSKPTAQDGVVEGQSLSVTTNQLFKDVEMKKGDWMCPKCNFMNFSRNTQCLNCKEDKPKDINPFTVQMKPGDWTCPECNYLNFARNRLCLECKIEGPAKEANTIEVERKKGDWTCPQCGFMNYARNTKCLRCPETRPKKHPGDWNCPGCGFMNFASKMKCLHCQEPNPSSKKYSGDWSCPKCDFYNYARNMACLKCNAERPKEQPTVDYEDHEWRRSN

SEQ ID NO: 58862 - DNA, 1390 bp, Glycine max
  misc_feature (1)..(1390): Ceres Seq. ID no. 14304120
ctcactcactcactcattgtccttactcacccctctctctattagcattagcatcaaaaacactctcttggttatccaatccaaacaccacccttcttctcataccctgctcagttagcagcagctactctcattcctctaccggagcaaaactataaacaaaaaaaacaagtccatcgtatgggtctcttagcatcctcatgcttcattctcattgctctcctactcctcactcccaaaggtgttatgggtgccaccttcacattctttaacaaatgcgactacacagtgtggcctgggattctcgcaaatgccggtagcccaccactcgacagcaccggttttgagctccccaaggacacttctcgcgccttccaagctcccaccggctggtccggtcgtttctggggccgaaccggttgcaccttcgacggatccggcgccggctcatgcctcaccggcgactgcggctccggccaagtcgaatgcaacggcgccggagccgccccgccggcaaccctggcggagttcacgctcggcaccggaggtcaagacttctacgacgtgagcctcgttgatggctacaatcttcccatgatcgtggaaggcactggtgggtcgggtctttgcgcctccacgggttgtacctcggatctgaaccagcaatgtcctgcggagctgagagcctcggagggaagcgcgtgcaagagcgcgtgtgaggcttttggtagccctgagtactgctgcagcggcgcgtatggctcacccgccacttgcaggccgtccatttactcggagatgttcaaggctgcttgccctaggtcttatagctacgcatacgatgatgctacgagtacgtttacgtgttccggcgccgattataccgttaccttctgtccatcctctccaagtcagaaatcttcacgagataccactaccaaccccatgacctcaacaacaacatcaccagggtcagggacagtgacaggaaccggaaccggaacaggatccgaaggggcagtggtatacacgggtgcggacaacggcgttgcgtataatacagttacggattccgggtcaagttcaggatccggaggagaaacaatgctcgcagatgggtcatatttagctggtttagccatgggagactcccctgaaagaacagtttccatcgcgtttgtttactctgctagctttttgcttattctcttcctgctttagctgcaccagcattgtttgttaaatgtgtaaatggctcttagattttcgggtttttcgtgggtgggttcaagaattttggctttgccagtaaagctggcagattctctccctcattgtaaaccaccttccaaaagattcgccagaaaaagtattccgtgtttcattcgtt

SEQ ID NO: 58863 - protein, 346 aa, Glycine max
  peptide (1)..(346): Ceres Seq. ID no. 14304121
  misc_feature (31)..(240): Pfam Name: Thaumatin family Pfam Description: Thaumatin family
  misc_feature (1)..(248): Homolog of NCBI NO: 15233437 NR Description: thaumatin family [Arabidopsis thaliana]
  misc_feature (23)..(271): Homolog of NCBI NO: 30686652 NR Description: thaumatin family [Arabidopsis thaliana]
  misc_feature (1)..(286): Homolog of NCBI NO: 15222875 NR Description: thaumatin family [Arabidopsis thaliana]
  misc_feature (1)..(295): Homolog of NCBI NO: 37531042 NR Description: putative thaumatin-like protein
  misc_feature (4)..(271): Homolog of NCBI NO: 25296204 NR Description: hypothetical protein T20H2.19 [imported] -
  misc_feature (9)..(243): Homolog of NCBI NO: 2262099 NR Description: thaumatin isolog [Arabidopsis thaliana]
  misc_feature (9)..(243): Homolog of NCBI NO: 15233738 NR Description: thaumatin family [Arabidopsis thaliana]
  misc_feature (20)..(344): Homolog of NCBI NO: 7442168 NR Description: pathogenesis-related protein F20M13.220 -
  misc_feature (5)..(344): Homolog of NCBI NO: 18420282 NR Description: thaumatin-like protein, putative [Arabidopsis
  misc_feature (5)..(344): Homolog of NCBI NO: 21592749 NR Description: putative thaumatin-like protein [Arabidopsis
MGLLASSCFILIALLLLTPKGVMGATFTFFNKCDYTVWPGILANAGSPPLDSTGFELPKDTSRAFQAPTGWSGRFWGRTGCTFDGSGAGSCLTGDCGSGQVECNGAGAAPPATLAEFTLGTGGQDFYDVSLVDGYNLPMIVEGTGGSGLCASTGCTSDLNQQCPAELRASEGSACKSACEAFGSPEYCCSGAYGSPATCRPSIYSEMFKAACPRSYSYAYDDATSTFTCSGADYTVTFCPSSPSQKSSRDTTTNPMTSTTTSPGSGTVTGTGTGTGSEGAVVYTGADNGVAYNTVTDSGSSSGSGGETMLADGSYLAGLAMGDSPERTVSIAFVYSASFLLILFLL

SEQ ID NO: 58864 - protein, 324 aa, Glycine max
  peptide (1)..(324): Ceres Seq. ID no. 14304122
  misc_feature (9)..(218): Pfam Name: Thaumatin family Pfam Description: Thaumatin family
  misc_feature (1)..(226): Homolog of NCBI NO: 15233437 NR Description: thaumatin family [Arabidopsis thaliana]
  misc_feature (1)..(249): Homolog of NCBI NO: 30686652 NR Description: thaumatin family [Arabidopsis thaliana]
  misc_feature (1)..(264): Homolog of NCBI NO: 15222875 NR Description: thaumatin family [Arabidopsis thaliana]
  misc_feature (1)..(273): Homolog of NCBI NO: 37531042 NR Description: putative thaumatin-like protein
  misc_feature (1)..(249): Homolog of NCBI NO: 25296204 NR Description: hypothetical protein T20H2.19 [imported] -
  misc_feature (1)..(221): Homolog of NCBI NO: 2262099 NR Description: thaumatin isolog [Arabidopsis thaliana]
  misc_feature (1)..(221): Homolog of NCBI NO: 15233738 NR Description: thaumatin family [Arabidopsis thaliana]
  misc_feature (1)..(322): Homolog of NCBI NO: 7442168 NR Description: pathogenesis-related protein F20M13.220 -
  misc_feature (1)..(322): Homolog of NCBI NO: 18420282 NR Description: thaumatin-like protein, putative [Arabidopsis
  misc_feature (1)..(322): Homolog of NCBI NO: 21592749 NR Description: putative thaumatin-like protein [Arabidopsis
MGATFTFFNKCDYTVWPGILANAGSPPLDSTGFELPKDTSRAFQAPTGWSGRFWGRTGCTFDGSGAGSCLTGDCGSGQVECNGAGAAPPATLAEFTLGTGGQDFYDVSLVDGYNLPMIVEGTGGSGLCASTGCTSDLNQQCPAELRASEGSACKSACEAFGSPEYCCSGAYGSPATCRPSIYSEMFKAACPRSYSYAYDDATSTFTCSGADYTVTFCPSSPSQKSSRDTTTNPMTSTTTSPGSGTVTGTGTGTGSEGAVVYTGADNGVAYNTVTDSGSSSGSGGETMLADGSYLAGLAMGDSPERTVSIAFVYSASFLLILFLL

SEQ ID NO: 58865 - protein, 208 aa, Glycine max
  peptide (1)..(208): Ceres Seq. ID no. 14304123
  misc_feature (1)..(102): Pfam Name: Thaumatin family Pfam Description: Thaumatin family
  misc_feature (1)..(110): Homolog of NCBI NO: 15233437 NR Description: thaumatin family [Arabidopsis thaliana]
  misc_feature (1)..(133): Homolog of NCBI NO: 30686652 NR Description: thaumatin family [Arabidopsis thaliana]
  misc_feature (1)..(148): Homolog of NCBI NO: 15222875 NR Description: thaumatin family [Arabidopsis thaliana]
  misc_feature (1)..(157): Homolog of NCBI NO: 37531042 NR Description: putative thaumatin-like protein
  misc_feature (1)..(133): Homolog of NCBI NO: 25296204 NR Description: hypothetical protein T20H2.19 [imported] -
  misc_feature (1)..(105): Homolog of NCBI NO: 2262099 NR Description: thaumatin isolog [Arabidopsis thaliana]
  misc_feature (1)..(105): Homolog of NCBI NO: 15233738 NR Description: thaumatin family [Arabidopsis thaliana]
  misc_feature (1)..(206): Homolog of NCBI NO: 7442168 NR Description: pathogenesis-related protein F20M13.220 -
  misc_feature (1)..(206): Homolog of NCBI NO: 18420282 NR Description: thaumatin-like protein, putative [Arabidopsis
  misc_feature (1)..(206): Homolog of NCBI NO: 21592749 NR Description: putative thaumatin-like protein [Arabidopsis
MIVEGTGGSGLCASTGCTSDLNQQCPAELRASEGSACKSACEAFGSPEYCCSGAYGSPATCRPSIYSEMFKAACPRSYSYAYDDATSTFTCSGADYTVTFCPSSPSQKSSRDTTTNPMTSTTTSPGSGTVTGTGTGTGSEGAVVYTGADNGVAYNTVTDSGSSSGSGGETMLADGSYLAGLAMGDSPERTVSIAFVYSASFLLILFLL

SEQ ID NO: 58866 - DNA, 1132 bp, Glycine max
  misc_feature (1)..(1132): Ceres Seq. ID no. 14313103
gttctacagttctcttggtcatgttcaacaaagcagccctctcctcttacaatttcccatttgcaaatgtcatcacacttgctcagatggtgtttgcatttattattctctacgtgttgagatccttgaagataatttctttcacagctggtgaatcgctgagcagttctaagaatacaataatatttgtgtcctataggacattagcccagacacttcctcttgctttaacttatttgctttttatggtagtgaccatggaagcagtgcgcggtataaacattcccatgtacaccaccctcaggcgaactgttgtcgccttcacaatggttatggagtattttctgtcagggcagacacattcaagatttgttgttggaagtgttgggataatcatagccggtgcttttgttgctggagctcgtgacttggcatttgatgctttttcctattcagttgtatttgtagaaaacatgtgtaaggcagtatacctggcttctgtttctcgtgttggtaaatccagcggcctcaatatttttggtattgtatggtgcaatgtggtgatttgtggaccaatcttgtttctctggtccttactcagaggagatctccaagcaacactaaactttccatacttcttttcccgtggatttcaggttgtgatgcttctttcctgcgcttttactttctttataaactacatcgtagttttgaatacaactatcaactcggcacttacacaggcaatctgtggtaacttaaaggatgttttcacaagtggtattggttggttattattcggaggacttccatatgacttgttcaatattcttggtcaagtacttggcttccttgggtcctgtttgtatgcttattgtaaactgatgcaagcagtatgaggatgacctttcaggtgggtgtttaggaacatcaaaacaccaaacaagcatcgtatagtgtccctacaaattttttagggtttacaaattaagtcaacagaaaaaggtcaaatatcaaattatctttatcaaaatttacagtataaaaaatgtttttgtctgcccaagtgtaacttagggaatgacaatagaaatgaattcctgaaaatatttaatataaaagcgtttaattt

SEQ ID NO: 58867 - protein, 298 aa, Glycine max
  peptide (1)..(298): Ceres Seq. ID no. 14313104
  misc_feature (1)..(291): Homolog of NCBI NO: 14971008 NR Description: UDP-sugar transporter [Drosophila melanogaster]
  misc_feature (1)..(291): Homolog of NCBI NO: 17647441 NR Description: fringe connection CG3874-PA [Drosophila
  misc_feature (1)..(291): Homolog of NCBI NO: 26340190 NR Description: unnamed protein product [Mus musculus]
  misc_feature (1)..(291): Homolog of NCBI NO: 14028875 NR Description: solute carrier family 35 (UDP-glucuronic
  misc_feature (1)..(291): Homolog of NCBI NO: 1665787 NR Description: Similar to a C.elegans protein encoded in cosmid
  misc_feature (1)..(291): Homolog of NCBI NO: 32766366 NR Description: Unknown (protein for MGC:63651) [Danio rerio]
  misc_feature (2)..(291): Homolog of NCBI NO: 39590273 NR Description: Hypothetical protein CBG11203 [Caenorhabditis
  misc_feature (43)..(86): Homolog of NCBI NO: 15236724 NR Description: expressed protein [Arabidopsis thaliana]
  misc_feature (217)..(285): Homolog of NCBI NO: 15236724 NR Description: expressed protein [Arabidopsis thaliana]
  misc_feature (2)..(291): Homolog of NCBI NO: 17535737 NR Description: SQuashed Vulva SQV-7, putative protein, with at
STVLLVMFNKAALSSYNFPFANVITLAQMVFAFIILYVLRSLKIISFTAGESLSSSKNTIIFVSYRTLAQTLPLALTYLLFMVVTMEAVRGINIPMYTTLRRTVVAFTMVMEYFLSGQTHSRFVVGSVGIIIAGAFVAGARDLAFDAFSYSVVFVENMCKAVYLASVSRVGKSSGLNIFGIVWCNVVICGPILFLWSLLRGDLQATLNFPYFFSRGFQVVMLLSCAFTFFINYIVVLNTTINSALTQAICGNLKDVFTSGIGWLLFGGLPYDLFNILGQVLGFLGSCLYAYCKLMQAV

SEQ ID NO: 58868 - protein, 292 aa, Glycine max
  peptide (1)..(292): Ceres Seq. ID no. 14313105
  misc_feature (1)..(285): Homolog of NCBI NO: 14971008 NR Description: UDP-sugar transporter [Drosophila melanogaster]
  misc_feature (1)..(285): Homolog of NCBI NO: 17647441 NR Description: fringe connection CG3874-PA [Drosophila
  misc_feature (1)..(285): Homolog of NCBI NO: 26340190 NR Description: unnamed protein product [Mus musculus]
  misc_feature (1)..(285): Homolog of NCBI NO: 14028875 NR Description: solute carrier family 35 (UDP-glucuronic
  misc_feature (1)..(285): Homolog of NCBI NO: 1665787 NR Description: Similar to a C.elegans protein encoded in cosmid
  misc_feature (1)..(285): Homolog of NCBI NO: 32766366 NR Description: Unknown (protein for MGC:63651) [Danio rerio]
  misc_feature (1)..(285): Homolog of NCBI NO: 39590273 NR Description: Hypothetical protein CBG11203 [Caenorhabditis
  misc_feature (37)..(80): Homolog of NCBI NO: 15236724 NR Description: expressed protein [Arabidopsis thaliana]
  misc_feature (211)..(279): Homolog of NCBI NO: 15236724 NR Description: expressed protein [Arabidopsis thaliana]
  misc_feature (1)..(285): Homolog of NCBI NO: 17535737 NR Description: SQuashed Vulva SQV-7, putative protein, with at
MFNKAALSSYNFPFANVITLAQMVFAFIILYVLRSLKIISFTAGESLSSSKNTIIFVSYRTLAQTLPLALTYLLFMVVTMEAVRGINIPMYTTLRRTVVAFTMVMEYFLSGQTHSRFVVGSVGIIIAGAFVAGARDLAFDAFSYSVVFVENMCKAVYLASVSRVGKSSGLNIFGIVWCNVVICGPILFLWSLLRGDLQATLNFPYFFSRGFQVVMLLSCAFTFFINYIVVLNTTINSALTQAICGNLKDVFTSGIGWLLFGGLPYDLFNILGQVLGFLGSCLYAYCKLMQAV

SEQ ID NO: 58869 - protein, 270 aa, Glycine max
  peptide (1)..(270): Ceres Seq. ID no. 14313106
  misc_feature (1)..(263): Homolog of NCBI NO: 14971008 NR Description: UDP-sugar transporter [Drosophila melanogaster]
  misc_feature (1)..(263): Homolog of NCBI NO: 17647441 NR Description: fringe connection CG3874-PA [Drosophila
  misc_feature (1)..(263): Homolog of NCBI NO: 26340190 NR Description: unnamed protein product [Mus musculus]
  misc_feature (1)..(263): Homolog of NCBI NO: 14028875 NR Description: solute carrier family 35 (UDP-glucuronic
  misc_feature (1)..(263): Homolog of NCBI NO: 1665787 NR Description: Similar to a C.elegans protein encoded in cosmid
  misc_feature (1)..(263): Homolog of NCBI NO: 32766366 NR Description: Unknown (protein for MGC:63651) [Danio rerio]
  misc_feature (1)..(263): Homolog of NCBI NO: 39590273 NR Description: Hypothetical protein CBG11203 [Caenorhabditis
  misc_feature (15)..(58): Homolog of NCBI NO: 15236724 NR Description: expressed protein [Arabidopsis thaliana]
  misc_feature (189)..(257): Homolog of NCBI NO: 15236724 NR Description: expressed protein [Arabidopsis thaliana]
  misc_feature (1)..(263): Homolog of NCBI NO: 17535737 NR Description: SQuashed Vulva SQV-7, putative protein, with at
MVFAFIILYVLRSLKIISFTAGESLSSSKNTIIFVSYRTLAQTLPLALTYLLFMVVTMEAVRGINIPMYTTLRRTVVAFTMVMEYFLSGQTHSRFVVGSVGIIIAGAFVAGARDLAFDAFSYSVVFVENMCKAVYLASVSRVGKSSGLNIFGIVWCNVVICGPILFLWSLLRGDLQATLNFPYFFSRGFQVVMLLSCAFTFFINYIVVLNTTINSALTQAICGNLKDVFTSGIGWLLFGGLPYDLFNILGQVLGFLGSCLYAYCKLMQAV

SEQ ID NO: 58870 - DNA, 1078 bp, Glycine max
  misc_feature (1)..(1078): Ceres Seq. ID no. 14313088
gtcggttacagagataataatcctgcagcactttcagactttctgcaatctgtgcactgtttaattccatattatcctttatctatctctttatctctcttctgcaaagtgcaaaccctacttactactttcacagctcctacctcctattcctctcccttcccatactctctgctcctaactttttctctcttctcccctttcttccattcctccttgtctctcgcaacgcgaaattcatggacgtggacatactgaaaacttccacgagtgacaacatcagcatggacatgatgatgacgatgatgcaaatggaaaagttccctgaattttgtgaacctttttataacaacaacaacaacactagtactgctcctctctacccagaaaacgagctcttaataaactccaccaccactctacccgtgttctccaacgttattaacaacccaaacgttataactccaccaccatcttcctctaattttattcaacaacaacccatgacaccccatcttgaacccaacttggagaagaggaattctgtggcggctatgagggagatgattttccgcgtagcagtgatgcaacctattcatatagaccctgaatccatcaagccaccgaagagaaggaacgtgaagatttcaaaagatccgcagagtgtggcggcgaggcacagaagagaaaggataagcgagagaataaggatacttcagagattagttcctggtgggaccaaaatggacacggcttctatgttggatgaagccattcactacgtgaagttcttgaagaagcaagtgcagacgctggaacaagcaggggcaagtagacccttgaatgttgttggcttccctactactgcgtccaacgccaataataataatagttattctggttttgtgaagagttgtcagccttatccaatgctgggttctgcagcttctaaacaattgcttagttgagaagtgtttgtttgatacatgcatgaaaaatgaaaatcaatgaattatatatgtggtttttattttattttttatcttcatagtattgtgatcgatcgtgcatggattat

SEQ ID NO: 58871 - protein, 242 aa, Glycine max
  peptide (1)..(242): Ceres Seq. ID no. 14313089
  misc_feature (139)..(186): Pfam Name: Helix-loop-helix DNA-binding domain Pfam Description: Helix-loop-helix DNA-binding domain
  misc_feature (91)..(241): Homolog of NCBI NO: 15289790 NR Description: P0002B05.9 [Oryza sativa (japonica
  misc_feature (91)..(241): Homolog of NCBI NO: 34914234 NR Description: P0697C12.24 [Oryza sativa (japonica
  misc_feature (79)..(193): Homolog of NCBI NO: 28393737 NR Description: unknown protein [Arabidopsis thaliana]
  misc_feature (79)..(193): Homolog of NCBI NO: 15232534 NR Description: bHLH protein family [Arabidopsis thaliana]
  misc_feature (79)..(193): Homolog of NCBI NO: 9294680 NR Description: emb|CAB62312.1~gene_id:MHC9.1~similar to unknown
  misc_feature (68)..(197): Homolog of NCBI NO: 15236714 NR Description: bHLH protein family [Arabidopsis thaliana]
  misc_feature (90)..(223): Homolog of NCBI NO: 34910410 NR Description: P0692C11.28 [Oryza sativa (japonica
  misc_feature (37)..(200): Homolog of NCBI NO: 15242494 NR Description: bHLH protein family [Arabidopsis thaliana]
  misc_feature (12)..(235): Homolog of NCBI NO: 15229725 NR Description: bHLH protein family [Arabidopsis thaliana]
  misc_feature (18)..(194): Homolog of NCBI NO: 15240189 NR Description: (bHLH088) putative bHLH transcription factor
MDVDILKTSTSDNISMDMMMTMMQMEKFPEFCEPFYNNNNNTSTAPLYPENELLINSTTTLPVFSNVINNPNVITPPPSSSNFIQQQPMTPHLEPNLEKRNSVAAMREMIFRVAVMQPIHIDPESIKPPKRRNVKISKDPQSVAARHRRERISERIRILQRLVPGGTKMDTASMLDEAIHYVKFLKKQVQTLEQAGASRPLNVVGFPTTASNANNNNSYSGFVKSCQPYPMLGSAASKQLLS

SEQ ID NO: 58872 - protein, 227 aa, Glycine max
  peptide (1)..(227): Ceres Seq. ID no. 14313090
  misc_feature (124)..(171): Pfam Name: Helix-loop-helix DNA-binding domain Pfam Description: Helix-loop-helix DNA-binding domain
  misc_feature (76)..(226): Homolog of NCBI NO: 15289790 NR Description: P0002B05.9 [Oryza sativa (japonica
  misc_feature (76)..(226): Homolog of NCBI NO: 34914234 NR Description: P0697C12.24 [Oryza sativa (japonica
  misc_feature (64)..(178): Homolog of NCBI NO: 28393737 NR Description: unknown protein [Arabidopsis thaliana]
  misc_feature (64)..(178): Homolog of NCBI NO: 15232534 NR Description: bHLH protein family [Arabidopsis thaliana]
  misc_feature (64)..(178): Homolog of NCBI NO: 9294680 NR Description: emb|CAB62312.1~gene_id:MHC9.1~similar to unknown
  misc_feature (53)..(182): Homolog of NCBI NO: 15236714 NR Description: bHLH protein family [Arabidopsis thaliana]
  misc_feature (75)..(208): Homolog of NCBI NO: 34910410 NR Description: P0692C11.28 [Oryza sativa (japonica
  misc_feature (22)..(185): Homolog of NCBI NO: 15242494 NR Description: bHLH protein family [Arabidopsis thaliana]
  misc_feature (1)..(220): Homolog of NCBI NO: 15229725 NR Description: bHLH protein family [Arabidopsis thaliana]
  misc_feature (3)..(179): Homolog of NCBI NO: 15240189 NR Description: (bHLH088) putative bHLH transcription factor
MDMMMTMMQMEKFPEFCEPFYNNNNNTSTAPLYPENELLINSTTTLPVFSNVINNPNVITPPPSSSNFIQQQPMTPHLEPNLEKRNSVAAMREMIFRVAVMQPIHIDPESIKPPKRRNVKISKDPQSVAARHRRERISERIRILQRLVPGGTKMDTASMLDEAIHYVKFLKKQVQTLEQAGASRPLNVVGFPTTASNANNNNSYSGFVKSCQPYPMLGSAASKQLLS

SEQ ID NO: 58873 - protein, 225 aa, Glycine max
  peptide (1)..(225): Ceres Seq. ID no. 14313091
  misc_feature (122)..(169): Pfam Name: Helix-loop-helix DNA-binding domain Pfam Description: Helix-loop-helix DNA-binding domain
  misc_feature (74)..(224): Homolog of NCBI NO: 15289790 NR Description: P0002B05.9 [Oryza sativa (japonica
  misc_feature (74)..(224): Homolog of NCBI NO: 34914234 NR Description: P0697C12.24 [Oryza sativa (japonica
  misc_feature (62)..(176): Homolog of NCBI NO: 28393737 NR Description: unknown protein [Arabidopsis thaliana]
  misc_feature (62)..(176): Homolog of NCBI NO: 15232534 NR Description: bHLH protein family [Arabidopsis thaliana]
  misc_feature (62)..(176): Homolog of NCBI NO: 9294680 NR Description: emb|CAB62312.1~gene_id:MHC9.1~similar to unknown
  misc_feature (51)..(180): Homolog of NCBI NO: 15236714 NR Description: bHLH protein family [Arabidopsis thaliana]
  misc_feature (73)..(206): Homolog of NCBI NO: 34910410 NR Description: P0692C11.28 [Oryza sativa (japonica
  misc_feature (20)..(183): Homolog of NCBI NO: 15242494 NR Description: bHLH protein family [Arabidopsis thaliana]
  misc_feature (1)..(218): Homolog of NCBI NO: 15229725 NR Description: bHLH protein family [Arabidopsis thaliana]
  misc_feature (1)..(177): Homolog of NCBI NO: 15240189 NR Description: (bHLH088) putative bHLH transcription factor
MMMTMMQMEKFPEFCEPFYNNNNNTSTAPLYPENELLINSTTTLPVFSNVINNPNVITPPPSSSNFIQQQPMTPHLEPNLEKRNSVAAMREMIFRVAVMQPIHIDPESIKPPKRRNVKISKDPQSVAARHRRERISERIRILQRLVPGGTKMDTASMLDEAIHYVKFLKKQVQTLEQAGASRPLNVVGFPTTASNANNNNSYSGFVKSCQPYPMLGSAASKQLLS

SEQ ID NO: 58874 - protein, 218 aa, Glycine max
  peptide (1)..(218): Ceres Seq. ID no. 14313092
  misc_feature (115)..(162): Pfam Name: Helix-loop-helix DNA-binding domain Pfam Description: Helix-loop-helix DNA-binding domain
  misc_feature (67)..(217): Homolog of NCBI NO: 15289790 NR Description: P0002B05.9 [Oryza sativa (japonica
  misc_feature (67)..(217): Homolog of NCBI NO: 34914234 NR Description: P0697C12.24 [Oryza sativa (japonica
  misc_feature (55)..(169): Homolog of NCBI NO: 28393737 NR Description: unknown protein [Arabidopsis thaliana]
  misc_feature (55)..(169): Homolog of NCBI NO: 15232534 NR Description: bHLH protein family [Arabidopsis thaliana]
  misc_feature (55)..(169): Homolog of NCBI NO: 9294680 NR Description: emb|CAB62312.1~gene_id:MHC9.1~similar to unknown
  misc_feature (44)..(173): Homolog of NCBI NO: 15236714 NR Description: bHLH protein family [Arabidopsis thaliana]
  misc_feature (66)..(199): Homolog of NCBI NO: 34910410 NR Description: P0692C11.28 [Oryza sativa (japonica
  misc_feature (13)..(176): Homolog of NCBI NO: 15242494 NR Description: bHLH protein family [Arabidopsis thaliana]
  misc_feature (1)..(211): Homolog of NCBI NO: 15229725 NR Description: bHLH protein family [Arabidopsis thaliana]
  misc_feature (1)..(170): Homolog of NCBI NO: 15240189 NR Description: (bHLH088) putative bHLH transcription factor
MEKFPEFCEPFYNNNNNTSTAPLYPENELLINSTTTLPVFSNVINNPNVITPPPSSSNFIQQQPMTPHLEPNLEKRNSVAAMREMIFRVAVMQPIHIDPESIKPPKRRNVKISKDPQSVAARHRRERISERIRILQRLVPGGTKMDTASMLDEAIHYVKFLKKQVQTLEQAGASRPLNVVGFPTTASNANNNNSYSGFVKSCQPYPMLGSAASKQLLS

SEQ ID NO: 58875 - DNA, 1393 bp, Glycine max
  misc_feature (1)..(1393): Ceres Seq. ID no. 14307526
aacacaacaacacacgttgtacagtgtgatgcccaaaccgagaccacttcgaaagagcgaaacgcagtgttagcattgttcctcaacaaaaaaaaaaaaaaaagaagaaaaaagactcagttgtgtatcgttgcagctctactagctagggtttcgcaagtgcgatcgaagaagaacgatggcgatggctgctgctctgcgtcgcgaaggaaggcgtttgacccaaccaatcaacgccctccgttcctctctcatctctcaagaccaatcccctcatggcgcgcgcttcatttccactcaagtggtgagaaaccgaatgaagagtgtgaggaatatccagaagatcaccaaggccatgaagatggttgccgcatccaagctgagagccgttcagaccagagctgaaaattcccgcggcctctggcagccgttcaccgctcttctcggcgacaatcccagtgctgatgttaagaaaaacgttgttgttaccatctcttcggacaaaggtctttgtggtggaatcaattccacgtctgtcaagataagcagggttttgtacaaattgaattctgggcctgataaagagacaaaatatgtcatattgggagagaaggctaaagctcaattgttgcgtgactcaaggaaacacattgtgctcagccttactgaattgcagaaaaatcccctgaattacactcaggtgtctgtcttggcagatgacattctaaagaatgtggagtatgacgcattaaggattgttttcaacaaatttcattctgttgtacaatttttgccaacagtgtcaactgtactgtctcctgaggttattgagagagaggctgaatcaggaggaaagctcggggaattggattcatatgagattgaaggtggcgaaacaaaagctgaaattcttcagaatctggctgagttccagttttcttgtgtgatgtacaatgccgtgttggagaatgcctgtagtgagcaaggagcaagaatgtctgcaatggacagctctagcaggaatgctggggatatgcttgatcgtctcacgctcacctataacagaactcgtcaagcatcaatcaccactgaattgatagagattatctctggagcttcagcactggaaggctaattgcaggagagcaatatgtaattattcagcagtctcccataccttcgcatagcgaagagcctctgggcaatggggtacgaagtttttttataatatcgttgtgttcttttgaaatttgttggtgccacatttttttgatcttacctcgactcctgtaataagtgttccaaggtcaaacccatgatgaggattttcctagttgaggctagatatttctggaattatgtttttgaattaaagatggagtctgtctttttt

SEQ ID NO: 58876 - protein, 318 aa, Glycine max
  peptide (1)..(318): Ceres Seq. ID no. 14307527
  misc_feature (38)..(316): Pfam Name: ATP synthase Pfam Description: ATP synthase
  misc_feature (25)..(316): Homolog of NCBI NO: 39581406 NR Description: Hypothetical protein CBG22500 [Caenorhabditis
  misc_feature (46)..(316): Homolog of NCBI NO: 38512238 NR Description: Mitochondrial ATP synthase gamma-subunit [Danio
  misc_feature (39)..(316): Homolog of NCBI NO: 11466530 NR Description: ATP synthase F1 subunit alpha [Reclinomonas
  misc_feature (155)..(318): Homolog of NCBI NO: 7436157 NR Description: probable H+-transporting two-sector ATPase (EC
  misc_feature (41)..(174): Homolog of NCBI NO: 37532654 NR Description: putative ATP SYNTHASE GAMMA CHAIN, MITOCHONDRIAL
  misc_feature (175)..(318): Homolog of NCBI NO: 37532654 NR Description: putative ATP SYNTHASE GAMMA CHAIN, MITOCHONDRIAL
  misc_feature (5)..(317): Homolog of NCBI NO: 7436158 NR Description: probable H+-transporting two-sector ATPase (EC
  misc_feature (1)..(317): Homolog of NCBI NO: 22530902 NR Description: mitochondrial F1-ATPase, gamma subunit
  misc_feature (1)..(317): Homolog of NCBI NO: 15227257 NR Description: mitochondrial F1-ATPase, gamma subunit
  misc_feature (1)..(318): Homolog of NCBI NO: 543867 NR Description: ATP synthase gamma chain, mitochondrial precursor
MAMAAALRREGRRLTQPINALRSSLISQDQSPHGARFISTQVVRNRMKSVRNIQKITKAMKMVAASKLRAVQTRAENSRGLWQPFTALLGDNPSADVKKNVVVTISSDKGLCGGINSTSVKISRVLYKLNSGPDKETKYVILGEKAKAQLLRDSRKHIVLSLTELQKNPLNYTQVSVLADDILKNVEYDALRIVFNKFHSVVQFLPTVSTVLSPEVIEREAESGGKLGELDSYEIEGGETKAEILQNLAEFQFSCVMYNAVLENACSEQGARMSAMDSSSRNAGDMLDRLTLTYNRTRQASITTELIEIISGASALEG

SEQ ID NO: 58877 - protein, 316 aa, Glycine max
  peptide (1)..(316): Ceres Seq. ID no. 14307528
  misc_feature (36)..(314): Pfam Name: ATP synthase Pfam Description: ATP synthase
  misc_feature (23)..(314): Homolog of NCBI NO: 39581406 NR Description: Hypothetical protein CBG22500 [Caenorhabditis
  misc_feature (44)..(314): Homolog of NCBI NO: 38512238 NR Description: Mitochondrial ATP synthase gamma-subunit [Danio
  misc_feature (37)..(314): Homolog of NCBI NO: 11466530 NR Description: ATP synthase F1 subunit alpha [Reclinomonas
  misc_feature (153)..(316): Homolog of NCBI NO: 7436157 NR Description: probable H+-transporting two-sector ATPase (EC
  misc_feature (39)..(172): Homolog of NCBI NO: 37532654 NR Description: putative ATP SYNTHASE GAMMA CHAIN, MITOCHONDRIAL
  misc_feature (173)..(316): Homolog of NCBI NO: 37532654 NR Description: putative ATP SYNTHASE GAMMA CHAIN, MITOCHONDRIAL
  misc_feature (3)..(315): Homolog of NCBI NO: 7436158 NR Description: probable H+-transporting two-sector ATPase (EC
  misc_feature (1)..(315): Homolog of NCBI NO: 22530902 NR Description: mitochondrial F1-ATPase, gamma subunit
  misc_feature (1)..(315): Homolog of NCBI NO: 15227257 NR Description: mitochondrial F1-ATPase, gamma subunit
  misc_feature (1)..(316): Homolog of NCBI NO: 543867 NR Description: ATP synthase gamma chain, mitochondrial precursor
MAAALRREGRRLTQPINALRSSLISQDQSPHGARFISTQVVRNRMKSVRNIQKITKAMKMVAASKLRAVQTRAENSRGLWQPFTALLGDNPSADVKKNVVVTISSDKGLCGGINSTSVKISRVLYKLNSGPDKETKYVILGEKAKAQLLRDSRKHIVLSLTELQKNPLNYTQVSVLADDILKNVEYDALRIVFNKFHSVVQFLPTVSTVLSPEVIEREAESGGKLGELDSYEIEGGETKAEILQNLAEFQFSCVMYNAVLENACSEQGARMSAMDSSSRNAGDMLDRLTLTYNRTRQASITTELIEIISGASALEG

SEQ ID NO: 58878 - protein, 272 aa, Glycine max
  peptide (1)..(272): Ceres Seq. ID no. 14307529
  misc_feature (1)..(270): Pfam Name: ATP synthase Pfam Description: ATP synthase
  misc_feature (1)..(270): Homolog of NCBI NO: 39581406 NR Description: Hypothetical protein CBG22500 [Caenorhabditis
  misc_feature (1)..(270): Homolog of NCBI NO: 38512238 NR Description: Mitochondrial ATP synthase gamma-subunit [Danio
  misc_feature (1)..(270): Homolog of NCBI NO: 11466530 NR Description: ATP synthase F1 subunit alpha [Reclinomonas
  misc_feature (109)..(272): Homolog of NCBI NO: 7436157 NR Description: probable H+-transporting two-sector ATPase (EC
  misc_feature (1)..(128): Homolog of NCBI NO: 37532654 NR Description: putative ATP SYNTHASE GAMMA CHAIN, MITOCHONDRIAL
  misc_feature (129)..(272): Homolog of NCBI NO: 37532654 NR Description: putative ATP SYNTHASE GAMMA CHAIN, MITOCHONDRIAL
  misc_feature (1)..(271): Homolog of NCBI NO: 7436158 NR Description: probable H+-transporting two-sector ATPase (EC
  misc_feature (1)..(271): Homolog of NCBI NO: 22530902 NR Description: mitochondrial F1-ATPase, gamma subunit
  misc_feature (1)..(271): Homolog of NCBI NO: 15227257 NR Description: mitochondrial F1-ATPase, gamma subunit
  misc_feature (1)..(272): Homolog of NCBI NO: 543867 NR Description: ATP synthase gamma chain, mitochondrial precursor
MKSVRNIQKITKAMKMVAASKLRAVQTRAENSRGLWQPFTALLGDNPSADVKKNVVVTISSDKGLCGGINSTSVKISRVLYKLNSGPDKETKYVILGEKAKAQLLRDSRKHIVLSLTELQKNPLNYTQVSVLADDILKNVEYDALRIVFNKFHSVVQFLPTVSTVLSPEVIEREAESGGKLGELDSYEIEGGETKAEILQNLAEFQFSCVMYNAVLENACSEQGARMSAMDSSSRNAGDMLDRLTLTYNRTRQASITTELIEIISGASALEG

SEQ ID NO: 58879 - DNA, 1766 bp, Glycine max
  misc_feature (1)..(1766): Ceres Seq. ID no. 15226449
attctccatttccacactctcatcagattcgggtcgggttagcgttatcggataacttcgcccataaattctctgtttacggggcgaaaatgacagtattcttagccacgaggctcgtgtttcggagatccccgccgcttctctggcggcgcagcttttctcgggcggcggtagaggccgaaaaggacatgttgccgtgccgtcgcttccgttgttcgattactctccgcctccgtatgcggggcccaccgctgacgagattctggcaaagcgcagggagtatctgagtccttccatcttgcacttctacaagaatcccgtgaacatagtggagggtaagaagcagtacctgtttgacgagaaggggagaaggtacgtggatgcgtttggagggattgctacggtgtgctgcgggcactgtcaccctgatgtggtcgaagccatagtcaaccaaaccaaaaagttgcagcactccacagttctctaccttaacaacgccatcgccgatttcgctcaagctttgacttccaagcttcccggtaatctcaaggtggtgtttttcacaaactctggaacagaagcaaacgaattggcgatactgattgcaaggttatacacagggtgtcatgacataatatctctaaggaatgcttatcatggtaatgcagctgggacaatgggagctacagctcaaagcatctggaaatttaatgtagtacagagtggtgttcatcatgcagtgaatccagacccttatagaggcattttcggttctgatggagagaagtatgcaagagatgtacaagatatcattaacttcggaacttctggaaatgttgcagccttcatttctgaagccatacagggagtggggggtatcattgaattggctcctggttacttgccagctgtgtacaataccattaaaaaagcaggaggacttttcatagctgatgaggttcaggctggctttggtcgcactggtagccatttctggggatttgaggcccacaatgttgttcctgacatagtgacaatggctaagggcattggaaatgtcattcctcttggtgctgttgtaactactccagagatcgcagaggtcttaacccgccggagctactttaacacatttggtggcaaccctgtttgtactgctgcagggttggctgttttaaaagtaatagagaaagagcagcttcaacaaaacgcgtttgtggttggatcctatttgaaagaaaggctcactgccctcaaggacaaatatgaattaattggtgatgtgaggggaagaggcctaatgctaggagttgaacttgtcactgatcgtgaacttaaaattccagcaaaaggtgaaacgctgcatgtaatggaccaaatgaaagaattaggagtacttattggtaagggtggttactatggaaatgtcttcagaattacacccccgttgtgtttcaccaaagaagatgcagactttgtagcagacgcaatggacttgaccttgtctagaatgtgaagctgagccaagatcctagctttaataaaagtctattatatcataaatgaaactgtattatctcatctccatagctggtaaaaattacatagatgcagacttatatagctaaaatagcagaccaatctactgtgatcttaggctatgcatgagccaacaactcgttgtctcttgtttgatgtttatctttccaaatgaatgagccaacaactcgttgtctcttgctttgtcgtcaaaaaaaaaaaaaaaa

SEQ ID NO: 58880 - protein, 279 aa, Glycine max
  peptide (1)..(279): Ceres Seq. ID no. 15226450
  misc_feature (1)..(279): Pfam Name: Aminotransferase class-III Pfam Description: Aminotransferase class-III
  misc_feature (36)..(270): Homolog of NCBI NO: 39595899 NR Description: Hypothetical protein CBG12888 [Caenorhabditis
  misc_feature (1)..(32): Homolog of NCBI NO: 28574759 NR Description: CG11241-PA [Drosophila melanogaster]
  misc_feature (1)..(32): Homolog of NCBI NO: 16198011 NR Description: LD24726p [Drosophila melanogaster]
  misc_feature (35)..(277): Homolog of NCBI NO: 28574759 NR Description: CG11241-PA [Drosophila melanogaster]
  misc_feature (35)..(277): Homolog of NCBI NO: 16198011 NR Description: LD24726p [Drosophila melanogaster]
  misc_feature (1)..(279): Homolog of NCBI NO: 18420498 NR Description: alanine--glyoxylate aminotransferase
  misc_feature (1)..(279): Homolog of NCBI NO: 5731259 NR Description: alanine:glyoxylate aminotransferase 2 homolog
  misc_feature (1)..(279): Homolog of NCBI NO: 15028237 NR Description: putative beta-alanine-pyruvate aminotransferase
  misc_feature (1)..(279): Homolog of NCBI NO: 15224499 NR Description: alanine--glyoxylate aminotransferase
  misc_feature (1)..(279): Homolog of NCBI NO: 15231974 NR Description: alanine--glyoxylate aminotransferase
MGATAQSIWKFNVVQSGVHHAVNPDPYRGIFGSDGEKYARDVQDIINFGTSGNVAAFISEAIQGVGGIIELAPGYLPAVYNTIKKAGGLFIADEVQAGFGRTGSHFWGFEAHNVVPDIVTMAKGIGNVIPLGAVVTTPEIAEVLTRRSYFNTFGGNPVCTAAGLAVLKVIEKEQLQQNAFVVGSYLKERLTALKDKYELIGDVRGRGLMLGVELVTDRELKIPAKGETLHVMDQMKELGVLIGKGGYYGNVFRITPPLCFTKEDADFVADAMDLTLSRM

SEQ ID NO: 58881 - protein, 159 aa, Glycine max
  peptide (1)..(159): Ceres Seq. ID no. 15226451
  misc_feature (1)..(159): Pfam Name: Aminotransferase class-III Pfam Description: Aminotransferase class-III
  misc_feature (1)..(149): Homolog of NCBI NO: 7507520 NR Description: hypothetical protein T09B4.8 - Caenorhabditis
  misc_feature (1)..(150): Homolog of NCBI NO: 32564660 NR Description: aminotransferase class-III (48.6 kD) (1G742)
  misc_feature (1)..(150): Homolog of NCBI NO: 39595899 NR Description: Hypothetical protein CBG12888 [Caenorhabditis
  misc_feature (1)..(157): Homolog of NCBI NO: 28574759 NR Description: CG11241-PA [Drosophila melanogaster]
  misc_feature (1)..(157): Homolog of NCBI NO: 16198011 NR Description: LD24726p [Drosophila melanogaster]
  misc_feature (1)..(159): Homolog of NCBI NO: 18420498 NR Description: alanine--glyoxylate aminotransferase
  misc_feature (1)..(159): Homolog of NCBI NO: 5731259 NR Description: alanine:glyoxylate aminotransferase 2 homolog
  misc_feature (1)..(159): Homolog of NCBI NO: 15028237 NR Description: putative beta-alanine-pyruvate aminotransferase
  misc_feature (1)..(159): Homolog of NCBI NO: 15224499 NR Description: alanine--glyoxylate aminotransferase
  misc_feature (1)..(159): Homolog of NCBI NO: 15231974 NR Description: alanine--glyoxylate aminotransferase
MAKGIGNVIPLGAVVTTPEIAEVLTRRSYFNTFGGNPVCTAAGLAVLKVIEKEQLQQNAFVVGSYLKERLTALKDKYELIGDVRGRGLMLGVELVTDRELKIPAKGETLHVMDQMKELGVLIGKGGYYGNVFRITPPLCFTKEDADFVADAMDLTLSRM

SEQ ID NO: 58882 - DNA, 1343 bp, Glycine max
  misc_feature (1)..(1343): Ceres Seq. ID no. 13594185
gccttagtctgtgttgagacttgagagtaaggtttcaaattgaaaccttttttttcagtagtttttcacttgcgtatatcactatattcgttgtgttctgtaggttgtgtgcataacacaatcaattaagaagctgtgattctgattcagaatcagaatgttgcgaagatggagcaaagcagttactccaatctccaaatttggatcgcagcagagtcatttgaatttcgtgaaggacgtcacgcgccaaagctacgccggggttgcacccgcgccaacaacgatagaggataaacctcaaccccccgtggttaaacttgacaaaatgttttggtctaagccctgttcgctggccctgccccgggactcacccctcaaagctgaagaacctgattatcagggcatcaagcgtttcatgctcaagctcatgctgttttatagtaagcagagcaagtcaattcgaggcgctaatgttgtgtaccgaagaattgtttctcaaattgataaacctcccatttatgaagtgtttaacttggagaaaacattcaaaacaacattctctttacttgtacttcatatgtggttatgtttgcgtcgcttgaagcaagagggaaatgagggtgttgaatttggccagtacctttatgagatttacaatcatgatgtggagctaagagtctctaaagctggagttaacctactactgactaagtggatgaaagagctcgagaagattttttatgggaacattgttgcttatgatactgccatacttccagaagctaaaccgggtgatttttctaatgttatatggaggaatatattctctgaagatggttcttcaacaccagatgctgctgcatctcaatcagtacaggcgatggccagatatgctcgccgtgaagtaagttgcatgaccttaacagataaagaagcactatattcagggaattttatgttcacctctttgaagcatgagaacagaagcggaaaggggcctcaatgatgaagtggtgatttctaaatttgtgatttagcaaattgaaaatacacgctgttcttattttatttattttttacaaaaaaattgttgaataattatgacataaagctcatgtccttctccgtaaggcttttattatacttgattagcttggtgcccagaaactagaactctcatattcttgccctgtaaaatgagaaaagaaaaagggcagaagtgactgaaaaatgttgttctttctcatttttggtcatctgttcctctttactttgctttaacggcttcaatggtttgcctttgttatttgagacattacaaattttcaatacaatgcaatatt

SEQ ID NO: 58883 - protein, 282 aa, Glycine max; identical to SEQ ID NO: 57785
  peptide (1)..(282): Ceres Seq. ID no. 13594186
  misc_feature (122)..(256): Pfam Name: Ubiquinol-cytochrome C chaperone Pfam Description: Ubiquinol-cytochrome C chaperone
  misc_feature (105)..(272): Homolog of NCBI NO: 13476949 NR Description: unknown protein [Mesorhizobium loti]
  misc_feature (65)..(275): Homolog of NCBI NO: 26346196 NR Description: unnamed protein product [Mus musculus]
  misc_feature (107)..(268): Homolog of NCBI NO: 27380134 NR Description: bll5023 [Bradyrhizobium japonicum]
  misc_feature (92)..(275): Homolog of NCBI NO: 9256564 NR Description: basic FGF repressed, Zic binding protein [Mus
  misc_feature (102)..(268): Homolog of NCBI NO: 22964668 NR Description: hypothetical protein [Rhodopseudomonas palustris]
  misc_feature (92)..(271): Homolog of NCBI NO: 39794451 NR Description: Unknown (protein for MGC:76279) [Silurana
  misc_feature (92)..(271): Homolog of NCBI NO: 28558076 NR Description: Basic FGF-repressed Zic binding protein homolog
  misc_feature (52)..(256): Homolog of NCBI NO: 8843859 NR Description: contains similarity to unknown
  misc_feature (37)..(281): Homolog of NCBI NO: 33146996 NR Description: unknown protein [Oryza sativa (japonica
  misc_feature (1)..(274): Homolog of NCBI NO: 30696021 NR Description: expressed protein [Arabidopsis thaliana]

SEQ ID NO: 58884 - protein, 226 aa, Glycine max; identical to SEQ ID NO: 57786
  peptide (1)..(226): Ceres Seq. ID no. 13594187
  misc_feature (66)..(200): Pfam Name: Ubiquinol-cytochrome C chaperone Pfam Description: Ubiquinol-cytochrome C chaperone
  misc_feature (49)..(216): Homolog of NCBI NO: 13476949 NR Description: unknown protein [Mesorhizobium loti]
  misc_feature (9)..(219): Homolog of NCBI NO: 26346196 NR Description: unnamed protein product [Mus musculus]
  misc_feature (51)..(212): Homolog of NCBI NO: 27380134 NR Description: bll5023 [Bradyrhizobium japonicum]
  misc_feature (36)..(219): Homolog of NCBI NO: 9256564 NR Description: basic FGF repressed, Zic binding protein [Mus
  misc_feature (46)..(212): Homolog of NCBI NO: 22964668 NR Description: hypothetical protein [Rhodopseudomonas palustris]
  misc_feature (36)..(215): Homolog of NCBI NO: 39794451 NR Description: Unknown (protein for MGC:76279) [Silurana
  misc_feature (36)..(215): Homolog of NCBI NO: 28558076 NR Description: Basic FGF-repressed Zic binding protein homolog
  misc_feature (1)..(200): Homolog of NCBI NO: 8843859 NR Description: contains similarity to unknown
  misc_feature (1)..(225): Homolog of NCBI NO: 33146996 NR Description: unknown protein [Oryza sativa (japonica
  misc_feature (1)..(218): Homolog of NCBI NO: 30696021 NR Description: expressed protein [Arabidopsis thaliana]

SEQ ID NO: 58885 - protein, 196 aa, Glycine max; identical to SEQ ID NO: 57787
  peptide (1)..(196): Ceres Seq. ID no. 13594188
  misc_feature (36)..(170): Pfam Name: Ubiquinol-cytochrome C chaperone Pfam Description: Ubiquinol-cytochrome C chaperone
  misc_feature (19)..(186): Homolog of NCBI NO: 13476949 NR Description: unknown protein [Mesorhizobium loti]
  misc_feature (1)..(189): Homolog of NCBI NO: 26346196 NR Description: unnamed protein product [Mus musculus]
  misc_feature (21)..(182): Homolog of NCBI NO: 27380134 NR Description: bll5023 [Bradyrhizobium japonicum]
  misc_feature (6)..(189): Homolog of NCBI NO: 9256564 NR Description: basic FGF repressed, Zic binding protein [Mus
  misc_feature (16)..(182): Homolog of NCBI NO: 22964668 NR Description: hypothetical protein [Rhodopseudomonas palustris]
  misc_feature (6)..(185): Homolog of NCBI NO: 39794451 NR Description: Unknown (protein for MGC:76279) [Silurana
  misc_feature (6)..(185): Homolog of NCBI NO: 28558076 NR Description: Basic FGF-repressed Zic binding protein homolog
  misc_feature (1)..(170): Homolog of NCBI NO: 8843859 NR Description: contains similarity to unknown
  misc_feature (1)..(195): Homolog of NCBI NO: 33146996 NR Description: unknown protein [Oryza sativa (japonica
  misc_feature (1)..(188): Homolog of NCBI NO: 30696021 NR Description: expressed protein [Arabidopsis thaliana]

SEQ ID NO: 58886 - DNA, 1518 bp, Glycine max
  misc_feature (1)..(1518): Ceres Seq. ID no. 13594151
attcacccaacacttcaactccatcttcttccatccatttcctctttctcgatctgttccaaattcacttcacacacaggaaagaagatggagactcgcgccgccgcaaagagaaaggcaaatgccgccaccatagtctttgtcgaaaaacaataccccaacaagaggcagcgggttgtgttgggtgaacttcccaatttacaaaaccttattgtctccgaaactcaaaattcgcgcaaagagaagctcctatgtcggaagaatcccaatgagaagaaaccatcacccacaaacaacaacacctttccttcccctcagatcaacgaatcttatgattcggatatccacgggtatcttcgtgaaatggagatgcagaataagagaagaccaatggttgactacattgaaaaggttcagaaaattgttaccccaaccatgagagcaatattggtggattggttagtggaggtagctgtggagtacaagcttctatcggatactcttcatctctctgtatcatacatcgataggtttttatcagttaatccagtcagtaaatccagacttcagttactgggtgtttcgtccatgctcattgctgcaaaatatgaggagatggatccacctggtgtggacgagttttgcagcatcactgatcacacttatgacaagacagaggttgtgaagatggaagctgacatacttaagtccctaatgtttgaaatgggaaatcctactgtaagcacctttctaaggaggtatgctgatgttgcttctaatgaccaaaaaactccaaatttgcagattgaatttttgggcagctatattggcgagctaagtttgttggactatgattgtttaagattcttgccttctattgtggctgcctcggttatatttcttgccaagttcattatctgtcctgaagtgcatccatggacttcttccttgtgtgaatgctcgggttacaagccagctgagttgaaagaatgtgtccttatcttgcatgacttgtatttgtcaagaaaggcagcatccttcaaagctgttcgggcaaaatacaagcagcaaaagttcgaatgtgtggcaaacctgcctacccctccatatgtaccgagttgttactttgaagaccagtggtgcagtgaattccttgataaatgatcaaaccgaccattgcttgcatgggcatggcttagaaatttgatgcgtaggtttttgtctttgaattgcaagagcaacaggatttcattagataccaaagttcaattcccattcctgatgaactatcagggagaagacctttaaataaggatcaaataacaagatcttagaatgtacaactgcatacttgcaacatgtattaggagaattacggtgtaggatgaaccgaaaattgcattgttcttacagagaatttttatcttagtgaagtagtttttagacatatttgttaggaattttataatttttaattaattaatatggattatatattataaaaaaaaaaaaaaaaaa

SEQ ID NO: 58887 - protein, 387 aa, Glycine max
  peptide (1)..(387): Ceres Seq. ID no. 13594152
  misc_feature (245)..(372): Pfam Name: Cyclin, C-terminal domain Pfam Description: Cyclin, C-terminal domain
IHPTLQLHLLPSISSFSICSKFTSHTGKKMETRAAAKRKANAATIVFVEKQYPNKRQRVVLGELPNLQNLIVSETQNSRKEKLLCRKNPNEKKPSPTNNNTFPSPQINESYDSDIHGYLREMEMQNKRRPMVDYIEKVQKIVTPTMRAILVDWLVEVAVEYKLLSDTLHLSVSYIDRFLSVNPVSKSRLQLLGVSSMLIAAKYEEMDPPGVDEFCSITDHTYDKTEVVKMEADILKSLMFEMGNPTVSTFLRRYADVASNDQKTPNLQIEFLGSYIGELSLLDYDCLRFLPSIVAASVIFLAKFIICPEVHPWTSSLCECSGYKPAELKECVLILHDLYLSRKAASFKAVRAKYKQQKFECVANLPTPPYVPSCYFEDQWCSEFLDK

SEQ ID NO: 58888 - protein, 358 aa, Glycine max
  peptide (1)..(358): Ceres Seq. ID no. 13594153
  misc_feature (216)..(343): Pfam Name: Cyclin, C-terminal domain Pfam Description: Cyclin, C-terminal domain
METRAAAKRKANAATIVFVEKQYPNKRQRVVLGELPNLQNLIVSETQNSRKEKLLCRKNPNEKKPSPTNNNTFPSPQINESYDSDIHGYLREMEMQNKRRPMVDYIEKVQKIVTPTMRAILVDWLVEVAVEYKLLSDTLHLSVSYIDRFLSVNPVSKSRLQLLGVSSMLIAAKYEEMDPPGVDEFCSITDHTYDKTEVVKMEADILKSLMFEMGNPTVSTFLRRYADVASNDQKTPNLQIEFLGSYIGELSLLDYDCLRFLPSIVAASVIFLAKFIICPEVHPWTSSLCECSGYKPAELKECVLILHDLYLSRKAASFKAVRAKYKQQKFECVANLPTPPYVPSCYFEDQWCSEFLDK

SEQ ID NO: 58889 - protein, 266 aa, Glycine max
  peptide (1)..(266): Ceres Seq. ID no. 13594154
  misc_feature (124)..(251): Pfam Name: Cyclin, C-terminal domain Pfam Description: Cyclin, C-terminal domain
MEMQNKRRPMVDYIEKVQKIVTPTMRAILVDWLVEVAVEYKLLSDTLHLSVSYIDRFLSVNPVSKSRLQLLGVSSMLIAAKYEEMDPPGVDEFCSITDHTYDKTEVVKMEADILKSLMFEMGNPTVSTFLRRYADVASNDQKTPNLQIEFLGSYIGELSLLDYDCLRFLPSIVAASVIFLAKFIICPEVHPWTSSLCECSGYKPAELKECVLILHDLYLSRKAASFKAVRAKYKQQKFECVANLPTPPYVPSCYFEDQWCSEFLDK

SEQ ID NO: 58890 - DNA, 2021 bp, Glycine max
  misc_feature (1)..(2021): Ceres Seq. ID no. 13594189
gaaaaactactttctgagacaacgacgacgttgtatagcagtccttcttcttctttctgtgttgacggtggcgttgatctgattggaattcaggatcaatggcaggggcagcctctgctctgttcctcctcgacatcaaaggccgcgtcctcatctggcgcgactaccgcggcgacgtctccgccctcgacgccgaacgcttcttcaccaaactcatcgaaaaacaggccgatccgcaagctcaagatccggttgtgcacgacaacggcgtgacctacatgttcatccagcacagcaacgtctacctcatgatagccaccagacataactgcaatgccgccagcctcctctttttcctgcaccgcatcgtcgatgtgtttaagcactactttgaagaattggaagaggaatcgcttcgggacaatttcgtcgtcgtgtatgagctacttgatgagattatggactttggctaccctcagtacaccgaggcgcagattcttagtgagtttattaagactgatgcttatagaatggaagttacgcagagacctcccatggctgtgactaatgccgtgtcgtggcgcagcgaagggataaactataagaaaaatgaggttttcttggatgtggtggagagtgttaatatacttgtcaatagcaatggacaaataattagatctgacgtcgttggggctttgaagatgagaacgtatttgagtggtatgcctgagtgcaaacttggtttaaatgatagagtattgttagaggcgcaaggtagaacaaccaagggaaaggctattgacttggaagacataaaatttcatcagtgtgtgcgtttggctcgatttgaaaacgatcgaacaatttcctttataccacctgatggatcgtttgatttgatgacatacaggctcagtacacaggttaagcctttaatttgggtggaagcaaatgttgaaaagcattcaaagagtcggattgagattatggtaaaagctaggagtcaatttaaggaacgtagcactgccacaaacgttgagattgagttgcctgtgcctgttgatgcaaccaatcctaatgttcgaacttcaatgggatctgcatcatatgcacccgaaaaagatgcgttaatctggaaaattagatccttccccggaggcaaggagtatatgttaagagcagagtttcatcttcccagtataacagatgaggaagcaactcctgagagaaaagctcctatacgtgtgaaatttgaaataccatattttactgtttctggaatacaggtaagatatttgaagattattgagaaaagtgggtatcaggctcttccatgggtgagatacataacgatggctggagagtatgaattgaggcttatttaagaatttgtatctttctttggtgctggaattccaccaaataatcgtgccaacttccatgatcaatggttttaaactggtggatgggagagggactcttgagtaaaattagagtttatttggcctgatcatatctcctcttgcgtcatgatagttttggcaacagatcgtaaattgctcattgtccgtaaagttcataacttcaagtcaggaattggcaagtgtaaggctgtatcttctgtgtaagtcctttttgttcaaatctgtttgttgggaaaatgtctgatttttttttcctcttgttttcttttcttttatttacgatctgtcaatctttgccattgtcttcaatttgatttatttgtaagagaattattagcttttgtattactaagattgaatattttccccatctttatttgtattcataacctgacccatcttgtgtattaatatggtgccatatccctccctttctgaacaaaaaccatgtatttttttaccattcattcaaaaagttgattgcaggtcaatggcagaaaagaaaaaaaaaaaaaaaaaaaaaaaaaaaaaaaaccaaaaaaaaaaaaaaaaaagcttatcgataccgtcgacctcgagggggggcccggtacccaa

SEQ ID NO: 58891 - protein, 428 aa, Glycine max
  peptide (1)..(428): Ceres Seq. ID no. 13594190
  misc_feature (8)..(427): Pfam Name: Adaptor complexes medium subunit family Pfam Description: Adaptor complexes medium subunit family
  misc_feature (4)..(426): Homolog of NCBI NO: 24645407 NR Description: CG9388-PA [Drosophila melanogaster]
  misc_feature (1)..(427): Homolog of NCBI NO: 21913172 NR Description: mu1 adaptin [Toxoplasma gondii]
  misc_feature (4)..(426): Homolog of NCBI NO: 6671557 NR Description: adaptor-related protein complex AP-1, mu subunit
  misc_feature (4)..(426): Homolog of NCBI NO: 14210504 NR Description: adaptor-related protein complex 1, mu 1 subunit
  misc_feature (5)..(427): Homolog of NCBI NO: 28949965 NR Description: probable clathrin assembly protein AP47
  misc_feature (1)..(92): Homolog of NCBI NO: 6573741 NR Description: F20B24.16 [Arabidopsis thaliana]
  misc_feature (111)..(428): Homolog of NCBI NO: 6573741 NR Description: F20B24.16 [Arabidopsis thaliana]
  misc_feature (1)..(428): Homolog of NCBI NO: 15220202 NR Description: clathrin-coat assembly protein -related
  misc_feature (1)..(428): Homolog of NCBI NO: 34910334 NR Description: putative clathrin-associated protein
  misc_feature (1)..(428): Homolog of NCBI NO: 15219810 NR Description: clathrin adaptor medium chain protein MU1B
MAGAASALFLLDIKGRVLIWRDYRGDVSALDAERFFTKLIEKQADPQAQDPVVHDNGVTYMFIQHSNVYLMIATRHNCNAASLLFFLHRIVDVFKHYFEELEEESLRDNFVVVYELLDEIMDFGYPQYTEAQILSEFIKTDAYRMEVTQRPPMAVTNAVSWRSEGINYKKNEVFLDVVESVNILVNSNGQIIRSDVVGALKMRTYLSGMPECKLGLNDRVLLEAQGRTTKGKAIDLEDIKFHQCVRLARFENDRTISFIPPDGSFDLMTYRLSTQVKPLIWVEANVEKHSKSRIEIMVKARSQFKERSTATNVEIELPVPVDATNPNVRTSMGSASYAPEKDALIWKIRSFPGGKEYMLRAEFHLPSITDEEATPERKAPIRVKFEIPYFTVSGIQVRYLKIIEKSGYQALPWVRYITMAGEYELRLI

SEQ ID NO: 58892 - protein, 368 aa, Glycine max
  peptide (1)..(368): Ceres Seq. ID no. 13594191
  misc_feature (1)..(367): Pfam Name: Adaptor complexes medium subunit family Pfam Description: Adaptor complexes medium subunit family
  misc_feature (1)..(366): Homolog of NCBI NO: 24645407 NR Description: CG9388-PA [Drosophila melanogaster]
  misc_feature (1)..(367): Homolog of NCBI NO: 21913172 NR Description: mu1 adaptin [Toxoplasma gondii]
  misc_feature (1)..(366): Homolog of NCBI NO: 6671557 NR Description: adaptor-related protein complex AP-1, mu subunit
  misc_feature (1)..(366): Homolog of NCBI NO: 14210504 NR Description: adaptor-related protein complex 1, mu 1 subunit
  misc_feature (1)..(367): Homolog of NCBI NO: 28949965 NR Description: probable clathrin assembly protein AP47
  misc_feature (1)..(32): Homolog of NCBI NO: 6573741 NR Description: F20B24.16 [Arabidopsis thaliana]
  misc_feature (51)..(368): Homolog of NCBI NO: 6573741 NR Description: F20B24.16 [Arabidopsis thaliana]
  misc_feature (1)..(368): Homolog of NCBI NO: 15220202 NR Description: clathrin-coat assembly protein -related
  misc_feature (1)..(368): Homolog of NCBI NO: 34910334 NR Description: putative clathrin-associated protein
  misc_feature (1)..(368): Homolog of NCBI NO: 15219810 NR Description: clathrin adaptor medium chain protein MU1B
MFIQHSNVYLMIATRHNCNAASLLFFLHRIVDVFKHYFEELEEESLRDNFVVVYELLDEIMDFGYPQYTEAQILSEFIKTDAYRMEVTQRPPMAVTNAVSWRSEGINYKKNEVFLDVVESVNILVNSNGQIIRSDVVGALKMRTYLSGMPECKLGLNDRVLLEAQGRTTKGKAIDLEDIKFHQCVRLARFENDRTISFIPPDGSFDLMTYRLSTQVKPLIWVEANVEKHSKSRIEIMVKARSQFKERSTATNVEIELPVPVDATNPNVRTSMGSASYAPEKDALIWKIRSFPGGKEYMLRAEFHLPSITDEEATPERKAPIRVKFEIPYFTVSGIQVRYLKIIEKSGYQALPWVRYITMAGEYELRLI

SEQ ID NO: 58893 - protein, 358 aa, Glycine max
  peptide (1)..(358): Ceres Seq. ID no. 13594192
  misc_feature (1)..(357): Pfam Name: Adaptor complexes medium subunit family Pfam Description: Adaptor complexes medium subunit family
  misc_feature (1)..(356): Homolog of NCBI NO: 24645407 NR Description: CG9388-PA [Drosophila melanogaster]
  misc_feature (1)..(357): Homolog of NCBI NO: 21913172 NR Description: mu1 adaptin [Toxoplasma gondii]
  misc_feature (1)..(356): Homolog of NCBI NO: 6671557 NR Description: adaptor-related protein complex AP-1, mu subunit
  misc_feature (1)..(356): Homolog of NCBI NO: 14210504 NR Description: adaptor-related protein complex 1, mu 1 subunit
  misc_feature (1)..(357): Homolog of NCBI NO: 28949965 NR Description: probable clathrin assembly protein AP47
  misc_feature (1)..(22): Homolog of NCBI NO: 6573741 NR Description: F20B24.16 [Arabidopsis thaliana]
  misc_feature (41)..(358): Homolog of NCBI NO: 6573741 NR Description: F20B24.16 [Arabidopsis thaliana]
  misc_feature (1)..(358): Homolog of NCBI NO: 15220202 NR Description: clathrin-coat assembly protein -related
  misc_feature (1)..(358): Homolog of NCBI NO: 34910334 NR Description: putative clathrin-associated protein
  misc_feature (1)..(358): Homolog of NCBI NO: 15219810 NR Description: clathrin adaptor medium chain protein MU1B
MIATRHNCNAASLLFFLHRIVDVFKHYFEELEEESLRDNFVVVYELLDEIMDFGYPQYTEAQILSEFIKTDAYRMEVTQRPPMAVTNAVSWRSEGINYKKNEVFLDVVESVNILVNSNGQIIRSDVVGALKMRTYLSGMPECKLGLNDRVLLEAQGRTTKGKAIDLEDIKFHQCVRLARFENDRTISFIPPDGSFDLMTYRLSTQVKPLIWVEANVEKHSKSRIEIMVKARSQFKERSTATNVEIELPVPVDATNPNVRTSMGSASYAPEKDALIWKIRSFPGGKEYMLRAEFHLPSITDEEATPERKAPIRVKFEIPYFTVSGIQVRYLKIIEKSGYQALPWVRYITMAGEYELRLI

SEQ ID NO: 58894 - DNA, 1618 bp, Glycine max
  misc_feature (1)..(1618): Ceres Seq. ID no. 15177783
aactactaaagggataaaatatgactactattagtgatgatcagtgattagtgtgattagtgcgtgcgattcattgtgtttgtgtagtagtgagtgactttgggttgggtttcgtctcaactcaacaaacgtcgtcgttctcccatttccaatctttctccaatggcttcttctgcttccttaatcaactcgttgacttgctcttcgcctgcacccactcagcactgtttcgccttcacccgcaccaccgccaccgctaccgccacgtcactgagacaattcaacagccaccgtccgcccccactcaccacgaggatctcctcgtcgccttccaccgttgtctgcaaagctgtctccgttaagccccaaaccgaaaccgaaggtctcaacattgctgacgatgtcacacagctcatagggaaaacgccgatggtttacctcaacaatatcgtgaagggttctgtggccaatattgctgcgaagcttgagattatggagccctgttgtagtgtcaaggacaggattggttttagtatgataaatgatgctgagcagagaggagctataacacctgggaagagtatattggtggaacctactagtgggaacacaggaattggtcttgcctttatagcagcttcaagaggatataagctaattttgacaatgcctgcttcaatgagtttagaaagacgggttcttttgaaagcatttggggccgagcttgttttgactgatgcagcaaagggcatgaatggagcagtacaaaaagctgaagaaattttaaaaagtacccccaattcatacatgcttcaacaatttgataatccttcaaatcctaaggttcattatgagacaactggcccggagatatgggaagatactagaggaaagatagatattttagttgcaggaattggaaccggtggaactgtttctggagctggccaattcctaaaacaacaaaatccgaaaatacaggttattggcgtagagcctctggaaagcaacatacttacaggtggaaagccaggacctcacaaaattcagggtattggggctggttttgtgcccaggaatttggatcaagatgtgcttgatgaagttatagcgatatcaagtgatgaagcagttgaaactgcaaagcaattagcactccaggaaggcttgctggtgggaatttcttcaggagctgcagctgcagctgctttgaaggttggaaagaggcctgagaatgcaggaaagcttattggggttgtcttcccaagctttggtgaaagatatttgtcaactattcttttccagtcaatacgggaagaatgcgagaaaatgcaacctgagccatgaattgactttgcttgttaatgtttcatactcattttccacaagtatctgtatggaatgacagtgtcagatgtccatgttatgcccgtgtttctcatttttgacactcaagaaattagataactgtgtacaggtcattgatttgacttacaacacagattaatgacccttgattgaagaaattttagatgtaataattattggcattgatgacaacgtagcaaatttctgccttatgttcgctattaaaaaataattgatgaaacagtttatc

SEQ ID NO: 58895 - protein, 394 aa, Glycine max
  peptide (1)..(394): Ceres Seq. ID no. 15177784
  misc_feature (81)..(370): Pfam Name: Pyridoxal-phosphate dependent enzyme Pfam Description: Pyridoxal-phosphate dependent enzyme
  misc_feature (1)..(393): Homolog of NCBI NO: 25291707 NR Description: cysteine synthase (EC 4.2.99.8) precursor,
  misc_feature (1)..(393): Homolog of NCBI NO: 572517 NR Description: cysteine synthase [Arabidopsis thaliana]
  misc_feature (51)..(393): Homolog of NCBI NO: 12644209 NR Description: CYSTEINE SYNTHASE, CHLOROPLAST PRECURSOR SULFHYDRYLASE) (O-ACETYLSERINE (THIOL)-LYASE) (CSASE B) (CS-B)
  misc_feature (51)..(393): Homolog of NCBI NO: 303902 NR Description: cysteine synthase [Spinacia oleracea]
  misc_feature (1)..(393): Homolog of NCBI NO: 15224351 NR Description: cysteine synthase, chloroplast (O-acetylserine
  misc_feature (1)..(393): Homolog of NCBI NO: 12643295 NR Description: CYSTEINE SYNTHASE, MITOCHONDRIAL PRECURSOR SULFHYDRYLASE) (O-ACETYLSERINE (THIOL)-LYASE) (CSASE C) (CS-C)
  misc_feature (56)..(393): Homolog of NCBI NO: 11131628 NR Description: Cysteine synthase, chloroplast precursor sulfhydrylase) (O-acetylserine (Thiol)-lyase) (CSase B) (CS-B)
  misc_feature (1)..(393): Homolog of NCBI NO: 30695056 NR Description: cysteine synthase, mitochondrial (O-acetylserine
  misc_feature (1)..(393): Homolog of NCBI NO: 22331875 NR Description: cysteine synthase, mitochondrial (O-acetylserine
  misc_feature (5)..(393): Homolog of NCBI NO: 12081919 NR Description: plastidic cysteine synthase 1 [Solanum tuberosum]
MASSASLINSLTCSSPAPTQHCFAFTRTTATATATSLRQFNSHRPPPLTTRISSSPSTVVCKAVSVKPQTETEGLNIADDVTQLIGKTPMVYLNNIVKGSVANIAAKLEIMEPCCSVKDRIGFSMINDAEQRGAITPGKSILVEPTSGNTGIGLAFIAASRGYKLILTMPASMSLERRVLLKAFGAELVLTDAAKGMNGAVQKAEEILKSTPNSYMLQQFDNPSNPKVHYETTGPEIWEDTRGKIDILVAGIGTGGTVSGAGQFLKQQNPKIQVIGVEPLESNILTGGKPGPHKIQGIGAGFVPRNLDQDVLDEVIAISSDEAVETAKQLALQEGLLVGISSGAAAAAALKVGKRPENAGKLIGVVFPSFGERYLSTILFQSIREECEKMQPEP

SEQ ID NO: 58896 - protein, 305 aa, Glycine max
  peptide (1)..(305): Ceres Seq. ID no. 15177785
  misc_feature (1)..(281): Pfam Name: Pyridoxal-phosphate dependent enzyme Pfam Description: Pyridoxal-phosphate dependent enzyme
  misc_feature (1)..(304): Homolog of NCBI NO: 25291707 NR Description: cysteine synthase (EC 4.2.99.8) precursor,
  misc_feature (1)..(304): Homolog of NCBI NO: 572517 NR Description: cysteine synthase [Arabidopsis thaliana]
  misc_feature (1)..(304): Homolog of NCBI NO: 12644209 NR Description: CYSTEINE SYNTHASE, CHLOROPLAST PRECURSOR SULFHYDRYLASE) (O-ACETYLSERINE (THIOL)-LYASE) (CSASE B) (CS-B)
  misc_feature (1)..(304): Homolog of NCBI NO: 303902 NR Description: cysteine synthase [Spinacia oleracea]
  misc_feature (1)..(304): Homolog of NCBI NO: 15224351 NR Description: cysteine synthase, chloroplast (O-acetylserine
  misc_feature (1)..(304): Homolog of NCBI NO: 12643295 NR Description: CYSTEINE SYNTHASE, MITOCHONDRIAL PRECURSOR SULFHYDRYLASE) (O-ACETYLSERINE (THIOL)-LYASE) (CSASE C) (CS-C)
  misc_feature (1)..(304): Homolog of NCBI NO: 11131628 NR Description: Cysteine synthase, chloroplast precursor sulfhydrylase) (O-acetylserine (Thiol)-lyase) (CSase B) (CS-B)
  misc_feature (1)..(304): Homolog of NCBI NO: 30695056 NR Description: cysteine synthase, mitochondrial (O-acetylserine
  misc_feature (1)..(304): Homolog of NCBI NO: 22331875 NR Description: cysteine synthase, mitochondrial (O-acetylserine
  misc_feature (1)..(304): Homolog of NCBI NO: 12081919 NR Description: plastidic cysteine synthase 1 [Solanum tuberosum]
MVYLNNIVKGSVANIAAKLEIMEPCCSVKDRIGFSMINDAEQRGAITPGKSILVEPTSGNTGIGLAFIAASRGYKLILTMPASMSLERRVLLKAFGAELVLTDAAKGMNGAVQKAEEILKSTPNSYMLQQFDNPSNPKVHYETTGPEIWEDTRGKIDILVAGIGTGGTVSGAGQFLKQQNPKIQVIGVEPLESNILTGGKPGPHKIQGIGAGFVPRNLDQDVLDEVIAISSDEAVETAKQLALQEGLLVGISSGAAAAAALKVGKRPENAGKLIGVVFPSFGERYLSTILFQSIREECEKMQPEP

SEQ ID NO: 58897 - protein, 284 aa, Glycine max
  peptide (1)..(284): Ceres Seq. ID no. 15177786
  misc_feature (1)..(260): Pfam Name: Pyridoxal-phosphate dependent enzyme Pfam Description: Pyridoxal-phosphate dependent enzyme
  misc_feature (1)..(283): Homolog of NCBI NO: 25291707 NR Description: cysteine synthase (EC 4.2.99.8) precursor,
  misc_feature (1)..(283): Homolog of NCBI NO: 572517 NR Description: cysteine synthase [Arabidopsis thaliana]
  misc_feature (1)..(283): Homolog of NCBI NO: 12644209 NR Description: CYSTEINE SYNTHASE, CHLOROPLAST PRECURSOR SULFHYDRYLASE) (O-ACETYLSERINE (THIOL)-LYASE) (CSASE B) (CS-B)
  misc_feature (1)..(283): Homolog of NCBI NO: 303902 NR Description: cysteine synthase [Spinacia oleracea]
  misc_feature (1)..(283): Homolog of NCBI NO: 15224351 NR Description: cysteine synthase, chloroplast (O-acetylserine
  misc_feature (1)..(283): Homolog of NCBI NO: 12643295 NR Description: CYSTEINE SYNTHASE, MITOCHONDRIAL PRECURSOR SULFHYDRYLASE) (O-ACETYLSERINE (THIOL)-LYASE) (CSASE C) (CS-C)
  misc_feature (1)..(283): Homolog of NCBI NO: 11131628 NR Description: Cysteine synthase, chloroplast precursor sulfhydrylase) (O-acetylserine (Thiol)-lyase) (CSase B) (CS-B)
  misc_feature (1)..(283): Homolog of NCBI NO: 30695056 NR Description: cysteine synthase, mitochondrial (O-acetylserine
  misc_feature (1)..(283): Homolog of NCBI NO: 22331875 NR Description: cysteine synthase, mitochondrial (O-acetylserine
  misc_feature (1)..(283): Homolog of NCBI NO: 12081919 NR Description: plastidic cysteine synthase 1 [Solanum tuberosum]
MEPCCSVKDRIGFSMINDAEQRGAITPGKSILVEPTSGNTGIGLAFIAASRGYKLILTMPASMSLERRVLLKAFGAELVLTDAAKGMNGAVQKAEEILKSTPNSYMLQQFDNPSNPKVHYETTGPEIWEDTRGKIDILVAGIGTGGTVSGAGQFLKQQNPKIQVIGVEPLESNILTGGKPGPHKIQGIGAGFVPRNLDQDVLDEVIAISSDEAVETAKQLALQEGLLVGISSGAAAAAALKVGKRPENAGKLIGVVFPSFGERYLSTILFQSIREECEKMQPEP

SEQ ID NO: 58898 - DNA, 1842 bp, Glycine max
  misc_feature (1)..(1842): Ceres Seq. ID no. 14308540
ttaatcaatactttatgcacttttgttactagcacatgtgattgatattgaattgctctgctgttggatctctgcactggaaatttgtttcattttatatgttctaaacacggcttaggaaacctggcatgggagttattactgtttctacctcagctgctaggactccattaagattgaatacaaggttgatcagtcatcagcaggagaaaattcctctacccctagaaacagcgaagaaacaccagaaaagagtaggaaagactagtgagtcactgaagagagtgagagccgtctctactgttgaaacctctccatgcaccttggatgtggactacaatgaagctgcagccaaacttgaaaatatatataaactcagccctgtatctgatacctgtaatgtggaagatatagatagtaaaatcgagagagtcttgcggaggaggaagaaggttagtgaggaacgtgatgatggaaattgtgataatgtggttagaaaccagaataagaaggccaaacgattgagtcttgataagaggattgcattgaaaaataatgcaaaggaggaggtgattgatcaaactcagaagaaaaggaatgttaagaatagagtacaaaatattgatgtgcttatcagggattattcagcatcaactgatttagttagcatggactggaagaaaatgaagattccgccagttcttccttcttcagaacatgcatggttgttcaagttgatgcagccaatgaaggcactcctacaagcaaaagaagatttaaaggaagtggataaagaaattacaggtggtgaactagctgatgcaacaaacatgagtattattcaagtaaggaaagctatagaggttggtcgagctgcgagaaacaaactcataaagcacaatctccggcttgtattgttcgtgatcaacaaatattttcaagattttgcaagtggcccgaggtttcaagatctttgtcaggcaggagttaagggacttatcacagcaattgatcgttttgagccaaaaagaagacttcagctatctacatacagtttattttggataagacattctatcgttcgttccataaccctctcaagcttcacacgtgttccttttggacttgaaagggttagagtagatatccaaagaacaaaacttaagttaacatttgagctccagaggtcaccaacggaagaagagttagtagaaagaattgggatctcacttgaaagatatcatgaagtaatgaaggcatcaaaacccattttatcccttcattcaagacatataaccacgcaagaggagtatattaatgggattactgatgttgatggtgttaatggtgataataggaggcaacttgctgttctaagacttgctcttgatgatgtgcttgattccctgaagccaaaggagagcctagtgatcaggcagagatatggacttgatggcaagggtgacagaacattgggagaaattgctgggaacttgaatatttctagggaaattgtccggaagcatgaagtcaaagctctcatgaagcttaagcatccagctcggttggattatcttcgtcgttatgttgtataaattaacaaatatatatatatgcttccattggtgtcattttagtcccacgtacgctacctatagccatgcccttgataattctcataacaattatttaagtatacaaaattataatcatttgtcatgtaatttgtatatgaaggagttattgctcataagaaataacaacccaatacatgttacatgtaatgtgttgtgttcatgaattacattccaaattatataatagttgctagagttcatgtcg

SEQ ID NO: 58899 - protein, 488 aa, Glycine max
  peptide (1)..(488): Ceres Seq. ID no. 14308541
  misc_feature (254)..(327): Pfam Name: Sigma-70 region 2 Pfam Description: Sigma-70 region 2
  misc_feature (191)..(487): Homolog of NCBI NO: 23041419 NR Description: hypothetical protein [Trichodesmium erythraeum
  misc_feature (123)..(487): Homolog of NCBI NO: 217140 NR Description: principal sigma factor [Synechococcus sp.]
  misc_feature (74)..(487): Homolog of NCBI NO: 16332132 NR Description: RNA polymerase sigma factor [Synechocystis sp.
  misc_feature (191)..(487): Homolog of NCBI NO: 17232755 NR Description: transcription initiation factor sigma [Nostoc sp.
  misc_feature (191)..(487): Homolog of NCBI NO: 1588486 NR Description: RNA polymerase sigma factor
  misc_feature (191)..(487): Homolog of NCBI NO: 558881 NR Description: SigA [Synechococcus sp. PCC 7002]
  misc_feature (191)..(487): Homolog of NCBI NO: 23128093 NR Description: hypothetical protein [Nostoc punctiforme]
  misc_feature (18)..(252): Homolog of NCBI NO: 15010718 NR Description: AT5g24120/MLE8_4 [Arabidopsis thaliana]
  misc_feature (69)..(487): Homolog of NCBI NO: 30698488 NR Description: Sig5 [Oryza sativa (japonica cultivar-group)]
  misc_feature (18)..(488): Homolog of NCBI NO: 15237896 NR Description: sigma-related factor (emb CAA77213.1)
MGVITVSTSAARTPLRLNTRLISHQQEKIPLPLETAKKHQKRVGKTSESLKRVRAVSTVETSPCTLDVDYNEAAAKLENIYKLSPVSDTCNVEDIDSKIERVLRRRKKVSEERDDGNCDNVVRNQNKKAKRLSLDKRIALKNNAKEEVIDQTQKKRNVKNRVQNIDVLIRDYSASTDLVSMDWKKMKIPPVLPSSEHAWLFKLMQPMKALLQAKEDLKEVDKEITGGELADATNMSIIQVRKAIEVGRAARNKLIKHNLRLVLFVINKYFQDFASGPRFQDLCQAGVKGLITAIDRFEPKRRLQLSTYSLFWIRHSIVRSITLSSFTRVPFGLERVRVDIQRTKLKLTFELQRSPTEEELVERIGISLERYHEVMKASKPILSLHSRHITTQEEYINGITDVDGVNGDNRRQLAVLRLALDDVLDSLKPKESLVIRQRYGLDGKGDRTLGEIAGNLNISREIVRKHEVKALMKLKHPARLDYLRRYVV

SEQ ID NO: 58900 - protein, 308 aa, Glycine max
  peptide (1)..(308): Ceres Seq. ID no. 14308542
  misc_feature (74)..(147): Pfam Name: Sigma-70 region 2 Pfam Description: Sigma-70 region 2
  misc_feature (11)..(307): Homolog of NCBI NO: 23041419 NR Description: hypothetical protein [Trichodesmium erythraeum
  misc_feature (1)..(307): Homolog of NCBI NO: 217140 NR Description: principal sigma factor [Synechococcus sp.]
  misc_feature (1)..(307): Homolog of NCBI NO: 16332132 NR Description: RNA polymerase sigma factor [Synechocystis sp.
  misc_feature (11)..(307): Homolog of NCBI NO: 17232755 NR Description: transcription initiation factor sigma [Nostoc sp.
  misc_feature (11)..(307): Homolog of NCBI NO: 1588486 NR Description: RNA polymerase sigma factor
  misc_feature (11)..(307): Homolog of NCBI NO: 558881 NR Description: SigA [Synechococcus sp. PCC 7002]
  misc_feature (11)..(307): Homolog of NCBI NO: 23128093 NR Description: hypothetical protein [Nostoc punctiforme]
  misc_feature (1)..(72): Homolog of NCBI NO: 15010718 NR Description: AT5g24120/MLE8_4 [Arabidopsis thaliana]
  misc_feature (1)..(307): Homolog of NCBI NO: 30698488 NR Description: Sig5 [Oryza sativa (japonica cultivar-group)]
  misc_feature (1)..(308): Homolog of NCBI NO: 15237896 NR Description: sigma-related factor (emb CAA77213.1)
MDWKKMKIPPVLPSSEHAWLFKLMQPMKALLQAKEDLKEVDKEITGGELADATNMSIIQVRKAIEVGRAARNKLIKHNLRLVLFVINKYFQDFASGPRFQDLCQAGVKGLITAIDRFEPKRRLQLSTYSLFWIRHSIVRSITLSSFTRVPFGLERVRVDIQRTKLKLTFELQRSPTEEELVERIGISLERYHEVMKASKPILSLHSRHITTQEEYINGITDVDGVNGDNRRQLAVLRLALDDVLDSLKPKESLVIRQRYGLDGKGDRTLGEIAGNLNISREIVRKHEVKALMKLKHPARLDYLRRYVV

SEQ ID NO: 58901 - protein, 303 aa, Glycine max
  peptide (1)..(303): Ceres Seq. ID no. 14308543
  misc_feature (69)..(142): Pfam Name: Sigma-70 region 2 Pfam Description: Sigma-70 region 2
  misc_feature (6)..(302): Homolog of NCBI NO: 23041419 NR Description: hypothetical protein [Trichodesmium erythraeum
  misc_feature (1)..(302): Homolog of NCBI NO: 217140 NR Description: principal sigma factor [Synechococcus sp.]
  misc_feature (1)..(302): Homolog of NCBI NO: 16332132 NR Description: RNA polymerase sigma factor [Synechocystis sp.
  misc_feature (6)..(302): Homolog of NCBI NO: 17232755 NR Description: transcription initiation factor sigma [Nostoc sp.
  misc_feature (6)..(302): Homolog of NCBI NO: 1588486 NR Description: RNA polymerase sigma factor
  misc_feature (6)..(302): Homolog of NCBI NO: 558881 NR Description: SigA [Synechococcus sp. PCC 7002]
  misc_feature (6)..(302): Homolog of NCBI NO: 23128093 NR Description: hypothetical protein [Nostoc punctiforme]
  misc_feature (1)..(67): Homolog of NCBI NO: 15010718 NR Description: AT5g24120/MLE8_4 [Arabidopsis thaliana]
  misc_feature (1)..(302): Homolog of NCBI NO: 30698488 NR Description: Sig5 [Oryza sativa (japonica cultivar-group)]
  misc_feature (1)..(303): Homolog of NCBI NO: 15237896 NR Description: sigma-related factor (emb CAA77213.1)
MKIPPVLPSSEHAWLFKLMQPMKALLQAKEDLKEVDKEITGGELADATNMSIIQVRKAIEVGRAARNKLIKHNLRLVLFVINKYFQDFASGPRFQDLCQAGVKGLITAIDRFEPKRRLQLSTYSLFWIRHSIVRSITLSSFTRVPFGLERVRVDIQRTKLKLTFELQRSPTEEELVERIGISLERYHEVMKASKPILSLHSRHITTQEEYINGITDVDGVNGDNRRQLAVLRLALDDVLDSLKPKESLVIRQRYGLDGKGDRTLGEIAGNLNISREIVRKHEVKALMKLKHPARLDYLRRYVV

SEQ ID NO: 58902 - DNA, 1607 bp, Glycine max
  misc_feature (1)..(1607): Ceres Seq. ID no. 14313097
aataatagtgcagtgcgtttcagtggtggaaagtggaaaccgtaatcgccaagctggaaagaaaacgctccatttctgcgccactctctgccttatcgccccatttccgttccaacattgtcagagagcaacacagattagtcgtagcagtgagaggcatcggagggggaataaaacatggtttcaacagcaacagaaacagagcaagattagaaagcgccagggtgcgcacgttagcaccgaaccccgtgggttcctctcccctaactcgcttcgcccccacggcattcctacgctgatccacactcaaaacgcatcacaaaaaacaccgtttcgcaaccctaacggaggaggggggtaaaaaaaaaaactgaaaaaaatgtttcggataacgagattctcggggtttttctccgccgcaatgtttgtgattgttcttgttattctctccccctccttccaatccgaagccattcgatcctcccaccgattttccttccggaaagcccctccgttccgcaatgccgccgaatgcggttcaatttccggtgaaaccaccaccgtctgcgacccttccttggtccacgtcgccataaccctcgacgtcgactacctccgcggctcaatcgccgccgtgcactccatcctccacaactccctctgtccggagaacatcttcttccatttcctcgtctccgacaccaacctccaaaccctagttgaatccacgttccctaacttgaagttcaacgtctattacttcgatccgaacatcgtcgctcacttgatctcctcctccgtgcggcaggcgttggagcagcctctcaattacgcgagaaattacctcgttgaccttctggagagttgcgtggagagggtgatctacttggactccgatctggtggtagtggatgacgtggcgaaactgtggagcgcgagtctggactcacgcgccatcggcgcgccggagtactgccacgcgaacttcacgaagtatttcacggcggggttctggtcggagccgaggttgtcggggacgttcgcgcagcggagggcgtgctacttcaacacgggggtgatggtgatggatctggtgaagtggaggaaggaagggtacaccaagagaatcgagaggtggatggagattcagaagagtgataggatctacgagcttggttctctgccgccgtttttgctggtgtttgcgggacacgtggcgcccattgagcaccggtggaaccagcatggtttgggcggggataacgtgaagggtagttgccgtgacttgcaccctggtccggttagtttgttgcattggtctggtagtgggaagccatggatccgtttaagttccaaacgcccctgtcctctggattctctatgggctccctttgatttgtatgcacactcttcctcttaaactaattcttccctctcatttaattcaatttctctttgcttgtcatttttcgctagttagatgttattcatctatttcttctccctaaactttttctccggaaaatttgtatgtcatttctattctattattttcctgtcattcctgatttgaaaataaaagaaaaagaaaagaaagcggattttct

SEQ ID NO: 58903 - protein, 346 aa, Glycine max
  peptide (1)..(346): Ceres Seq. ID no. 14313098
  misc_feature (12)..(344): Homolog of NCBI NO: 18391493 NR Description: glycosyltransferase family 8 [Arabidopsis
  misc_feature (8)..(341): Homolog of NCBI NO: 30689156 NR Description: galactinol synthase, putative [Arabidopsis
  misc_feature (40)..(346): Homolog of NCBI NO: 15221684 NR Description: glycosyltransferase family 8 [Arabidopsis
  misc_feature (39)..(346): Homolog of NCBI NO: 18409445 NR Description: glycosyltransferase family 8 [Arabidopsis
  misc_feature (1)..(312): Homolog of NCBI NO: 20258800 NR Description: putative glycosyl transferase [Arabidopsis
  misc_feature (1)..(344): Homolog of NCBI NO: 15217851 NR Description: glycosyltransferase family 8 [Arabidopsis
  misc_feature (1)..(344): Homolog of NCBI NO: 21554300 NR Description: putative glycosyl transferase [Arabidopsis
  misc_feature (1)..(344): Homolog of NCBI NO: 15235247 NR Description: glycosyltransferase family 8 [Arabidopsis
  misc_feature (6)..(345): Homolog of NCBI NO: 11281926 NR Description: hypothetical protein F26K9.90 - Arabidopsis
  misc_feature (1)..(345): Homolog of NCBI NO: 22331906 NR Description: glycosyltransferase family 8 [Arabidopsis
MFRITRFSGFFSAAMFVIVLVILSPSFQSEAIRSSHRFSFRKAPPFRNAAECGSISGETTTVCDPSLVHVAITLDVDYLRGSIAAVHSILHNSLCPENIFFHFLVSDTNLQTLVESTFPNLKFNVYYFDPNIVAHLISSSVRQALEQPLNYARNYLVDLLESCVERVIYLDSDLVVVDDVAKLWSASLDSRAIGAPEYCHANFTKYFTAGFWSEPRLSGTFAQRRACYFNTGVMVMDLVKWRKEGYTKRIERWMEIQKSDRIYELGSLPPFLLVFAGHVAPIEHRWNQHGLGGDNVKGSCRDLHPGPVSLLHWSGSGKPWIRLSSKRPCPLDSLWAPFDLYAHSSS

SEQ ID NO: 58904 - protein, 332 aa, Glycine max
  peptide (1)..(332): Ceres Seq. ID no. 14313099
  misc_feature (1)..(330): Homolog of NCBI NO: 18391493 NR Description: glycosyltransferase family 8 [Arabidopsis
  misc_feature (1)..(327): Homolog of NCBI NO: 30689156 NR Description: galactinol synthase, putative [Arabidopsis
  misc_feature (26)..(332): Homolog of NCBI NO: 15221684 NR Description: glycosyltransferase family 8 [Arabidopsis
  misc_feature (25)..(332): Homolog of NCBI NO: 18409445 NR Description: glycosyltransferase family 8 [Arabidopsis
  misc_feature (1)..(298): Homolog of NCBI NO: 20258800 NR Description: putative glycosyl transferase [Arabidopsis
  misc_feature (1)..(330): Homolog of NCBI NO: 15217851 NR Description: glycosyltransferase family 8 [Arabidopsis
  misc_feature (1)..(330): Homolog of NCBI NO: 21554300 NR Description: putative glycosyl transferase [Arabidopsis
  misc_feature (1)..(330): Homolog of NCBI NO: 15235247 NR Description: glycosyltransferase family 8 [Arabidopsis
  misc_feature (1)..(331): Homolog of NCBI NO: 11281926 NR Description: hypothetical protein F26K9.90 - Arabidopsis
  misc_feature (1)..(331): Homolog of NCBI NO: 22331906 NR Description: glycosyltransferase family 8 [Arabidopsis
MFVIVLVILSPSFQSEAIRSSHRFSFRKAPPFRNAAECGSISGETTTVCDPSLVHVAITLDVDYLRGSIAAVHSILHNSLCPENIFFHFLVSDTNLQTLVESTFPNLKFNVYYFDPNIVAHLISSSVRQALEQPLNYARNYLVDLLESCVERVIYLDSDLVVVDDVAKLWSASLDSRAIGAPEYCHANFTKYFTAGFWSEPRLSGTFAQRRACYFNTGVMVMDLVKWRKEGYTKRIERWMEIQKSDRIYELGSLPPFLLVFAGHVAPIEHRWNQHGLGGDNVKGSCRDLHPGPVSLLHWSGSGKPWIRLSSKRPCPLDSLWAPFDLYAHSSS

SEQ ID NO: 58905 - DNA, 1339 bp, Glycine max
  misc_feature (1)..(1339): Ceres Seq. ID no. 14316499
gaatccttcatatcactgccggcgcgcaagagaggaccatccttgttctgccctctacctcgttcatacaaacatttcgcacacgcagctctatctctccacaacacatccaccatgggtctcatcaagggcggcttcttgcgcctgttccaaacactgctatacgcgctctgcttctgctgcgccggcattgccctcggcatctactcatacttcctcgcggtccaagccgatcgcgaccagggcatccccagatggcaaaaggctgttgagggtatctccggcgtggctgttctgtacaccatcgctgccgtggtcctcacttgctgccttggtggtatcagcttcttcgccttcaccgcgattgtccttgacatcctcttcgtcggcggcttcattgccatcgctgttctgacccgccacggtgcttcctcttgcactggcatcgtcaacacccctctcggtatcggcaatgccaacgccaactctgagggcttcggcaacaacggtctcggcactggaaacggcgagaacctcacctacgctgtttctcctcgcaacgcttgccgcatgaacacagccgtcttcgccgtgtctattgttgccgctttcctgttcctcatcaccgctctcttccaagtcttccttgtccgcaagcacaagaaggagaagcgtttcggccctggcccgtccaacaactacaccagcggccctgccaagcgcaacttctggcagcgcaagaagaagaccaacgacagggatcttgagaaggatgtcatcactcccgcaccagctggcaccctcaccactggccatgccaccgacatccgtccctcgcacgacacggcctacactggaagcactgtcgctgcccccggcgacaggtacgacaaggtcgacggcgccaacggctacgctacccagcagcacaccggccacgcggctcacggttcccacggcgcctactacggagctcctcagggaaccgccaacccgtacaccatggacactaatggcgatcacactctgcttcgcgagaacaaccctgtctaccgcggcgttgcttagatcaatgattgtcccatcggcaacacgatcaacaactagacttcgagtctactgacagctagtctttcgggactgatcagctgccttttctttctgtttgctccatgacgcgatttaatgaacaagataccactataatgccacctgtaacataggacttctgaaaagaaggtgatacgaagttgggattggatggtggcgaggagcgatgtttactctaatatatgtaattgcaagaatgacagcggcacctagccgtttaataactaag

SEQ ID NO: 58906 - protein, 355 aa, Glycine max
  peptide (1)..(355): Ceres Seq. ID no. 14316500
  misc_feature (39)..(341): Homolog of NCBI NO: 32404848 NR Description: hypothetical protein ( (AL513467) conserved
  misc_feature (44)..(313): Homolog of NCBI NO: 40747543 NR Description: hypothetical protein AN0600.2 [Aspergillus
ESFISLPARKRGPSLFCPLPRSYKHFAHAALSLHNTSTMGLIKGGFLRLFQTLLYALCFCCAGIALGIYSYFLAVQADRDQGIPRWQKAVEGISGVAVLYTIAAVVLTCCLGGISFFAFTAIVLDILFVGGFIAIAVLTRHGASSCTGIVNTPLGIGNANANSEGFGNNGLGTGNGENLTYAVSPRNACRMNTAVFAVSIVAAFLFLITALFQVFLVRKHKKEKRFGPGPSNNYTSGPAKRNFWQRKKKTNDRDLEKDVITPAPAGTLTTGHATDIRPSHDTAYTGSTVAAPGDRYDKVDGANGYATQQHTGHAAHGSHGAYYGAPQGTANPYTMDTNGDHTLLRENNPVYRGVA

SEQ ID NO: 58907 - protein, 317 aa, Glycine max
  peptide (1)..(317): Ceres Seq. ID no. 14316501
  misc_feature (1)..(303): Homolog of NCBI NO: 32404848 NR Description: hypothetical protein ( (AL513467) conserved
  misc_feature (6)..(275): Homolog of NCBI NO: 40747543 NR Description: hypothetical protein AN0600.2 [Aspergillus
MGLIKGGFLRLFQTLLYALCFCCAGIALGIYSYFLAVQADRDQGIPRWQKAVEGISGVAVLYTIAAVVLTCCLGGISFFAFTAIVLDILFVGGFIAIAVLTRHGASSCTGIVNTPLGIGNANANSEGFGNNGLGTGNGENLTYAVSPRNACRMNTAVFAVSIVAAFLFLITALFQVFLVRKHKKEKRFGPGPSNNYTSGPAKRNFWQRKKKTNDRDLEKDVITPAPAGTLTTGHATDIRPSHDTAYTGSTVAAPGDRYDKVDGANGYATQQHTGHAAHGSHGAYYGAPQGTANPYTMDTNGDHTLLRENNPVYRGVA

SEQ ID NO: 58908 - DNA, 1717 bp, Glycine max
  misc_feature (1)..(1717): Ceres Seq. ID no. 14309682
tttcctcttctttgcatcatcattctcattccttctttctaaactaaccaactttttttcaaacaaattcgattctttcttcatttttaacctaattttcttttcgatccaaaaaatggctctctcgcgcgttgttgctcaatcgtcgcaatcgaatcttctgaaacccctagcgtcgtacttatcactacgacgccgttcggtttcgacttcgtcagacccactcacgatagagacctcggtgcccttcacctcccacaactgcgacgcgccgtcacgcgccgtggagacctcctcggcggagctctttgcgttcttccacgacatggcgctgatgcggcggatggagatcgcggcggactcgctctacaaggcgaagctgatccgcggcttctgccacctctacgacggtcaggaggctgtcgccgtcggcatggaggccgccatcacgcgcaaggactgcgtcatcaccgcctaccgcgaccattgcaccttcctcgcccgtggcggaaccctaatcgagatcttctccgagctcatgggccgccgcgacggctgctccaaggggaaagggggatccatgcacttttataggaaggaaggtggcttctacggtggccatggaatcgttggggcgcaggttccgcttgggtgtggcttggcttttgctcagaagtattgtaaagatgagaatgttacgttttctatgtacggtgatggtgctgccaatcagggccagttgttcgaggcgcttaacatttccgctctttgggatctcccctccattttggtctgcgagaataatcactatggaatggggacagctgagtggagagctgctaagagtcctgcttattacaagcgtggggattatgttcctggattgaaggtagatggcatggatgctcttgctgtgaaacaagcttgtaaatttgcaaaggagtttgctttgaagaatggtcccattattcttgaaatggacacatacagataccatggccactccatgtctgatcctggcagcacataccgtacacgtgatgagatttctggtgtgagacaggagcgtgatccaattgagagagtaagaaagctactattgactcacgagattgctactgaaaaggagctaaaggacattgaaaaggaaataagaaaagaagttgatgaagccattgccaaagcaaaggaaagtcaaatgccagagccatctgatttatttaccaatgtatatgtaaaaggctttggtgtcgaggcttgtggcgctgataggaaagaagttagagctattttgccctgatggaaaacttttcctttgaatttcttttccttagttttggaccgatcaaaataatgaagaataaaaggttcagaagatcatctctacctatttgttgagctttccccaaattgtatatgaaattgattcttcagtagcaatggggcggaaattaatgttttgccatgtaattttggaggatctaacactcatatgacctcaattgattaagcatgcaactagtgtcctgcaaatttggaggatttcgttatgcaaaacctccatgattggcaaaattttgccattattttatttttaggtattcacaagattgtgttccaattgaaaccattttttggctataagagtctttggacagttaaaaatttgatgcctgtacattgcagattgaattggtgatacaggttggattatgtt

SEQ ID NO: 58909 - protein, 432 aa, Glycine max
  peptide (1)..(432): Ceres Seq. ID no. 14309683
  misc_feature (109)..(404): Pfam Name: Dehydrogenase E1 component Pfam Description: Dehydrogenase E1 component
  misc_feature (49)..(432): Homolog of NCBI NO: 28465345 NR Description: pyruvate dehydrogenase E1 alpha subunit [Beta
  misc_feature (49)..(432): Homolog of NCBI NO: 28465343 NR Description: pyruvate dehydrogenase E1alpha subunit [Beta
  misc_feature (39)..(432): Homolog of NCBI NO: 12003246 NR Description: pyruvate dehydrogenase [Lycopersicon esculentum]
  misc_feature (39)..(432): Homolog of NCBI NO: 2117533 NR Description: pyruvate dehydrogenase (lipoamide) (EC 1.2.4.1)
  misc_feature (39)..(432): Homolog of NCBI NO: 23306664 NR Description: pyruvate dehydrogenase E1a-like subunit IAR4
  misc_feature (39)..(432): Homolog of NCBI NO: 1709453 NR Description: Pyruvate dehydrogenase E1 component alpha
  misc_feature (39)..(432): Homolog of NCBI NO: 15218940 NR Description: pyruvate dehydrogenase e1 alpha subunit -related
  misc_feature (39)..(432): Homolog of NCBI NO: 13430788 NR Description: putative pyruvate dehydrogenase e1 alpha subunit
  misc_feature (39)..(432): Homolog of NCBI NO: 15221692 NR Description: pyruvate dehydrogenase E1 alpha subunit
  misc_feature (39)..(432): Homolog of NCBI NO: 1709449 NR Description: Pyruvate dehydrogenase E1 component alpha
FLFFASSFSFLLSKLTNFFSNKFDSFFIFNLIFFSIQKMALSRVVAQSSQSNLLKPLASYLSLRRRSVSTSSDPLTIETSVPFTSHNCDAPSRAVETSSAELFAFFHDMALMRRMEIAADSLYKAKLIRGFCHLYDGQEAVAVGMEAAITRKDCVITAYRDHCTFLARGGTLIEIFSELMGRRDGCSKGKGGSMHFYRKEGGFYGGHGIVGAQVPLGCGLAFAQKYCKDENVTFSMYGDGAANQGQLFEALNISALWDLPSILVCENNHYGMGTAEWRAAKSPAYYKRGDYVPGLKVDGMDALAVKQACKFAKEFALKNGPIILEMDTYRYHGHSMSDPGSTYRTRDEISGVRQERDPIERVRKLLLTHEIATEKELKDIEKEIRKEVDEAIAKAKESQMPEPSDLFTNVYVKGFGVEACGADRKEVRAILP

SEQ ID NO: 58910 - protein, 394 aa, Glycine max
  peptide (1)..(394): Ceres Seq. ID no. 14309684
  misc_feature (71)..(366): Pfam Name: Dehydrogenase E1 component Pfam Description: Dehydrogenase E1 component
  misc_feature (11)..(394): Homolog of NCBI NO: 28465345 NR Description: pyruvate dehydrogenase E1 alpha subunit [Beta
  misc_feature (11)..(394): Homolog of NCBI NO: 28465343 NR Description: pyruvate dehydrogenase E1alpha subunit [Beta
  misc_feature (1)..(394): Homolog of NCBI NO: 12003246 NR Description: pyruvate dehydrogenase [Lycopersicon esculentum]
  misc_feature (1)..(394): Homolog of NCBI NO: 2117533 NR Description: pyruvate dehydrogenase (lipoamide) (EC 1.2.4.1)
  misc_feature (1)..(394): Homolog of NCBI NO: 23306664 NR Description: pyruvate dehydrogenase E1a-like subunit IAR4
  misc_feature (1)..(394): Homolog of NCBI NO: 1709453 NR Description: Pyruvate dehydrogenase E1 component alpha
  misc_feature (1)..(394): Homolog of NCBI NO: 15218940 NR Description: pyruvate dehydrogenase e1 alpha subunit -related
  misc_feature (1)..(394): Homolog of NCBI NO: 13430788 NR Description: putative pyruvate dehydrogenase e1 alpha subunit
  misc_feature (1)..(394): Homolog of NCBI NO: 15221692 NR Description: pyruvate dehydrogenase E1 alpha subunit
  misc_feature (1)..(394): Homolog of NCBI NO: 1709449 NR Description: Pyruvate dehydrogenase E1 component alpha
MALSRVVAQSSQSNLLKPLASYLSLRRRSVSTSSDPLTIETSVPFTSHNCDAPSRAVETSSAELFAFFHDMALMRRMEIAADSLYKAKLIRGFCHLYDGQEAVAVGMEAAITRKDCVITAYRDHCTFLARGGTLIEIFSELMGRRDGCSKGKGGSMHFYRKEGGFYGGHGIVGAQVPLGCGLAFAQKYCKDENVTFSMYGDGAANQGQLFEALNISALWDLPSILVCENNHYGMGTAEWRAAKSPAYYKRGDYVPGLKVDGMDALAVKQACKFAKEFALKNGPIILEMDTYRYHGHSMSDPGSTYRTRDEISGVRQERDPIERVRKLLLTHEIATEKELKDIEKEIRKEVDEAIAKAKESQMPEPSDLFTNVYVKGFGVEACGADRKEVRAILP

SEQ ID NO: 58911 - protein, 324 aa, Glycine max
  peptide (1)..(324): Ceres Seq. ID no. 14309685
  misc_feature (1)..(296): Pfam Name: Dehydrogenase E1 component Pfam Description: Dehydrogenase E1 component
  misc_feature (1)..(324): Homolog of NCBI NO: 28465345 NR Description: pyruvate dehydrogenase E1 alpha subunit [Beta
  misc_feature (1)..(324): Homolog of NCBI NO: 28465343 NR Description: pyruvate dehydrogenase E1alpha subunit [Beta
  misc_feature (1)..(324): Homolog of NCBI NO: 12003246 NR Description: pyruvate dehydrogenase [Lycopersicon esculentum]
  misc_feature (1)..(324): Homolog of NCBI NO: 2117533 NR Description: pyruvate dehydrogenase (lipoamide) (EC 1.2.4.1)
  misc_feature (1)..(324): Homolog of NCBI NO: 23306664 NR Description: pyruvate dehydrogenase E1a-like subunit IAR4
  misc_feature (1)..(324): Homolog of NCBI NO: 1709453 NR Description: Pyruvate dehydrogenase E1 component alpha
  misc_feature (1)..(324): Homolog of NCBI NO: 15218940 NR Description: pyruvate dehydrogenase e1 alpha subunit -related
  misc_feature (1)..(324): Homolog of NCBI NO: 13430788 NR Description: putative pyruvate dehydrogenase e1 alpha subunit
  misc_feature (1)..(324): Homolog of NCBI NO: 15221692 NR Description: pyruvate dehydrogenase E1 alpha subunit
  misc_feature (1)..(324): Homolog of NCBI NO: 1709449 NR Description: Pyruvate dehydrogenase E1 component alpha
MALMRRMEIAADSLYKAKLIRGFCHLYDGQEAVAVGMEAAITRKDCVITAYRDHCTFLARGGTLIEIFSELMGRRDGCSKGKGGSMHFYRKEGGFYGGHGIVGAQVPLGCGLAFAQKYCKDENVTFSMYGDGAANQGQLFEALNISALWDLPSILVCENNHYGMGTAEWRAAKSPAYYKRGDYVPGLKVDGMDALAVKQACKFAKEFALKNGPIILEMDTYRYHGHSMSDPGSTYRTRDEISGVRQERDPIERVRKLLLTHEIATEKELKDIEKEIRKEVDEAIAKAKESQMPEPSDLFTNVYVKGFGVEACGADRKEVRAILP

SEQ ID NO: 58912 - DNA, 961 bp, Glycine max
  misc_feature (1)..(961): Ceres Seq. ID no. 14308171
atagagaaacagataagggcgctctccgtaccatcttcctaatcctccttacatttgcagtgttcccatgtctcctacccactgaagtcgaacccctatttttcctctccctaatggcttctcaagttcttcttcagcaggcactgtttgcccccaagctaagtttcccttcttcttctcgtaacgtggcgttaatttctagggttccttccaccccaatttcatggcgttgcactcccctcattgctaagcctagtttcgtagtgagagctgacaccaacctcgatggcggtggtgaagccaccgaggatgttccttcggataatgctgaaaaagtttcggaaggcgaagcagaacaagtttcggattctgaagctccgaaatcgcctagaaaaccccgagtcaaactcggagacattatggggatattgaatcagagggcaattgaggcatccgagaagcaaagaccaactccagacattaggactggggatattgtcgaaatcaaattggaggttcctgagaacaagcgtaggttgtccatttataaagggattgtcatctcaaaacaaaatgctggtattcacacgactattcgaatccgaagaatcattgccggcactggggttgagatagtcttcccagtttactcaccaaacatcaaagaaatcaaagtggtaagtcaccgtaaggtcaggagggcaagattgtactatctgagagacaagcttccgagattctccactttcaagtgatactcggataccccacctttcctcacgttattcgtcgaactagtctgctgatccaggataagtgctgcggagctttaatttttttaatttcaatttgttctgttgtagaatacatcatttttcttcccctttgtgtatcttcccttaaatcgaaacaagtgtactgaaccttgatagtattgagaaatttgaagtgtttcttctgc

SEQ ID NO: 58913 - protein, 250 aa, Glycine max
  peptide (1)..(250): Ceres Seq. ID no. 14308172
  misc_feature (145)..(250): Pfam Name: Ribosomal protein L19 Pfam Description: Ribosomal protein L19
  misc_feature (86)..(177): Homolog of NCBI NO: 7485084 NR Description: hypothetical protein - Arabidopsis thaliana
  misc_feature (37)..(243): Homolog of NCBI NO: 18395422 NR Description: ribosomal protein L19, putative [Arabidopsis
  misc_feature (36)..(243): Homolog of NCBI NO: 15234249 NR Description: ribosomal protein L19, putative [Arabidopsis
  misc_feature (36)..(243): Homolog of NCBI NO: 15239778 NR Description: ribosomal protein L19, putative [Arabidopsis
  misc_feature (41)..(250): Homolog of NCBI NO: 14140122 NR Description: putative plastid ribosomal protein L19 precursor
  misc_feature (86)..(250): Homolog of NCBI NO: 21592584 NR Description: contains similarity to plastid ribosomal protein
  misc_feature (83)..(250): Homolog of NCBI NO: 18422764 NR Description: ribosomal protein L19, putative [Arabidopsis
  misc_feature (83)..(250): Homolog of NCBI NO: 8809601 NR Description: contains similarity to plastid ribosomal protein
  misc_feature (86)..(250): Homolog of NCBI NO: 18414915 NR Description: ribosomal protein L19, putative [Arabidopsis
  misc_feature (52)..(250): Homolog of NCBI NO: 7582403 NR Description: plastid ribosomal protein L19 precursor [Spinacia
RETDKGALRTIFLILLTFAVFPCLLPTEVEPLFFLSLMASQVLLQQALFAPKLSFPSSSRNVALISRVPSTPISWRCTPLIAKPSFVVRADTNLDGGGEATEDVPSDNAEKVSEGEAEQVSDSEAPKSPRKPRVKLGDIMGILNQRAIEASEKQRPTPDIRTGDIVEIKLEVPENKRRLSIYKGIVISKQNAGIHTTIRIRRIIAGTGVEIVFPVYSPNIKEIKVVSHRKVRRARLYYLRDKLPRFSTFK

SEQ ID NO: 58914 - protein, 213 aa, Glycine max
  peptide (1)..(213): Ceres Seq. ID no. 14308173
  misc_feature (108)..(213): Pfam Name: Ribosomal protein L19 Pfam Description: Ribosomal protein L19
  misc_feature (49)..(140): Homolog of NCBI NO: 7485084 NR Description: hypothetical protein - Arabidopsis thaliana
  misc_feature (1)..(206): Homolog of NCBI NO: 18395422 NR Description: ribosomal protein L19, putative [Arabidopsis
  misc_feature (1)..(206): Homolog of NCBI NO: 15234249 NR Description: ribosomal protein L19, putative [Arabidopsis
  misc_feature (1)..(206): Homolog of NCBI NO: 15239778 NR Description: ribosomal protein L19, putative [Arabidopsis
  misc_feature (4)..(213): Homolog of NCBI NO: 14140122 NR Description: putative plastid ribosomal protein L19 precursor
  misc_feature (49)..(213): Homolog of NCBI NO: 21592584 NR Description: contains similarity to plastid ribosomal protein
  misc_feature (46)..(213): Homolog of NCBI NO: 18422764 NR Description: ribosomal protein L19, putative [Arabidopsis
  misc_feature (46)..(213): Homolog of NCBI NO: 8809601 NR Description: contains similarity to plastid ribosomal protein
  misc_feature (49)..(213): Homolog of NCBI NO: 18414915 NR Description: ribosomal protein L19, putative [Arabidopsis
  misc_feature (15)..(213): Homolog of NCBI NO: 7582403 NR Description: plastid ribosomal protein L19 precursor [Spinacia
MASQVLLQQALFAPKLSFPSSSRNVALISRVPSTPISWRCTPLIAKPSFVVRADTNLDGGGEATEDVPSDNAEKVSEGEAEQVSDSEAPKSPRKPRVKLGDIMGILNQRAIEASEKQRPTPDIRTGDIVEIKLEVPENKRRLSIYKGIVISKQNAGIHTTIRIRRIIAGTGVEIVFPVYSPNIKEIKVVSHRKVRRARLYYLRDKLPRFSTFK

SEQ ID NO: 58915 - DNA, 1394 bp, Glycine max
  misc_feature (1)..(1394): Ceres Seq. ID no. 14313107
atattgttttgattgttcattcaagttcaaacttgaatttgattcatctgatctaaccaatgaaatcaaaatcgggattcgattgcagttgcaggtctctctatttggtgcttattacttattattaaggtttctttcttctgttgaaatggtctttagtaattatatttctgccaatgaatctcattgtttaattctgattatacctttcccgaaatgcaattagcgtcaaatggtgacaaggaagaatgttcagaaagcgaacccatcttgaatcatcaccatcttcatttgccaccacccggagaatcctccttttcctgtgaaattattcctatttctgctgctgcttccggcgatgatgatttacaaaacgttcgggttgatgagacttgtcatctcgtaaatgcagatcagccacaatgccgaatatgcctcgatattgtaggagaagatttaattgctccatgccattgcaaaggtacgcaaaagtacgtccacagatcatgtctcgataattggagatccaccaaggaggggttcgcgttttctcactgtacagagtgcagagctgtcttcatattacgtgcaaatgtcccaccagatcggtggtggttgagattaaaatttcagttccttgttgctagagatcatgcattcattttcataattgttcagctggttgttgctttcttgggagtgcttgtgtacaaattttatggagatgaactgagggaaatgtttggttatgaagaacatccatatggattttatacaatggctgttctagccattgttttggttggtttgctctatggcttcttcatagcgataatatgtggtcaaagaatcaatgaacgccactaccatgttcttgccaaacaagaattgactaaggaatatgtggttgaagatcgagaacatgtaaagaatgtgcctgaacttgaccccagccatgtgacagagctaaggatgttgggcctttactagttggatgcatcttctgcatagtcacattgaatttgttgtatttgcggcttgtctccatggtccccttcacatttgtagatcacattggtctgttcagagtgatgccccattaatatggctgtttgggcaccaactggcagtgcacagccacatgggtgttgtttattgtactctattttgattctttatttttaatttatatttttctggcgaaacttgtgaaagaaacatgcagttcacctagaaaattgctcttgtgaatcaatgttgtttggtggagtataaaggaaaaaggtgcagatcctatgaacatgagatattttgtatttgtaacttgtataagtcccttgatgtaacttattttacaatattttttttcatttctatacaaaatattataatcg

SEQ ID NO: 58916 - protein, 257 aa, Glycine max
  peptide (1)..(257): Ceres Seq. ID no. 14313108
  misc_feature (70)..(117): Pfam Name: Zinc finger, C3HC4 type (RING finger) Pfam Description: Zinc finger, C3HC4 type (RING finger)
  misc_feature (66)..(160): Homolog of NCBI NO: 15227153 NR Description: zinc finger (C3HC4-type RING finger) protein
  misc_feature (1)..(185): Homolog of NCBI NO: 25402638 NR Description: hypothetical protein [imported] - Arabidopsis
  misc_feature (183)..(256): Homolog of NCBI NO: 21593635 NR Description: unknown [Arabidopsis thaliana]
  misc_feature (183)..(256): Homolog of NCBI NO: 18391230 NR Description: zinc finger (C3HC4-type RING finger) protein
  misc_feature (1)..(199): Homolog of NCBI NO: 21593635 NR Description: unknown [Arabidopsis thaliana]
  misc_feature (1)..(199): Homolog of NCBI NO: 18391230 NR Description: zinc finger (C3HC4-type RING finger) protein
  misc_feature (182)..(256): Homolog of NCBI NO: 28393273 NR Description: unknown protein [Arabidopsis thaliana]
  misc_feature (66)..(198): Homolog of NCBI NO: 28393273 NR Description: unknown protein [Arabidopsis thaliana]
  misc_feature (31)..(257): Homolog of NCBI NO: 26450547 NR Description: unknown protein [Arabidopsis thaliana]
  misc_feature (31)..(257): Homolog of NCBI NO: 18403075 NR Description: zinc finger (C3HC4-type RING finger) protein
MQLASNGDKEECSESEPILNHHHLHLPPPGESSFSCEIIPISAAASGDDDLQNVRVDETCHLVNADQPQCRICLDIVGEDLIAPCHCKGTQKYVHRSCLDNWRSTKEGFAFSHCTECRAVFILRANVPPDRWWLRLKFQFLVARDHAFIFIIVQLVVAFLGVLVYKFYGDELREMFGYEEHPYGFYTMAVLAIVLVGLLYGFFIAIICGQRINERHYHVLAKQELTKEYVVEDREHVKNVPELDPSHVTELRMLGLY

SEQ ID NO: 58917 - DNA, 1663 bp, Glycine max
  misc_feature (1)..(1663): Ceres Seq. ID no. 15177648
tcatacgatatggatagggtgttctcagtggacgatatctccgatcacttctggcagccgcctatccctgtctccgccgcccaaacttcctcccagatgagccgcagcgcctccgagtgggccttccaacgcttcctccaggaagcttccgcctccgcaccctctcctccgtcttcttcctccgccgccgacgtcgtattcgtcgagatcgaagatcaacctaaacccgcccctccccctccgtcaaacggcgccgttctccccaatgcccctggtcccgtcccccttgactccgacgaataccaggccttcctcaagagcaagcttaacctcgcatgcgccgccgtcgccatgactaggggatctttggctaaatctcaagacccgtcccctttttctgaaggtggatcacagccgactaatccttctctagttgaatctcagactacttctaaaggatctattccttctgaaaatgatccatctaagttacaagataaagataccaatgtaccagttgggattccttccatacctgccatgcaaaagaaacctgctgttgcaattaggccatctacaagtggatcatcaagagaacagtcagatgatgaggacattgagggagagacatctatgattgacaacacggaccctgctgatgtaaaacgagtaaggaggatgctatccaatagggagtcagcccgacgctgtagaagaagaaagcaggctcatttaactgacctagaaacacaggtttctcaattaagaggtgaaaattctaccttgttaaagcgccttactgatgttagtcagaaatacagcgactctgctgttgacaacagagttttaaaagctgatgttgaaacattaagaacaaaggtaaagctctactttatacttaaacctactggctctttctaacaagttccataggtttggctgacaagatggaggatggtgtccaatgagggtcatcttttacagtgaagaaaagctaaattagaattaatgttgcttcatctgtttggacaaagtttatctgacatgtgtgtttgtcatttcctaccatgttattctcatttttaggtgaagatggccgaagagaccgtcaaaagaattactggattgaacccattgcttcatgccatgtctgatatatcatcactgggcctgccatcatttgatggaagaagcccttcagacacttcagctgatgcagctgttcctgtgcaagatgatccacatcatcacttctatcaacccacatctactaatcctattcccagtcatgatccgatagtcaacaatggattggggggcatttcttcaattgaaaatgtgcagcagaatgctgcagtagtgctaggtgggaacaagatgggtcaaacagcatccctgcagcgggtggctagcttggaacatctacaggagcggattcgtggtggacctccatctaatggggagcagtgactaattagccaaatctcctggatgctttgccaggaaattattctaaaacagttatttctgttggttataactagaggcctattcttctggaatacattgtaattcaattgatggggcacatgatgttggattcaattagtgcaccccgtatttttttaaaaaataatataaaatgaactttactttctagttc

SEQ ID NO: 58918 - protein, 306 aa, Glycine max
  peptide (1)..(306): Ceres Seq. ID no. 15177649
  misc_feature (218)..(282): Pfam Name: bZIP transcription factor Pfam Description: bZIP transcription factor
  misc_feature (49)..(296): Homolog of NCBI NO: 16797791 NR Description: bZIP transcription factor [Nicotiana tabacum]
SYDMDRVFSVDDISDHFWQPPIPVSAAQTSSQMSRSASEWAFQRFLQEASASAPSPPSSSSAADVVFVEIEDQPKPAPPPPSNGAVLPNAPGPVPLDSDEYQAFLKSKLNLACAAVAMTRGSLAKSQDPSPFSEGGSQPTNPSLVESQTTSKGSIPSENDPSKLQDKDTNVPVGIPSIPAMQKKPAVAIRPSTSGSSREQSDDEDIEGETSMIDNTDPADVKRVRRMLSNRESARRCRRRKQAHLTDLETQVSQLRGENSTLLKRLTDVSQKYSDSAVDNRVLKADVETLRTKVKLYFILKPTGSF

SEQ ID NO: 58919 - protein, 303 aa, Glycine max
  peptide (1)..(303): Ceres Seq. ID no. 15177650
  misc_feature (215)..(279): Pfam Name: bZIP transcription factor Pfam Description: bZIP transcription factor
  misc_feature (46)..(293): Homolog of NCBI NO: 16797791 NR Description: bZIP transcription factor [Nicotiana tabacum]
MDRVFSVDDISDHFWQPPIPVSAAQTSSQMSRSASEWAFQRFLQEASASAPSPPSSSSAADVVFVEIEDQPKPAPPPPSNGAVLPNAPGPVPLDSDEYQAFLKSKLNLACAAVAMTRGSLAKSQDPSPFSEGGSQPTNPSLVESQTTSKGSIPSENDPSKLQDKDTNVPVGIPSIPAMQKKPAVAIRPSTSGSSREQSDDEDIEGETSMIDNTDPADVKRVRRMLSNRESARRCRRRKQAHLTDLETQVSQLRGENSTLLKRLTDVSQKYSDSAVDNRVLKADVETLRTKVKLYFILKPTGSF

SEQ ID NO: 58920 - protein, 274 aa, Glycine max
  peptide (1)..(274): Ceres Seq. ID no. 15177651
  misc_feature (186)..(250): Pfam Name: bZIP transcription factor Pfam Description: bZIP transcription factor
  misc_feature (17)..(264): Homolog of NCBI NO: 16797791 NR Description: bZIP transcription factor [Nicotiana tabacum]
MSRSASEWAFQRFLQEASASAPSPPSSSSAADVVFVEIEDQPKPAPPPPSNGAVLPNAPGPVPLDSDEYQAFLKSKLNLACAAVAMTRGSLAKSQDPSPFSEGGSQPTNPSLVESQTTSKGSIPSENDPSKLQDKDTNVPVGIPSIPAMQKKPAVAIRPSTSGSSREQSDDEDIEGETSMIDNTDPADVKRVRRMLSNRESARRCRRRKQAHLTDLETQVSQLRGENSTLLKRLTDVSQKYSDSAVDNRVLKADVETLRTKVKLYFILKPTGSF

SEQ ID NO: 58921 - DNA, 1277 bp, Glycine max
  misc_feature (1)..(1277): Ceres Seq. ID no. 14308571
attactaatcaaaattttgagtgcatctttgattatttctctgttttcttcactacctaccgtctttcatgacaaactgtctagtctttatggcggcatgtgctgattgatgtctcaataagatccaagagaccaagattgtcattaatccggttgattatgatgtagggctttgccaggatcttttaattccagtaaccaactttcataatgaagacaagggctatatggttttacctggagatgtttttgatttgcctattcggaaggacattattcatcgtgttgttaggtggcagcttgcaaaacgacaacaggggactcactcaacaaaaactatcagtgaggtcagtggcactgggagaaaaccttggaatcaaaagggaactggtagagcaaggcatggttcattgcgtgggcctcaggtagtgaagcattctgctcattacttgctagtccatctttattccttctttcttctcatttttttgtgttcttattgtccatttttagcagttgaaattaacaaacttaatgaatggtaacagttcaggggtggtgccaccatgcatggccctaagccccgaagccatgctttcaaagtcaataagaaggttcgacgtctagggctgaagattgctttatcagctcgtgcagcagaaggaaagcttcttgtttttgaggatctggcggttcccacacataaaaccaagaatattgtgaattattacaatcaaatggaggataccaagaaactgctgcttgtagatggcgctatagatgaaaagttaaaattatctacacaaaatctacactatgttaacgtacttccctccattggcttgaatgtctacagcattttgctgcatgatacattggtgatgtcccgagctgctgtgagcaaaattgttgagcgcatgcatactccaataaatcgttgaggctgtaactttttattgtgcttcgcttcatttactcggaaataggaacatttctgtagcaacataaaaagatccaatgagaatatctttggtacgaggtgtctgttttaattacataagttaggcaagttatgccattttgcccatgttgaaggttggaacttaggaacttgatgatcgaaatttgacgttcatgtgattaggtttatcttgttttccggtggttgaatctcatttttcaattctttcacatgcataggatctgataaacctgtacatcattcatgacctagtgtccttcattcatgaatttaaccaatatagtttgtctttggc

SEQ ID NO: 58922 - protein, 124 aa, Glycine max
  peptide (1)..(124): Ceres Seq. ID no. 14308572
  misc_feature (1)..(117): Pfam Name: Ribosomal protein L4/L1 family Pfam Description: Ribosomal protein L4/L1 family
  misc_feature (1)..(117): Homolog of NCBI NO: 13470552 NR Description: 50S ribosomal protein L4 [Mesorhizobium loti]
  misc_feature (1)..(117): Homolog of NCBI NO: 15889241 NR Description: AGR_C_3553p [Agrobacterium tumefaciens]
  misc_feature (1)..(118): Homolog of NCBI NO: 15604504 NR Description: 50S RIBOSOMAL PROTEIN L4 (rplD) [Rickettsia
  misc_feature (1)..(117): Homolog of NCBI NO: 15965110 NR Description: PROBABLE 50S RIBOSOMAL PROTEIN L4 [Sinorhizobium
  misc_feature (1)..(118): Homolog of NCBI NO: 15892928 NR Description: 50S ribosomal protein L4 [Rickettsia conorii]
  misc_feature (1)..(118): Homolog of NCBI NO: 23014087 NR Description: hypothetical protein [Magnetospirillum
  misc_feature (1)..(118): Homolog of NCBI NO: 22966121 NR Description: hypothetical protein [Rhodospirillum rubrum]
  misc_feature (1)..(124): Homolog of NCBI NO: 25411960 NR Description: 50S ribosomal protein L4 [imported] - Arabidopsis
  misc_feature (1)..(124): Homolog of NCBI NO: 18399235 NR Description: ribosomal protein L4p family [Arabidopsis
  misc_feature (1)..(124): Homolog of NCBI NO: 21553676 NR Description: 50S ribosomal protein L4 [Arabidopsis thaliana]
MHGPKPRSHAFKVNKKVRRLGLKIALSARAAEGKLLVFEDLAVPTHKTKNIVNYYNQMEDTKKLLLVDGAIDEKLKLSTQNLHYVNVLPSIGLNVYSILLHDTLVMSRAAVSKIVERMHTPINR

SEQ ID NO: 58923 - protein, 105 aa, Glycine max
  peptide (1)..(105): Ceres Seq. ID no. 14308573
  misc_feature (1)..(66): Pfam Name: Ribosomal protein L4/L1 family Pfam Description: Ribosomal protein L4/L1 family
  misc_feature (1)..(66): Homolog of NCBI NO: 13470552 NR Description: 50S ribosomal protein L4 [Mesorhizobium loti]
  misc_feature (1)..(66): Homolog of NCBI NO: 15889241 NR Description: AGR_C_3553p [Agrobacterium tumefaciens]
  misc_feature (1)..(67): Homolog of NCBI NO: 15604504 NR Description: 50S RIBOSOMAL PROTEIN L4 (rplD) [Rickettsia
  misc_feature (1)..(66): Homolog of NCBI NO: 15965110 NR Description: PROBABLE 50S RIBOSOMAL PROTEIN L4 [Sinorhizobium
  misc_feature (1)..(67): Homolog of NCBI NO: 15892928 NR Description: 50S ribosomal protein L4 [Rickettsia conorii]
  misc_feature (1)..(66): Homolog of NCBI NO: 23014087 NR Description: hypothetical protein [Magnetospirillum
  misc_feature (1)..(66): Homolog of NCBI NO: 22966121 NR Description: hypothetical protein [Rhodospirillum rubrum]
  misc_feature (1)..(66): Homolog of NCBI NO: 25411960 NR Description: 50S ribosomal protein L4 [imported] - Arabidopsis
  misc_feature (1)..(66): Homolog of NCBI NO: 18399235 NR Description: ribosomal protein L4p family [Arabidopsis
  misc_feature (1)..(66): Homolog of NCBI NO: 21553676 NR Description: 50S ribosomal protein L4 [Arabidopsis thaliana]
MVLPGDVFDLPIRKDIIHRVVRWQLAKRQQGTHSTKTISEVSGTGRKPWNQKGTGRARHGSLRGPQVVKHSAHYLLVHLYSFFLLIFLCSYCPFLAVEINKLNEW

SEQ ID NO: 58924 - protein, 72 aa, Glycine max
  peptide (1)..(72): Ceres Seq. ID no. 14308574
MKTRAIWFYLEMFLICLFGRTLFIVLLGGSLQNDNRGLTQQKLSVRSVALGENLGIKRELVEQGMVHCVGLR

SEQ ID NO: 58925 - DNA, 1160 bp, Glycine max
  misc_feature (1)..(1160): Ceres Seq. ID no. 14309711
aatgattatcaatgtggactaaactaagcttctgtgctacttgtggtcctgtaacaacttcaagtctacaagtacaaggtgatgaatcctgaaatgcaaaattcaaatgttgatcaattctgaccttttcttttgacaagagaaaatttatttaaagatataactcaagggatgtactaatgataatgataatacaattgcatctcctgaggaataccctattatctggatggattattaaaattttacatcatttttttttcttctccgaaatataagcctgatttgatgctaaacagcacatgcatcattgaaagaggccagcagtttgttttattgtttttaaagtttccataatagtattattctttttaaaatttgtttcctgaaaaaagtttttctttttgcttttaccataaagtcaataatggcaaaatctttcgtgaaataagattcccgttcgttcctttttatgcttttccaacttagttcatgtcctttttgagctcggcttccattttaaccttgcttttttcttatatttgtagcctgcaggtggtcaaagtaacatcttatttggtgaagcatccgttgagaagacagcaaagaagatacataaccagaagttcgcggagctgacaggcaataatattttccaaggagatgttcctccaggctcagctgagaagcctctgagcagggctaagctcagagaaatgactggcagtgacatatttgctgatggaaagacagaaatcaaagaccctgtgcgaggtgcccggaaaccccctggtggagagagcagcattgccttggtttaagttatttttaatttacaaaaaatactagcaatatattctctaatatttattttttctgacatactttctattgatagaaattcgcgtgagtcttgctaaatatgtgactctcatccacaaacaagtgaaactcacatgaatttcagtcaatgaaagaaagcagataaaaaaagtattagaaaatgtgttgttagctttcctctttaacttatcccctttgacataggaattctataaattcgtctgaacttccatgtttttctgtagaagggtcagtgtgttcgattatcagcattgtaagtttcaactttcaatgaacgtggcataacctttacattt

SEQ ID NO: 58926 - protein, 48 aa, Glycine max
  peptide (1)..(48): Ceres Seq. ID no. 14309712
MSFLSSASILTLLFSYICSLQVVKVTSYLVKHPLRRQQRRYITRSSRS

SEQ ID NO: 58927 - protein, 35 aa, Glycine max
  peptide (1)..(35): Ceres Seq. ID no. 14309713
MERQKSKTLCEVPGNPLVERAALPWFKLFLIYKKY

SEQ ID NO: 58928 - protein, 34 aa, Glycine max
  peptide (1)..(34): Ceres Seq. ID no. 14309714
  misc_feature (1)..(34): Homolog of NCBI NO: 18399883 NR Description: expressed protein [Arabidopsis thaliana]
  misc_feature (1)..(34): Homolog of NCBI NO: 25361078 NR Description: unknown protein T11I11.9 [imported] - Arabidopsis
  misc_feature (1)..(34): Homolog of NCBI NO: 30699309 NR Description: expressed protein [Arabidopsis thaliana]
  misc_feature (1)..(34): Homolog of NCBI NO: 25361079 NR Description: hypothetical protein At2g22270 [imported] -
  misc_feature (1)..(34): Homolog of NCBI NO: 18399920 NR Description: expressed protein [Arabidopsis thaliana]
  misc_feature (1)..(34): Homolog of NCBI NO: 33146622 NR Description: hypothetical protein [Oryza sativa (japonica
  misc_feature (1)..(34): Homolog of NCBI NO: 38347099 NR Description: OSJNBa0006M15.14 [Oryza sativa (japonica
  misc_feature (1)..(34): Homolog of NCBI NO: 21553689 NR Description: unknown [Arabidopsis thaliana]
  misc_feature (1)..(34): Homolog of NCBI NO: 30692553 NR Description: expressed protein [Arabidopsis thaliana]
  misc_feature (1)..(34): Homolog of NCBI NO: 15236057 NR Description: expressed protein [Arabidopsis thaliana]
MTGSDIFADGKTEIKDPVRGARKPPGGESSIALV

SEQ ID NO: 58929 - DNA, 1128 bp, Glycine max
  misc_feature (1)..(1128): Ceres Seq. ID no. 14311969
gaaaaactacccttccctttcgtcgttctccgtctccctcatttgttcactttctctctctaaatccctaaaccagatctcgcactcgcgctttctctctctaggattcgacaatggcggccgctccctcgcctcgcgaagagaacgtgtacatggcgaagctcgccgagcaggccgagcgctacgaagagatggtggagttcatggagaaggtctccgccgccgccgacaacgaggagctcaccgtcgaggagaggaacctcctctccgtcgcgtacaagaacgtgatcggagcgcgccgcgcctcgtggcgcatcatctcctcgatcgagcagaaggaggagagccgcggcaacgaggaccacgtctccgtcatccgcgactaccgatccaagatcgagtccgagctctccaacatctgcgacggtattctcaagctcctcgactctcgcttcattccctccgcttcctccggcgattccaaggtcttctacctcaagatgaagggagattaccacaggtacctcgccgagttcaagaccggcgccgagcgtaaggaggctgccgagagcactctctctgcatacaaagccgctcaggacattgcaaatgccgaactgcctccaactcatccaattaggcttggccttgcacttaacttctctgtattttactacgaaatccttaactctcccgatcgtgcctgcaaccttgcaaaacaggcttttgatgaagctattgctgaattggatacactgggagaggagtcatacaaggatagcactctgatcatgcaactccttcgtgataacctcaccctttggacctctgacatgcaggatgatggagcagatgaaattaaagaagcagcaccgaaacaggatgaccagtaaaaatattttactgctaattagaattgaacttctcctccatatctttttgaagggagaaggtgtttgttgctaatatctctttggtactgagattttaggcattcatgtttgttatgattgtggatgtactgggccgtttttagtttgtccttccattttcaagtgttttccaaattgcctattttattaaggacgctgaagtttttattatatggaattggaattttaagattct

SEQ ID NO: 58930 - protein, 259 aa, Glycine max
  peptide (1)..(259): Ceres Seq. ID no. 14311970
  misc_feature (8)..(245): Pfam Name: 14-3-3 protein Pfam Description: 14-3-3 protein
  misc_feature (1)..(259): Homolog of NCBI NO: 3766535 NR Description: 14-3-3 protein [Solanum tuberosum]
  misc_feature (6)..(258): Homolog of NCBI NO: 3023190 NR Description: 14-3-3-LIKE PROTEIN 16R
  misc_feature (6)..(258): Homolog of NCBI NO: 26454608 NR Description: 14-3-3 protein 6
  misc_feature (1)..(259): Homolog of NCBI NO: 4775555 NR Description: 14-3-3-like protein [Pisum sativum]
  misc_feature (1)..(259): Homolog of NCBI NO: 1168189 NR Description: 14-3-3-LIKE PROTEIN A (VFA-1433A)
  misc_feature (1)..(259): Homolog of NCBI NO: 8099063 NR Description: 14-3-3 protein [Populus x canescens]
  misc_feature (1)..(259): Homolog of NCBI NO: 1168195 NR Description: 14-3-3-LIKE PROTEIN
  misc_feature (1)..(259): Homolog of NCBI NO: 1168196 NR Description: 14-3-3-LIKE PROTEIN
  misc_feature (1)..(259): Homolog of NCBI NO: 4850247 NR Description: 14-3-3-like protein [Pisum sativum]
  misc_feature (1)..(259): Homolog of NCBI NO: 13928452 NR Description: 14-3-3 protein [Vigna angularis]
MAAAPSPREENVYMAKLAEQAERYEEMVEFMEKVSAAADNEELTVEERNLLSVAYKNVIGARRASWRIISSIEQKEESRGNEDHVSVIRDYRSKIESELSNICDGILKLLDSRFIPSASSGDSKVFYLKMKGDYHRYLAEFKTGAERKEAAESTLSAYKAAQDIANAELPPTHPIRLGLALNFSVFYYEILNSPDRACNLAKQAFDEAIAELDTLGEESYKDSTLIMQLLRDNLTLWTSDMQDDGADEIKEAAPKQDDQ

SEQ ID NO: 58931 - protein, 246 aa, Glycine max
  peptide (1)..(246): Ceres Seq. ID no. 14311971
  misc_feature (1)..(232): Pfam Name: 14-3-3 protein Pfam Description: 14-3-3 protein
  misc_feature (1)..(246): Homolog of NCBI NO: 3766535 NR Description: 14-3-3 protein [Solanum tuberosum]
  misc_feature (1)..(245): Homolog of NCBI NO: 3023190 NR Description: 14-3-3-LIKE PROTEIN 16R
  misc_feature (1)..(245): Homolog of NCBI NO: 26454608 NR Description: 14-3-3 protein 6
  misc_feature (1)..(246): Homolog of NCBI NO: 4775555 NR Description: 14-3-3-like protein [Pisum sativum]
  misc_feature (1)..(246): Homolog of NCBI NO: 1168189 NR Description: 14-3-3-LIKE PROTEIN A (VFA-1433A)
  misc_feature (1)..(246): Homolog of NCBI NO: 8099063 NR Description: 14-3-3 protein [Populus x canescens]
  misc_feature (1)..(246): Homolog of NCBI NO: 1168195 NR Description: 14-3-3-LIKE PROTEIN
  misc_feature (1)..(246): Homolog of NCBI NO: 1168196 NR Description: 14-3-3-LIKE PROTEIN
  misc_feature (1)..(246): Homolog of NCBI NO: 4850247 NR Description: 14-3-3-like protein [Pisum sativum]
  misc_feature (1)..(246): Homolog of NCBI NO: 13928452 NR Description: 14-3-3 protein [Vigna angularis]
MAKLAEQAERYEEMVEFMEKVSAAADNEELTVEERNLLSVAYKNVIGARRASWRIISSIEQKEESRGNEDHVSVIRDYRSKIESELSNICDGILKLLDSRFIPSASSGDSKVFYLKMKGDYHRYLAEFKTGAERKEAAESTLSAYKAAQDIANAELPPTHPIRLGLALNFSVFYYEILNSPDRACNLAKQAFDEAIAELDTLGEESYKDSTLIMQLLRDNLTLWTSDMQDDGADEIKEAAPKQDDQ

SEQ ID NO: 58932 - protein, 233 aa, Glycine max
  peptide (1)..(233): Ceres Seq. ID no. 14311972
  misc_feature (1)..(219): Pfam Name: 14-3-3 protein Pfam Description: 14-3-3 protein
  misc_feature (1)..(233): Homolog of NCBI NO: 3766535 NR Description: 14-3-3 protein [Solanum tuberosum]
  misc_feature (1)..(232): Homolog of NCBI NO: 3023190 NR Description: 14-3-3-LIKE PROTEIN 16R
  misc_feature (1)..(232): Homolog of NCBI NO: 26454608 NR Description: 14-3-3 protein 6
  misc_feature (1)..(233): Homolog of NCBI NO: 4775555 NR Description: 14-3-3-like protein [Pisum sativum]
  misc_feature (1)..(233): Homolog of NCBI NO: 1168189 NR Description: 14-3-3-LIKE PROTEIN A (VFA-1433A)
  misc_feature (1)..(233): Homolog of NCBI NO: 8099063 NR Description: 14-3-3 protein [Populus x canescens]
  misc_feature (1)..(233): Homolog of NCBI NO: 1168195 NR Description: 14-3-3-LIKE PROTEIN
  misc_feature (1)..(233): Homolog of NCBI NO: 1168196 NR Description: 14-3-3-LIKE PROTEIN
  misc_feature (1)..(233): Homolog of NCBI NO: 4850247 NR Description: 14-3-3-like protein [Pisum sativum]
  misc_feature (1)..(233): Homolog of NCBI NO: 13928452 NR Description: 14-3-3 protein [Vigna angularis]
MVEFMEKVSAAADNEELTVEERNLLSVAYKNVIGARRASWRIISSIEQKEESRGNEDHVSVIRDYRSKIESELSNICDGILKLLDSRFIPSASSGDSKVFYLKMKGDYHRYLAEFKTGAERKEAAESTLSAYKAAQDIANAELPPTHPIRLGLALNFSVFYYEILNSPDRACNLAKQAFDEAIAELDTLGEESYKDSTLIMQLLRDNLTLWTSDMQDDGADEIKEAAPKQDDQ

SEQ ID NO: 58933 - DNA, 1480 bp, Glycine max
  misc_feature (1)..(1480): Ceres Seq. ID no. 13594132
aggaaagaaaagaaaaacatggttggtgaaggagaaaagccgaaggcagtgataataggaggtagcatagcagggatatcaagtgcacatgctctcaccttagctggttgggatgtacttgtgcttgagaaaaccacctcacctccaactggaagccccactggtgcaggtcttggactcaattctttgtcccaacaaatcatccactcttggcttccaccacaccaaaaacaactccttcacaacaccactttaacactcaccattgatcagaaccatgcaactgatagtgagaagaagtttagctggacattgacaagagatgagagttttaacttcagagcagcacattgggctgatctccatggccttctgtacaatgcactgccaccaaatgtatttttgtggggtcacctttttctctcagtccatgttgctgatgataagggttcagtcatagtaaaggctaaagtactagaaactggcaagattatagagatagtaggggattttcttgttgcggcagatggttgtctctcttccctccgccagaaatatctccccgattttaaactcagatattctggctattgtgcttggagaggggttcttgatttttcaaaaattgagaattcagaaaccatcaatggtatcagaaaggcataccctgatctaggaaaatgcttgtactttgacttggcctctggcacacacactgtgttgtatgagctgcaaaacaagaagctcaattggatttggtatgtgaatcagcctgagcctgaagttaagggaacatcggtgacaatgaaagtaaacaatgacatgatccagaaaatgcaccaagaagcggaacaagtttggattcctgagttggtaaaggtcataaaggaaacaaaggaccctttcttaaatttcatatatgatagtgatcccttagagaagatcttttgggacaatgtggtattggtaggggatgcagctcaccccacaactcctcactgccttagaagcactaacatgtcaatattggatgcagcagtgttaggcaaatgcatagagaagtggggaccagaaaagcttggatcagctttagaagagtatcagttcgttaggctaccagtcacttccaaggaagttctgtactcaaggcgtcttggccgattgaaacaagggctagttctacctgatagagaaccttttgacccaaagttaattaggccagaggactgccaggagcttctactgaggaacacaccattttttaatgatgagccgttgtcactgctttgataccatcttacatttcttcatctgattgcttatagcagtgagttttatgactgctttgaaaatagatgtcttacttagcaccatccatacatctgtttgcacactgataatattttggaccctttcccataactgatttggtgccttttggcctcaaatttttgtttttgctattaatagttttatcatc

SEQ ID NO: 58934 - protein, 429 aa, Glycine max
  peptide (1)..(429): Ceres Seq. ID no. 13594133
  misc_feature (169)..(383): Pfam Name: Monooxygenase Pfam Description: Monooxygenase
  misc_feature (15)..(205): Homolog of NCBI NO: 21283954 NR Description: ORFID:MW2225~hypothetical protein, similar to
  misc_feature (266)..(390): Homolog of NCBI NO: 15925296 NR Description: hypothetical protein [Staphylococcus aureus
  misc_feature (15)..(205): Homolog of NCBI NO: 15925296 NR Description: hypothetical protein [Staphylococcus aureus
  misc_feature (14)..(60): Homolog of NCBI NO: 5916090 NR Description: hypothetical protein [Ralstonia eutropha]
  misc_feature (169)..(392): Homolog of NCBI NO: 5916090 NR Description: hypothetical protein [Ralstonia eutropha]
  misc_feature (4)..(60): Homolog of NCBI NO: 22986825 NR Description: hypothetical protein [Burkholderia fungorum]
  misc_feature (118)..(368): Homolog of NCBI NO: 22986825 NR Description: hypothetical protein [Burkholderia fungorum]
  misc_feature (15)..(58): Homolog of NCBI NO: 33601729 NR Description: putative monooxygenase [Bordetella
  misc_feature (120)..(398): Homolog of NCBI NO: 33601729 NR Description: putative monooxygenase [Bordetella
  misc_feature (12)..(426): Homolog of NCBI NO: 15239022 NR Description: monooxygenase family [Arabidopsis thaliana]
RKEKKNMVGEGEKPKAVIIGGSIAGISSAHALTLAGWDVLVLEKTTSPPTGSPTGAGLGLNSLSQQIIHSWLPPHQKQLLHNTTLTLTIDQNHATDSEKKFSWTLTRDESFNFRAAHWADLHGLLYNALPPNVFLWGHLFLSVHVADDKGSVIVKAKVLETGKIIEIVGDFLVAADGCLSSLRQKYLPDFKLRYSGYCAWRGVLDFSKIENSETINGIRKAYPDLGKCLYFDLASGTHTVLYELQNKKLNWIWYVNQPEPEVKGTSVTMKVNNDMIQKMHQEAEQVWIPELVKVIKETKDPFLNFIYDSDPLEKIFWDNVVLVGDAAHPTTPHCLRSTNMSILDAAVLGKCIEKWGPEKLGSALEEYQFVRLPVTSKEVLYSRRLGRLKQGLVLPDREPFDPKLIRPEDCQELLLRNTPFFNDEPLSLL

SEQ ID NO: 58935 - protein, 423 aa, Glycine max
  peptide (1)..(423): Ceres Seq. ID no. 13594134
  misc_feature (163)..(377): Pfam Name: Monooxygenase Pfam Description: Monooxygenase
  misc_feature (9)..(199): Homolog of NCBI NO: 21283954 NR Description: ORFID:MW2225~hypothetical protein, similar to
  misc_feature (260)..(384): Homolog of NCBI NO: 15925296 NR Description: hypothetical protein [Staphylococcus aureus
  misc_feature (9)..(199): Homolog of NCBI NO: 15925296 NR Description: hypothetical protein [Staphylococcus aureus
  misc_feature (8)..(54): Homolog of NCBI NO: 5916090 NR Description: hypothetical protein [Ralstonia eutropha]
  misc_feature (163)..(386): Homolog of NCBI NO: 5916090 NR Description: hypothetical protein [Ralstonia eutropha]
  misc_feature (1)..(54): Homolog of NCBI NO: 22986825 NR Description: hypothetical protein [Burkholderia fungorum]
  misc_feature (112)..(362): Homolog of NCBI NO: 22986825 NR Description: hypothetical protein [Burkholderia fungorum]
  misc_feature (9)..(52): Homolog of NCBI NO: 33601729 NR Description: putative monooxygenase [Bordetella
  misc_feature (114)..(392): Homolog of NCBI NO: 33601729 NR Description: putative monooxygenase [Bordetella
  misc_feature (6)..(420): Homolog of NCBI NO: 15239022 NR Description: monooxygenase family [Arabidopsis thaliana]
MVGEGEKPKAVIIGGSIAGISSAHALTLAGWDVLVLEKTTSPPTGSPTGAGLGLNSLSQQIIHSWLPPHQKQLLHNTTLTLTIDQNHATDSEKKFSWTLTRDESFNFRAAHWADLHGLLYNALPPNVFLWGHLFLSVHVADDKGSVIVKAKVLETGKIIEIVGDFLVAADGCLSSLRQKYLPDFKLRYSGYCAWRGVLDFSKIENSETINGIRKAYPDLGKCLYFDLASGTHTVLYELQNKKLNWIWYVNQPEPEVKGTSVTMKVNNDMIQKMHQEAEQVWIPELVKVIKETKDPFLNFIYDSDPLEKIFWDNVVLVGDAAHPTTPHCLRSTNMSILDAAVLGKCIEKWGPEKLGSALEEYQFVRLPVTSKEVLYSRRLGRLKQGLVLPDREPFDPKLIRPEDCQELLLRNTPFFNDEPLSLL

SEQ ID NO: 58936 - DNA, 1312 bp, Glycine max
  misc_feature (1)..(1312): Ceres Seq. ID no. 14312933
atcaaacactgcacttcatttggttggttcatatctcacttaattttgtgtcctttccatttacatattccacattcattaattttgagaaacatttagtgtatgttacatctggggaaggcttaaagtagatttactttgggtccatggtatccactgacttaaattactttgccaaaccatcattctcaacctcaatccacaaggaaaataattgtaccatagatagaaggctgacatttttaatttgaacctttgattttgagtggtttgtaaaatttaaaccccctcatcctaactaaactttatttgtgaatgtaatcccttctgagacactcataattcatgcatggtgtgcttgtacatttcaggttcaggtacttgcagtaagagaacatattgtaaaactaaaagggaaaaatggccttagatcactttgaggagactgtgcaccaaaaaggaaattggaaatcttccagtgaaatcattgcagattctgatagaaatgcctctggtgactttgactgcaacatctgcctggagtgtgtgcaagatccagtggtgacactttgtggtcatctttattgctggccctgcatatacaaatggcttcattttcaaagcacctctttggatgatgaagaacaacagaggccacaatgtcctgtatgcaaatcagaagtttctcaatcctcccttgttccattatacggccgtggccaaaccacattaccttctaaagggaagccacgtcaagtaggcactgtcataccacaaagacctcatggtccaagaacacttaacactagaagtgtttcacaacctatttctcaaagttaccatccctatagtaatccttatcatcctcaacaacacttcaactcgattccaagcggttacacctcacctatgattagaacaactggttcaatagacaacacatttggaatctttggtgagatgatatatgcaagggtctttggtaaccacgtgtcaaacattcatacatacgccaattcgtacaatctttcggggaccagtaacccaaggatgagaagacatttaatgcaagttgataaatcactcagcagaataagttgtttcctcctttgctgcctagttttgtgtctgctcttattctgattgctacttcattttcatcattagttatagtgcatccttacatagaatacattcactcattgatccagatgtattctatgttagagaagctgcaaattgatgctgagttatgtgtaaattaccaatctctctacgagctatatgaagtgaataatgatattctcatacc

SEQ ID NO: 58937 - protein, 240 aa, Glycine max; identical to SEQ ID NO: 51610
  peptide (1)..(240): Ceres Seq. ID no. 14312934
  misc_feature (36)..(84): Pfam Name: Zinc finger, C3HC4 type (RING finger) Pfam Description: Zinc finger, C3HC4 type (RING finger)
  misc_feature (25)..(125): Homolog of NCBI NO: 18394721 NR Description: zinc finger (C3HC4-type RING finger) protein
  misc_feature (25)..(238): Homolog of NCBI NO: 21553849 NR Description: putative RING zinc finger protein [Arabidopsis
  misc_feature (18)..(238): Homolog of NCBI NO: 15224062 NR Description: zinc finger (C3HC4-type RING finger) protein
  misc_feature (34)..(240): Homolog of NCBI NO: 38346627 NR Description: OSJNBa0074L08.21 [Oryza sativa (japonica
  misc_feature (29)..(231): Homolog of NCBI NO: 7488309 NR Description: RING zinc finger protein F27G19.70 - Arabidopsis
  misc_feature (172)..(240): Homolog of NCBI NO: 15235242 NR Description: zinc finger (C3HC4-type RING finger) protein
  misc_feature (29)..(138): Homolog of NCBI NO: 15235242 NR Description: zinc finger (C3HC4-type RING finger) protein
  misc_feature (29)..(240): Homolog of NCBI NO: 30687607 NR Description: zinc finger (C3HC4-type RING finger) protein
  misc_feature (26)..(240): Homolog of NCBI NO: 15236326 NR Description: E3 ubiquitin ligase, RMA1 [Arabidopsis thaliana]
  misc_feature (6)..(240): Homolog of NCBI NO: 22795037 NR Description: putative RING protein [Populus x canescens]

SEQ ID NO: 58938 - DNA, 1166 bp, Glycine max
  misc_feature (1)..(1166): Ceres Seq. ID no. 15224613
gtagaatatgcatcatcactttggaaaaaagaacctaaaacaaaacatggcacctcaaatttctagaggcagagtccctattgttgttttgctagcctctctagtcctccccctcctttttcaagaatattcttcttcttctgtgttcattgcaagtgcatcagcttcagaatcagatgttgatctgttagaatttcccttaaatttagaatacttggaggctgagtttttcttatttggttccttgggtcatggattggatgtggttgctccaaatttaagtgagggaggaccccctcccattggtgccagattggccagacttgagaacctcatcagggatatcatcttgcagtttggtttgcaggaagttggacacttgagggccataaagagcacagtgagagggttcccaaggccgttacttgatctaagcacagcatcttttgcaaaagtaatgaatagtgcatttgggagacctcttgttcctccctttgacccctatgctaattcgatcaactatctgttagcatcttatgtgattccctatgttggtctcactggttatgttggtgccaatccactgctgcaaaatgctacttccaagaggtttgttgcagggcttctaggagtagagtccgggcaagatgcagttattcgaacattgttgtatgaacgccaagcatcattggtgcaaccatacaaagtgactgtggcagagtttacagatcgcatttcaatgcttaggaacaagctaggaaatgcaggtgtgaaagacgagggtcttgtggtgcctagagtgcaaggtgctgagggtagtgtcacagacaacattctcgctggtgacaaagattcactatcatatcctagaactccagaggaaatattgaggataatatatggaggaggtgatgaacatgttcctggtggtttctaccctaacggagcatgtggtcgcatagctaaatcttacttgaagtacactacttaaagctagagtatgtgttgtagttatatgtgtcttgaaattgttatgcctaccctatcacaataaattattattataataagagagtatgttgcttgatcatatggctacaatttgtaagtgatgattaattaccaataatcgaatctttggtaatatatatttaaaaatcaatatc

SEQ ID NO: 58939 - protein, 327 aa, Glycine max
  peptide (1)..(327): Ceres Seq. ID no. 15224614
  misc_feature (70)..(318): Homolog of NCBI NO: 16263242 NR Description: Conserved hypothetical protein [Sinorhizobium
  misc_feature (28)..(321): Homolog of NCBI NO: 22984403 NR Description: hypothetical protein [Burkholderia fungorum]
  misc_feature (56)..(197): Homolog of NCBI NO: 12083528 NR Description: similar to Arabidopsis thaliana hypothetical
  misc_feature (184)..(324): Homolog of NCBI NO: 12083528 NR Description: similar to Arabidopsis thaliana hypothetical
  misc_feature (50)..(323): Homolog of NCBI NO: 15228845 NR Description: expressed protein [Arabidopsis thaliana]
  misc_feature (55)..(317): Homolog of NCBI NO: 118926 NR Description: Desiccation-related protein PCC13-62 precursor
  misc_feature (41)..(323): Homolog of NCBI NO: 38346151 NR Description: OSJNBb0118P14.11 [Oryza sativa (japonica
  misc_feature (49)..(323): Homolog of NCBI NO: 25357137 NR Description: hypothetical protein T2J15.11 [imported] -
  misc_feature (28)..(323): Homolog of NCBI NO: 18401988 NR Description: dessication-related protein -related [Arabidopsis
  misc_feature (28)..(323): Homolog of NCBI NO: 21593191 NR Description: dessication-related protein, putative
MHHHFGKKNLKQNMAPQISRGRVPIVVLLASLVLPLLFQEYSSSSVFIASASASESDVDLLEFPLNLEYLEAEFFLFGSLGHGLDVVAPNLSEGGPPPIGARLARLENLIRDIILQFGLQEVGHLRAIKSTVRGFPRPLLDLSTASFAKVMNSAFGRPLVPPFDPYANSINYLLASYVIPYVGLTGYVGANPLLQNATSKRFVAGLLGVESGQDAVIRTLLYERQASLVQPYKVTVAEFTDRISMLRNKLGNAGVKDEGLVVPRVQGAEGSVTDNILAGDKDSLSYPRTPEEILRIIYGGGDEHVPGGFYPNGACGRIAKSYLKYTT

SEQ ID NO: 58940 - protein, 314 aa, Glycine max
  peptide (1)..(314): Ceres Seq. ID no. 15224615
  misc_feature (57)..(305): Homolog of NCBI NO: 16263242 NR Description: Conserved hypothetical protein [Sinorhizobium
  misc_feature (15)..(308): Homolog of NCBI NO: 22984403 NR Description: hypothetical protein [Burkholderia fungorum]
  misc_feature (43)..(184): Homolog of NCBI NO: 12083528 NR Description: similar to Arabidopsis thaliana hypothetical
  misc_feature (171)..(311): Homolog of NCBI NO: 12083528 NR Description: similar to Arabidopsis thaliana hypothetical
  misc_feature (37)..(310): Homolog of NCBI NO: 15228845 NR Description: expressed protein [Arabidopsis thaliana]
  misc_feature (42)..(304): Homolog of NCBI NO: 118926 NR Description: Desiccation-related protein PCC13-62 precursor
  misc_feature (28)..(310): Homolog of NCBI NO: 38346151 NR Description: OSJNBb0118P14.11 [Oryza sativa (japonica
  misc_feature (36)..(310): Homolog of NCBI NO: 25357137 NR Description: hypothetical protein T2J15.11 [imported] -
  misc_feature (15)..(310): Homolog of NCBI NO: 18401988 NR Description: dessication-related protein -related [Arabidopsis
  misc_feature (15)..(310): Homolog of NCBI NO: 21593191 NR Description: dessication-related protein, putative
MAPQISRGRVPIVVLLASLVLPLLFQEYSSSSVFIASASASESDVDLLEFPLNLEYLEAEFFLFGSLGHGLDVVAPNLSEGGPPPIGARLARLENLIRDIILQFGLQEVGHLRAIKSTVRGFPRPLLDLSTASFAKVMNSAFGRPLVPPFDPYANSINYLLASYVIPYVGLTGYVGANPLLQNATSKRFVAGLLGVESGQDAVIRTLLYERQASLVQPYKVTVAEFTDRISMLRNKLGNAGVKDEGLVVPRVQGAEGSVTDNILAGDKDSLSYPRTPEEILRIIYGGGDEHVPGGFYPNGACGRIAKSYLKYTT

SEQ ID NO: 58941 - protein, 177 aa, Glycine max
  peptide (1)..(177): Ceres Seq. ID no. 15224616
  misc_feature (1)..(168): Homolog of NCBI NO: 16263242 NR Description: Conserved hypothetical protein [Sinorhizobium
  misc_feature (1)..(171): Homolog of NCBI NO: 22984403 NR Description: hypothetical protein [Burkholderia fungorum]
  misc_feature (1)..(47): Homolog of NCBI NO: 12083528 NR Description: similar to Arabidopsis thaliana hypothetical
  misc_feature (34)..(174): Homolog of NCBI NO: 12083528 NR Description: similar to Arabidopsis thaliana hypothetical
  misc_feature (1)..(173): Homolog of NCBI NO: 15228845 NR Description: expressed protein [Arabidopsis thaliana]
  misc_feature (1)..(167): Homolog of NCBI NO: 118926 NR Description: Desiccation-related protein PCC13-62 precursor
  misc_feature (1)..(173): Homolog of NCBI NO: 38346151 NR Description: OSJNBb0118P14.11 [Oryza sativa (japonica
  misc_feature (1)..(173): Homolog of NCBI NO: 25357137 NR Description: hypothetical protein T2J15.11 [imported] -
  misc_feature (1)..(173): Homolog of NCBI NO: 18401988 NR Description: dessication-related protein -related [Arabidopsis
  misc_feature (1)..(173): Homolog of NCBI NO: 21593191 NR Description: dessication-related protein, putative
MNSAFGRPLVPPFDPYANSINYLLASYVIPYVGLTGYVGANPLLQNATSKRFVAGLLGVESGQDAVIRTLLYERQASLVQPYKVTVAEFTDRISMLRNKLGNAGVKDEGLVVPRVQGAEGSVTDNILAGDKDSLSYPRTPEEILRIIYGGGDEHVPGGFYPNGACGRIAKSYLKYTT

SEQ ID NO: 58942 - DNA, 1293 bp, Glycine max
  misc_feature (1)..(1293): Ceres Seq. ID no. 13581563
aagcctttttttcataaagtgttttaaagaaaaaaaatcatttgggctaaatgaagacagaatatctaaatttatacaatcgtgcatcatggcaaaggtaatttcctagctttagagcaatgtacctcttaaacagtgttaacatcctcataattaagatttattacagtctctcacaaattcttttacaatgtgtccagattcttctgacaatgtatgcattgaagactgttatataagcactggtgatgatctgattgccatcaagagcgggtgggatgagtatggcattgcatatggtcgcccaagcacaaacattatcatccacaggctagttggtaaaactcaaacaagtgggattgctattggaagtgagatgtctggtggtgtatctgaagttcatgcagaagatattcaattctatgattcatataatgcaatcagaataaagacttctcctggcaggggtggttacgttagaaacatctatgtctctaacgtgaccttggctaatgtagatattgctattacgttcactggtttatatggggagcatccagatgatgcttatgacccaaatgctctacctgtaatagaaaaagttacaatcaaggatgtggtaggagaaaatatcaaaactgcaggtcttatagagggtatagaaggtgacaattttgtcaacatttgcctgtcaaacattatccttaacgtgacctcaaactatccatggaactgctcctacgttaaaggatattctgacttagtccagccagaagcttgtgagcctctcaaggagagaatattccctgatcattgttcagattgttactatttgacaaatcaaattcagagttcgaatagtcaaaatagagcaggacaaacttcaggtgacataagaggttgagtggagttgcccaactgtgattgtccatctgcagaaagataccgagaaatgattggtttttgtaacttgtgtgcagtaacaaaataattgagtgatttatcagaaataggaagttggatgatttcatgtcttgctttttctagctacatatggctttggaaaagaaaattgcaaagttttgtgtttntaatgattntaagggaaagaatgtgtttggctattgatagaggtgagatatggctaccctgacataattccctcttgccaaaaatgttatcggacacaggagattttgcagtagtacgaggctggtgcttgttggctttacatcccttttgattgaataaggaatccaataaataaacttcctagaaaggtggaatttacgc

SEQ ID NO: 58943 - protein, 237 aa, Glycine max
  peptide (1)..(237): Ceres Seq. ID no. 13581564
  misc_feature (1)..(197): Pfam Name: Glycosyl hydrolases family 28 Pfam Description: Glycosyl hydrolases family 28
  misc_feature (3)..(203): Homolog of NCBI NO: 22329119 NR Description: polygalacturonase, putative [Arabidopsis
  misc_feature (3)..(200): Homolog of NCBI NO: 15238207 NR Description: polygalacturonase, putative [Arabidopsis
  misc_feature (1)..(203): Homolog of NCBI NO: 15236514 NR Description: polygalacturonase, putative [Arabidopsis
  misc_feature (3)..(201): Homolog of NCBI NO: 34897760 NR Description: ESTs AU029388(E30287),D49277(S16474) correspond a region of the predicted gene.~Similar to Arabidopsis thaliana
  misc_feature (1)..(213): Homolog of NCBI NO: 15236625 NR Description: polygalacturonase, putative [Arabidopsis
  misc_feature (3)..(211): Homolog of NCBI NO: 34912726 NR Description: putative polygalacturonase
  misc_feature (3)..(201): Homolog of NCBI NO: 40714685 NR Description: putative polygalacturonase
  misc_feature (1)..(211): Homolog of NCBI NO: 34393209 NR Description: putative polygalacturonase
  misc_feature (3)..(228): Homolog of NCBI NO: 18412253 NR Description: polygalacturonase, putative [Arabidopsis
  misc_feature (3)..(228): Homolog of NCBI NO: 11263971 NR Description: hypothetical protein T17J13.70 - Arabidopsis
MCPDSSDNVCIEDCYISTGDDLIAIKSGWDEYGIAYGRPSTNIIIHRLVGKTQTSGIAIGSEMSGGVSEVHAEDIQFYDSYNAIRIKTSPGRGGYVRNIYVSNVTLANVDIAITFTGLYGEHPDDAYDPNALPVIEKVTIKDVVGENIKTAGLIEGIEGDNFVNICLSNIILNVTSNYPWNCSYVKGYSDLVQPEACEPLKERIFPDHCSDCYYLTNQIQSSNSQNRAGQTSGDIRG

SEQ ID NO: 58944 - protein, 175 aa, Glycine max
  peptide (1)..(175): Ceres Seq. ID no. 13581565
  misc_feature (1)..(135): Pfam Name: Glycosyl hydrolases family 28 Pfam Description: Glycosyl hydrolases family 28
  misc_feature (1)..(141): Homolog of NCBI NO: 22329119 NR Description: polygalacturonase, putative [Arabidopsis
  misc_feature (1)..(138): Homolog of NCBI NO: 15238207 NR Description: polygalacturonase, putative [Arabidopsis
  misc_feature (1)..(141): Homolog of NCBI NO: 15236514 NR Description: polygalacturonase, putative [Arabidopsis
  misc_feature (1)..(139): Homolog of NCBI NO: 34897760 NR Description: ESTs AU029388(E30287),D49277(S16474) correspond a region of the predicted gene.~Similar to Arabidopsis thaliana
  misc_feature (1)..(151): Homolog of NCBI NO: 15236625 NR Description: polygalacturonase, putative [Arabidopsis
  misc_feature (1)..(149): Homolog of NCBI NO: 34912726 NR Description: putative polygalacturonase
  misc_feature (1)..(139): Homolog of NCBI NO: 40714685 NR Description: putative polygalacturonase
  misc_feature (1)..(149): Homolog of NCBI NO: 34393209 NR Description: putative polygalacturonase
  misc_feature (1)..(166): Homolog of NCBI NO: 18412253 NR Description: polygalacturonase, putative [Arabidopsis
  misc_feature (1)..(166): Homolog of NCBI NO: 11263971 NR Description: hypothetical protein T17J13.70 - Arabidopsis
MSGGVSEVHAEDIQFYDSYNAIRIKTSPGRGGYVRNIYVSNVTLANVDIAITFTGLYGEHPDDAYDPNALPVIEKVTIKDVVGENIKTAGLIEGIEGDNFVNICLSNIILNVTSNYPWNCSYVKGYSDLVQPEACEPLKERIFPDHCSDCYYLTNQIQSSNSQNRAGQTSGDIRG

SEQ ID NO: 58945 - DNA, 369 bp, Glycine max
  misc_feature (1)..(369): Ceres Seq. ID no. 13594143
gtagaaacagaacttcgttgcaaaatatgggtgcttctgacgacaaccccacaactttctccaagttgtcttcaataactttgatgttcttgcactgcccttggttacgcttgtttaccctttatatgcttcaattaaggccatcgagacnnngtctactactgacgatcaacaatggctcacgtattggattctgtattccattctnnnnaatctttgagctcacatttgccaaagttcttgaactgcttcccatttggctttttgccaagttgatattcacttgctggttggttctgcctcacttcaatggggctgcggctgtttataggaattacatcagaccattttatatgaacccccaaatcc

SEQ ID NO: 58946 - protein, 122 aa, Glycine max
  peptide (1)..(122): Ceres Seq. ID no. 13594144
  misc_feature (68)..(114): Homolog of NCBI NO: 1076715 NR Description: abscisic acid-induced protein HVA22 - barley
  misc_feature (68)..(114): Homolog of NCBI NO: 7484787 NR Description: abscisic acid-induced protein homolog F13M23.100
  misc_feature (71)..(117): Homolog of NCBI NO: 34910810 NR Description: P0042A10.34 [Oryza sativa (japonica
  misc_feature (68)..(114): Homolog of NCBI NO: 18416458 NR Description: abscisic acid-induced - like protein [Arabidopsis
  misc_feature (68)..(114): Homolog of NCBI NO: 8777395 NR Description: gene_id:MFB16.12~pir||T05517~similar to unknown
  misc_feature (68)..(114): Homolog of NCBI NO: 18423191 NR Description: expressed protein [Arabidopsis thaliana]
  misc_feature (71)..(120): Homolog of NCBI NO: 15241840 NR Description: AtHVA22b-related protein [Arabidopsis thaliana]
  misc_feature (71)..(120): Homolog of NCBI NO: 4884934 NR Description: AtHVA22b [Arabidopsis thaliana]
  misc_feature (71)..(121): Homolog of NCBI NO: 15221266 NR Description: AtHVA22a [Arabidopsis thaliana]
  misc_feature (71)..(121): Homolog of NCBI NO: 15222421 NR Description: AtHVA22c [Arabidopsis thaliana]
  misc_feature (50)..(50): Xaa is any aa, unknown or other
  misc_feature (51)..(51): Xaa is any aa, unknown or other
  misc_feature (69)..(69): Xaa is any aa, unknown or other
  misc_feature (70)..(70): Xaa is any aa, unknown or other
RNRTSLQNMGASDDNPTTFSKLSSITLMFLHCPWLRLFTLYMLQLRPSRXXLLLTINNGSRIGFCIPFXXIFELTFAKVLELLPIWLFAKLIFTCWLVLPHFNGAAAVYRNYIRPFYMNPQI

SEQ ID NO: 58947 - protein, 114 aa, Glycine max
  peptide (1)..(114): Ceres Seq. ID no. 13594145
  misc_feature (60)..(106): Homolog of NCBI NO: 1076715 NR Description: abscisic acid-induced protein HVA22 - barley
  misc_feature (60)..(106): Homolog of NCBI NO: 7484787 NR Description: abscisic acid-induced protein homolog F13M23.100
  misc_feature (63)..(109): Homolog of NCBI NO: 34910810 NR Description: P0042A10.34 [Oryza sativa (japonica
  misc_feature (60)..(106): Homolog of NCBI NO: 18416458 NR Description: abscisic acid-induced - like protein [Arabidopsis
  misc_feature (60)..(106): Homolog of NCBI NO: 8777395 NR Description: gene_id:MFB16.12~pir||T05517~similar to unknown
  misc_feature (60)..(106): Homolog of NCBI NO: 18423191 NR Description: expressed protein [Arabidopsis thaliana]
  misc_feature (63)..(112): Homolog of NCBI NO: 15241840 NR Description: AtHVA22b-related protein [Arabidopsis thaliana]
  misc_feature (63)..(112): Homolog of NCBI NO: 4884934 NR Description: AtHVA22b [Arabidopsis thaliana]
  misc_feature (63)..(113): Homolog of NCBI NO: 15221266 NR Description: AtHVA22a [Arabidopsis thaliana]
  misc_feature (63)..(113): Homolog of NCBI NO: 15222421 NR Description: AtHVA22c [Arabidopsis thaliana]
  misc_feature (42)..(42): Xaa is any aa, unknown or other
  misc_feature (43)..(43): Xaa is any aa, unknown or other
  misc_feature (61)..(61): Xaa is any aa, unknown or other
  misc_feature (62)..(62): Xaa is any aa, unknown or other
MGASDDNPTTFSKLSSITLMFLHCPWLRLFTLYMLQLRPSRXXLLLTINNGSRIGFCIPFXXIFELTFAKVLELLPIWLFAKLIFTCWLVLPHFNGAAAVYRNYIRPFYMNPQI

SEQ ID NO: 58948 - protein, 95 aa, Glycine max
  peptide (1)..(95): Ceres Seq. ID no. 13594146
  misc_feature (41)..(87): Homolog of NCBI NO: 1076715 NR Description: abscisic acid-induced protein HVA22 - barley
  misc_feature (41)..(87): Homolog of NCBI NO: 7484787 NR Description: abscisic acid-induced protein homolog F13M23.100
  misc_feature (44)..(90): Homolog of NCBI NO: 34910810 NR Description: P0042A10.34 [Oryza sativa (japonica
  misc_feature (41)..(87): Homolog of NCBI NO: 18416458 NR Description: abscisic acid-induced - like protein [Arabidopsis
  misc_feature (41)..(87): Homolog of NCBI NO: 8777395 NR Description: gene_id:MFB16.12~pir||T05517~similar to unknown
  misc_feature (41)..(87): Homolog of NCBI NO: 18423191 NR Description: expressed protein [Arabidopsis thaliana]
  misc_feature (44)..(93): Homolog of NCBI NO: 15241840 NR Description: AtHVA22b-related protein [Arabidopsis thaliana]
  misc_feature (44)..(93): Homolog of NCBI NO: 4884934 NR Description: AtHVA22b [Arabidopsis thaliana]
  misc_feature (44)..(94): Homolog of NCBI NO: 15221266 NR Description: AtHVA22a [Arabidopsis thaliana]
  misc_feature (44)..(94): Homolog of NCBI NO: 15222421 NR Description: AtHVA22c [Arabidopsis thaliana]
  misc_feature (23)..(23): Xaa is any aa, unknown or other
  misc_feature (24)..(24): Xaa is any aa, unknown or other
  misc_feature (42)..(42): Xaa is any aa, unknown or other
  misc_feature (43)..(43): Xaa is any aa, unknown or other
MFLHCPWLRLFTLYMLQLRPSRXXLLLTINNGSRIGFCIPFXXIFELTFAKVLELLPIWLFAKLIFTCWLVLPHFNGAAAVYRNYIRPFYMNPQI

SEQ ID NO: 58949 - DNA, 1283 bp, Glycine max
  misc_feature (1)..(1283): Ceres Seq. ID no. 14309707
aactcaaagaaaagcaaaatgtttttgtacaatttcatcgtgcaggaagtgaagataaaacaaagacaaaaacagcatcaggactacaaccaacttttttagagtcttggacaaaggattggaaatgtaatcccaatatgatcagtttagagtttgaaatatacaaacacaagttcttatcaaacgatttattgggtagagcagtattagacttacaaaattacacattcgtgacaaaaaaaccaaaaatcatcatacttccagttcaattagtcaaacaaaaggtaaaatcaactctcacagatcaaccatctatcgtcattcaaatcacaccagaagattttggttaccatccatcaccatacgtatggacatggtcatatgaacaacaagaacccactttgattatggatcttgccgatgtagtacaagtttcttgctctgaaactgcaacctattttgtaacagagaaaggttcactatacaaattagcaattggagaacatgtaccaataaaaattgaaacattaacacctgttctaaaagtagcagcaggattcgatcatgtgcttttcatttcgaaggataaaacagtgcaaagttttggtgaaaacaattatggacaattgggattggatgattttacatcacgatctattgcatcaacagttcaattggcacctggattatcggatgcagaatctgtttttgcaggtagaaatgtttcattctttgttgcatccaatggagatgcttatgcatgtggtgataattctaaaaatcaattaggattaagaaacaatgagttaattgcgcgtccaaaaattcttgacattaaaaatatatcttgtttacgtacatttaaagactttaccatggcaattagtcatgattcattatactttaccggtatttgtaacggattcgtgtcaaatacatggttgcatgtgttaactggaacaagatttatgtctgttgcaggatggagcgatatttttgctctatcaagagaaggaaaagtgtttaaatgtgatcttgaagaagataaggcagagattgttgaagaattatcaacgaaaaatatcactgaaattgttgctggatttaatcatttaatagctatggaagagaatggtgatgttacttacatacaagaaggacttggagataagttaaagtttttggagtcaaataaggcattatcgattgcagcttctggtactcaaagcatagtagttaccagagatttgtaaaaattacaacattaaatacaaatttgaagc

SEQ ID NO: 58950 - protein, 416 aa, Glycine max
  peptide (1)..(416): Ceres Seq. ID no. 14309708
  misc_feature (126)..(268): Homolog of NCBI NO: 12844231 NR Description: unnamed protein product [Mus musculus]
  misc_feature (124)..(311): Homolog of NCBI NO: 39582597 NR Description: Hypothetical protein CBG08488 [Caenorhabditis
  misc_feature (182)..(308): Homolog of NCBI NO: 19074229 NR Description: REGULATOR OF CHROMOSOME CONDENSATION
  misc_feature (156)..(368): Homolog of NCBI NO: 23113311 NR Description: hypothetical protein [Desulfitobacterium
LKEKQNVFVQFHRAGSEDKTKTKTASGLQPTFLESWTKDWKCNPNMISLEFEIYKHKFLSNDLLGRAVLDLQNYTFVTKKPKIIILPVQLVKQKVKSTLTDQPSIVIQITPEDFGYHPSPYVWTWSYEQQEPTLIMDLADVVQVSCSETATYFVTEKGSLYKLAIGEHVPIKIETLTPVLKVAAGFDHVLFISKDKTVQSFGENNYGQLGLDDFTSRSIASTVQLAPGLSDAESVFAGRNVSFFVASNGDAYACGDNSKNQLGLRNNELIARPKILDIKNISCLRTFKDFTMAISHDSLYFTGICNGFVSNTWLHVLTGTRFMSVAGWSDIFALSREGKVFKCDLEEDKAEIVEELSTKNITEIVAGFNHLIAMEENGDVTYIQEGLGDKLKFLESNKALSIAASGTQSIVVTRDL

SEQ ID NO: 58951 - protein, 371 aa, Glycine max
  peptide (1)..(371): Ceres Seq. ID no. 14309709
  misc_feature (81)..(223): Homolog of NCBI NO: 12844231 NR Description: unnamed protein product [Mus musculus]
  misc_feature (79)..(266): Homolog of NCBI NO: 39582597 NR Description: Hypothetical protein CBG08488 [Caenorhabditis
  misc_feature (137)..(263): Homolog of NCBI NO: 19074229 NR Description: REGULATOR OF CHROMOSOME CONDENSATION
  misc_feature (111)..(323): Homolog of NCBI NO: 23113311 NR Description: hypothetical protein [Desulfitobacterium
MISLEFEIYKHKFLSNDLLGRAVLDLQNYTFVTKKPKIIILPVQLVKQKVKSTLTDQPSIVIQITPEDFGYHPSPYVWTWSYEQQEPTLIMDLADVVQVSCSETATYFVTEKGSLYKLAIGEHVPIKIETLTPVLKVAAGFDHVLFISKDKTVQSFGENNYGQLGLDDFTSRSIASTVQLAPGLSDAESVFAGRNVSFFVASNGDAYACGDNSKNQLGLRNNELIARPKILDIKNISCLRTFKDFTMAISHDSLYFTGICNGFVSNTWLHVLTGTRFMSVAGWSDIFALSREGKVFKCDLEEDKAEIVEELSTKNITEIVAGFNHLIAMEENGDVTYIQEGLGDKLKFLESNKALSIAASGTQSIVVTRDL

SEQ ID NO: 58952 - protein, 281 aa, Glycine max
  peptide (1)..(281): Ceres Seq. ID no. 14309710
  misc_feature (1)..(133): Homolog of NCBI NO: 12844231 NR Description: unnamed protein product [Mus musculus]
  misc_feature (1)..(176): Homolog of NCBI NO: 39582597 NR Description: Hypothetical protein CBG08488 [Caenorhabditis
  misc_feature (47)..(173): Homolog of NCBI NO: 19074229 NR Description: REGULATOR OF CHROMOSOME CONDENSATION
  misc_feature (21)..(233): Homolog of NCBI NO: 23113311 NR Description: hypothetical protein [Desulfitobacterium
MDLADVVQVSCSETATYFVTEKGSLYKLAIGEHVPIKIETLTPVLKVAAGFDHVLFISKDKTVQSFGENNYGQLGLDDFTSRSIASTVQLAPGLSDAESVFAGRNVSFFVASNGDAYACGDNSKNQLGLRNNELIARPKILDIKNISCLRTFKDFTMAISHDSLYFTGICNGFVSNTWLHVLTGTRFMSVAGWSDIFALSREGKVFKCDLEEDKAEIVEELSTKNITEIVAGFNHLIAMEENGDVTYIQEGLGDKLKFLESNKALSIAASGTQSIVVTRDL

SEQ ID NO: 58953 - DNA, 932 bp, Glycine max
  misc_feature (1)..(932): Ceres Seq. ID no. 14312537
gatttaatctacttgatgcttgacaaggctgatgaacagactgacaggcgccttgctaaacatattgtgtccctacactttgagaatcccgagaacgtggaacaggacgtgttggacatttctacattaaccgattatgttagctatgcccgaaagcacatacacccacagctttctgatgaagccgctgaagaattgactagaggttacgtagaaataagaaaaagaggaaattttcctgggagtagcaaaaaggtgataacagcaacaccaaggcagattgagagtctgatacgcctaagtgaagcattggctcggatgcgcttctcagaatgggttgaaaagcatgatgtaatggaggcatttcggcttttggaagttgcaatgcagcagtctgcaacggatcattctactggaactattgacatggatcttattactactggagtttcggcaagtgaaagaatgaggcgagaaagtctgcaacaagcaactcgtaacataatcatggagaaaatgcagattgggggaccatctatgcgcttattggagttattggaagaattgaagaaacaggatactggtagcgaagttcatcttaatgatctaaggaatgcaattgctactctggctacagaaggatttgttaccatgcacggtgacattgtaaaaagatcttgatggcacgagacagtagtgacatcaggggactgtcttatagttattaattatagtgggttactgtttttattctttaaccttcttacccaatcatatgcatccggagttcaatgttacgtacatatttttatatacggtgtcttgtgaatgcatctattggtagttatttggttttatctttttccttatccgaacatctttactgttaggtgtttcattttataattaaacatgtattacctttcttgacg

SEQ ID NO: 58954 - protein, 226 aa, Glycine max
  peptide (1)..(226): Ceres Seq. ID no. 14312538
  misc_feature (1)..(130): Pfam Name: MCM2/3/5 family Pfam Description: MCM2/3/5 family
  misc_feature (1)..(222): Homolog of NCBI NO: 28829641 NR Description: similar to essential for initiation of DNA
  misc_feature (1)..(224): Homolog of NCBI NO: 26354819 NR Description: unnamed protein product [Mus musculus]
  misc_feature (1)..(224): Homolog of NCBI NO: 31982197 NR Description: minichromosome maintenance protein 4
  misc_feature (1)..(224): Homolog of NCBI NO: 12848061 NR Description: unnamed protein product [Mus musculus]
  misc_feature (1)..(224): Homolog of NCBI NO: 1705521 NR Description: DNA REPLICATION LICENSING FACTOR MCM4 (CDC21
  misc_feature (1)..(224): Homolog of NCBI NO: 34870013 NR Description: mini chromosome maintenance deficient 4 homolog
  misc_feature (1)..(226): Homolog of NCBI NO: 40738855 NR Description: hypothetical protein AN6070.2 [Aspergillus
  misc_feature (1)..(203): Homolog of NCBI NO: 25411709 NR Description: probable CDC21 protein [imported] - Arabidopsis
  misc_feature (1)..(203): Homolog of NCBI NO: 34913746 NR Description: putative cdc21 protein [Oryza sativa (japonica
  misc_feature (1)..(225): Homolog of NCBI NO: 30679660 NR Description: DNA replication licensing factor, putative
DLIYLMLDKADEQTDRRLAKHIVSLHFENPENVEQDVLDISTLTDYVSYARKHIHPQLSDEAAEELTRGYVEIRKRGNFPGSSKKVITATPRQIESLIRLSEALARMRFSEWVEKHDVMEAFRLLEVAMQQSATDHSTGTIDMDLITTGVSASERMRRESLQQATRNIIMEKMQIGGPSMRLLELLEELKKQDTGSEVHLNDLRNAIATLATEGFVTMHGDIVKRS

SEQ ID NO: 58955 - protein, 221 aa, Glycine max
  peptide (1)..(221): Ceres Seq. ID no. 14312539
  misc_feature (1)..(125): Pfam Name: MCM2/3/5 family Pfam Description: MCM2/3/5 family
  misc_feature (1)..(217): Homolog of NCBI NO: 28829641 NR Description: similar to essential for initiation of DNA
  misc_feature (1)..(219): Homolog of NCBI NO: 31982197 NR Description: minichromosome maintenance protein 4
  misc_feature (1)..(219): Homolog of NCBI NO: 26354819 NR Description: unnamed protein product [Mus musculus]
  misc_feature (1)..(219): Homolog of NCBI NO: 12848061 NR Description: unnamed protein product [Mus musculus]
  misc_feature (1)..(219): Homolog of NCBI NO: 1705521 NR Description: DNA REPLICATION LICENSING FACTOR MCM4 (CDC21
  misc_feature (1)..(219): Homolog of NCBI NO: 34870013 NR Description: mini chromosome maintenance deficient 4 homolog
  misc_feature (1)..(221): Homolog of NCBI NO: 40738855 NR Description: hypothetical protein AN6070.2 [Aspergillus
  misc_feature (1)..(198): Homolog of NCBI NO: 25411709 NR Description: probable CDC21 protein [imported] - Arabidopsis
  misc_feature (1)..(198): Homolog of NCBI NO: 34913746 NR Description: putative cdc21 protein [Oryza sativa (japonica
  misc_feature (1)..(220): Homolog of NCBI NO: 30679660 NR Description: DNA replication licensing factor, putative
MLDKADEQTDRRLAKHIVSLHFENPENVEQDVLDISTLTDYVSYARKHIHPQLSDEAAEELTRGYVEIRKRGNFPGSSKKVITATPRQIESLIRLSEALARMRFSEWVEKHDVMEAFRLLEVAMQQSATDHSTGTIDMDLITTGVSASERMRRESLQQATRNIIMEKMQIGGPSMRLLELLEELKKQDTGSEVHLNDLRNAIATLATEGFVTMHGDIVKRS

SEQ ID NO: 58956 - protein, 120 aa, Glycine max
  peptide (1)..(120): Ceres Seq. ID no. 14312540
  misc_feature (1)..(116): Homolog of NCBI NO: 28829641 NR Description: similar to essential for initiation of DNA
  misc_feature (1)..(118): Homolog of NCBI NO: 26354819 NR Description: unnamed protein product [Mus musculus]
  misc_feature (1)..(118): Homolog of NCBI NO: 31982197 NR Description: minichromosome maintenance protein 4
  misc_feature (1)..(118): Homolog of NCBI NO: 12848061 NR Description: unnamed protein product [Mus musculus]
  misc_feature (1)..(118): Homolog of NCBI NO: 1705521 NR Description: DNA REPLICATION LICENSING FACTOR MCM4 (CDC21
  misc_feature (1)..(118): Homolog of NCBI NO: 34870013 NR Description: mini chromosome maintenance deficient 4 homolog
  misc_feature (1)..(120): Homolog of NCBI NO: 40738855 NR Description: hypothetical protein AN6070.2 [Aspergillus
  misc_feature (1)..(97): Homolog of NCBI NO: 25411709 NR Description: probable CDC21 protein [imported] - Arabidopsis
  misc_feature (1)..(97): Homolog of NCBI NO: 34913746 NR Description: putative cdc21 protein [Oryza sativa (japonica
  misc_feature (1)..(119): Homolog of NCBI NO: 30679660 NR Description: DNA replication licensing factor, putative
MRFSEWVEKHDVMEAFRLLEVAMQQSATDHSTGTIDMDLITTGVSASERMRRESLQQATRNIIMEKMQIGGPSMRLLELLEELKKQDTGSEVHLNDLRNAIATLATEGFVTMHGDIVKRS

SEQ ID NO: 58957 - DNA, 1311 bp, Glycine max
  misc_feature (1)..(1311): Ceres Seq. ID no. 15172170
ttgatttggttgaccgtctaggacgcaagataataatagatccgacgaaaagttatggaaaggtggccatgataggagttttttcaagcatcgggaccatcattctactctttggtttgtggcggttgcgtaaagttgtaaggaaaaagatagcaaagaaacgcaaagaaaagttcttcaaacaaaatggaggattgttgttagaacaaagactatctactggtgaagttaatgttgacaaaactaaactctttagcttaaaggaattagggaaggccactgatcactttaatataaacagaatacttggaaaaggaggtcaaggtacagtttacaaaggtatgttagtagatggaaaaattgttgcagtgaaaaaatttaaggtcaacggaaatgttgaagaattcatcaacgaatttgtcattctttcacaaattaaccacagaaatgtggttaagttgttgggatgttgtttggagactgaaatccctttgcttgtttatgaattcattcccaatggtaacctttatgaatatttacatggacaaaatgatgagttaccaatgacatgggatatgcgtttgagaattgccactgaagtggctggagctctattttacttgcactcagctgcttctcaacccatttatcatagagatgtgaagtcaacaaatatattattggatgagaagtataaggcaaaagtagcagactttggggcatcaagaatggtttccattgaagccactcacctcactactgcagttcaaggaacttttggatacttagatcctgaatattttcatacaagtcaattgacagagaagagtgatgtctacagctttggagtggttcttgttgaacttttaacaggacaaaaaccaatatcctcagtgaacgaacaaggacttcaaagtttagcttcatattttcttctttgtatggaggaaaatcgtttttttgatattgttgatgcaagagtcatgcaggaagtggagaaagaacacataattgtagttgccaatcttgcaagaagatgcttacagttgaatgggagaaagcgaccaactatgaaagaagtcacattagaattggaaagtatccaaaaactggaaaaccagtgtaatgcacaagagcaacaagaagaacttgagcttgctggaaatgaagatagccaattttgggctgcgtattctacaacttcgactgcagggcaaacttcagacagcaaaacatcaaccttggagattatgcctattcttatcaaataattgttgaattctcttaacttgttttgttgtgtgtaaaatt

SEQ ID NO: 58958 - protein, 422 aa, Glycine max
  peptide (1)..(422): Ceres Seq. ID no. 15172171
  misc_feature (25)..(418): Homolog of NCBI NO: 15219181 NR Description: wall-associated kinase -related [Arabidopsis
  misc_feature (11)..(384): Homolog of NCBI NO: 15219132 NR Description: WAK-like kinase (WLK) [Arabidopsis thaliana]
  misc_feature (24)..(392): Homolog of NCBI NO: 15222427 NR Description: WAK-like kinase (WLK) [Arabidopsis thaliana]
  misc_feature (25)..(420): Homolog of NCBI NO: 25405037 NR Description: protein F20B17.10 [imported] - Arabidopsis
  misc_feature (19)..(420): Homolog of NCBI NO: 30699443 NR Description: WAK-like kinase (WLK) [Arabidopsis thaliana]
  misc_feature (19)..(420): Homolog of NCBI NO: 15219445 NR Description: WAK-like kinase (WLK) [Arabidopsis thaliana]
  misc_feature (23)..(413): Homolog of NCBI NO: 25405037 NR Description: protein F20B17.10 [imported] - Arabidopsis
  misc_feature (23)..(419): Homolog of NCBI NO: 15219447 NR Description: WAK-like kinase (WLK) [Arabidopsis thaliana]
  misc_feature (20)..(392): Homolog of NCBI NO: 25287654 NR Description: protein F18O14.11 [imported] - Arabidopsis
  misc_feature (20)..(419): Homolog of NCBI NO: 15223546 NR Description: WAK-like kinase (WLK) [Arabidopsis thaliana]
DLVDRLGRKIIIDPTKSYGKVAMIGVFSSIGTIILLFGLWRLRKVVRKKIAKKRKEKFFKQNGGLLLEQRLSTGEVNVDKTKLFSLKELGKATDHFNINRILGKGGQGTVYKGMLVDGKIVAVKKFKVNGNVEEFINEFVILSQINHRNVVKLLGCCLETEIPLLVYEFIPNGNLYEYLHGQNDELPMTWDMRLRIATEVAGALFYLHSAASQPIYHRDVKSTNILLDEKYKAKVADFGASRMVSIEATHLTTAVQGTFGYLDPEYFHTSQLTEKSDVYSFGVVLVELLTGQKPISSVNEQGLQSLASYFLLCMEENRFFDIVDARVMQEVEKEHIIVVANLARRCLQLNGRKRPTMKEVTLELESIQKLENQCNAQEQQEELELAGNEDSQFWAAYSTTSTAGQTSDSKTSTLEIMPILIK

SEQ ID NO: 58959 - protein, 400 aa, Glycine max
  peptide (1)..(400): Ceres Seq. ID no. 15172172
  misc_feature (3)..(396): Homolog of NCBI NO: 15219181 NR Description: wall-associated kinase -related [Arabidopsis
  misc_feature (1)..(362): Homolog of NCBI NO: 15219132 NR Description: WAK-like kinase (WLK) [Arabidopsis thaliana]
  misc_feature (2)..(370): Homolog of NCBI NO: 15222427 NR Description: WAK-like kinase (WLK) [Arabidopsis thaliana]
  misc_feature (3)..(398): Homolog of NCBI NO: 25405037 NR Description: protein F20B17.10 [imported] - Arabidopsis
  misc_feature (1)..(398): Homolog of NCBI NO: 30699443 NR Description: WAK-like kinase (WLK) [Arabidopsis thaliana]
  misc_feature (1)..(398): Homolog of NCBI NO: 15219445 NR Description: WAK-like kinase (WLK) [Arabidopsis thaliana]
  misc_feature (1)..(391): Homolog of NCBI NO: 25405037 NR Description: protein F20B17.10 [imported] - Arabidopsis
  misc_feature (1)..(397): Homolog of NCBI NO: 15219447 NR Description: WAK-like kinase (WLK) [Arabidopsis thaliana]
  misc_feature (1)..(370): Homolog of NCBI NO: 25287654 NR Description: protein F18O14.11 [imported] - Arabidopsis
  misc_feature (1)..(397): Homolog of NCBI NO: 15223546 NR Description: WAK-like kinase (WLK) [Arabidopsis thaliana]
MIGVFSSIGTIILLFGLWRLRKVVRKKIAKKRKEKFFKQNGGLLLEQRLSTGEVNVDKTKLFSLKELGKATDHFNINRILGKGGQGTVYKGMLVDGKIVAVKKFKVNGNVEEFINEFVILSQINHRNVVKLLGCCLETEIPLLVYEFIPNGNLYEYLHGQNDELPMTWDMRLRIATEVAGALFYLHSAASQPIYHRDVKSTNILLDEKYKAKVADFGASRMVSIEATHLTTAVQGTFGYLDPEYFHTSQLTEKSDVYSFGVVLVELLTGQKPISSVNEQGLQSLASYFLLCMEENRFFDIVDARVMQEVEKEHIIVVANLARRCLQLNGRKRPTMKEVTLELESIQKLENQCNAQEQQEELELAGNEDSQFWAAYSTTSTAGQTSDSKTSTLEIMPILIK

SEQ ID NO: 58960 - protein, 309 aa, Glycine max; identical to SEQ ID NO: 53298
  peptide (1)..(309): Ceres Seq. ID no. 15172173
  misc_feature (1)..(305): Homolog of NCBI NO: 15219181 NR Description: wall-associated kinase -related [Arabidopsis
  misc_feature (1)..(271): Homolog of NCBI NO: 15219132 NR Description: WAK-like kinase (WLK) [Arabidopsis thaliana]
  misc_feature (1)..(279): Homolog of NCBI NO: 15222427 NR Description: WAK-like kinase (WLK) [Arabidopsis thaliana]
  misc_feature (1)..(307): Homolog of NCBI NO: 25405037 NR Description: protein F20B17.10 [imported] - Arabidopsis
  misc_feature (1)..(307): Homolog of NCBI NO: 30699443 NR Description: WAK-like kinase (WLK) [Arabidopsis thaliana]
  misc_feature (1)..(307): Homolog of NCBI NO: 15219445 NR Description: WAK-like kinase (WLK) [Arabidopsis thaliana]
  misc_feature (1)..(300): Homolog of NCBI NO: 25405037 NR Description: protein F20B17.10 [imported] - Arabidopsis
  misc_feature (1)..(306): Homolog of NCBI NO: 15219447 NR Description: WAK-like kinase (WLK) [Arabidopsis thaliana]
  misc_feature (1)..(279): Homolog of NCBI NO: 25287654 NR Description: protein F18O14.11 [imported] - Arabidopsis
  misc_feature (1)..(306): Homolog of NCBI NO: 15223546 NR Description: WAK-like kinase (WLK) [Arabidopsis thaliana]

SEQ ID NO: 58961 - DNA, 1986 bp, Glycine max
  misc_feature (1)..(1986): Ceres Seq. ID no. 15176298
agatatcgatcgatcaccctctttcataatattcccagctggtcccccaaaaatcaatcaaatggcggcgaaacgattttttgatgattctgatcaagacaacaataataagccaccaggcgataaacggatgagaactacaccaagaccttcttttgcttcggtaataggagaagtggtgatggtgaaaaacttgcagaaccttttctcaggcttggagcccttgcttagaagagtggtgaatgaagagatggagagagtgatgaggcattttagtgtgccacgttcaatattaagtaggtccccttcgttgaggatagaagcagcatcaatggagcaagaatcaaagtatgaactggtgttcagcaagaagctatcggtccctatattcacgggaagcagaatagtggacatagatgggaattccatccacgtgattctggttgacaaaagtggcggtgaagtagtagcggttcccactagtctgggccacccgataaagctagagatagtggtgcttgatggggattttccagctcccaacaacaacaaggaagaatattcatggacgagtgaggagttcaacaaccacatagtgaaggagagaactgggaagaggccattgctcactggagaattgaatctcaccatgagagatgggattgcactaattgaagagattgagttcactgataactctagttggatacgaagcaggaagttcagagttgcagttagggtggctcctgggagtaatcaaactgttcgaattcgtgaaggaatcactgagccatttgttgttaaggatcaccgtggtgaattgtacaagaaacatcacccacctatgctcaacgacgaagtgtggcgcctagagaagattggtaaagacggagctttccacaaaaaattgtccaaagaggggataaacagcgttcaagacttcctcaagttatactttgttgatttccataggctcaaaaagattttgggcgttgggatgtcagataaaatgtgggatgtgacaatcaagcatgcaaagacttgcgagaagggcaacaaatactacgcgtaccgtgggcataattttaccgtctttctgaattccatatgccagttggttagagctgatatcaacggccaaacttttcctggcagagagctaagcaacatgactaggagctatatggaaaaattggtgagagaagcatatgctagatggaatgacttggaagaaattgatgcggctctgttaacccaaggtgaaaccttggaggaatttccaaacaatcatcaggcatcactaatagcatatgatcagaatgactactttggtgataaatctgccgaagttggtaactatgtaccaacccataatgcacaaatgggatgcagcgactggcaagtgaatggaacatttggcacaacatcattcgtgaatggcggcataccttacagcttctcagattcacaatcggacagtgacataaccccctcagttgatgctgccgcaaggtggcattaggaaaattatttagtactttgactttcagctgtaaatacgaattaacagttgaagaatcaaattaggttcagtgacttagtgtgtgaagtcttgttggcccattacataaactgtgtccagcctgccttggcttatattgggctttcttttctttctggttaggcgtagtttattatgaggcccatttcaaggatatgtgcaaagatgaggcctggctcttctgcaaaatatgcaacctgcctttgctgggctaatgttgctatgttttataatttcagctatcacgaaacagaatgatgctttataaatagtgataagataaatgatgcaatcctttgattatactgtatgcattttttgtttatgatttgatttaagagtctcattctgcttttagcttgcaaatgttcatgttctgggactatctattcacacatcacaacaaatgaaattgatccaattcc

SEQ ID NO: 58962 - protein, 506 aa, Glycine max
  peptide (1)..(506): Ceres Seq. ID no. 15176299
  misc_feature (128)..(413): Homolog of NCBI NO: 7489107 NR Description: calmodulin-binding protein TCB60 - common tobacco
  misc_feature (28)..(460): Homolog of NCBI NO: 38637566 NR Description: putative calmodulin-binding protein
  misc_feature (31)..(488): Homolog of NCBI NO: 22329041 NR Description: calmodulin-binding protein [Arabidopsis thaliana]
  misc_feature (41)..(413): Homolog of NCBI NO: 32482927 NR Description: OSJNBa0058G03.4 [Oryza sativa (japonica
  misc_feature (34)..(437): Homolog of NCBI NO: 30687005 NR Description: calmodulin-binding protein [Arabidopsis thaliana]
  misc_feature (17)..(81): Homolog of NCBI NO: 25354646 NR Description: probable calmodulin-binding protein
  misc_feature (80)..(477): Homolog of NCBI NO: 25354646 NR Description: probable calmodulin-binding protein
  misc_feature (29)..(417): Homolog of NCBI NO: 15242785 NR Description: calmodulin-binding protein [Arabidopsis thaliana]
  misc_feature (39)..(417): Homolog of NCBI NO: 34895622 NR Description: putative calmodulin-binding protein
  misc_feature (31)..(456): Homolog of NCBI NO: 25406296 NR Description: hypothetical protein F25P22.22 [imported] -
DIDRSPSFIIFPAGPPKINQMAAKRFFDDSDQDNNNKPPGDKRMRTTPRPSFASVIGEVVMVKNLQNLFSGLEPLLRRVVNEEMERVMRHFSVPRSILSRSPSLRIEAASMEQESKYELVFSKKLSVPIFTGSRIVDIDGNSIHVILVDKSGGEVVAVPTSLGHPIKLEIVVLDGDFPAPNNNKEEYSWTSEEFNNHIVKERTGKRPLLTGELNLTMRDGIALIEEIEFTDNSSWIRSRKFRVAVRVAPGSNQTVRIREGITEPFVVKDHRGELYKKHHPPMLNDEVWRLEKIGKDGAFHKKLSKEGINSVQDFLKLYFVDFHRLKKILGVGMSDKMWDVTIKHAKTCEKGNKYYAYRGHNFTVFLNSICQLVRADINGQTFPGRELSNMTRSYMEKLVREAYARWNDLEEIDAALLTQGETLEEFPNNHQASLIAYDQNDYFGDKSAEVGNYVPTHNAQMGCSDWQVNGTFGTTSFVNGGIPYSFSDSQSDSDITPSVDAAARWH

SEQ ID NO: 58963 - protein, 486 aa, Glycine max
  peptide (1)..(486): Ceres Seq. ID no. 15176300
  misc_feature (108)..(393): Homolog of NCBI NO: 7489107 NR Description: calmodulin-binding protein TCB60 - common tobacco
  misc_feature (8)..(440): Homolog of NCBI NO: 38637566 NR Description: putative calmodulin-binding protein
  misc_feature (11)..(468): Homolog of NCBI NO: 22329041 NR Description: calmodulin-binding protein [Arabidopsis thaliana]
  misc_feature (21)..(393): Homolog of NCBI NO: 32482927 NR Description: OSJNBa0058G03.4 [Oryza sativa (japonica
  misc_feature (14)..(417): Homolog of NCBI NO: 30687005 NR Description: calmodulin-binding protein [Arabidopsis thaliana]
  misc_feature (1)..(61): Homolog of NCBI NO: 25354646 NR Description: probable calmodulin-binding protein
  misc_feature (60)..(457): Homolog of NCBI NO: 25354646 NR Description: probable calmodulin-binding protein
  misc_feature (9)..(397): Homolog of NCBI NO: 15242785 NR Description: calmodulin-binding protein [Arabidopsis thaliana]
  misc_feature (19)..(397): Homolog of NCBI NO: 34895622 NR Description: putative calmodulin-binding protein
  misc_feature (11)..(436): Homolog of NCBI NO: 25406296 NR Description: hypothetical protein F25P22.22 [imported] -
MAAKRFFDDSDQDNNNKPPGDKRMRTTPRPSFASVIGEVVMVKNLQNLFSGLEPLLRRVVNEEMERVMRHFSVPRSILSRSPSLRIEAASMEQESKYELVFSKKLSVPIFTGSRIVDIDGNSIHVILVDKSGGEVVAVPTSLGHPIKLEIVVLDGDFPAPNNNKEEYSWTSEEFNNHIVKERTGKRPLLTGELNLTMRDGIALIEEIEFTDNSSWIRSRKFRVAVRVAPGSNQTVRIREGITEPFVVKDHRGELYKKHHPPMLNDEVWRLEKIGKDGAFHKKLSKEGINSVQDFLKLYFVDFHRLKKILGVGMSDKMWDVTIKHAKTCEKGNKYYAYRGHNFTVFLNSICQLVRADINGQTFPGRELSNMTRSYMEKLVREAYARWNDLEEIDAALLTQGETLEEFPNNHQASLIAYDQNDYFGDKSAEVGNYVPTHNAQMGCSDWQVNGTFGTTSFVNGGIPYSFSDSQSDSDITPSVDAAARWH

SEQ ID NO: 58964 - protein, 463 aa, Glycine max
  peptide (1)..(463): Ceres Seq. ID no. 15176301
  misc_feature (85)..(370): Homolog of NCBI NO: 7489107 NR Description: calmodulin-binding protein TCB60 - common tobacco
  misc_feature (1)..(417): Homolog of NCBI NO: 38637566 NR Description: putative calmodulin-binding protein
  misc_feature (1)..(445): Homolog of NCBI NO: 22329041 NR Description: calmodulin-binding protein [Arabidopsis thaliana]
  misc_feature (1)..(370): Homolog of NCBI NO: 32482927 NR Description: OSJNBa0058G03.4 [Oryza sativa (japonica
  misc_feature (1)..(394): Homolog of NCBI NO: 30687005 NR Description: calmodulin-binding protein [Arabidopsis thaliana]
  misc_feature (1)..(38): Homolog of NCBI NO: 25354646 NR Description: probable calmodulin-binding protein
  misc_feature (37)..(434): Homolog of NCBI NO: 25354646 NR Description: probable calmodulin-binding protein
  misc_feature (1)..(374): Homolog of NCBI NO: 15242785 NR Description: calmodulin-binding protein [Arabidopsis thaliana]
  misc_feature (1)..(374): Homolog of NCBI NO: 34895622 NR Description: putative calmodulin-binding protein
  misc_feature (1)..(413): Homolog of NCBI NO: 25406296 NR Description: hypothetical protein F25P22.22 [imported] -
MRTTPRPSFASVIGEVVMVKNLQNLFSGLEPLLRRVVNEEMERVMRHFSVPRSILSRSPSLRIEAASMEQESKYELVFSKKLSVPIFTGSRIVDIDGNSIHVILVDKSGGEVVAVPTSLGHPIKLEIVVLDGDFPAPNNNKEEYSWTSEEFNNHIVKERTGKRPLLTGELNLTMRDGIALIEEIEFTDNSSWIRSRKFRVAVRVAPGSNQTVRIREGITEPFVVKDHRGELYKKHHPPMLNDEVWRLEKIGKDGAFHKKLSKEGINSVQDFLKLYFVDFHRLKKILGVGMSDKMWDVTIKHAKTCEKGNKYYAYRGHNFTVFLNSICQLVRADINGQTFPGRELSNMTRSYMEKLVREAYARWNDLEEIDAALLTQGETLEEFPNNHQASLIAYDQNDYFGDKSAEVGNYVPTHNAQMGCSDWQVNGTFGTTSFVNGGIPYSFSDSQSDSDITPSVDAAARWH

SEQ ID NO: 58965 - DNA, 1810 bp, Glycine max
  misc_feature (1)..(1810): Ceres Seq. ID no. 14310508
aatgcctagtgaattagctatgaacaatgatgagctacatgtggttatgttcccattccttgcatttggccacattagtccatttgttcagctctccaacaagttgttctctcatggtgttcatgtcactttcttgtcagctgcatccaacattcccagaatcagatcaactcttaatctcaatccagccatcaatgttatctcactaaagttcccaaatggtataaccaacactgctgaattgccacctcacttagctggaaatctcatacacgcccttgacctcactcaagatcaggtgaagtcccttttgttggaactcaaaccccactatgttttctttgactttgcacaacattggctcccaaaattagcttctgaagttggcatcaagtctgttcatttctcagtctactctgccatttctgatgcttacattaccgtgccttctagatttgctgatgttgaaggaagaaacatcacttttgaggatcttaaaaagcctccacctgggtatcctcaaaactctaatatttccctcaaggcctttgaggccatggactttatgttcctcttcacaagatttggtgaaaaaaaccttactggttatgagcgagttttgcaaagccttggtgagtgttcattcatagtgttcaaaacgtgcaaggaaatagaaggaccctacttagactacatagaaacgcaatttcgaaaaccagttttgctatctggtccactagtccccgagccatcaaccgatgtgcttgaggaaaagtggtccaaatggttagatggtttccctgccaaatctgtcatattatgctcctttggcagtgagacatttctgagtgattatcaaatcaaagaactagccagtgggttagaactcactggcttacctttcattttggttctgaatttcccatccaatctctctgccaaagctgagttggagagagcattgccaaaagggtatttggaaagagtgaagaataggggagtggtgcacagtggttggtttcagcagcagcttgtgctgaaacactcaagtgtggggtgctatgtatgccatggtggctttagttcagtgattgaagctatggtcaatgagtgtcaactggtgctgttgcctttcaagggtgaccagtttttcaattctaaactcattgccaatgatttaaaggcaggggtagaggtgaataggagtgatgaagatgggttctttcacaaagaggatatactggaggcattgaaaactgtcatgttggaggataacaaagagcaagggaagcaaataagagaaaaccacatgcaatggagcaagtttttatcaaataaggaaattcagaacaaattcatcacagatctggttgcccagttaaagtctatggcttagtcttgtctcttccaatggaaaataaagtctaccaagactagaaagtataaactatagttcaaaatgatcatattatcatatatcaattgagatatgcgtggtcagtctcgttgttcttgtgattttgctttcccgttgtaggttttattctgtgtctcctttctcccgatcaattaatgcagttaggagattcaccttaaaaaagctaaaaattgcttttgtaacttgaagttattgtattcctactgattttggtcaagaccaagaagttgtcttataatttgtgcacatggtttgttttgaaatttagaaaggaaaaaagaaaagaaaaagtagagcatggaacaaatatcgtttgtaatataggtgaccaataaatgtagaaccattctaaataaatatggctttgaatac

SEQ ID NO: 58966 - protein, 464 aa, Glycine max; identical to SEQ ID NO: 54454
  peptide (1)..(464): Ceres Seq. ID no. 14310509
  misc_feature (7)..(464): Homolog of NCBI NO: 15982889 NR Description: AT4g27560/T29A15_50 [Arabidopsis thaliana]
  misc_feature (7)..(463): Homolog of NCBI NO: 15234195 NR Description: glycosyltransferase family [Arabidopsis thaliana]
  misc_feature (7)..(463): Homolog of NCBI NO: 15234196 NR Description: glycosyltransferase family [Arabidopsis thaliana]
  misc_feature (9)..(462): Homolog of NCBI NO: 15239543 NR Description: glycosyltransferase family [Arabidopsis thaliana]
  misc_feature (11)..(463): Homolog of NCBI NO: 15239525 NR Description: glycosyltransferase family [Arabidopsis thaliana]
  misc_feature (8)..(463): Homolog of NCBI NO: 23955910 NR Description: UDP-glucosyltransferase [Stevia rebaudiana]
  misc_feature (1)..(464): Homolog of NCBI NO: 7433907 NR Description: anthocyanin rhamnosyltransferase - garden petunia
  misc_feature (7)..(464): Homolog of NCBI NO: 22759895 NR Description: rhamnosyl transferase [Nierembergia sp. NB17]
  misc_feature (3)..(464): Homolog of NCBI NO: 480314 NR Description: UDP rhamnose-anthocyanidin-3-glucoside
  misc_feature (1)..(464): Homolog of NCBI NO: 2501497 NR Description: FLAVONOL 3-O-GLUCOSYLTRANSFERASE (UDP-GLUCOSE

SEQ ID NO: 58967 - protein, 458 aa, Glycine max; identical to SEQ ID NO: 54455
  peptide (1)..(458): Ceres Seq. ID no. 14310510
  misc_feature (1)..(458): Homolog of NCBI NO: 15982889 NR Description: AT4g27560/T29A15_50 [Arabidopsis thaliana]
  misc_feature (1)..(457): Homolog of NCBI NO: 15234195 NR Description: glycosyltransferase family [Arabidopsis thaliana]
  misc_feature (1)..(457): Homolog of NCBI NO: 15234196 NR Description: glycosyltransferase family [Arabidopsis thaliana]
  misc_feature (3)..(456): Homolog of NCBI NO: 15239543 NR Description: glycosyltransferase family [Arabidopsis thaliana]
  misc_feature (5)..(457): Homolog of NCBI NO: 15239525 NR Description: glycosyltransferase family [Arabidopsis thaliana]
  misc_feature (2)..(457): Homolog of NCBI NO: 23955910 NR Description: UDP-glucosyltransferase [Stevia rebaudiana]
  misc_feature (1)..(458): Homolog of NCBI NO: 7433907 NR Description: anthocyanin rhamnosyltransferase - garden petunia
  misc_feature (1)..(458): Homolog of NCBI NO: 22759895 NR Description: rhamnosyl transferase [Nierembergia sp. NB17]
  misc_feature (1)..(458): Homolog of NCBI NO: 480314 NR Description: UDP rhamnose-anthocyanidin-3-glucoside
  misc_feature (1)..(458): Homolog of NCBI NO: 2501497 NR Description: FLAVONOL 3-O-GLUCOSYLTRANSFERASE (UDP-GLUCOSE

SEQ ID NO: 58968 - protein, 449 aa, Glycine max; identical to SEQ ID NO: 54456
  peptide (1)..(449): Ceres Seq. ID no. 14310511
  misc_feature (1)..(449): Homolog of NCBI NO: 15982889 NR Description: AT4g27560/T29A15_50 [Arabidopsis thaliana]
  misc_feature (1)..(448): Homolog of NCBI NO: 15234195 NR Description: glycosyltransferase family [Arabidopsis thaliana]
  misc_feature (1)..(448): Homolog of NCBI NO: 15234196 NR Description: glycosyltransferase family [Arabidopsis thaliana]
  misc_feature (1)..(447): Homolog of NCBI NO: 15239543 NR Description: glycosyltransferase family [Arabidopsis thaliana]
  misc_feature (1)..(448): Homolog of NCBI NO: 15239525 NR Description: glycosyltransferase family [Arabidopsis thaliana]
  misc_feature (1)..(448): Homolog of NCBI NO: 23955910 NR Description: UDP-glucosyltransferase [Stevia rebaudiana]
  misc_feature (1)..(449): Homolog of NCBI NO: 7433907 NR Description: anthocyanin rhamnosyltransferase - garden petunia
  misc_feature (1)..(449): Homolog of NCBI NO: 22759895 NR Description: rhamnosyl transferase [Nierembergia sp. NB17]
  misc_feature (1)..(449): Homolog of NCBI NO: 480314 NR Description: UDP rhamnose-anthocyanidin-3-glucoside
  misc_feature (1)..(449): Homolog of NCBI NO: 2501497 NR Description: FLAVONOL 3-O-GLUCOSYLTRANSFERASE (UDP-GLUCOSE

SEQ ID NO: 58969 - DNA, 1104 bp, Glycine max
  misc_feature (1)..(1104): Ceres Seq. ID no. 14310572
aaaaacgtgggagccctgaatcgtgcgtgttttgcgattctgacttgtttttcatttttactttttgggcctttgaaagcttaaaaacctaaacgcccaagactcaaaacaaggcagaaccgctcaactgcgccgtgaaactcttcttctcattcacattcagttgcgcgaagcaccatcaggctctgcaaatgccaatggtggatttggagggcacagaaggttacataccttccacagagtatgtggaagacagcaacgaaacactcattaacttgactgactcaactgagcttttgtttcttaagttgccttcttccaatgattttttatctgacatacatgggcagaaattgtttctcactcttcataatgatggtaaactagccagcttcgaggattcatcaggtaaagtatatgattttgtaagctattctgctcaggagccagacgaaacagtttttgttccctctacagaaccaaaaataggaaagatttcgatgcgagtttccactgtccattaccctggtcctaaagaacttgaaaagctcaattcaactaacgcaaaacatgcacatggaaattcttctggagtcactgggacaacttcatctcgatattttcctatgcaaagtggtggagcagcttcatcaaaaggtagcagacagagaagctctctaactgaagctagtgagccatcaagtatttcaaaaagaagacacgcgtctaaatctaaatccaacttgtccgagacttcacatgagcacagcactggcatttcgtccatgtccccaaatcattctcatgaaggaaaggcaaagagaagaaaacataaggaatagtgtttcctatactcgccattggcctatttaatagtgtaatatttagaggttacattctcccaggcctttaaatatgtccggaaagactagtgctaaacttttatgttgcaaaatgataaatttaaatgtttgcattctcttttttgtcttttttttttgcaaatgttcatttgcttcagttggacaatgttcactgatgtaaggagtaagaccctttcgtgctcctatgtatacttaagggcgatgttaattttgttgtgtt

SEQ ID NO: 58970 - protein, 216 aa, Glycine max
  peptide (1)..(216): Ceres Seq. ID no. 14310573
  misc_feature (15)..(216): Homolog of NCBI NO: 15237757 NR Description: expressed protein [Arabidopsis thaliana]
  misc_feature (48)..(215): Homolog of NCBI NO: 34902970 NR Description: unnamed protein product [Oryza sativa (japonica
  misc_feature (12)..(193): Homolog of NCBI NO: 34904964 NR Description: OSJNBa0077M12.25 [Oryza sativa (japonica
  misc_feature (2)..(198): Homolog of NCBI NO: 37573093 NR Description: unknown protein [Oryza sativa (japonica
MPMVDLEGTEGYIPSTEYVEDSNETLINLTDSTELLFLKLPSSNDFLSDIHGQKLFLTLHNDGKLASFEDSSGKVYDFVSYSAQEPDETVFVPSTEPKIGKISMRVSTVHYPGPKELEKLNSTNAKHAHGNSSGVTGTTSSRYFPMQSGGAASSKGSRQRSSLTEASEPSSISKRRHASKSKSNLSETSHEHSTGISSMSPNHSHEGKAKRRKHKE

SEQ ID NO: 58971 - protein, 214 aa, Glycine max
  peptide (1)..(214): Ceres Seq. ID no. 14310574
  misc_feature (13)..(214): Homolog of NCBI NO: 15237757 NR Description: expressed protein [Arabidopsis thaliana]
  misc_feature (46)..(213): Homolog of NCBI NO: 34902970 NR Description: unnamed protein product [Oryza sativa (japonica
  misc_feature (10)..(191): Homolog of NCBI NO: 34904964 NR Description: OSJNBa0077M12.25 [Oryza sativa (japonica
  misc_feature (1)..(196): Homolog of NCBI NO: 37573093 NR Description: unknown protein [Oryza sativa (japonica
MVDLEGTEGYIPSTEYVEDSNETLINLTDSTELLFLKLPSSNDFLSDIHGQKLFLTLHNDGKLASFEDSSGKVYDFVSYSAQEPDETVFVPSTEPKIGKISMRVSTVHYPGPKELEKLNSTNAKHAHGNSSGVTGTTSSRYFPMQSGGAASSKGSRQRSSLTEASEPSSISKRRHASKSKSNLSETSHEHSTGISSMSPNHSHEGKAKRRKHKE

SEQ ID NO: 58972 - protein, 113 aa, Glycine max
  peptide (1)..(113): Ceres Seq. ID no. 14310575
  misc_feature (1)..(113): Homolog of NCBI NO: 15237757 NR Description: expressed protein [Arabidopsis thaliana]
  misc_feature (1)..(112): Homolog of NCBI NO: 34902970 NR Description: unnamed protein product [Oryza sativa (japonica
  misc_feature (1)..(90): Homolog of NCBI NO: 34904964 NR Description: OSJNBa0077M12.25 [Oryza sativa (japonica
  misc_feature (1)..(95): Homolog of NCBI NO: 37573093 NR Description: unknown protein [Oryza sativa (japonica
MRVSTVHYPGPKELEKLNSTNAKHAHGNSSGVTGTTSSRYFPMQSGGAASSKGSRQRSSLTEASEPSSISKRRHASKSKSNLSETSHEHSTGISSMSPNHSHEGKAKRRKHKE

SEQ ID NO: 58973 - DNA, 689 bp, Glycine max
  misc_feature (1)..(689): Ceres Seq. ID no. 13637980
atctttttcttcttactctagactcttccttttctcttctctgtctaaggggtgccctgagatcacattgaacaatggtgaaggctgtggccgttcttggcagcagtgagggtgtcactggaactattcacttcgttcaggagggaagtggtccaaccaccgtaactggatctcttgctggtcttaagcctggtctccatggtttccatgtccatgccttgggggacactaccaatggttgcctctcaactggatcacatttcaatcctaataacaaggagcatggtgcccctgaggatgagaatcgtcatgctggtgatcttgggaatgttaatgtcggtgatgatggtactgtcagcttcactattactgacagccagattcctctcactggaccaaacaacatcataggaagggcggttgttgtccatgctgatcctgatgatcttgggaaaggtggtcatgagcttagcaaaactactggaaatgctggtggcagagtagcttgtggtatcattggtctgcaaggataaactaatcacatgaagttggaaacgtgctttagatttgtggaataaagtagcacccatttaaacccgtttggttaggtccggtctgtactgctgaattctgtgttttgcttgtattgtatcgacacttgatgcttaatcaaattgttacattgcttg

SEQ ID NO: 58974 - protein, 152 aa, Glycine max
  peptide (1)..(152): Ceres Seq. ID no. 13637981
  misc_feature (1)..(152): Pfam Name: Copper/zinc superoxide dismutase (SODC) Pfam Description: Copper/zinc superoxide dismutase (SODC)
  misc_feature (1)..(152): Homolog of NCBI NO: 13431904 NR Description: Superoxide dismutase [Cu-Zn]
  misc_feature (1)..(150): Homolog of NCBI NO: 17385628 NR Description: copper/zinc superoxide dismutase [Bruguiera
  misc_feature (1)..(152): Homolog of NCBI NO: 134597 NR Description: Superoxide dismutase [Cu-Zn] 4A
  misc_feature (1)..(152): Homolog of NCBI NO: 3334334 NR Description: Superoxide dismutase [Cu-Zn] 1
  misc_feature (1)..(152): Homolog of NCBI NO: 33340236 NR Description: copper/zinc superoxide dismutase [Citrus limon]
  misc_feature (1)..(152): Homolog of NCBI NO: 13274150 NR Description: putative cytosolic CuZn-superoxide dismutase
  misc_feature (1)..(152): Homolog of NCBI NO: 4102861 NR Description: copper/zinc-superoxide dismutase [Populus
  misc_feature (1)..(152): Homolog of NCBI NO: 401108 NR Description: Superoxide dismutase [Cu-Zn]
  misc_feature (1)..(152): Homolog of NCBI NO: 3860329 NR Description: superoxide dismutase [Cicer arietinum]
  misc_feature (1)..(152): Homolog of NCBI NO: 7433298 NR Description: superoxide dismutase (EC 1.15.1.1) (Cu-Zn) -
MVKAVAVLGSSEGVTGTIHFVQEGSGPTTVTGSLAGLKPGLHGFHVHALGDTTNGCLSTGSHFNPNNKEHGAPEDENRHAGDLGNVNVGDDGTVSFTITDSQIPLTGPNNIIGRAVVVHADPDDLGKGGHELSKTTGNAGGRVACGIIGLQG

SEQ ID NO: 58975 - DNA, 1300 bp, Glycine max
  misc_feature (1)..(1300): Ceres Seq. ID no. 13594147
gaactgaacttcatcttctctactgccatggccatttcatctgcatccgatttcataaatgatttgcacagcatatgttatgccttgcaatttcaagatgtgatttgactcaacttctgggatttgagaaattcattccaccctttgcaaacactagtggttcaaacatacttaaaggtgttaactatgcatcaggtggagctggaatacgcattgaaaccggctcggacatgggtgctactatcagcttgggattacagttagcaaatcacagagtcatagtttctgaaattgctacgaaacttggaagtcctgacttagctcgacaataccttgaaaagtgcttgtattatttgaacataggcaacaatgattacatgggcaactacttccgtccccagctctacccagcaagccgcatttatagccttgagcagtatgcacaagctctgattgaagagttatctctgaatttgcaggctttacatgaccttggagcgagaaagtatgtgttggctgggttgggccttataggatgcacaccagctgtgatgcattctcatgggacaaatggatcttgtgttgaagagcataatgctgctacatacgattataataacaagcttaaagctctagtggatcagttcaataacaggttctctgctaattccaaattcatccttatacacaatggatcaaacgcccttgacattgcacatgggtttttggtttcggatgctgcttgctgcccatcagggtgtaatcccaaccaaaagccgtgcaataataggagtgactatgtgttttgggatgaagttcatcccaccgaggcatggaacctagttaatgcaatatcagcttataattctaccattgatccagcctttacttatccaatgaatatcaagcaacttgtagactgtgaagttaagagggaattggagttcaggaatgagtccacttcacagctcagtgccactgaataagttctggctatcacctagtctttcatttggagctaaattaattgagttgaatatgtacgaagtaatggcctgctactgaattgaacgacaaaggggaatgaatcaagcacagttgctgttatggaatccaattcaaaatcattaagccataatgatttggtttcaaaatcctctcctgaaatttgattttgtactgtttatactcttttctttgtttagaaccaatatattgacatgagttatactatttatgtaatatttctttacaacattattatttctctctttcttaatcacatcattcatcttatttc

SEQ ID NO: 58976 - protein, 303 aa, Glycine max
  peptide (1)..(303): Ceres Seq. ID no. 13594148
  misc_feature (11)..(259): Pfam Name: GDSL-like Lipase/Acylhydrolase Pfam Description: GDSL-like Lipase/Acylhydrolase
  misc_feature (11)..(280): Homolog of NCBI NO: 21618199 NR Description: GDSL-motif lipase/hydrolase-like protein
  misc_feature (11)..(280): Homolog of NCBI NO: 34909504 NR Description: putative GDSL-motif lipase/hydrolase-like protein
  misc_feature (11)..(280): Homolog of NCBI NO: 15242458 NR Description: GDSL-motif lipase/hydrolase protein [Arabidopsis
  misc_feature (11)..(280): Homolog of NCBI NO: 18415211 NR Description: GDSL-motif lipase/hydrolase protein [Arabidopsis
  misc_feature (11)..(280): Homolog of NCBI NO: 21553940 NR Description: GDSL-motif lipase/hydrolase-like protein
  misc_feature (11)..(280): Homolog of NCBI NO: 7485419 NR Description: hypothetical protein F13C5.140 - Arabidopsis
  misc_feature (11)..(280): Homolog of NCBI NO: 21594055 NR Description: lipase/hydrolase, putative [Arabidopsis thaliana]
  misc_feature (11)..(280): Homolog of NCBI NO: 15220512 NR Description: GDSL-motif lipase/hydrolase protein [Arabidopsis
  misc_feature (11)..(280): Homolog of NCBI NO: 21592417 NR Description: lipase/hydrolase, putative [Arabidopsis thaliana]
  misc_feature (11)..(280): Homolog of NCBI NO: 15220514 NR Description: GDSL-motif lipase/hydrolase protein [Arabidopsis
MLCLAISRCDLTQLLGFEKFIPPFANTSGSNILKGVNYASGGAGIRIETGSDMGATISLGLQLANHRVIVSEIATKLGSPDLARQYLEKCLYYLNIGNNDYMGNYFRPQLYPASRIYSLEQYAQALIEELSLNLQALHDLGARKYVLAGLGLIGCTPAVMHSHGTNGSCVEEHNAATYDYNNKLKALVDQFNNRFSANSKFILIHNGSNALDIAHGFLVSDAACCPSGCNPNQKPCNNRSDYVFWDEVHPTEAWNLVNAISAYNSTIDPAFTYPMNIKQLVDCEVKRELEFRNESTSQLSATE

SEQ ID NO: 58977 - protein, 251 aa, Glycine max
  peptide (1)..(251): Ceres Seq. ID no. 13594149
  misc_feature (1)..(207): Pfam Name: GDSL-like Lipase/Acylhydrolase Pfam Description: GDSL-like Lipase/Acylhydrolase
  misc_feature (1)..(228): Homolog of NCBI NO: 21618199 NR Description: GDSL-motif lipase/hydrolase-like protein
  misc_feature (1)..(228): Homolog of NCBI NO: 34909504 NR Description: putative GDSL-motif lipase/hydrolase-like protein
  misc_feature (1)..(228): Homolog of NCBI NO: 18415211 NR Description: GDSL-motif lipase/hydrolase protein [Arabidopsis
  misc_feature (1)..(228): Homolog of NCBI NO: 21553940 NR Description: GDSL-motif lipase/hydrolase-like protein
  misc_feature (1)..(228): Homolog of NCBI NO: 15242458 NR Description: GDSL-motif lipase/hydrolase protein [Arabidopsis
  misc_feature (1)..(228): Homolog of NCBI NO: 7485419 NR Description: hypothetical protein F13C5.140 - Arabidopsis
  misc_feature (1)..(228): Homolog of NCBI NO: 21594055 NR Description: lipase/hydrolase, putative [Arabidopsis thaliana]
  misc_feature (1)..(228): Homolog of NCBI NO: 15220512 NR Description: GDSL-motif lipase/hydrolase protein [Arabidopsis
  misc_feature (1)..(228): Homolog of NCBI NO: 21592417 NR Description: lipase/hydrolase, putative [Arabidopsis thaliana]
  misc_feature (1)..(228): Homolog of NCBI NO: 15220514 NR Description: GDSL-motif lipase/hydrolase protein [Arabidopsis
MGATISLGLQLANHRVIVSEIATKLGSPDLARQYLEKCLYYLNIGNNDYMGNYFRPQLYPASRIYSLEQYAQALIEELSLNLQALHDLGARKYVLAGLGLIGCTPAVMHSHGTNGSCVEEHNAATYDYNNKLKALVDQFNNRFSANSKFILIHNGSNALDIAHGFLVSDAACCPSGCNPNQKPCNNRSDYVFWDEVHPTEAWNLVNAISAYNSTIDPAFTYPMNIKQLVDCEVKRELEFRNESTSQLSATE

SEQ ID NO: 58978 - protein, 202 aa, Glycine max
  peptide (1)..(202): Ceres Seq. ID no. 13594150
  misc_feature (1)..(158): Pfam Name: GDSL-like Lipase/Acylhydrolase Pfam Description: GDSL-like Lipase/Acylhydrolase
  misc_feature (1)..(179): Homolog of NCBI NO: 21618199 NR Description: GDSL-motif lipase/hydrolase-like protein
  misc_feature (1)..(179): Homolog of NCBI NO: 34909504 NR Description: putative GDSL-motif lipase/hydrolase-like protein
  misc_feature (1)..(179): Homolog of NCBI NO: 18415211 NR Description: GDSL-motif lipase/hydrolase protein [Arabidopsis
  misc_feature (1)..(179): Homolog of NCBI NO: 21553940 NR Description: GDSL-motif lipase/hydrolase-like protein
  misc_feature (1)..(179): Homolog of NCBI NO: 15242458 NR Description: GDSL-motif lipase/hydrolase protein [Arabidopsis
  misc_feature (1)..(179): Homolog of NCBI NO: 7485419 NR Description: hypothetical protein F13C5.140 - Arabidopsis
  misc_feature (1)..(179): Homolog of NCBI NO: 21594055 NR Description: lipase/hydrolase, putative [Arabidopsis thaliana]
  misc_feature (1)..(179): Homolog of NCBI NO: 15220512 NR Description: GDSL-motif lipase/hydrolase protein [Arabidopsis
  misc_feature (1)..(179): Homolog of NCBI NO: 21592417 NR Description: lipase/hydrolase, putative [Arabidopsis thaliana]
  misc_feature (1)..(179): Homolog of NCBI NO: 15220514 NR Description: GDSL-motif lipase/hydrolase protein [Arabidopsis
MGNYFRPQLYPASRIYSLEQYAQALIEELSLNLQALHDLGARKYVLAGLGLIGCTPAVMHSHGTNGSCVEEHNAATYDYNNKLKALVDQFNNRFSANSKFILIHNGSNALDIAHGFLVSDAACCPSGCNPNQKPCNNRSDYVFWDEVHPTEAWNLVNAISAYNSTIDPAFTYPMNIKQLVDCEVKRELEFRNESTSQLSATE

SEQ ID NO: 58979 - DNA, 1607 bp, Glycine max
  misc_feature (1)..(1607): Ceres Seq. ID no. 15174513
aaaaaacaaacctgtatcatcttcttactctttcgtttgtctctcttctttccctttcccctctctttcgagggtttttctttttctttttttcccccttttttatttttccttttttttttttactttctcttgtttttcagttttgcttccatttcctttgaatccccatttcttgttcctctgcaactctaaccctagaattgaagatgcaaccacagaggttaaggcagcatgccatgttgcaaccatctctctaccaccaccccgctctccttactcctcctcagatagagcctatcttgagtggaaatctgccacctggctttgattcgagttcatgccgcagtgtttatgttggcaacattcatccccaggttacagattcccttcttcaagagcttttttcaactgcaggcgcccttgaaggatgtaaacttattaggaaagagaagtcatcctatggctttgtggactactttgatcgcagttctgctgcatttgccattgtaactctcaatgggaggaatatttttgggcagcctattaaggttaactgggcttatgctagcagccagagagaggatacctcaggtcactttaatatttttgtcggtgaccttagtcctgaggttacagatgcgacattgtatgcttgcttctctgtatatcctagttgttctgatgcaagggtaatgtgggatcagaagacaggccgttccaggggatttggatttgtttcttttcggaatcagcaggatgcccaaagtgctataaatgatttgactggaaaatggcttggaagtagacagattcgttgtaattgggcaaccaaaggggccagtgccagtgatgaaaagcagagttcggattcaaaaattgtcgtggagttgatcaatggatcatccgaagaaggccaggaaacaaccaatgatgacactcccgagaagaatcctcaatataccactgtttatgttggcaatcttgctccggaggttacttctgttgatctccatcaacattttcattctcttaatgccggaattattgaagatgttagggtgcaacgagacaaaggttttgggtttgtgagatacagtacccatgctgaagcagctcttgctatacagatgggtaatgcccgaattctatttggcaaacctatcaagtgttcatggggtagcaagcctactcctctgggaactgcctctactcctcttctgccaccttctgcaaatgtgccgggcttttctctggctggtcttgcagcatatgaacgtcaaatggctttgagtaaaatgggtggtgcacacacccttatgcatcaacaaggtcaacatgccctaaagcatgtagacatgggaatgggtgctactgggactggtttcgatgcaaggttccagaatgttgcaaccacccaacacctagtgtactatcagtaaaatgtgttggtgtgcaactctctgcgataaacaagggaggattaaagtatgtaagaatggttctacaataccgattatttcttccttccctgtccatctgctatgctaacttcatcctcccatttttttcttctgtgcttgtttatgtaatactacagttttttt

SEQ ID NO: 58980 - protein, 410 aa, Glycine max
  peptide (1)..(410): Ceres Seq. ID no. 15174514
  misc_feature (48)..(108): Pfam Name: RNA recognition motif. (a.k.a. RRM, RBD, or RNP domain) Pfam Description: RNA recognition motif. (a.k.a. RRM, RBD, or RNP
  misc_feature (1)..(409): Homolog of NCBI NO: 23237933 NR Description: putative oligouridylate binding protein
  misc_feature (4)..(410): Homolog of NCBI NO: 30695647 NR Description: oligouridylate binding protein (UBP1), putative
  misc_feature (308)..(410): Homolog of NCBI NO: 25402821 NR Description: protein F1L3.2 [imported] - Arabidopsis thaliana
  misc_feature (193)..(320): Homolog of NCBI NO: 25402821 NR Description: protein F1L3.2 [imported] - Arabidopsis thaliana
  misc_feature (27)..(195): Homolog of NCBI NO: 25402821 NR Description: protein F1L3.2 [imported] - Arabidopsis thaliana
  misc_feature (4)..(410): Homolog of NCBI NO: 15221031 NR Description: oligouridylate binding protein (UBP1), putative
  misc_feature (1)..(410): Homolog of NCBI NO: 21593280 NR Description: oligouridylate binding protein, putative
  misc_feature (1)..(410): Homolog of NCBI NO: 15231783 NR Description: oligouridylate binding protein (UBP1), putative
  misc_feature (1)..(410): Homolog of NCBI NO: 18394471 NR Description: oligouridylate binding protein (UBP1), putative
  misc_feature (1)..(409): Homolog of NCBI NO: 6996560 NR Description: oligouridylate binding protein [Nicotiana
MQPQRLRQHAMLQPSLYHHPALLTPPQIEPILSGNLPPGFDSSSCRSVYVGNIHPQVTDSLLQELFSTAGALEGCKLIRKEKSSYGFVDYFDRSSAAFAIVTLNGRNIFGQPIKVNWAYASSQREDTSGHFNIFVGDLSPEVTDATLYACFSVYPSCSDARVMWDQKTGRSRGFGFVSFRNQQDAQSAINDLTGKWLGSRQIRCNWATKGASASDEKQSSDSKIVVELINGSSEEGQETTNDDTPEKNPQYTTVYVGNLAPEVTSVDLHQHFHSLNAGIIEDVRVQRDKGFGFVRYSTHAEAALAIQMGNARILFGKPIKCSWGSKPTPLGTASTPLLPPSANVPGFSLAGLAAYERQMALSKMGGAHTLMHQQGQHALKHVDMGMGATGTGFDARFQNVATTQHLVYYQ

SEQ ID NO: 58981 - protein, 400 aa, Glycine max
  peptide (1)..(400): Ceres Seq. ID no. 15174515
  misc_feature (38)..(98): Pfam Name: RNA recognition motif. (a.k.a. RRM, RBD, or RNP domain) Pfam Description: RNA recognition motif. (a.k.a. RRM, RBD, or RNP
  misc_feature (1)..(399): Homolog of NCBI NO: 23237933 NR Description: putative oligouridylate binding protein
  misc_feature (1)..(400): Homolog of NCBI NO: 30695647 NR Description: oligouridylate binding protein (UBP1), putative
  misc_feature (298)..(400): Homolog of NCBI NO: 25402821 NR Description: protein F1L3.2 [imported] - Arabidopsis thaliana
  misc_feature (183)..(310): Homolog of NCBI NO: 25402821 NR Description: protein F1L3.2 [imported] - Arabidopsis thaliana
  misc_feature (17)..(185): Homolog of NCBI NO: 25402821 NR Description: protein F1L3.2 [imported] - Arabidopsis thaliana
  misc_feature (1)..(400): Homolog of NCBI NO: 15221031 NR Description: oligouridylate binding protein (UBP1), putative
  misc_feature (1)..(400): Homolog of NCBI NO: 21593280 NR Description: oligouridylate binding protein, putative
  misc_feature (1)..(400): Homolog of NCBI NO: 15231783 NR Description: oligouridylate binding protein (UBP1), putative
  misc_feature (1)..(400): Homolog of NCBI NO: 18394471 NR Description: oligouridylate binding protein (UBP1), putative
  misc_feature (1)..(399): Homolog of NCBI NO: 6996560 NR Description: oligouridylate binding protein [Nicotiana
MLQPSLYHHPALLTPPQIEPILSGNLPPGFDSSSCRSVYVGNIHPQVTDSLLQELFSTAGALEGCKLIRKEKSSYGFVDYFDRSSAAFAIVTLNGRNIFGQPIKVNWAYASSQREDTSGHFNIFVGDLSPEVTDATLYACFSVYPSCSDARVMWDQKTGRSRGFGFVSFRNQQDAQSAINDLTGKWLGSRQIRCNWATKGASASDEKQSSDSKIVVELINGSSEEGQETTNDDTPEKNPQYTTVYVGNLAPEVTSVDLHQHFHSLNAGIIEDVRVQRDKGFGFVRYSTHAEAALAIQMGNARILFGKPIKCSWGSKPTPLGTASTPLLPPSANVPGFSLAGLAAYERQMALSKMGGAHTLMHQQGQHALKHVDMGMGATGTGFDARFQNVATTQHLVYYQ

SEQ ID NO: 58982 - protein, 248 aa, Glycine max
  peptide (1)..(248): Ceres Seq. ID no. 15174516
  misc_feature (1)..(247): Homolog of NCBI NO: 23237933 NR Description: putative oligouridylate binding protein
  misc_feature (1)..(248): Homolog of NCBI NO: 30695647 NR Description: oligouridylate binding protein (UBP1), putative
  misc_feature (146)..(248): Homolog of NCBI NO: 25402821 NR Description: protein F1L3.2 [imported] - Arabidopsis thaliana
  misc_feature (31)..(158): Homolog of NCBI NO: 25402821 NR Description: protein F1L3.2 [imported] - Arabidopsis thaliana
  misc_feature (1)..(33): Homolog of NCBI NO: 25402821 NR Description: protein F1L3.2 [imported] - Arabidopsis thaliana
  misc_feature (1)..(248): Homolog of NCBI NO: 15221031 NR Description: oligouridylate binding protein (UBP1), putative
  misc_feature (1)..(248): Homolog of NCBI NO: 21593280 NR Description: oligouridylate binding protein, putative
  misc_feature (1)..(248): Homolog of NCBI NO: 15231783 NR Description: oligouridylate binding protein (UBP1), putative
  misc_feature (1)..(248): Homolog of NCBI NO: 18394471 NR Description: oligouridylate binding protein (UBP1), putative
  misc_feature (1)..(247): Homolog of NCBI NO: 6996560 NR Description: oligouridylate binding protein [Nicotiana
MWDQKTGRSRGFGFVSFRNQQDAQSAINDLTGKWLGSRQIRCNWATKGASASDEKQSSDSKIVVELINGSSEEGQETTNDDTPEKNPQYTTVYVGNLAPEVTSVDLHQHFHSLNAGIIEDVRVQRDKGFGFVRYSTHAEAALAIQMGNARILFGKPIKCSWGSKPTPLGTASTPLLPPSANVPGFSLAGLAAYERQMALSKMGGAHTLMHQQGQHALKHVDMGMGATGTGFDARFQNVATTQHLVYYQ

SEQ ID NO: 58983 - DNA, 537 bp, Glycine max
  misc_feature (1)..(537): Ceres Seq. ID no. 13505109
acgaataagatgcacttccggtcatcattttaccaacatgcagattttgagttggtttctgaatataaatggacgccaaacggttcatccagctggttgaggagaagaagaagaaaattatggagagaaaggaagctcctttgaaatgggagcagaagctggaagctgctgctgaagctaaagagaggaagctgaaggttgcaaagcatacaaaaagatctggctctgatagtgacagcgattatgacagtgatgatgagagtacaaagacaagtaaaagatctcacaggaagcacagaaagcattctcactacgactctggtgaccatgagaaaaggaaagaaaaaagttccaaacggaaaacaaggaaatggtcctctgaatctagtgattatagtagtgatgactctgagagtagctttgaggaggaaagaagaagaaagaagaggcaaagcatgaagctgagagatcggggttcaagatcagattctagcaactatgattctactgctgatgaattaagcaagaggaaaagac

SEQ ID NO: 58984 - protein, 156 aa, Glycine max
  peptide (1)..(156): Ceres Seq. ID no. 13505110
  misc_feature (30)..(155): Homolog of NCBI NO: 27651999 NR Description: CAX-interacting protein 4 [Arabidopsis thaliana]
  misc_feature (30)..(155): Homolog of NCBI NO: 18401896 NR Description: expressed protein [Arabidopsis thaliana]
  misc_feature (10)..(153): Homolog of NCBI NO: 20070795 NR Description: formin binding protein 3 [Homo sapiens]
  misc_feature (10)..(155): Homolog of NCBI NO: 23509121 NR Description: hypothetical protein [Plasmodium falciparum 3D7]
  misc_feature (21)..(155): Homolog of NCBI NO: 1945332 NR Description: ORF YGR159c [Saccharomyces cerevisiae]
  misc_feature (11)..(134): Homolog of NCBI NO: 39586156 NR Description: Hypothetical protein CBG15274 [Caenorhabditis
  misc_feature (15)..(144): Homolog of NCBI NO: 34895374 NR Description: P0698A04.25 [Oryza sativa (japonica
  misc_feature (10)..(155): Homolog of NCBI NO: 17542856 NR Description: Putative nuclear protein, nematode specific
  misc_feature (1)..(149): Homolog of NCBI NO: 18379151 NR Description: expressed protein [Arabidopsis thaliana]
  misc_feature (1)..(154): Homolog of NCBI NO: 34895374 NR Description: P0698A04.25 [Oryza sativa (japonica
MDAKRFIQLVEEKKKKIMERKEAPLKWEQKLEAAAEAKERKLKVAKHTKRSGSDSDSDYDSDDESTKTSKRSHRKHRKHSHYDSGDHEKRKEKSSKRKTRKWSSESSDYSSDDSESSFEEERRRKKRQSMKLRDRGSRSDSSNYDSTADELSKRKR

SEQ ID NO: 58985 - protein, 139 aa, Glycine max
  peptide (1)..(139): Ceres Seq. ID no. 13505111
  misc_feature (13)..(138): Homolog of NCBI NO: 27651999 NR Description: CAX-interacting protein 4 [Arabidopsis thaliana]
  misc_feature (13)..(138): Homolog of NCBI NO: 18401896 NR Description: expressed protein [Arabidopsis thaliana]
  misc_feature (1)..(136): Homolog of NCBI NO: 20070795 NR Description: formin binding protein 3 [Homo sapiens]
  misc_feature (1)..(138): Homolog of NCBI NO: 23509121 NR Description: hypothetical protein [Plasmodium falciparum 3D7]
  misc_feature (4)..(138): Homolog of NCBI NO: 1945332 NR Description: ORF YGR159c [Saccharomyces cerevisiae]
  misc_feature (1)..(117): Homolog of NCBI NO: 39586156 NR Description: Hypothetical protein CBG15274 [Caenorhabditis
  misc_feature (1)..(127): Homolog of NCBI NO: 34895374 NR Description: P0698A04.25 [Oryza sativa (japonica
  misc_feature (1)..(138): Homolog of NCBI NO: 17542856 NR Description: Putative nuclear protein, nematode specific
  misc_feature (1)..(132): Homolog of NCBI NO: 18379151 NR Description: expressed protein [Arabidopsis thaliana]
  misc_feature (1)..(137): Homolog of NCBI NO: 34895374 NR Description: P0698A04.25 [Oryza sativa (japonica
MERKEAPLKWEQKLEAAAEAKERKLKVAKHTKRSGSDSDSDYDSDDESTKTSKRSHRKHRKHSHYDSGDHEKRKEKSSKRKTRKWSSESSDYSSDDSESSFEEERRRKKRQSMKLRDRGSRSDSSNYDSTADELSKRKR

SEQ ID NO: 58986 - DNA, 1265 bp, Glycine max
  misc_feature (1)..(1265): Ceres Seq. ID no. 14307496
aatgaattctcgttaaaaatattaaccatgtaggaaaaataattgcttgatatggttattatttataatatattagtttaaataaccactcctagtggttattgtcccttgatggtaaatgtttttatcaagagttctgtttctgaaattctcccttttattatatggttctttttacagggttgcttgtgctataaattctgattaactgatccttgttaactcaatgctgtcatcattcatcaggaagatacacagacctttcacatagtttccttgtgctgtctgcttaagatatgacaaaatttcagtttcctattacagggctcgagtttggttgtaagctcttatgatggtgaagacatacttgtatcatttggaggatacaatggacattacaataatgaggtctatgtccttaaaccaagccacaaatcaaccttgcaatcaaaactaatagaaaaccccattccatacagtgtttctggtgcgcataatgccgcaaatgctacccgagatctggattctgaagcaggccacaaagggattatcaaggaacttgtcatggacagtgttgattcaataaaatcaaaaggtgatgttataacagttctaaaggtcgagaaagaagatttggaatcatcgctctacaaagagaagttgcaaactcttcaactaaagcaagagctttcagaaactaaaactcgtaactctgatctttgcaaggaactccaatcaatacgtggtcagcttgcttctgagcagtcaaggtgtttcaaacttgaggtggaggttgctgaattaagtcagaagctccagacaattgggacactacagaaggaacttgagctcctgcagcggcaaaaagctgcatccgagctggctgccctgaatgcaaagcaaaagcagggttcaggtggtgtatggggttggcttgctggtgctcctccccctacccagaaagaagatgatgggtgatcgcgtgattaaactaactggattaccatgctgcatttagtttcattagcccatttttacatccaatacacttattttttttattcaattctttttttggtgaagggaataaaatttagctttctgtttaggaaaaaccccccgtaggggtcttgcaattgcagtaatacatatttcacatattctgtaattttatttacttgttcaggacagtgcatgttgttgttcccgccaatttgctgatttgtttcgaatccactattgaatgaaaagataagtattcttcc

SEQ ID NO: 58987 - protein, 137 aa, Glycine max
  peptide (1)..(137): Ceres Seq. ID no. 14307497
  misc_feature (1)..(122): Homolog of NCBI NO: 15724206 NR Description: AT5g04420/T32M21_20 [Arabidopsis thaliana]
  misc_feature (1)..(122): Homolog of NCBI NO: 15237715 NR Description: Kelch repeat-containing protein [Arabidopsis
  misc_feature (1)..(129): Homolog of NCBI NO: 40714674 NR Description: putative transcription factor
  misc_feature (1)..(130): Homolog of NCBI NO: 22327105 NR Description: acyl CoA binding protein (ACBP) family
  misc_feature (1)..(136): Homolog of NCBI NO: 30679500 NR Description: acyl CoA binding protein (ACBP) family
  misc_feature (1)..(136): Homolog of NCBI NO: 7596769 NR Description: unknown protein [Arabidopsis thaliana]
MDSVDSIKSKGDVITVLKVEKEDLESSLYKEKLQTLQLKQELSETKTRNSDLCKELQSIRGQLASEQSRCFKLEVEVAELSQKLQTIGTLQKELELLQRQKAASELAALNAKQKQGSGGVWGWLAGAPPPTQKEDDG

SEQ ID NO: 58988 - DNA, 1481 bp, Glycine max
  misc_feature (1)..(1481): Ceres Seq. ID no. 15169244
ggttcacatgtcacatatacactacatcttgttctaaaaagccatcatttgctatcctgaggaaacttccattctttccacaatgagcaaacccaaaactcaaagaaaaccaaccattaccaaacatgtcagccaaaaccaaaaccaagaggcacagaaaacagagaaacaaccttcatgggtggtgagaggcctactagcttgtagaaatgtgcaaatccaacaaaatcagccgcagcagaaggaagcaaaatcacccccagaagcaaaagaaaacaggaaaaaacaggaacatagaaagctgcaagaggaacgagtcccagaagaaaacagcaagaaatccaagaagatgaaatgctcaggatcgctttgtaacaacaccaagatcactgcaaagcctgacacagcaaccccagatgttcacaagaaaaggttgttactaagtgggtgcaacaacaagaacgatgcttccagcagatccatgaaagcacctcttaatgaactcaatggaaccgtgtcagcctcttcttcttctttgtcagcatcttcaacttcttctggcggtggttctttcaggggaatgccattcaggagactctccggttgttatgagtgtagaatggtggtagacccagttcttggcttcactagagacccttctctaaggagtagcatttgttcttgccctgactgtggtgagatcatgaaagctgaaagcttggaacatcaccaggctgtcaaacatgcagtttcagaactgggtccagaagacaccagcaaaaacatagttgagataatattccactccagctggctgaagaagcaatctccagtgtgcaaaatagaccgcatcctcaaggtccacaacactcagaaaacaataaccaaattcgaagagtacagagactccataaaagccaaggccacaaagctctccaagaagcaccctcgttgcatagcagacggcaacgagcttctcaggttccactgcacctccttcaattgctccctgggcctaaacggttcctccaacttgtgcaactcgataccacagtgtaacgtgtgcagcataatcaagcacgggttcaaggtcaccggaggagccggtatcttgacgacggcgacgagtggaaaggctcacgacaaggcggcgtgtgtggaggagagtgaggagaagagggcaatgctggtttgtagagtgatagcaggcagggtgaagaagaatgcagaaggtggcatggaggagtatgattctgttgctgttgccggtgctgttggagcttattctaatttggatgagttgcttgtgttcaaccctaaagctatattgccttgctttgttgtaatctatagaggcttttgaaatgtgctgtgagttgaattaatttcgtttcctttgttttgttaattaactcttttaaaagttgtagcatcttcttgtgttaaggatgagtatttgatcggtctcagatcatttttgt

SEQ ID NO: 58989 - protein, 426 aa, Glycine max
  peptide (1)..(426): Ceres Seq. ID no. 15169245
  misc_feature (223)..(424): Homolog of NCBI NO: 38346001 NR Description: OSJNBa0073L13.11 [Oryza sativa (japonica
  misc_feature (200)..(422): Homolog of NCBI NO: 34910152 NR Description: B1070A12.19 [Oryza sativa (japonica
  misc_feature (93)..(422): Homolog of NCBI NO: 15239695 NR Description: expressed protein [Arabidopsis thaliana]
  misc_feature (1)..(422): Homolog of NCBI NO: 18416951 NR Description: expressed protein [Arabidopsis thaliana]
  misc_feature (42)..(425): Homolog of NCBI NO: 15220992 NR Description: reverse transcriptase-related [Arabidopsis
  misc_feature (42)..(424): Homolog of NCBI NO: 9802582 NR Description: T2E6.3 [Arabidopsis thaliana]
  misc_feature (356)..(424): Homolog of NCBI NO: 15222333 NR Description: expressed protein [Arabidopsis thaliana]
  misc_feature (45)..(380): Homolog of NCBI NO: 15222333 NR Description: expressed protein [Arabidopsis thaliana]
  misc_feature (1)..(424): Homolog of NCBI NO: 5777616 NR Description: CAA30374.1 protein [Oryza sativa]
  misc_feature (20)..(424): Homolog of NCBI NO: 38345520 NR Description: OSJNBa0039K24.23 [Oryza sativa (japonica
MSKPKTQRKPTITKHVSQNQNQEAQKTEKQPSWVVRGLLACRNVQIQQNQPQQKEAKSPPEAKENRKKQEHRKLQEERVPEENSKKSKKMKCSGSLCNNTKITAKPDTATPDVHKKRLLLSGCNNKNDASSRSMKAPLNELNGTVSASSSSLSASSTSSGGGSFRGMPFRRLSGCYECRMVVDPVLGFTRDPSLRSSICSCPDCGEIMKAESLEHHQAVKHAVSELGPEDTSKNIVEIIFHSSWLKKQSPVCKIDRILKVHNTQKTITKFEEYRDSIKAKATKLSKKHPRCIADGNELLRFHCTSFNCSLGLNGSSNLCNSIPQCNVCSIIKHGFKVTGGAGILTTATSGKAHDKAACVEESEEKRAMLVCRVIAGRVKKNAEGGMEEYDSVAVAGAVGAYSNLDELLVFNPKAILPCFVVIYRGF

SEQ ID NO: 58990 - protein, 337 aa, Glycine max
  peptide (1)..(337): Ceres Seq. ID no. 15169246
  misc_feature (134)..(335): Homolog of NCBI NO: 38346001 NR Description: OSJNBa0073L13.11 [Oryza sativa (japonica
  misc_feature (111)..(333): Homolog of NCBI NO: 34910152 NR Description: B1070A12.19 [Oryza sativa (japonica
  misc_feature (4)..(333): Homolog of NCBI NO: 15239695 NR Description: expressed protein [Arabidopsis thaliana]
  misc_feature (1)..(333): Homolog of NCBI NO: 18416951 NR Description: expressed protein [Arabidopsis thaliana]
  misc_feature (1)..(336): Homolog of NCBI NO: 15220992 NR Description: reverse transcriptase-related [Arabidopsis
  misc_feature (1)..(335): Homolog of NCBI NO: 9802582 NR Description: T2E6.3 [Arabidopsis thaliana]
  misc_feature (267)..(335): Homolog of NCBI NO: 15222333 NR Description: expressed protein [Arabidopsis thaliana]
  misc_feature (1)..(291): Homolog of NCBI NO: 15222333 NR Description: expressed protein [Arabidopsis thaliana]
  misc_feature (1)..(335): Homolog of NCBI NO: 5777616 NR Description: CAA30374.1 protein [Oryza sativa]
  misc_feature (1)..(335): Homolog of NCBI NO: 38345520 NR Description: OSJNBa0039K24.23 [Oryza sativa (japonica
MKCSGSLCNNTKITAKPDTATPDVHKKRLLLSGCNNKNDASSRSMKAPLNELNGTVSASSSSLSASSTSSGGGSFRGMPFRRLSGCYECRMVVDPVLGFTRDPSLRSSICSCPDCGEIMKAESLEHHQAVKHAVSELGPEDTSKNIVEIIFHSSWLKKQSPVCKIDRILKVHNTQKTITKFEEYRDSIKAKATKLSKKHPRCIADGNELLRFHCTSFNCSLGLNGSSNLCNSIPQCNVCSIIKHGFKVTGGAGILTTATSGKAHDKAACVEESEEKRAMLVCRVIAGRVKKNAEGGMEEYDSVAVAGAVGAYSNLDELLVFNPKAILPCFVVIYRGF

SEQ ID NO: 58991 - protein, 293 aa, Glycine max
  peptide (1)..(293): Ceres Seq. ID no. 15169247
  misc_feature (90)..(291): Homolog of NCBI NO: 38346001 NR Description: OSJNBa0073L13.11 [Oryza sativa (japonica
  misc_feature (67)..(289): Homolog of NCBI NO: 34910152 NR Description: B1070A12.19 [Oryza sativa (japonica
  misc_feature (1)..(289): Homolog of NCBI NO: 15239695 NR Description: expressed protein [Arabidopsis thaliana]
  misc_feature (1)..(289): Homolog of NCBI NO: 18416951 NR Description: expressed protein [Arabidopsis thaliana]
  misc_feature (1)..(292): Homolog of NCBI NO: 15220992 NR Description: reverse transcriptase-related [Arabidopsis
  misc_feature (1)..(291): Homolog of NCBI NO: 9802582 NR Description: T2E6.3 [Arabidopsis thaliana]
  misc_feature (223)..(291): Homolog of NCBI NO: 15222333 NR Description: expressed protein [Arabidopsis thaliana]
  misc_feature (1)..(247): Homolog of NCBI NO: 15222333 NR Description: expressed protein [Arabidopsis thaliana]
  misc_feature (1)..(291): Homolog of NCBI NO: 5777616 NR Description: CAA30374.1 protein [Oryza sativa]
  misc_feature (1)..(291): Homolog of NCBI NO: 38345520 NR Description: OSJNBa0039K24.23 [Oryza sativa (japonica
MKAPLNELNGTVSASSSSLSASSTSSGGGSFRGMPFRRLSGCYECRMVVDPVLGFTRDPSLRSSICSCPDCGEIMKAESLEHHQAVKHAVSELGPEDTSKNIVEIIFHSSWLKKQSPVCKIDRILKVHNTQKTITKFEEYRDSIKAKATKLSKKHPRCIADGNELLRFHCTSFNCSLGLNGSSNLCNSIPQCNVCSIIKHGFKVTGGAGILTTATSGKAHDKAACVEESEEKRAMLVCRVIAGRVKKNAEGGMEEYDSVAVAGAVGAYSNLDELLVFNPKAILPCFVVIYRGF

SEQ ID NO: 58992 - DNA, 2206 bp, Glycine max
  misc_feature (1)..(2206): Ceres Seq. ID no. 15176563
ggtatcaccccagttcaaagaaacttgacaccgattagattaggggcttcgaacaaggagccccgaaacccaaaccctaatctgattcgctttcgattatggcgtctgagagcgcttctcgatcgagttccgcggccgattcgtacattgggagcttgataagcttgacctctaagagtgagatcagatacgaaggtattctctacaacatcaacaccgaagagtccagtattggcctcagaaacgtgcggtcttttggaacagaaggaaggaaaaaggatggcccacaaatccctcccagtgacaaggtttatgagtatatacttttccgtgggactgacatcaaggatttacaggttaaatcttctccacctgtccagcctactccacaagtcaacaatgacccagctattattcagtctcactatcctttcccggtgaccacatctacaagtttgccttctgctgtaagtgggtctttgactgatcctagctctcataccacacaacttggacttcccgggtcaaattttcaagggcccttacctttgtatcaacctggagggaacataggatcgtggggagcttctccacctgctcctaatgcaaatggtggtcggcttgctatgccaccaatgtattggcaaggatattatggtgccccaaatgggcttcctcaattacaccaacaatctttgcttcaaccgccacctggtttatcaatgccttcatctatgcagcagccaatgcagtatcccaattttaccccccctttacctactgtatcttctaatttgcctgaattgccatcatctttgctgcctgtgagtgctagtacccctagtgtaacatctgcttccttgcctcctaatttgcctccagcaccttctgctttgcctcctgctccttcagccttgcctcctgctccttctgctttatctcccgttccttctgcaacgcttgcttctgaaatttttccagtatcagtagcaaataaggcacccaatgtttcaacttccgcagccatgttagcttctaacttaccatcactggctttgctgaccaatcctgctcgagatatcaatgctatagtgccggccatttccagcaaatcgaatgcaatttcaggttcaagcttgccctaccaatctgtatcccagttgtctcctgcagttgttgaatcatcgacttctatccacacagaaacatcagcaccttctttggtaaccccaggacaattattgaagcctggaccaattatagtttcttcggctcagccttcacaagcacctcataaggatgttgaagttgttcaggtatcatcaacatcatctcctgagccatctgtaccagtttctgtggaaactcaaccaccaatactgccattgccagtaacttcacggcccaatcacaggcctggtggagctcctacccaaactcatcatcatggctatagttatagaggacgtggaagaggaagaggaactgggggtttccgctcagtcacaaaattcactgaagattttgatttcacagcaatgaatgagaagttcaaaaaggatgaagtatggggtcatcttggtaaaagtaagtctcattcaaaagacaataacggggaagaaaatgcctttgatgaagattaccaagatgaagacaatgacgatgtatcaaacattgaggttaagcctgtttataacaaggacgacttctttgactcgctctcttccaacatgcatggtaatgcttcacagaatggaaggactcgatactccgaacaaatcaagattgatactgagacgtttggcgattatgtgaggtaccatggtggtcgtgggggccgtggccctggccgtggtggacgtactcgaggtggttattatggaagaggaggagggtatggctactctggacgagggaggggacgcggcatgccaagtcgcactttgtaggtggcagttaatgtttagtcatgaacatggtggagaacaagagcctaggtagccttccattaaagaaccataagtatgttagagattatgcttcattgttgtgttgcctgttatgtgtttgtttcacagaataagtaggacatttttttttctctcgtcatattaccctcttgttactcctctaccacttggtttgatggaaagatgtttgtacaacatattattttagcttatatcaacaggcagaagtttagact

SEQ ID NO: 58993 - protein, 616 aa, Glycine max
  peptide (1)..(616): Ceres Seq. ID no. 15176564
  misc_feature (193)..(440): Pfam Name: Herpes virus major outer envelope glycoprotein (BLLF1) Pfam Description: Herpes virus major outer envelope glycoprotein
MASESASRSSSAADSYIGSLISLTSKSEIRYEGILYNINTEESSIGLRNVRSFGTEGRKKDGPQIPPSDKVYEYILFRGTDIKDLQVKSSPPVQPTPQVNNDPAIIQSHYPFPVTTSTSLPSAVSGSLTDPSSHTTQLGLPGSNFQGPLPLYQPGGNIGSWGASPPAPNANGGRLAMPPMYWQGYYGAPNGLPQLHQQSLLQPPPGLSMPSSMQQPMQYPNFTPPLPTVSSNLPELPSSLLPVSASTPSVTSASLPPNLPPAPSALPPAPSALPPAPSALSPVPSATLASEIFPVSVANKAPNVSTSAAMLASNLPSLALLTNPARDINAIVPAISSKSNAISGSSLPYQSVSQLSPAVVESSTSIHTETSAPSLVTPGQLLKPGPIIVSSAQPSQAPHKDVEVVQVSSTSSPEPSVPVSVETQPPILPLPVTSRPNHRPGGAPTQTHHHGYSYRGRGRGRGTGGFRSVTKFTEDFDFTAMNEKFKKDEVWGHLGKSKSHSKDNNGEENAFDEDYQDEDNDDVSNIEVKPVYNKDDFFDSLSSNMHGNASQNGRTRYSEQIKIDTETFGDYVRYHGGRGGRGPGRGGRTRGGYYGRGGGYGYSGRGRGRGMPSRTL

SEQ ID NO: 58994 - protein, 440 aa, Glycine max
  peptide (1)..(440): Ceres Seq. ID no. 15176565
  misc_feature (17)..(264): Pfam Name: Herpes virus major outer envelope glycoprotein (BLLF1) Pfam Description: Herpes virus major outer envelope glycoprotein
MPPMYWQGYYGAPNGLPQLHQQSLLQPPPGLSMPSSMQQPMQYPNFTPPLPTVSSNLPELPSSLLPVSASTPSVTSASLPPNLPPAPSALPPAPSALPPAPSALSPVPSATLASEIFPVSVANKAPNVSTSAAMLASNLPSLALLTNPARDINAIVPAISSKSNAISGSSLPYQSVSQLSPAVVESSTSIHTETSAPSLVTPGQLLKPGPIIVSSAQPSQAPHKDVEVVQVSSTSSPEPSVPVSVETQPPILPLPVTSRPNHRPGGAPTQTHHHGYSYRGRGRGRGTGGFRSVTKFTEDFDFTAMNEKFKKDEVWGHLGKSKSHSKDNNGEENAFDEDYQDEDNDDVSNIEVKPVYNKDDFFDSLSSNMHGNASQNGRTRYSEQIKIDTETFGDYVRYHGGRGGRGPGRGGRTRGGYYGRGGGYGYSGRGRGRGMPSRTL

SEQ ID NO: 58995 - protein, 437 aa, Glycine max
  peptide (1)..(437): Ceres Seq. ID no. 15176566
  misc_feature (14)..(261): Pfam Name: Herpes virus major outer envelope glycoprotein (BLLF1) Pfam Description: Herpes virus major outer envelope glycoprotein
MYWQGYYGAPNGLPQLHQQSLLQPPPGLSMPSSMQQPMQYPNFTPPLPTVSSNLPELPSSLLPVSASTPSVTSASLPPNLPPAPSALPPAPSALPPAPSALSPVPSATLASEIFPVSVANKAPNVSTSAAMLASNLPSLALLTNPARDINAIVPAISSKSNAISGSSLPYQSVSQLSPAVVESSTSIHTETSAPSLVTPGQLLKPGPIIVSSAQPSQAPHKDVEVVQVSSTSSPEPSVPVSVETQPPILPLPVTSRPNHRPGGAPTQTHHHGYSYRGRGRGRGTGGFRSVTKFTEDFDFTAMNEKFKKDEVWGHLGKSKSHSKDNNGEENAFDEDYQDEDNDDVSNIEVKPVYNKDDFFDSLSSNMHGNASQNGRTRYSEQIKIDTETFGDYVRYHGGRGGRGPGRGGRTRGGYYGRGGGYGYSGRGRGRGMPSRTL

SEQ ID NO: 58996 - DNA, 809 bp, Glycine max
  misc_feature (1)..(809): Ceres Seq. ID no. 15225697
taccgggccccccctcgagtcagctacgtaggccccccccccccttgaaatgttggaagtcaataaaaatttgactgaatttgctatccatggaaacagaatttccttaagttgtttaagcagaataagaaagattttggcaaggaaccaaaaagaagcaaatgaaagagagccaaataagctcaagacggaattatacagacttcaatatgaacaaaagaagattgtcgatgctaaagaaaagctcaaagttcaagaaaaggaaattaacaaagccattgaaactaaggatactttaattaaagatattgaaaaattcaaaaacaatgaaacctataaaaggaaggctttacaagataagattgaagaacaaaagagtgaattatctcgaaagaaaggttttatcagtgataaaaaagatgaattagaaaagatgaaaatcaagcaccaagctgaaatggcagtgttaaaaggggaatatgaaggagccgtgaaaaagaagactgacttagatggtgatttaaagcaaatgcaggaatcaaaggagaagatggaagaggattatatggcaactatcaatcacttgaagggtcaaatcacaaatctcaagaaaaagggagaagaccttaagaagaaagaacaatctcttaatgaagagtttagaatgctcaagatgcattaatattcatattaatcaaaatgaaaacttaagttggtcatttatagatctgttgttattttttttacttttattgtatatggtgaattagttacctttcatactctctaaattcatgaatcaaactatg

SEQ ID NO: 58997 - protein, 210 aa, Glycine max
  peptide (1)..(210): Ceres Seq. ID no. 15225698
  misc_feature (31)..(205): Pfam Name: Myosin tail Pfam Description: Myosin tail
  misc_feature (1)..(203): Homolog of NCBI NO: 37181945 NR Description: SLAP [Homo sapiens]
  misc_feature (32)..(208): Homolog of NCBI NO: 12718845 NR Description: enterophilin-2L [Cavia porcellus]
  misc_feature (29)..(205): Homolog of NCBI NO: 37595224 NR Description: M protein [Streptococcus pyogenes]
  misc_feature (29)..(205): Homolog of NCBI NO: 34485690 NR Description: M protein [Streptococcus pyogenes]
  misc_feature (29)..(205): Homolog of NCBI NO: 34485692 NR Description: M protein [Streptococcus pyogenes]
  misc_feature (29)..(205): Homolog of NCBI NO: 37595288 NR Description: M protein [Streptococcus pyogenes]
  misc_feature (34)..(200): Homolog of NCBI NO: 24641414 NR Description: CG32662-PA [Drosophila melanogaster]
MLEVNKNLTEFAIHGNRISLSCLSRIRKILARNQKEANEREPNKLKTELYRLQYEQKKIVDAKEKLKVQEKEINKAIETKDTLIKDIEKFKNNETYKRKALQDKIEEQKSELSRKKGFISDKKDELEKMKIKHQAEMAVLKGEYEGAVKKKTDLDGDLKQMQESKEKMEEDYMATINHLKGQITNLKKKGEDLKKKEQSLNEEFRMLKMH

SEQ ID NO: 58998 - DNA, 1201 bp, Glycine max
  misc_feature (1)..(1201): Ceres Seq. ID no. 15171984
tgaaagactctagcaacaatgaatctgcaggccaactttttgtggatactgctgtatattcacggaatcgttgttttcgtctccctctttcttcaaaagcaggaaaaagatcagttcttctgccaacaaagcgatttaagtgcaaggacttgggtgaagaagacatattcatggcttccttgatctgcaatatggatgttgattgcaaaacgtatctggtctgcaaaacagacttagattgtgtgaaaactatgcattttgatacagaggagaatagtaatgttagtaattccacccaaattccttcagaatttacattgggtactagcacaagtgatgtttcaactacatacttcatgggaaagtcaccattcccatttctggacaaatttatactgtctgttgcctctgtcgggaatataccaggaaacattcatagctggtattatttctcggaatttggattgatggtctacagcatgacaaaaaatagatactgtgagcgaattggcagacagcataaaagcaataatgtgatatatgtggttgatctacgaatggcagtgtattatcagaaatgtcatgatcctgactgcagaggttatcgatctccctcacgtcaaatcccagttcatgtgttctccaatccttcagatgtaattggttcctttgggttgttagatgatgaacagccagtagatgataagttgagacatcaacttgatgacaacaaggagcaaaatcttttacaattcaaagacactgttgaggacaactccaatgattcatggtggctagaagccataagagttgtcgaggatatggaaaataagcaaacaaagacagaggaggtaattgatgaagatgaggagtggtggcaggctgtagaaagtactgcatcccaggttgaacttacctgctccagtcaacaagaactctgcgcaatctaagtcctttggggatttgtacaaagaattttctacttgtgggatcaataaatacttcagataactaaaaaaccagagaagcagcatgttgcacttatctgctgcaaacaaccagaggatcttgtgaattgattctcttgaaggataaaaaaatgctcttgcagaggattcacattcacacacgagctgtaggagcttctctgtaagctgtaaccttttgctatgtatagataaattatcaagccagttctttt

SEQ ID NO: 58999 - protein, 315 aa, Glycine max
  peptide (1)..(315): Ceres Seq. ID no. 15171985
  misc_feature (5)..(212): Homolog of NCBI NO: 34878429 NR Description: similar to hypothetical protein FLJ33167 [Rattus
  misc_feature (12)..(287): Homolog of NCBI NO: 40675451 NR Description: 1700029A22Rik protein [Mus musculus]
  misc_feature (5)..(287): Homolog of NCBI NO: 22749373 NR Description: hypothetical protein FLJ33167 [Homo sapiens]
  misc_feature (6)..(200): Homolog of NCBI NO: 15237266 NR Description: hypothetical protein [Arabidopsis thaliana]
KDSSNNESAGQLFVDTAVYSRNRCFRLPLSSKAGKRSVLLPTKRFKCKDLGEEDIFMASLICNMDVDCKTYLVCKTDLDCVKTMHFDTEENSNVSNSTQIPSEFTLGTSTSDVSTTYFMGKSPFPFLDKFILSVASVGNIPGNIHSWYYFSEFGLMVYSMTKNRYCERIGRQHKSNNVIYVVDLRMAVYYQKCHDPDCRGYRSPSRQIPVHVFSNPSDVIGSFGLLDDEQPVDDKLRHQLDDNKEQNLLQFKDTVEDNSNDSWWLEAIRVVEDMENKQTKTEEVIDEDEEWWQAVESTASQVELTCSSQQELCAI

SEQ ID NO: 59000 - protein, 259 aa, Glycine max
  peptide (1)..(259): Ceres Seq. ID no. 15171986
  misc_feature (1)..(156): Homolog of NCBI NO: 34878429 NR Description: similar to hypothetical protein FLJ33167 [Rattus
  misc_feature (1)..(231): Homolog of NCBI NO: 40675451 NR Description: 1700029A22Rik protein [Mus musculus]
  misc_feature (1)..(231): Homolog of NCBI NO: 22749373 NR Description: hypothetical protein FLJ33167 [Homo sapiens]
  misc_feature (1)..(144): Homolog of NCBI NO: 15237266 NR Description: hypothetical protein [Arabidopsis thaliana]
MASLICNMDVDCKTYLVCKTDLDCVKTMHFDTEENSNVSNSTQIPSEFTLGTSTSDVSTTYFMGKSPFPFLDKFILSVASVGNIPGNIHSWYYFSEFGLMVYSMTKNRYCERIGRQHKSNNVIYVVDLRMAVYYQKCHDPDCRGYRSPSRQIPVHVFSNPSDVIGSFGLLDDEQPVDDKLRHQLDDNKEQNLLQFKDTVEDNSNDSWWLEAIRVVEDMENKQTKTEEVIDEDEEWWQAVESTASQVELTCSSQQELCAI

SEQ ID NO: 59001 - protein, 252 aa, Glycine max
  peptide (1)..(252): Ceres Seq. ID no. 15171987
  misc_feature (1)..(149): Homolog of NCBI NO: 34878429 NR Description: similar to hypothetical protein FLJ33167 [Rattus
  misc_feature (1)..(224): Homolog of NCBI NO: 40675451 NR Description: 1700029A22Rik protein [Mus musculus]
  misc_feature (1)..(224): Homolog of NCBI NO: 22749373 NR Description: hypothetical protein FLJ33167 [Homo sapiens]
  misc_feature (1)..(137): Homolog of NCBI NO: 15237266 NR Description: hypothetical protein [Arabidopsis thaliana]
MDVDCKTYLVCKTDLDCVKTMHFDTEENSNVSNSTQIPSEFTLGTSTSDVSTTYFMGKSPFPFLDKFILSVASVGNIPGNIHSWYYFSEFGLMVYSMTKNRYCERIGRQHKSNNVIYVVDLRMAVYYQKCHDPDCRGYRSPSRQIPVHVFSNPSDVIGSFGLLDDEQPVDDKLRHQLDDNKEQNLLQFKDTVEDNSNDSWWLEAIRVVEDMENKQTKTEEVIDEDEEWWQAVESTASQVELTCSSQQELCAI

SEQ ID NO: 59002 - DNA, 1465 bp, Glycine max
  misc_feature (1)..(1465): Ceres Seq. ID no. 14308103
attgaaatctgataccatgaacaaagatgctatgatcagatcagatgatgctgaatttggagaagcagatcaagatgagcaaaaatatgtagatccattggataaatttctccctcccccatcaaaaactaaatgctctgaggagttacaaagaaaaataaacaaattcctggagtataagaaggctggaaaaagttttaatgcagaagttcgcaacaggaaggactatcgaaaccctgacttcttactgcatgcagtgaggtaccaggatattgatcaaatagggtcttgcttcagtaaagatgtatttgaccctcatggatatgatccaagtgatttctatgatgaaatagaagctgatatgaggcgcgaaagtgagaggaaagagcaagaaaagaagaaagcacagaaggttgaatttatttcggggggtgcacaaccgggaattgtagctagcgcttctaggattagcatgcccattgcaggtgcttctgctgtgactgcaagtggtttgcctttggtgcctcctacagccgattctattaatcgggatggtagacagaataaaaaatcaaaatgggataaggtattcatctaaacaaatgcaatagcaactttagggacattcttcattgtgcttaagaaatttttgtgaaagataggtggatggtgataaaaaaaatcctctgccctctgcggggcaggattctgtatctactattggggttcatgcagccattttatctgctgctaatgccggcggtggatatatgcaatttgcgtaagttgataaacaaccatgaactttcatatgcattctacttctatcttttgattctggttatgctttcaatttctaagatttgattttgggttgacacgttttattgtgtagacattttttaggtgttcgcatttttccaatttgaacttatcaaatctactgaaaaaactagaatctaaattaacatattacttgcagagatttccaaatttaaatattgattttgaatagtcagtcatctatacttaagaaacgtgtttgatgttatttcatgaaattgacagtcaaatggatggaatatccagttctgacaattggcaattagctgatatagttatgtttgatacaataatctcattttgttgaacaggcaacaaaaacgacgggaggctgaggagaaaagatccactgaaaggaggttagagagaaggtcgtgagccattcagtgtggggctgtagtatcgaacattgcggataagctgtggcagagatttctctgaaacattttgtctgttaaataactttggcaatgatcgcagacactgtatatctcgaacttgaaaagaaatttcctgctccaaccgtgcccttagctggaataattcttccaattccagtacttgtgtcccatgatatggttgattgatcggttcgttgctaatgcctaatttttatttgatt

SEQ ID NO: 59003 - protein, 198 aa, Glycine max
  peptide (1)..(198): Ceres Seq. ID no. 14308104
  misc_feature (17)..(177): Homolog of NCBI NO: 19921898 NR Description: CG2063-PA [Drosophila melanogaster]
  misc_feature (37)..(143): Homolog of NCBI NO: 31199425 NR Description: ENSANGP00000011283 [Anopheles gambiae]
  misc_feature (7)..(168): Homolog of NCBI NO: 20086427 NR Description: HCNGP [Homo sapiens]
  misc_feature (7)..(168): Homolog of NCBI NO: 9994179 NR Description: transcriptional regulator protein [Homo sapiens]
  misc_feature (7)..(168): Homolog of NCBI NO: 34875136 NR Description: similar to transcriptional regulator protein
  misc_feature (25)..(168): Homolog of NCBI NO: 28856236 NR Description: Similar to transcriptional regulator protein
  misc_feature (7)..(168): Homolog of NCBI NO: 31560336 NR Description: transcriptional regulator protein [Mus musculus]
  misc_feature (7)..(168): Homolog of NCBI NO: 462253 NR Description: Transcriptional regulator protein HCNGP
  misc_feature (7)..(168): Homolog of NCBI NO: 21754486 NR Description: unnamed protein product [Homo sapiens]
  misc_feature (16)..(196): Homolog of NCBI NO: 18396997 NR Description: expressed protein [Arabidopsis thaliana]
LKSDTMNKDAMIRSDDAEFGEADQDEQKYVDPLDKFLPPPSKTKCSEELQRKINKFLEYKKAGKSFNAEVRNRKDYRNPDFLLHAVRYQDIDQIGSCFSKDVFDPHGYDPSDFYDEIEADMRRESERKEQEKKKAQKVEFISGGAQPGIVASASRISMPIAGASAVTASGLPLVPPTADSINRDGRQNKKSKWDKVFI

SEQ ID NO: 59004 - protein, 193 aa, Glycine max
  peptide (1)..(193): Ceres Seq. ID no. 14308105
  misc_feature (12)..(172): Homolog of NCBI NO: 19921898 NR Description: CG2063-PA [Drosophila melanogaster]
  misc_feature (32)..(138): Homolog of NCBI NO: 31199425 NR Description: ENSANGP00000011283 [Anopheles gambiae]
  misc_feature (2)..(163): Homolog of NCBI NO: 20086427 NR Description: HCNGP [Homo sapiens]
  misc_feature (2)..(163): Homolog of NCBI NO: 9994179 NR Description: transcriptional regulator protein [Homo sapiens]
  misc_feature (2)..(163): Homolog of NCBI NO: 34875136 NR Description: similar to transcriptional regulator protein
  misc_feature (20)..(163): Homolog of NCBI NO: 28856236 NR Description: Similar to transcriptional regulator protein
  misc_feature (2)..(163): Homolog of NCBI NO: 31560336 NR Description: transcriptional regulator protein [Mus musculus]
  misc_feature (2)..(163): Homolog of NCBI NO: 462253 NR Description: Transcriptional regulator protein HCNGP
  misc_feature (2)..(163): Homolog of NCBI NO: 21754486 NR Description: unnamed protein product [Homo sapiens]
  misc_feature (11)..(191): Homolog of NCBI NO: 18396997 NR Description: expressed protein [Arabidopsis thaliana]
MNKDAMIRSDDAEFGEADQDEQKYVDPLDKFLPPPSKTKCSEELQRKINKFLEYKKAGKSFNAEVRNRKDYRNPDFLLHAVRYQDIDQIGSCFSKDVFDPHGYDPSDFYDEIEADMRRESERKEQEKKKAQKVEFISGGAQPGIVASASRISMPIAGASAVTASGLPLVPPTADSINRDGRQNKKSKWDKVFI

SEQ ID NO: 59005 - protein, 188 aa, Glycine max
  peptide (1)..(188): Ceres Seq. ID no. 14308106
  misc_feature (7)..(167): Homolog of NCBI NO: 19921898 NR Description: CG2063-PA [Drosophila melanogaster]
  misc_feature (27)..(133): Homolog of NCBI NO: 31199425 NR Description: ENSANGP00000011283 [Anopheles gambiae]
  misc_feature (1)..(158): Homolog of NCBI NO: 20086427 NR Description: HCNGP [Homo sapiens]
  misc_feature (1)..(158): Homolog of NCBI NO: 9994179 NR Description: transcriptional regulator protein [Homo sapiens]
  misc_feature (1)..(158): Homolog of NCBI NO: 34875136 NR Description: similar to transcriptional regulator protein
  misc_feature (15)..(158): Homolog of NCBI NO: 28856236 NR Description: Similar to transcriptional regulator protein
  misc_feature (1)..(158): Homolog of NCBI NO: 31560336 NR Description: transcriptional regulator protein [Mus musculus]
  misc_feature (1)..(158): Homolog of NCBI NO: 462253 NR Description: Transcriptional regulator protein HCNGP
  misc_feature (1)..(158): Homolog of NCBI NO: 21754486 NR Description: unnamed protein product [Homo sapiens]
  misc_feature (6)..(186): Homolog of NCBI NO: 18396997 NR Description: expressed protein [Arabidopsis thaliana]
MIRSDDAEFGEADQDEQKYVDPLDKFLPPPSKTKCSEELQRKINKFLEYKKAGKSFNAEVRNRKDYRNPDFLLHAVRYQDIDQIGSCFSKDVFDPHGYDPSDFYDEIEADMRRESERKEQEKKKAQKVEFISGGAQPGIVASASRISMPIAGASAVTASGLPLVPPTADSINRDGRQNKKSKWDKVFI

SEQ ID NO: 59006 - DNA, 1415 bp, Glycine max
  misc_feature (1)..(1415): Ceres Seq. ID no. 14308156
aaacagagtgctatttgaaaaattgttctctcaccgtgaaagagagagagaggttaggctatggctgatgagagcgttgttgagtccccagtgaagaggcagagagatgatggtgaagaaaatggtgtctctgtttccatggacgcggagggtggcaaagaccctcttagtaacggtttatcatctgtgattcctgggtggttctctgaaatcagtgcaatgtggcctggagaggctcactccttgaaggtggaaaagattttgtttcaaggaaagtcagaataccaaaatgtcatggtcttccagtcatcaacatatggcaaggttcttgttttggatggagtaattcagctaacagaaagggatgaatgtgcctaccaagaaatgatcactcatcttcctctttgctctattccaaaccctaaaaaggttttggttatcggtggaggtgatggaggggtcatacgagaagtagcacgccattcttcagttgaaaagatagacatttgtgaaattgacaagatggttgttgatgtctccaaacaatacttccctgatgtagctgttgggtatgatgatcctcgtgtgacacttcatattggtgatggagttgcatttttgaaggaagttccagaaggaacttatgatgctgttatagtggattcatccgaccctattggtcctgctcaggagctttttgaaaagcccttctttgcgtcagttgcaaaggctctttgtcccggtggagttgtgtgtactcaggcagaaagcatttggcttcatatggatataattgaggacattgtggccaattgtcgccagatttttaaaggctctgtcaactatgcttggactactgttcctacatacccaagtgggatgattggttttatgctttgctcaactgagggaccacctgttgatttcaagcatccagttaatcccatagatgaaaatgagagtcagaagtcagtaagaccactgaaattttacaactctgagattcatacagcagctttctgtttgccgtcatttgcaaagaggaagattagttctaaagcaaattaaaaagattttcagaacctttgaaggagctcaagtggctgttgtagaagtccaacattcatccttgctgtattggtccatctatcaatgagccttggaataagtcagattaaatttggcattgaatagttaagtttatttctggaaatcaattagcaatcggattaagagtctaggcaatcctaaacggggtttaaaagtgatggcaattatcattatcaacccaagaattacctgttttataatctatctttatattcttattaataagttggagaggggaccaatcgattgacatgattaaatcaactttgaatgccgatcactatcaattggatgccataattttc

SEQ ID NO: 59007 - protein, 335 aa, Glycine max
  peptide (1)..(335): Ceres Seq. ID no. 14308157
  misc_feature (46)..(291): Pfam Name: Spermine/spermidine synthase Pfam Description: Spermine/spermidine synthase
  misc_feature (40)..(333): Homolog of NCBI NO: 6094328 NR Description: Spermidine synthase 1 (Putrescine
  misc_feature (1)..(333): Homolog of NCBI NO: 15150055 NR Description: spermidine synthase [Solanum tuberosum]
  misc_feature (11)..(335): Homolog of NCBI NO: 15220885 NR Description: spermidine synthase -related [Arabidopsis
  misc_feature (27)..(334): Homolog of NCBI NO: 6094330 NR Description: Spermidine synthase 2 (Putrescine
  misc_feature (1)..(333): Homolog of NCBI NO: 12230013 NR Description: Spermidine synthase (Putrescine
  misc_feature (36)..(335): Homolog of NCBI NO: 6094335 NR Description: Spermidine synthase (Putrescine
  misc_feature (1)..(334): Homolog of NCBI NO: 23495352 NR Description: spermidine synthase [Malus x domestica]
  misc_feature (1)..(334): Homolog of NCBI NO: 23495354 NR Description: spermidine synthase [Malus x domestica]
  misc_feature (8)..(335): Homolog of NCBI NO: 12229958 NR Description: Spermidine synthase 1 (Putrescine
  misc_feature (1)..(333): Homolog of NCBI NO: 12229957 NR Description: Spermidine synthase 2 (Putrescine
MADESVVESPVKRQRDDGEENGVSVSMDAEGGKDPLSNGLSSVIPGWFSEISAMWPGEAHSLKVEKILFQGKSEYQNVMVFQSSTYGKVLVLDGVIQLTERDECAYQEMITHLPLCSIPNPKKVLVIGGGDGGVIREVARHSSVEKIDICEIDKMVVDVSKQYFPDVAVGYDDPRVTLHIGDGVAFLKEVPEGTYDAVIVDSSDPIGPAQELFEKPFFASVAKALCPGGVVCTQAESIWLHMDIIEDIVANCRQIFKGSVNYAWTTVPTYPSGMIGFMLCSTEGPPVDFKHPVNPIDENESQKSVRPLKFYNSEIHTAAFCLPSFAKRKISSKAN

SEQ ID NO: 59008 - protein, 309 aa, Glycine max
  peptide (1)..(309): Ceres Seq. ID no. 14308158
  misc_feature (20)..(265): Pfam Name: Spermine/spermidine synthase Pfam Description: Spermine/spermidine synthase
  misc_feature (14)..(307): Homolog of NCBI NO: 6094328 NR Description: Spermidine synthase 1 (Putrescine
  misc_feature (1)..(307): Homolog of NCBI NO: 15150055 NR Description: spermidine synthase [Solanum tuberosum]
  misc_feature (1)..(309): Homolog of NCBI NO: 15220885 NR Description: spermidine synthase -related [Arabidopsis
  misc_feature (1)..(308): Homolog of NCBI NO: 6094330 NR Description: Spermidine synthase 2 (Putrescine
  misc_feature (1)..(307): Homolog of NCBI NO: 12230013 NR Description: Spermidine synthase (Putrescine
  misc_feature (10)..(309): Homolog of NCBI NO: 6094335 NR Description: Spermidine synthase (Putrescine
  misc_feature (1)..(308): Homolog of NCBI NO: 23495352 NR Description: spermidine synthase [Malus x domestica]
  misc_feature (1)..(308): Homolog of NCBI NO: 23495354 NR Description: spermidine synthase [Malus x domestica]
  misc_feature (1)..(309): Homolog of NCBI NO: 12229958 NR Description: Spermidine synthase 1 (Putrescine
  misc_feature (1)..(307): Homolog of NCBI NO: 12229957 NR Description: Spermidine synthase 2 (Putrescine
MDAEGGKDPLSNGLSSVIPGWFSEISAMWPGEAHSLKVEKILFQGKSEYQNVMVFQSSTYGKVLVLDGVIQLTERDECAYQEMITHLPLCSIPNPKKVLVIGGGDGGVIREVARHSSVEKIDICEIDKMVVDVSKQYFPDVAVGYDDPRVTLHIGDGVAFLKEVPEGTYDAVIVDSSDPIGPAQELFEKPFFASVAKALCPGGVVCTQAESIWLHMDIIEDIVANCRQIFKGSVNYAWTTVPTYPSGMIGFMLCSTEGPPVDFKHPVNPIDENESQKSVRPLKFYNSEIHTAAFCLPSFAKRKISSKAN

SEQ ID NO: 59009 - protein, 282 aa, Glycine max
  peptide (1)..(282): Ceres Seq. ID no. 14308159
  misc_feature (1)..(238): Pfam Name: Spermine/spermidine synthase Pfam Description: Spermine/spermidine synthase
  misc_feature (1)..(280): Homolog of NCBI NO: 6094328 NR Description: Spermidine synthase 1 (Putrescine
  misc_feature (1)..(280): Homolog of NCBI NO: 15150055 NR Description: spermidine synthase [Solanum tuberosum]
  misc_feature (1)..(282): Homolog of NCBI NO: 15220885 NR Description: spermidine synthase -related [Arabidopsis
  misc_feature (1)..(281): Homolog of NCBI NO: 6094330 NR Description: Spermidine synthase 2 (Putrescine
  misc_feature (1)..(280): Homolog of NCBI NO: 12230013 NR Description: Spermidine synthase (Putrescine
  misc_feature (1)..(282): Homolog of NCBI NO: 6094335 NR Description: Spermidine synthase (Putrescine
  misc_feature (1)..(281): Homolog of NCBI NO: 23495352 NR Description: spermidine synthase [Malus x domestica]
  misc_feature (1)..(281): Homolog of NCBI NO: 23495354 NR Description: spermidine synthase [Malus x domestica]
  misc_feature (1)..(282): Homolog of NCBI NO: 12229958 NR Description: Spermidine synthase 1 (Putrescine
  misc_feature (1)..(280): Homolog of NCBI NO: 12229957 NR Description: Spermidine synthase 2 (Putrescine
MWPGEAHSLKVEKILFQGKSEYQNVMVFQSSTYGKVLVLDGVIQLTERDECAYQEMITHLPLCSIPNPKKVLVIGGGDGGVIREVARHSSVEKIDICEIDKMVVDVSKQYFPDVAVGYDDPRVTLHIGDGVAFLKEVPEGTYDAVIVDSSDPIGPAQELFEKPFFASVAKALCPGGVVCTQAESIWLHMDIIEDIVANCRQIFKGSVNYAWTTVPTYPSGMIGFMLCSTEGPPVDFKHPVNPIDENESQKSVRPLKFYNSEIHTAAFCLPSFAKRKISSKAN

SEQ ID NO: 59010 - DNA, 1587 bp, Glycine max
  misc_feature (1)..(1587): Ceres Seq. ID no. 15169415
atgaatatgatcatgaaagtattgctgctgatatttctgagctactctgtagcatactcctcatctgcgtttgagtctacaatgcacactaataattgggctgttttggtctgcacgtctcgcttctggtttaattatcggcatatggccaataccctgtcattgtataggacagttaaacggctaggaataccggatgagaggattatactcatgctagcagatgacatggcatgtaatgctagaaacaagtaccctgcccaagtttttaataatgaaaaccatatacttaatctgtatggggataatgttgaggtagactatcgtggctatgaagtgacagtggaaaactttttacgggtacttactggacgtcatgagacatctgttccaaggtccaaacgacttcttagtgatgagggaagtcatattcttctgtatatgacagggcatggaggtgatgagtttttgaagtttcaggattcagaagagcttcaaagtcacgatttagctgatgctgtgaagcaaatgaaagagaagcgcaggtttaaggagcttctgataatggtggacacctgccaagcctctactcttttttcccagcttcattcaccaggtgttttggcaattggaagtagtatgaaaggagaaaattcatattcacatcatttggattcagatgttggcgtttcagttgttgatcgttttacattttacactcttgctttctttgagaggctgaatatgtatgacaatgcttcgttgagcagccttttcaattcatataatccaaatttgttgatgtcgactgcatattacagaatggatatataccaacgctatttaaaggaggtacctgtgacaaacttctttggttctgtaatgaaaacgatacatactgattcagcctacagatcccggtcaaataaaaaaattgaggaagctaaaagcaatatgtctttggatgaatcaatctctgacagtgactcggatgacgaggatcaatttaataatttaactgctgagaaatatctctggtatagtgttggaccactatggagtgctattctcagcaatgccaatacttctgaaagcatcgatactttggtgtgctatggactgcttttaatgcttcctttgctgatattttccacatggctgtcaaagtaaagattggggaaatattccgtaagtttgttagcagagcagacacatttctttgatgctgctagatggcaccgttgcttgaaatgcaatttcacccgaaaaagcagattatttggctgcataatatgtgggacgcaaactactggtagagcagcttcatagttgttgcctatcagctgtattctgttagctattgcttttgccttggtgcagtttattctggtagccattggtgatgttggcttgctgctgctgtcatgtttcgccttgtattttgatgatgattatgattatgattgcaaactgtaaaatttttgtaaaacctcgctctatttttagatattatgttgatttccaacattagaacactgctcttttaagaactcggaaatgaaaatgcttgatcattttatctacttg

SEQ ID NO: 59011 - protein, 389 aa, Glycine max
  peptide (1)..(389): Ceres Seq. ID no. 15169416
  misc_feature (6)..(329): Pfam Name: Peptidase C13 family Pfam Description: Peptidase C13 family
  misc_feature (29)..(317): Homolog of NCBI NO: 29788753 NR Description: phosphatidylinositol glycan, class K [Mus
  misc_feature (29)..(317): Homolog of NCBI NO: 26335483 NR Description: unnamed protein product [Mus musculus]
  misc_feature (3)..(316): Homolog of NCBI NO: 20071719 NR Description: Similar to phosphatidylinositol glycan, class K
  misc_feature (3)..(327): Homolog of NCBI NO: 23199983 NR Description: phosphatidylinositol glycan, class K precursor
  misc_feature (3)..(327): Homolog of NCBI NO: 1518259 NR Description: gpi8 [Homo sapiens]
  misc_feature (1)..(302): Homolog of NCBI NO: 6320538 NR Description: Protein involved in the attachment of
  misc_feature (5)..(345): Homolog of NCBI NO: 9802563 NR Description: F22O13.24 [Arabidopsis thaliana]
  misc_feature (5)..(345): Homolog of NCBI NO: 7485988 NR Description: hypothetical protein F22O13.26 - Arabidopsis
  misc_feature (5)..(387): Homolog of NCBI NO: 18390936 NR Description: GPI-anchor transamidase (U32517) -related
  misc_feature (5)..(387): Homolog of NCBI NO: 21537105 NR Description: putative GPI-anchor transamidase [Arabidopsis
MNMIMKVLLLIFLSYSVAYSSSAFESTMHTNNWAVLVCTSRFWFNYRHMANTLSLYRTVKRLGIPDERIILMLADDMACNARNKYPAQVFNNENHILNLYGDNVEVDYRGYEVTVENFLRVLTGRHETSVPRSKRLLSDEGSHILLYMTGHGGDEFLKFQDSEELQSHDLADAVKQMKEKRRFKELLIMVDTCQASTLFSQLHSPGVLAIGSSMKGENSYSHHLDSDVGVSVVDRFTFYTLAFFERLNMYDNASLSSLFNSYNPNLLMSTAYYRMDIYQRYLKEVPVTNFFGSVMKTIHTDSAYRSRSNKKIEEAKSNMSLDESISDSDSDDEDQFNNLTAEKYLWYSVGPLWSAILSNANTSESIDTLVCYGLLLMLPLLIFSTWLSK

SEQ ID NO: 59012 - protein, 387 aa, Glycine max
  peptide (1)..(387): Ceres Seq. ID no. 15169417
  misc_feature (4)..(327): Pfam Name: Peptidase C13 family Pfam Description: Peptidase C13 family
  misc_feature (27)..(315): Homolog of NCBI NO: 29788753 NR Description: phosphatidylinositol glycan, class K [Mus
  misc_feature (27)..(315): Homolog of NCBI NO: 26335483 NR Description: unnamed protein product [Mus musculus]
  misc_feature (1)..(314): Homolog of NCBI NO: 20071719 NR Description: Similar to phosphatidylinositol glycan, class K
  misc_feature (1)..(325): Homolog of NCBI NO: 23199983 NR Description: phosphatidylinositol glycan, class K precursor
  misc_feature (1)..(325): Homolog of NCBI NO: 1518259 NR Description: gpi8 [Homo sapiens]
  misc_feature (1)..(300): Homolog of NCBI NO: 6320538 NR Description: Protein involved in the attachment of
  misc_feature (3)..(343): Homolog of NCBI NO: 9802563 NR Description: F22O13.24 [Arabidopsis thaliana]
  misc_feature (3)..(343): Homolog of NCBI NO: 7485988 NR Description: hypothetical protein F22O13.26 - Arabidopsis
  misc_feature (3)..(385): Homolog of NCBI NO: 18390936 NR Description: GPI-anchor transamidase (U32517) -related
  misc_feature (3)..(385): Homolog of NCBI NO: 21537105 NR Description: putative GPI-anchor transamidase [Arabidopsis
MIMKVLLLIFLSYSVAYSSSAFESTMHTNNWAVLVCTSRFWFNYRHMANTLSLYRTVKRLGIPDERIILMLADDMACNARNKYPAQVFNNENHILNLYGDNVEVDYRGYEVTVENFLRVLTGRHETSVPRSKRLLSDEGSHILLYMTGHGGDEFLKFQDSEELQSHDLADAVKQMKEKRRFKELLIMVDTCQASTLFSQLHSPGVLAIGSSMKGENSYSHHLDSDVGVSVVDRFTFYTLAFFERLNMYDNASLSSLFNSYNPNLLMSTAYYRMDIYQRYLKEVPVTNFFGSVMKTIHTDSAYRSRSNKKIEEAKSNMSLDESISDSDSDDEDQFNNLTAEKYLWYSVGPLWSAILSNANTSESIDTLVCYGLLLMLPLLIFSTWLSK

SEQ ID NO: 59013 - protein, 385 aa, Glycine max
  peptide (1)..(385): Ceres Seq. ID no. 15169418
  misc_feature (2)..(325): Pfam Name: Peptidase C13 family Pfam Description: Peptidase C13 family
  misc_feature (25)..(313): Homolog of NCBI NO: 29788753 NR Description: phosphatidylinositol glycan, class K [Mus
  misc_feature (25)..(313): Homolog of NCBI NO: 26335483 NR Description: unnamed protein product [Mus musculus]
  misc_feature (1)..(312): Homolog of NCBI NO: 20071719 NR Description: Similar to phosphatidylinositol glycan, class K
  misc_feature (1)..(323): Homolog of NCBI NO: 23199983 NR Description: phosphatidylinositol glycan, class K precursor
  misc_feature (1)..(323): Homolog of NCBI NO: 1518259 NR Description: gpi8 [Homo sapiens]
  misc_feature (1)..(298): Homolog of NCBI NO: 6320538 NR Description: Protein involved in the attachment of
  misc_feature (1)..(341): Homolog of NCBI NO: 9802563 NR Description: F22O13.24 [Arabidopsis thaliana]
  misc_feature (1)..(341): Homolog of NCBI NO: 7485988 NR Description: hypothetical protein F22O13.26 - Arabidopsis
  misc_feature (1)..(383): Homolog of NCBI NO: 18390936 NR Description: GPI-anchor transamidase (U32517) -related
  misc_feature (1)..(383): Homolog of NCBI NO: 21537105 NR Description: putative GPI-anchor transamidase [Arabidopsis
MKVLLLIFLSYSVAYSSSAFESTMHTNNWAVLVCTSRFWFNYRHMANTLSLYRTVKRLGIPDERIILMLADDMACNARNKYPAQVFNNENHILNLYGDNVEVDYRGYEVTVENFLRVLTGRHETSVPRSKRLLSDEGSHILLYMTGHGGDEFLKFQDSEELQSHDLADAVKQMKEKRRFKELLIMVDTCQASTLFSQLHSPGVLAIGSSMKGENSYSHHLDSDVGVSVVDRFTFYTLAFFERLNMYDNASLSSLFNSYNPNLLMSTAYYRMDIYQRYLKEVPVTNFFGSVMKTIHTDSAYRSRSNKKIEEAKSNMSLDESISDSDSDDEDQFNNLTAEKYLWYSVGPLWSAILSNANTSESIDTLVCYGLLLMLPLLIFSTWLSK

SEQ ID NO: 59014 - DNA, 1435 bp, Glycine max
  misc_feature (1)..(1435): Ceres Seq. ID no. 14309678
aaaacgaatctgaaaaagatggatctgaaaccgaaaccctaaaaccaatcatggatccatttccctttccacatttagctaccacgaaacgtaattttaatttctctctcaagagtcattttccgatgaaacgcaccgttcggcccctcttcgcgctcctcctcctcctcgtcttcgctgccaccctcacctcacgcgccgtcctccgccgcggcatcctctccatcgagctcgaatcccgcgtccggatccgccgccctccgccgcagctcaactccacgctcctccaccacgccgccgtcgaaatcggcgaggagaagttcaagcaagagattcagagcctcctcgacggcaacttcggcagccaagcgcgccaccgcaccttcgtctcctggcgccgcttcatccaccatgaccgcggcggcgccgaaggcgccgtggccaacctcccggggacgctccgctcgccgctcttctatcgctactggctcgacttccggaaggtcctccacgactggttccggaagcgacgattccaacccggtatcatgtccgagttgactcggtcaattaagcttccaattgattcacacaacaacaacaaactacaaaccaataacaaaaataaaaacaaatactcttcttgtgccgtagttggaaacagtggaattttgctgaatagaaactacggtagtgaaattgattcccatgaggttgtgataaggttaaacaatgctagggttgatcactttgaaaccaaggttgggaaaaaaactagcatttcattcatgaatagtaacatcttgcatttgtgtgctagaaggggagggtgcttttgccacccttatggtgataacgttccaattgtaatgtacatttgtcaagccgtgcatttcttggactacactgtgtgcaatgcttctcacaaggctcctttgttggtcactgatcctaggtttgatgtgttgtgtgcgaggattgtgaagtactattcgttgaagaggtttgtggaggagagtgggaagggtttggagaagtggggtgaggctcatgatggttctctttttcactactcttcagggatgcaggctgtgatactggctttggggatttgtgatagggttagcatttttgggtttgggaaattggcttctgctaagcaccattaccacactaaccagaaggctgagcttcacttgcatgattatgaggctgagtatgcgttttatagggaccttgtggatgggaatagggctataccgtttcttgaggacaggtttaaggttcctcctgttgttatgtatcagtgataggtgctgaactgctactgctgcaagtggtggtggtggagggcatctgtgacttgttgttctgttattgtaatacttgtgaaatgcacagatagtggaaaaagcaaaaaatactgattcaagac

SEQ ID NO: 59015 - protein, 435 aa, Glycine max
  peptide (1)..(435): Ceres Seq. ID no. 14309679
  misc_feature (152)..(418): Pfam Name: Glycosyltransferase family 29 (sialyltransferase) Pfam Description: Glycosyltransferase family 29
  misc_feature (344)..(405): Homolog of NCBI NO: 37652853 NR Description: alpha2,3-sialyltransferase [Xenopus laevis]
  misc_feature (172)..(263): Homolog of NCBI NO: 37652853 NR Description: alpha2,3-sialyltransferase [Xenopus laevis]
  misc_feature (344)..(404): Homolog of NCBI NO: 461676 NR Description: ase (Beta-galactoside alpha-2,3-sialyltransferase) (Alpha 2,3-ST) (Gal-beta-1,3-GalNAc-alpha-2,3-sialyltransferase)
  misc_feature (344)..(404): Homolog of NCBI NO: 346465 NR Description: Gal beta 1,3GalNAc alpha 2,3-sialyltransferase -
  misc_feature (172)..(263): Homolog of NCBI NO: 461676 NR Description: ase (Beta-galactoside alpha-2,3-sialyltransferase) (Alpha 2,3-ST) (Gal-beta-1,3-GalNAc-alpha-2,3-sialyltransferase)
  misc_feature (172)..(263): Homolog of NCBI NO: 346465 NR Description: Gal beta 1,3GalNAc alpha 2,3-sialyltransferase -
  misc_feature (322)..(434): Homolog of NCBI NO: 28416597 NR Description: At1g08280 [Arabidopsis thaliana]
  misc_feature (169)..(435): Homolog of NCBI NO: 21743080 NR Description: OSJNBb0002J11.10 [Oryza sativa (japonica
  misc_feature (42)..(434): Homolog of NCBI NO: 34908454 NR Description: P0683F02.18 [Oryza sativa (japonica
  misc_feature (42)..(434): Homolog of NCBI NO: 15223174 NR Description: sialyltransferase family [Arabidopsis thaliana]
NESEKDGSETETLKPIMDPFPFPHLATTKRNFNFSLKSHFPMKRTVRPLFALLLLLVFAATLTSRAVLRRGILSIELESRVRIRRPPPQLNSTLLHHAAVEIGEEKFKQEIQSLLDGNFGSQARHRTFVSWRRFIHHDRGGAEGAVANLPGTLRSPLFYRYWLDFRKVLHDWFRKRRFQPGIMSELTRSIKLPIDSHNNNKLQTNNKNKNKYSSCAVVGNSGILLNRNYGSEIDSHEVVIRLNNARVDHFETKVGKKTSISFMNSNILHLCARRGGCFCHPYGDNVPIVMYICQAVHFLDYTVCNASHKAPLLVTDPRFDVLCARIVKYYSLKRFVEESGKGLEKWGEAHDGSLFHYSSGMQAVILALGICDRVSIFGFGKLASAKHHYHTNQKAELHLHDYEAEYAFYRDLVDGNRAIPFLEDRFKVPPVVMYQ

SEQ ID NO: 59016 - protein, 419 aa, Glycine max
  peptide (1)..(419): Ceres Seq. ID no. 14309680
  misc_feature (136)..(402): Pfam Name: Glycosyltransferase family 29 (sialyltransferase) Pfam Description: Glycosyltransferase family 29
  misc_feature (328)..(389): Homolog of NCBI NO: 37652853 NR Description: alpha2,3-sialyltransferase [Xenopus laevis]
  misc_feature (156)..(247): Homolog of NCBI NO: 37652853 NR Description: alpha2,3-sialyltransferase [Xenopus laevis]
  misc_feature (328)..(388): Homolog of NCBI NO: 461676 NR Description: ase (Beta-galactoside alpha-2,3-sialyltransferase) (Alpha 2,3-ST) (Gal-beta-1,3-GalNAc-alpha-2,3-sialyltransferase)
  misc_feature (328)..(388): Homolog of NCBI NO: 346465 NR Description: Gal beta 1,3GalNAc alpha 2,3-sialyltransferase -
  misc_feature (156)..(247): Homolog of NCBI NO: 461676 NR Description: ase (Beta-galactoside alpha-2,3-sialyltransferase) (Alpha 2,3-ST) (Gal-beta-1,3-GalNAc-alpha-2,3-sialyltransferase)
  misc_feature (156)..(247): Homolog of NCBI NO: 346465 NR Description: Gal beta 1,3GalNAc alpha 2,3-sialyltransferase -
  misc_feature (306)..(418): Homolog of NCBI NO: 28416597 NR Description: At1g08280 [Arabidopsis thaliana]
  misc_feature (153)..(419): Homolog of NCBI NO: 21743080 NR Description: OSJNBb0002J11.10 [Oryza sativa (japonica
  misc_feature (26)..(418): Homolog of NCBI NO: 34908454 NR Description: P0683F02.18 [Oryza sativa (japonica
  misc_feature (26)..(418): Homolog of NCBI NO: 15223174 NR Description: sialyltransferase family [Arabidopsis thaliana]
MDPFPFPHLATTKRNFNFSLKSHFPMKRTVRPLFALLLLLVFAATLTSRAVLRRGILSIELESRVRIRRPPPQLNSTLLHHAAVEIGEEKFKQEIQSLLDGNFGSQARHRTFVSWRRFIHHDRGGAEGAVANLPGTLRSPLFYRYWLDFRKVLHDWFRKRRFQPGIMSELTRSIKLPIDSHNNNKLQTNNKNKNKYSSCAVVGNSGILLNRNYGSEIDSHEVVIRLNNARVDHFETKVGKKTSISFMNSNILHLCARRGGCFCHPYGDNVPIVMYICQAVHFLDYTVCNASHKAPLLVTDPRFDVLCARIVKYYSLKRFVEESGKGLEKWGEAHDGSLFHYSSGMQAVILALGICDRVSIFGFGKLASAKHHYHTNQKAELHLHDYEAEYAFYRDLVDGNRAIPFLEDRFKVPPVVMYQ

SEQ ID NO: 59017 - protein, 394 aa, Glycine max
  peptide (1)..(394): Ceres Seq. ID no. 14309681
  misc_feature (111)..(377): Pfam Name: Glycosyltransferase family 29 (sialyltransferase) Pfam Description: Glycosyltransferase family 29
  misc_feature (303)..(364): Homolog of NCBI NO: 37652853 NR Description: alpha2,3-sialyltransferase [Xenopus laevis]
  misc_feature (131)..(222): Homolog of NCBI NO: 37652853 NR Description: alpha2,3-sialyltransferase [Xenopus laevis]
  misc_feature (303)..(363): Homolog of NCBI NO: 461676 NR Description: ase (Beta-galactoside alpha-2,3-sialyltransferase) (Alpha 2,3-ST) (Gal-beta-1,3-GalNAc-alpha-2,3-sialyltransferase)
  misc_feature (303)..(363): Homolog of NCBI NO: 346465 NR Description: Gal beta 1,3GalNAc alpha 2,3-sialyltransferase -
  misc_feature (131)..(222): Homolog of NCBI NO: 461676 NR Description: ase (Beta-galactoside alpha-2,3-sialyltransferase) (Alpha 2,3-ST) (Gal-beta-1,3-GalNAc-alpha-2,3-sialyltransferase)
  misc_feature (131)..(222): Homolog of NCBI NO: 346465 NR Description: Gal beta 1,3GalNAc alpha 2,3-sialyltransferase -
  misc_feature (281)..(393): Homolog of NCBI NO: 28416597 NR Description: At1g08280 [Arabidopsis thaliana]
  misc_feature (128)..(394): Homolog of NCBI NO: 21743080 NR Description: OSJNBb0002J11.10 [Oryza sativa (japonica
  misc_feature (1)..(393): Homolog of NCBI NO: 34908454 NR Description: P0683F02.18 [Oryza sativa (japonica
  misc_feature (1)..(393): Homolog of NCBI NO: 15223174 NR Description: sialyltransferase family [Arabidopsis thaliana]
MKRTVRPLFALLLLLVFAATLTSRAVLRRGILSIELESRVRIRRPPPQLNSTLLHHAAVEIGEEKFKQEIQSLLDGNFGSQARHRTFVSWRRFIHHDRGGAEGAVANLPGTLRSPLFYRYWLDFRKVLHDWFRKRRFQPGIMSELTRSIKLPIDSHNNNKLQTNNKNKNKYSSCAVVGNSGILLNRNYGSEIDSHEVVIRLNNARVDHFETKVGKKTSISFMNSNILHLCARRGGCFCHPYGDNVPIVMYICQAVHFLDYTVCNASHKAPLLVTDPRFDVLCARIVKYYSLKRFVEESGKGLEKWGEAHDGSLFHYSSGMQAVILALGICDRVSIFGFGKLASAKHHYHTNQKAELHLHDYEAEYAFYRDLVDGNRAIPFLEDRFKVPPVVMYQ

SEQ ID NO: 59018 - DNA, 1251 bp, Glycine max
  misc_feature (1)..(1251): Ceres Seq. ID no. 14308152
ataacagagcacaccaacaccaacatcaacattctcattctctctcttttttctttcagttttggctttgatctttcaagttcaatggctggagatatagggagagccttgcctcctcctgattcagaagaattctcaaccttgttcaaccaactcctccacaattctcccccactaggaatggaccccaatcattcaccttctgatttcaccccacacaacaccaccatcaacatcaacagcaacaacaacaacaacactgttccttcctctccctcaaatttcaatttctctgacccccatcattacatccctgcctctgatgccaccaccttcaagcaacacaacatcaaccacaacaacaatcacacccctgatttcacttcttctcatgttgagaagagtgtggaggcatcgaaacctgtcccaccaccacgttcttcgtcaaagaggagtagagctgcagagttccataatttgtctgaaaagagaaggaggagtaggattaacgagaaaatgaaagccttacagaatttaattccaaattccaacaagacagacaaagcttcaatgctagatgaggccatagaatatttaaagcagctccagcttcaagtgcaaatgttaatgatgagaaatggtttgagcttgcatccaatgtctttgccaggaggactaagacctatgataatgcctcagactggattgaatcttgatgggagtaatggatttcagaattctacctgtgcaattgcctcatcttcaaatgatgaaagcttggtgcggcatgcctttagttttccaaagcaatgcagcatctcaaataagtctattggtgtaccctccgtgaaaaacatagcaacttcggatacctcatccacttttcatccctctattaaggatgcactctacggcaacatgccacaaccgtttatggatacaacaaagattggaaaaccctctccagacgtgtcttaaacagctcgatttcattgagggagaaaagaattttttagatggcaagtcgcctcgtaaaagggtagctttgttcaggcattataatctacatttaaatctgctgactatatgacactccattgggttgttcctggtgcagtttaatttgtagcagtttgacagagtctttgtgccattgttgacacttgcataaaaatgtacaagtattttataacttcatcaattgcaaaatgcagctaatgaacattctgcaacatgttgtgactgacttgt

SEQ ID NO: 59019 - protein, 325 aa, Glycine max
  peptide (1)..(325): Ceres Seq. ID no. 14308153
  misc_feature (154)..(203): Pfam Name: Helix-loop-helix DNA-binding domain Pfam Description: Helix-loop-helix DNA-binding domain
  misc_feature (128)..(242): Homolog of NCBI NO: 25411969 NR Description: hypothetical protein At2g20180 [imported] -
  misc_feature (128)..(242): Homolog of NCBI NO: 30680909 NR Description: (bHLH015) putative bHLH transcription factor
  misc_feature (119)..(320): Homolog of NCBI NO: 4093153 NR Description: phytochrome-associated protein 3 [Arabidopsis
  misc_feature (128)..(242): Homolog of NCBI NO: 30680903 NR Description: (bHLH015) putative bHLH transcription factor
  misc_feature (119)..(320): Homolog of NCBI NO: 15217533 NR Description: phytochrome interacting factor 3 (PIF3)
  misc_feature (146)..(223): Homolog of NCBI NO: 21536863 NR Description: unknown [Arabidopsis thaliana]
  misc_feature (146)..(223): Homolog of NCBI NO: 15240202 NR Description: bHLH protein family [Arabidopsis thaliana]
  misc_feature (135)..(289): Homolog of NCBI NO: 15451582 NR Description: Putative SPATULA [Oryza sativa]
  misc_feature (107)..(299): Homolog of NCBI NO: 25407777 NR Description: hypothetical protein AT4g36930 [imported] -
  misc_feature (107)..(299): Homolog of NCBI NO: 18419937 NR Description: bHLH protein SPATULA (SPT) [Arabidopsis thaliana]
ITEHTNTNINILILSLFSFSFGFDLSSSMAGDIGRALPPPDSEEFSTLFNQLLHNSPPLGMDPNHSPSDFTPHNTTININSNNNNNTVPSSPSNFNFSDPHHYIPASDATTFKQHNINHNNNHTPDFTSSHVEKSVEASKPVPPPRSSSKRSRAAEFHNLSEKRRRSRINEKMKALQNLIPNSNKTDKASMLDEAIEYLKQLQLQVQMLMMRNGLSLHPMSLPGGLRPMIMPQTGLNLDGSNGFQNSTCAIASSSNDESLVRHAFSFPKQCSISNKSIGVPSVKNIATSDTSSTFHPSIKDALYGNMPQPFMDTTKIGKPSPDVS

SEQ ID NO: 59020 - protein, 297 aa, Glycine max
  peptide (1)..(297): Ceres Seq. ID no. 14308154
  misc_feature (126)..(175): Pfam Name: Helix-loop-helix DNA-binding domain Pfam Description: Helix-loop-helix DNA-binding domain
  misc_feature (100)..(214): Homolog of NCBI NO: 25411969 NR Description: hypothetical protein At2g20180 [imported] -
  misc_feature (100)..(214): Homolog of NCBI NO: 30680909 NR Description: (bHLH015) putative bHLH transcription factor
  misc_feature (91)..(292): Homolog of NCBI NO: 4093153 NR Description: phytochrome-associated protein 3 [Arabidopsis
  misc_feature (100)..(214): Homolog of NCBI NO: 30680903 NR Description: (bHLH015) putative bHLH transcription factor
  misc_feature (91)..(292): Homolog of NCBI NO: 15217533 NR Description: phytochrome interacting factor 3 (PIF3)
  misc_feature (118)..(195): Homolog of NCBI NO: 21536863 NR Description: unknown [Arabidopsis thaliana]
  misc_feature (118)..(195): Homolog of NCBI NO: 15240202 NR Description: bHLH protein family [Arabidopsis thaliana]
  misc_feature (107)..(261): Homolog of NCBI NO: 15451582 NR Description: Putative SPATULA [Oryza sativa]
  misc_feature (79)..(271): Homolog of NCBI NO: 25407777 NR Description: hypothetical protein AT4g36930 [imported] -
  misc_feature (79)..(271): Homolog of NCBI NO: 18419937 NR Description: bHLH protein SPATULA (SPT) [Arabidopsis thaliana]
MAGDIGRALPPPDSEEFSTLFNQLLHNSPPLGMDPNHSPSDFTPHNTTININSNNNNNTVPSSPSNFNFSDPHHYIPASDATTFKQHNINHNNNHTPDFTSSHVEKSVEASKPVPPPRSSSKRSRAAEFHNLSEKRRRSRINEKMKALQNLIPNSNKTDKASMLDEAIEYLKQLQLQVQMLMMRNGLSLHPMSLPGGLRPMIMPQTGLNLDGSNGFQNSTCAIASSSNDESLVRHAFSFPKQCSISNKSIGVPSVKNIATSDTSSTFHPSIKDALYGNMPQPFMDTTKIGKPSPDVS

SEQ ID NO: 59021 - protein, 265 aa, Glycine max
  peptide (1)..(265): Ceres Seq. ID no. 14308155
  misc_feature (94)..(143): Pfam Name: Helix-loop-helix DNA-binding domain Pfam Description: Helix-loop-helix DNA-binding domain
  misc_feature (68)..(182): Homolog of NCBI NO: 25411969 NR Description: hypothetical protein At2g20180 [imported] -
  misc_feature (68)..(182): Homolog of NCBI NO: 30680909 NR Description: (bHLH015) putative bHLH transcription factor
  misc_feature (59)..(260): Homolog of NCBI NO: 4093153 NR Description: phytochrome-associated protein 3 [Arabidopsis
  misc_feature (68)..(182): Homolog of NCBI NO: 30680903 NR Description: (bHLH015) putative bHLH transcription factor
  misc_feature (59)..(260): Homolog of NCBI NO: 15217533 NR Description: phytochrome interacting factor 3 (PIF3)
  misc_feature (86)..(163): Homolog of NCBI NO: 21536863 NR Description: unknown [Arabidopsis thaliana]
  misc_feature (86)..(163): Homolog of NCBI NO: 15240202 NR Description: bHLH protein family [Arabidopsis thaliana]
  misc_feature (75)..(229): Homolog of NCBI NO: 15451582 NR Description: Putative SPATULA [Oryza sativa]
  misc_feature (47)..(239): Homolog of NCBI NO: 25407777 NR Description: hypothetical protein AT4g36930 [imported] -
  misc_feature (47)..(239): Homolog of NCBI NO: 18419937 NR Description: bHLH protein SPATULA (SPT) [Arabidopsis thaliana]
MDPNHSPSDFTPHNTTININSNNNNNTVPSSPSNFNFSDPHHYIPASDATTFKQHNINHNNNHTPDFTSSHVEKSVEASKPVPPPRSSSKRSRAAEFHNLSEKRRRSRINEKMKALQNLIPNSNKTDKASMLDEAIEYLKQLQLQVQMLMMRNGLSLHPMSLPGGLRPMIMPQTGLNLDGSNGFQNSTCAIASSSNDESLVRHAFSFPKQCSISNKSIGVPSVKNIATSDTSSTFHPSIKDALYGNMPQPFMDTTKIGKPSPDVS

SEQ ID NO: 59022 - DNA, 1389 bp, Glycine max
  misc_feature (1)..(1389): Ceres Seq. ID no. 14312328
gaagagagagcgcattaccaaaccccccaaagaacacgttcactctcgattttgccttgcaaattgcgatttctctgcagtttcttccatcctccaactctgacctttcttgacgcgattttggtttttgtcaacttcttattgaaacccttcttcagtcttctcccatttccagagttcttataaattgatgctttttacaagtctttctgaacattccgtttccttcctccaggaaaagttagcgtgtccttaggtcacataggattttgagaaatttactttttaatttgcctctgaattaattctgcaagaagagagataatgtctggttcaaagaaatctcctttgaaggttgctaagcctagctctgctgaatcttggacgaatccatttgattctgatgatgagggaaaggatagcaaaaaatatagttcctctagaaaaacttcttcggagcgcgcacttgctacactggaagttaacaccaacccctttgatgatgatattgatgccaataagaaatcttcatcaacttcgtatgcctttcaatctgccaaccggaacaggtataagaatgattttcgtgactctggtggattagagaatcaatcggttcaagaactggagagttatgctgtttacaaggctgaagagactacaaattcagtcaacaattgtttgaagatagcagagaacataagagaggatgctaccaagacactagtcacccttgaacaacagggtgaacaaattaccaggagtcaccatgttgctgctgacattgatcacgatttaagtcggggagaaaagctcttgggaagccttggtggcctcttctccaaaacttggaaaccaaagaagacacgagcaataaccggccctgttattgttggagatgatccggtcaggagaaaggacaatcacttggagcagagagacaagttgggactgacctctgcacccaaagggcagtccaagctacggaccccccctccagaaccaacaaatgcacttgaaaaagttgaggttgaaaaaaagaagcaagatgatgcactatcagatttaagtgatctgttgggagagcttaaagacatggctgttgacatgggatccgagattgagaggcataacaaagccctgaatcatctatacgatgatgtggatgagttgaatttccgagtgaaaggtgctaatcaacgtggccgtcgtttgctcggaaaataagattgattgatttcatcattgtgtttttctctttgtatccatcatctggtttaatgaaggcaatcttttcatttagtttatacttgtgttgcattatatataaaatatgcaacagattaaataagtctgggtgcaatactacataattcaatttgttgattt

SEQ ID NO: 59023 - protein, 300 aa, Glycine max
  peptide (1)..(300): Ceres Seq. ID no. 14312329
  misc_feature (240)..(300): Pfam Name: SNARE domain Pfam Description: SNARE domain
  misc_feature (89)..(299): Homolog of NCBI NO: 6755588 NR Description: synaptosomal-associated protein 25
  misc_feature (93)..(298): Homolog of NCBI NO: 28279149 NR Description: Similar to synaptosomal-associated protein, 23kD
  misc_feature (89)..(299): Homolog of NCBI NO: 40555928 NR Description: synaptosomal-associated protein 25 [Lateolabrax
  misc_feature (98)..(298): Homolog of NCBI NO: 17737875 NR Description: Synapse protein 24 CG9474-PA [Drosophila
  misc_feature (89)..(299): Homolog of NCBI NO: 18765733 NR Description: synaptosomal-associated protein 25 isoform SNAP25A
  misc_feature (56)..(300): Homolog of NCBI NO: 15241436 NR Description: SNAP25 - like protein [Arabidopsis thaliana]
  misc_feature (22)..(300): Homolog of NCBI NO: 32308074 NR Description: SNAP-34 [Hordeum vulgare subsp. vulgare]
  misc_feature (81)..(300): Homolog of NCBI NO: 15222976 NR Description: synaptosomal associated protein (SNAP25A)
  misc_feature (1)..(300): Homolog of NCBI NO: 15240163 NR Description: syntaxin SNAP33 [Arabidopsis thaliana]
  misc_feature (1)..(300): Homolog of NCBI NO: 21553460 NR Description: snap25a [Arabidopsis thaliana]
MSGSKKSPLKVAKPSSAESWTNPFDSDDEGKDSKKYSSSRKTSSERALATLEVNTNPFDDDIDANKKSSSTSYAFQSANRNRYKNDFRDSGGLENQSVQELESYAVYKAEETTNSVNNCLKIAENIREDATKTLVTLEQQGEQITRSHHVAADIDHDLSRGEKLLGSLGGLFSKTWKPKKTRAITGPVIVGDDPVRRKDNHLEQRDKLGLTSAPKGQSKLRTPPPEPTNALEKVEVEKKKQDDALSDLSDLLGELKDMAVDMGSEIERHNKALNHLYDDVDELNFRVKGANQRGRRLLGK

SEQ ID NO: 59024 - DNA, 1157 bp, Glycine max
  misc_feature (1)..(1157): Ceres Seq. ID no. 14304136
attcacattcatcacaactcacctcacccagctagctagcttcataaggttaattagatttttttcgtggaaacaaagatctcaatacttgtgatatcatgacgatgatgagcagcaacaacaacaacaacaacaacaacgttggagaatttggagacaccactctgactaaggtttttgttgggggcttagcttgggagactccgaaggatgccctcaaagaccactttgagaagtatggtgagatccttgaagctgtcatcatttccgataagcacactgccaaatccaaaggctatggctttgtgactttcaaggaggctgaggctgccaagaaggcttgtgaggattcagcaactctcgttatcaatggccgtcgagcaaattgcaatcttgcttgcctaggtgctcgtcgcccaaggtcttcttccaatgtttcaccacctccacaaccacaaggaggatcaaacggtggagtagtgaagaacaatgcatcaagcccaccagccattaatcacgtgcagccatattattatccagtgaggacaactgctgctctgccattccataatcacactcttcctttctatgggtatgcgcctacctacattgtgacggacgtaaactacaattacaatcagaaactgtgctatggtagcggtgggacctacatgaatgggcagcatgtgtacccgaggcaggctattgtgggtgccaacacactgatgccaatgtaccctctttatcagtatcatcatccaacggagaccataggtgtaccagctcacaacttttatccaacggcatcatgggccccaatgaccatcatgtccaagccatcgtctatcgttcctcatacaggtacagttggcacaggtgagtgctttaaaagggttgtctgagaggagcttggttggctaaataacagcagagggagggaaaatggtggtggtggccgcacagagcaacattattatctgatctgtcttggctttactttccttttttttgttgttgtctttaaatattgtttcatttttagttgttaatcttaggcattttgttgttgatgagattctttcattctctttttctgtctaacatctcagcatgtgctgtgcacagttacattcagttgaaattatcgatttgttctc

SEQ ID NO: 59025 - protein, 267 aa, Glycine max
  peptide (1)..(267): Ceres Seq. ID no. 14304137
  misc_feature (26)..(84): Pfam Name: RNA recognition motif. (a.k.a. RRM, RBD, or RNP domain) Pfam Description: RNA recognition motif. (a.k.a. RRM, RBD, or RNP
  misc_feature (18)..(225): Homolog of NCBI NO: 22330665 NR Description: RNA recognition motif (RRM)-containing protein
  misc_feature (18)..(225): Homolog of NCBI NO: 23505939 NR Description: At1g20880/F9H16_14 [Arabidopsis thaliana]
  misc_feature (18)..(225): Homolog of NCBI NO: 15010636 NR Description: At1g20880/F9H16_14 [Arabidopsis thaliana]
  misc_feature (18)..(225): Homolog of NCBI NO: 18394923 NR Description: RNA recognition motif (RRM)-containing protein
  misc_feature (18)..(252): Homolog of NCBI NO: 25405025 NR Description: protein F3F9.20 [imported] - Arabidopsis thaliana
  misc_feature (18)..(252): Homolog of NCBI NO: 18411885 NR Description: RNA recognition motif (RRM)-containing protein
  misc_feature (12)..(186): Homolog of NCBI NO: 15226439 NR Description: RNA recognition motif (RRM)-containing protein
  misc_feature (15)..(218): Homolog of NCBI NO: 34907334 NR Description: P0698A10.29 [Oryza sativa (japonica
  misc_feature (12)..(265): Homolog of NCBI NO: 15232579 NR Description: RNA recognition motif (RRM)-containing protein
  misc_feature (12)..(265): Homolog of NCBI NO: 21536939 NR Description: RNA binding protein-like [Arabidopsis thaliana]
MTMMSSNNNNNNNNVGEFGDTTLTKVFVGGLAWETPKDALKDHFEKYGEILEAVIISDKHTAKSKGYGFVTFKEAEAAKKACEDSATLVINGRRANCNLACLGARRPRSSSNVSPPPQPQGGSNGGVVKNNASSPPAINHVQPYYYPVRTTAALPFHNHTLPFYGYAPTYIVTDVNYNYNQKLCYGSGGTYMNGQHVYPRQAIVGANTLMPMYPLYQYHHPTETIGVPAHNFYPTASWAPMTIMSKPSSIVPHTGTVGTGECFKRVV

SEQ ID NO: 59026 - protein, 265 aa, Glycine max
  peptide (1)..(265): Ceres Seq. ID no. 14304138
  misc_feature (24)..(82): Pfam Name: RNA recognition motif. (a.k.a. RRM, RBD, or RNP domain) Pfam Description: RNA recognition motif. (a.k.a. RRM, RBD, or RNP
  misc_feature (16)..(223): Homolog of NCBI NO: 22330665 NR Description: RNA recognition motif (RRM)-containing protein
  misc_feature (16)..(223): Homolog of NCBI NO: 23505939 NR Description: At1g20880/F9H16_14 [Arabidopsis thaliana]
  misc_feature (16)..(223): Homolog of NCBI NO: 15010636 NR Description: At1g20880/F9H16_14 [Arabidopsis thaliana]
  misc_feature (16)..(223): Homolog of NCBI NO: 18394923 NR Description: RNA recognition motif (RRM)-containing protein
  misc_feature (16)..(250): Homolog of NCBI NO: 25405025 NR Description: protein F3F9.20 [imported] - Arabidopsis thaliana
  misc_feature (16)..(250): Homolog of NCBI NO: 18411885 NR Description: RNA recognition motif (RRM)-containing protein
  misc_feature (10)..(184): Homolog of NCBI NO: 15226439 NR Description: RNA recognition motif (RRM)-containing protein
  misc_feature (13)..(216): Homolog of NCBI NO: 34907334 NR Description: P0698A10.29 [Oryza sativa (japonica
  misc_feature (10)..(263): Homolog of NCBI NO: 15232579 NR Description: RNA recognition motif (RRM)-containing protein
  misc_feature (10)..(263): Homolog of NCBI NO: 21536939 NR Description: RNA binding protein-like [Arabidopsis thaliana]
MMSSNNNNNNNNVGEFGDTTLTKVFVGGLAWETPKDALKDHFEKYGEILEAVIISDKHTAKSKGYGFVTFKEAEAAKKACEDSATLVINGRRANCNLACLGARRPRSSSNVSPPPQPQGGSNGGVVKNNASSPPAINHVQPYYYPVRTTAALPFHNHTLPFYGYAPTYIVTDVNYNYNQKLCYGSGGTYMNGQHVYPRQAIVGANTLMPMYPLYQYHHPTETIGVPAHNFYPTASWAPMTIMSKPSSIVPHTGTVGTGECFKRVV

SEQ ID NO: 59027 - protein, 264 aa, Glycine max
  peptide (1)..(264): Ceres Seq. ID no. 14304139
  misc_feature (23)..(81): Pfam Name: RNA recognition motif. (a.k.a. RRM, RBD, or RNP domain) Pfam Description: RNA recognition motif. (a.k.a. RRM, RBD, or RNP
  misc_feature (15)..(222): Homolog of NCBI NO: 22330665 NR Description: RNA recognition motif (RRM)-containing protein
  misc_feature (15)..(222): Homolog of NCBI NO: 23505939 NR Description: At1g20880/F9H16_14 [Arabidopsis thaliana]
  misc_feature (15)..(222): Homolog of NCBI NO: 15010636 NR Description: At1g20880/F9H16_14 [Arabidopsis thaliana]
  misc_feature (15)..(222): Homolog of NCBI NO: 18394923 NR Description: RNA recognition motif (RRM)-containing protein
  misc_feature (15)..(249): Homolog of NCBI NO: 25405025 NR Description: protein F3F9.20 [imported] - Arabidopsis thaliana
  misc_feature (15)..(249): Homolog of NCBI NO: 18411885 NR Description: RNA recognition motif (RRM)-containing protein
  misc_feature (9)..(183): Homolog of NCBI NO: 15226439 NR Description: RNA recognition motif (RRM)-containing protein
  misc_feature (12)..(215): Homolog of NCBI NO: 34907334 NR Description: P0698A10.29 [Oryza sativa (japonica
  misc_feature (9)..(262): Homolog of NCBI NO: 15232579 NR Description: RNA recognition motif (RRM)-containing protein
  misc_feature (9)..(262): Homolog of NCBI NO: 21536939 NR Description: RNA binding protein-like [Arabidopsis thaliana]
MSSNNNNNNNNVGEFGDTTLTKVFVGGLAWETPKDALKDHFEKYGEILEAVIISDKHTAKSKGYGFVTFKEAEAAKKACEDSATLVINGRRANCNLACLGARRPRSSSNVSPPPQPQGGSNGGVVKNNASSPPAINHVQPYYYPVRTTAALPFHNHTLPFYGYAPTYIVTDVNYNYNQKLCYGSGGTYMNGQHVYPRQAIVGANTLMPMYPLYQYHHPTETIGVPAHNFYPTASWAPMTIMSKPSSIVPHTGTVGTGECFKRVV

SEQ ID NO: 59028 - DNA, 1413 bp, Glycine max
  misc_feature (1)..(1413): Ceres Seq. ID no. 13581611
aaagtgggaagaaatagttaagtagcacggtaggcgcagtaggccacagtcacacacagcctttgcctttgcctttgctgttcagtgctcccactcccagtccgggccgaggcagaaaatatcggaaactaacctttcacactcacacatccatcgtcatatctgaattggcaactcattattaaatcaattacgaaaacgaagaaacccaacaaaacaatggtagtagcttagctaattgcctaattgaatgaatctcaatggaacctcctctcatcaacgactccacattctcttccgctaacccttccttgtccgagatttggccctctcattttcccacagaccacactcccagtaacaagagacacctctccccctcgactgattgtggcagcaataaacatatcaaatcatcaggatcaggatcccaggatcaaaacggtgccttgaaggcgggtgaagtggacgcgacttcagtagccggtaacaagttacccgaacaaacggcgaaacctagttcttccgagcagccacctaagcaagactatatacacgtgcgagctagaagaggccaagccaccgatagccacagtctcgctgagagagctaggagagaaaagatcagtgagaggatgaaaattcttcaagatatagttcccggctgcaacaaggtaattggtaaagcacttgtgctggatgagataattaattatatccagtcactgcagcatcaggttgagttcctttctatgaagcttgaggcagttaattcgagattgagcatgagccctactattgaatgttttccttcaaaagaagttggcactcagccatttgaccttgccggaataatatttggatcacaaccggccaggggatatgctcaaggatcacagccgggatggctgcatatgcagatagctggtggttttgagaaagcaacataatttgagggaggttcattgggaatgacagaccaatcagtgtggttggttttccattgaaaaggaaaaagtcacttggctggttggttagcatgcgctgctctattaacaacctagtcaattgatgcaaaatgttgtaaggtctgtatgttctttgtcatagtatgatatcaatagtaagaaatgcatctaatttccttgcgcatcatctgactgggaacgtagtgtttcaccatgttagcaattgaaataatcttattgtggtttagttttcgtttcaaaactctggtgtggtaggattcttctctcctgatttgttctatcacaattcatatatgattagcaagatattattcgcgttagggacagtatgaaaattgccccaaggtcgtaattgagtccttgtctgaagttcaaatgtttgattgcgactaaacaagtaatatgttaatgtcaaatgtttgag

SEQ ID NO: 59029 - protein, 229 aa, Glycine max
  peptide (1)..(229): Ceres Seq. ID no. 13581612
  misc_feature (107)..(157): Pfam Name: Helix-loop-helix DNA-binding domain Pfam Description: Helix-loop-helix DNA-binding domain
  misc_feature (39)..(177): Homolog of NCBI NO: 34906952 NR Description: DNA-binding protein-like protein
  misc_feature (46)..(188): Homolog of NCBI NO: 30696324 NR Description: bHLH protein [Arabidopsis thaliana]
  misc_feature (46)..(188): Homolog of NCBI NO: 25453562 NR Description: helix-loop-helix protein homolog
  misc_feature (43)..(229): Homolog of NCBI NO: 15241896 NR Description: bHLH protein family [Arabidopsis thaliana]
  misc_feature (48)..(229): Homolog of NCBI NO: 29150361 NR Description: hypothetical protein [Oryza sativa (japonica
  misc_feature (174)..(229): Homolog of NCBI NO: 25404871 NR Description: protein T30E16.21 [imported] - Arabidopsis
  misc_feature (46)..(188): Homolog of NCBI NO: 25404871 NR Description: protein T30E16.21 [imported] - Arabidopsis
  misc_feature (46)..(229): Homolog of NCBI NO: 21592490 NR Description: unknown [Arabidopsis thaliana]
  misc_feature (46)..(229): Homolog of NCBI NO: 18406408 NR Description: bHLH protein [Arabidopsis thaliana]
  misc_feature (43)..(229): Homolog of NCBI NO: 33339703 NR Description: MYC1 [Catharanthus roseus]
MEPPLINDSTFSSANPSLSEIWPSHFPTDHTPSNKRHLSPSTDCGSNKHIKSSGSGSQDQNGALKAGEVDATSVAGNKLPEQTAKPSSSEQPPKQDYIHVRARRGQATDSHSLAERARREKISERMKILQDIVPGCNKVIGKALVLDEIINYIQSLQHQVEFLSMKLEAVNSRLSMSPTIECFPSKEVGTQPFDLAGIIFGSQPARGYAQGSQPGWLHMQIAGGFEKAT

SEQ ID NO: 59030 - DNA, 1470 bp, Glycine max
  misc_feature (1)..(1470): Ceres Seq. ID no. 14308107
aaaaaagttctattccttcgtctgcaaccctagctttccgttgtttgcaaatctatggctggtgaatctgataaacccgaaaacaccctctcttgtgctaactgtggcaaacctgcgaatcttcagtgtccaaaatgtatggaattgaagcttcctcgagaaggtgctgccttctgctctcaggattgtttcaagtcttcatggagctcgcacaaatcagtgcatctgaaggcaaaactatccccacctggcacacaaaattcagactcacttgatgaaggttggttatattgtttgaagagagggcaggctcgaacgccaaagcttcctcactttgattggacaggaccactgcagccatatcccatttctagtaaacggattgtcccagatcaaattgataaacctgattgggctggtgatggaacacccaaaattgagcccaatagtagtctacagcataccattgaggtcaaaactccagatcaaatagagagaatgagggaaacttgtcggattgcaagggaggtgttggatgcagctgctcggattattcagcctggtgtgacgactgatgagattgacagagttgttcatgaggcaactattgctgcaggaggatatccatcgcctctcaattaccatttcttccctaaatcttgctgcacgtcagttaatgaagtaatctgtcatggaattcctgatgcaaggaagcttgaggatggtgacattgtaaatgttgatgtcactgtgtactataaaggtgttcatggtgatctcaatgaaacatactttgtgggaaatgttgatgaagagtctctccaactagtaaaatgcacatatgagtgcctggagaaggcaatatccattgttaaacctgggatacgattccgtgagattggtgaagtcattaatcgtcatgcttcaatgtctggattctcggtggtaaaatcttattgtggtcatggaattggagagctcttccattgtgcaccaaacattcctcattattcaagaaataaagcagttggtgtgatgaaggctggacagacctttacaattgaaccaatgatcaatgccggtgtctggcgtgatcgaatgtggcctgatggatggactgctgttacagcggatggtaaacgaagtgctcaatttgagcacactcttttggtgacagagactggtgttgaagttttaacagggcggttgcagacatcacccaatgtttttccttggctaggttcataattgggtgaatcatggagacagatgctggcagtgtctaaataccatacaattattagacgacatttctttgatctatttctctgattgcctcctttgggtatcatgtttgtaagttatacaaaaaacagaagcaaattcaattgagtttaggtgaaaagtatgcttaatgatatgtttgtgtaattgaagaaaatttaattttagaattttgtcttgctttcc

SEQ ID NO: 59031 - protein, 397 aa, Glycine max
  peptide (1)..(397): Ceres Seq. ID no. 14308108
  misc_feature (17)..(386): Homolog of NCBI NO: 32484310 NR Description: Unknown (protein for MGC:64362) [Xenopus laevis]
  misc_feature (17)..(388): Homolog of NCBI NO: 28202007 NR Description: methionyl aminopeptidase 1 [Mus musculus]
  misc_feature (14)..(57): Homolog of NCBI NO: 39583678 NR Description: Hypothetical protein CBG08323 [Caenorhabditis
  misc_feature (92)..(389): Homolog of NCBI NO: 39583678 NR Description: Hypothetical protein CBG08323 [Caenorhabditis
  misc_feature (17)..(388): Homolog of NCBI NO: 33302602 NR Description: Methionine aminopeptidase 1 (MetAP 1) (MAP 1)
  misc_feature (17)..(388): Homolog of NCBI NO: 577315 NR Description: KIAA0094 gene product is related to S.cerevisiae
  misc_feature (17)..(386): Homolog of NCBI NO: 28436769 NR Description: Unknown (protein for IMAGE:5542221) [Xenopus
  misc_feature (75)..(395): Homolog of NCBI NO: 37535920 NR Description: putative methionine aminopeptidase
  misc_feature (1)..(395): Homolog of NCBI NO: 21593270 NR Description: putative methionine aminopeptidase [Arabidopsis
  misc_feature (1)..(395): Homolog of NCBI NO: 15225437 NR Description: methionine aminopeptidase -related [Arabidopsis
MAGESDKPENTLSCANCGKPANLQCPKCMELKLPREGAAFCSQDCFKSSWSSHKSVHLKAKLSPPGTQNSDSLDEGWLYCLKRGQARTPKLPHFDWTGPLQPYPISSKRIVPDQIDKPDWAGDGTPKIEPNSSLQHTIEVKTPDQIERMRETCRIAREVLDAAARIIQPGVTTDEIDRVVHEATIAAGGYPSPLNYHFFPKSCCTSVNEVICHGIPDARKLEDGDIVNVDVTVYYKGVHGDLNETYFVGNVDEESLQLVKCTYECLEKAISIVKPGIRFREIGEVINRHASMSGFSVVKSYCGHGIGELFHCAPNIPHYSRNKAVGVMKAGQTFTIEPMINAGVWRDRMWPDGWTAVTADGKRSAQFEHTLLVTETGVEVLTGRLQTSPNVFPWLGS

SEQ ID NO: 59032 - protein, 369 aa, Glycine max
  peptide (1)..(369): Ceres Seq. ID no. 14308109
  misc_feature (1)..(358): Homolog of NCBI NO: 32484310 NR Description: Unknown (protein for MGC:64362) [Xenopus laevis]
  misc_feature (1)..(360): Homolog of NCBI NO: 28202007 NR Description: methionyl aminopeptidase 1 [Mus musculus]
  misc_feature (1)..(29): Homolog of NCBI NO: 39583678 NR Description: Hypothetical protein CBG08323 [Caenorhabditis
  misc_feature (64)..(361): Homolog of NCBI NO: 39583678 NR Description: Hypothetical protein CBG08323 [Caenorhabditis
  misc_feature (1)..(360): Homolog of NCBI NO: 33302602 NR Description: Methionine aminopeptidase 1 (MetAP 1) (MAP 1)
  misc_feature (1)..(360): Homolog of NCBI NO: 577315 NR Description: KIAA0094 gene product is related to S.cerevisiae
  misc_feature (1)..(358): Homolog of NCBI NO: 28436769 NR Description: Unknown (protein for IMAGE:5542221) [Xenopus
  misc_feature (47)..(367): Homolog of NCBI NO: 37535920 NR Description: putative methionine aminopeptidase
  misc_feature (1)..(367): Homolog of NCBI NO: 21593270 NR Description: putative methionine aminopeptidase [Arabidopsis
  misc_feature (1)..(367): Homolog of NCBI NO: 15225437 NR Description: methionine aminopeptidase -related [Arabidopsis
MELKLPREGAAFCSQDCFKSSWSSHKSVHLKAKLSPPGTQNSDSLDEGWLYCLKRGQARTPKLPHFDWTGPLQPYPISSKRIVPDQIDKPDWAGDGTPKIEPNSSLQHTIEVKTPDQIERMRETCRIAREVLDAAARIIQPGVTTDEIDRVVHEATIAAGGYPSPLNYHFFPKSCCTSVNEVICHGIPDARKLEDGDIVNVDVTVYYKGVHGDLNETYFVGNVDEESLQLVKCTYECLEKAISIVKPGIRFREIGEVINRHASMSGFSVVKSYCGHGIGELFHCAPNIPHYSRNKAVGVMKAGQTFTIEPMINAGVWRDRMWPDGWTAVTADGKRSAQFEHTLLVTETGVEVLTGRLQTSPNVFPWLGS

SEQ ID NO: 59033 - protein, 249 aa, Glycine max
  peptide (1)..(249): Ceres Seq. ID no. 14308110
  misc_feature (1)..(236): Homolog of NCBI NO: 17543082 NR Description: metallopeptidase family M24 (4E448)
  misc_feature (1)..(238): Homolog of NCBI NO: 32484310 NR Description: Unknown (protein for MGC:64362) [Xenopus laevis]
  misc_feature (1)..(240): Homolog of NCBI NO: 28202007 NR Description: methionyl aminopeptidase 1 [Mus musculus]
  misc_feature (1)..(241): Homolog of NCBI NO: 39583678 NR Description: Hypothetical protein CBG08323 [Caenorhabditis
  misc_feature (1)..(240): Homolog of NCBI NO: 33302602 NR Description: Methionine aminopeptidase 1 (MetAP 1) (MAP 1)
  misc_feature (1)..(240): Homolog of NCBI NO: 577315 NR Description: KIAA0094 gene product is related to S.cerevisiae
  misc_feature (1)..(238): Homolog of NCBI NO: 28436769 NR Description: Unknown (protein for IMAGE:5542221) [Xenopus
  misc_feature (1)..(247): Homolog of NCBI NO: 37535920 NR Description: putative methionine aminopeptidase
  misc_feature (1)..(247): Homolog of NCBI NO: 21593270 NR Description: putative methionine aminopeptidase [Arabidopsis
  misc_feature (1)..(247): Homolog of NCBI NO: 15225437 NR Description: methionine aminopeptidase -related [Arabidopsis
MRETCRIAREVLDAAARIIQPGVTTDEIDRVVHEATIAAGGYPSPLNYHFFPKSCCTSVNEVICHGIPDARKLEDGDIVNVDVTVYYKGVHGDLNETYFVGNVDEESLQLVKCTYECLEKAISIVKPGIRFREIGEVINRHASMSGFSVVKSYCGHGIGELFHCAPNIPHYSRNKAVGVMKAGQTFTIEPMINAGVWRDRMWPDGWTAVTADGKRSAQFEHTLLVTETGVEVLTGRLQTSPNVFPWLGS

SEQ ID NO: 59034 - DNA, 1302 bp, Glycine max
  misc_feature (1)..(1302): Ceres Seq. ID no. 15177611
agaatattcttcttcctccaccgcgattagggttttcggattttcactttactctcacttcttccaccctcgtcacctgcaattgatttttttttcttccaatcgataattgaagaacacgacattccaattcctctctcgattcgtttcgctagctcgataatcaaaagtgcctggtgattcggagttgtttgtgaaaatgagaaggcaggggcactatggggatccatctgccaacacttgtgttggtggtggccagatgcatcatatggctggtcaaaggggggaggccaagtcgggtaattttgaaggacggctagaggcctttactccagaaagagagaatccgtatggaaattccaagccggagggtcagtggagatgggagatggatgaatcgaagatgtccaattcaatggcatctcgaatgtttaatgaaggtcaaggggttgatgcttcaaagccctattttcaagggcagagccggaacaatagtgattccagatctcaggctcatgaagaagatatggatgttagatatgaaggagaacatttatcacaatcttttgaaggtcttgagcagaattttcatgatgacatcattaaactcaccaaagaacagaatgatgctgaagatgcagcatatgccagacacagagagaaaataaatgcaatcaatgctcagtatgaagaaaaactagcagcactccgagctcagcatagcagccgcagagctgaatttcttcaaagggaatcacatgctacgcaacagcagtaccagcaaatcataagggatccttacctcggtggtggcatggcaccccgagaccctcatgcaccccgagaccctcatgcaccccgagatcctcatggttacaacaatgtgaatgattcaggtgcaggtggagaagtgcaacgaggctattctgccgatcactttgatccttaccgagagagagctcgatttcttgggggtggtagagatcaaggatttgaacctagaggcccatatcctggtggccgtgtctatgacactggttcacgctactacaattgagttttgacccaaaggtttatctccattttgggtttctactgcaggtgaaaatgcttaaattgacataatttatgctttgtcatcttaccatctttttactaccctgtttatggaaattaacgtttcttagcggctgttatttatatagatcaacattggagttgcacaccgttatattggtgttgtgcattaaaacgtaggatatttgttgtttgtgtttatgaaaaccaataacattcaacacc

SEQ ID NO: 59035 - protein, 285 aa, Glycine max
  peptide (1)..(285): Ceres Seq. ID no. 15177612
  misc_feature (109)..(248): Homolog of NCBI NO: 26449851 NR Description: unknown protein [Arabidopsis thaliana]
  misc_feature (17)..(248): Homolog of NCBI NO: 15228732 NR Description: expressed protein [Arabidopsis thaliana]
  misc_feature (1)..(284): Homolog of NCBI NO: 22326954 NR Description: expressed protein [Arabidopsis thaliana]
MRRQGHYGDPSANTCVGGGQMHHMAGQRGEAKSGNFEGRLEAFTPERENPYGNSKPEGQWRWEMDESKMSNSMASRMFNEGQGVDASKPYFQGQSRNNSDSRSQAHEEDMDVRYEGEHLSQSFEGLEQNFHDDIIKLTKEQNDAEDAAYARHREKINAINAQYEEKLAALRAQHSSRRAEFLQRESHATQQQYQQIIRDPYLGGGMAPRDPHAPRDPHAPRDPHGYNNVNDSGAGGEVQRGYSADHFDPYRERARFLGGGRDQGFEPRGPYPGGRVYDTGSRYYN

SEQ ID NO: 59036 - protein, 265 aa, Glycine max
  peptide (1)..(265): Ceres Seq. ID no. 15177613
  misc_feature (89)..(228): Homolog of NCBI NO: 26449851 NR Description: unknown protein [Arabidopsis thaliana]
  misc_feature (1)..(228): Homolog of NCBI NO: 15228732 NR Description: expressed protein [Arabidopsis thaliana]
  misc_feature (1)..(264): Homolog of NCBI NO: 22326954 NR Description: expressed protein [Arabidopsis thaliana]
MHHMAGQRGEAKSGNFEGRLEAFTPERENPYGNSKPEGQWRWEMDESKMSNSMASRMFNEGQGVDASKPYFQGQSRNNSDSRSQAHEEDMDVRYEGEHLSQSFEGLEQNFHDDIIKLTKEQNDAEDAAYARHREKINAINAQYEEKLAALRAQHSSRRAEFLQRESHATQQQYQQIIRDPYLGGGMAPRDPHAPRDPHAPRDPHGYNNVNDSGAGGEVQRGYSADHFDPYRERARFLGGGRDQGFEPRGPYPGGRVYDTGSRYYN

SEQ ID NO: 59037 - protein, 262 aa, Glycine max
  peptide (1)..(262): Ceres Seq. ID no. 15177614
  misc_feature (86)..(225): Homolog of NCBI NO: 26449851 NR Description: unknown protein [Arabidopsis thaliana]
  misc_feature (1)..(225): Homolog of NCBI NO: 15228732 NR Description: expressed protein [Arabidopsis thaliana]
  misc_feature (1)..(261): Homolog of NCBI NO: 22326954 NR Description: expressed protein [Arabidopsis thaliana]
MAGQRGEAKSGNFEGRLEAFTPERENPYGNSKPEGQWRWEMDESKMSNSMASRMFNEGQGVDASKPYFQGQSRNNSDSRSQAHEEDMDVRYEGEHLSQSFEGLEQNFHDDIIKLTKEQNDAEDAAYARHREKINAINAQYEEKLAALRAQHSSRRAEFLQRESHATQQQYQQIIRDPYLGGGMAPRDPHAPRDPHAPRDPHGYNNVNDSGAGGEVQRGYSADHFDPYRERARFLGGGRDQGFEPRGPYPGGRVYDTGSRYYN

SEQ ID NO: 59038 - DNA, 1051 bp, Glycine max
  misc_feature (1)..(1051): Ceres Seq. ID no. 15227118
aactgggcccatagaattgttaatttctctgatcccattgtgaatttgtggggatctgaattgcggaggaagatgattcagcttctgttcacggtgatattttcggaggcttcgatgatagcgttgctgctgttcaagacccctttgaggaagctcgtgataatgggcttggatcggttgaagcgaggtcgtggacccttgatggtgaagaccgttgcagggaccgttctcgtggtgttgttgtcgagtgtgtatagcatgttgaagattcagaagcgtgggatccaagagggtgctgttgttaaccccaccgatcaggttcttatggccaagcacctcctcgaagcaacgctcatggttgctgtccttttccttgcacttatgatagacagactacatcattacataagagaactgcggattcgaagaaaaggcatggaagctgtgaagaaacaaaccagagggactgaagatgggaaagttgcaaattcagaagaaattaagtctgtggaggaagaaagagccagattgagagctgaacttagccgccttgaatctgaactacagtcaaaaacaaaagacgtagatggtgctgaagccaatatagctgctctgagaaaacaatctgaggggttccttcttgagtatgatcgcttacttgaggaaaaccagaacctccgcaaccaactacaatccttggacaggaaattgtcacattcaggttccaagaagaatatgtaagaaaattgcaggtaagaatggcttcttttgtatactcttaaggaattccatggcagtttgttgataacagcttgtcaatccctgtaagcttgctcctaaaggaatacgattttcacttttgagttgaatttggttcaattttgttctgacaaattgtgaatttttttttagtgataacagaaaatatagtgctgatttgtttttttctgcacataatgtaacttctgcaacttctgttccactatttaagattcgacaactgaagggatgtgcccacgattattgtttgatgtcaaaaaaaaaaaaaaaa

SEQ ID NO: 59039 - protein, 246 aa, Glycine max
  peptide (1)..(246): Ceres Seq. ID no. 15227119
  misc_feature (28)..(217): Pfam Name: B-cell receptor-associated protein 31-like Pfam Description: B-cell receptor-associated protein 31-like
  misc_feature (25)..(155): Homolog of NCBI NO: 21618114 NR Description: unknown [Arabidopsis thaliana]
  misc_feature (24)..(155): Homolog of NCBI NO: 18402620 NR Description: expressed protein [Arabidopsis thaliana]
  misc_feature (25)..(230): Homolog of NCBI NO: 15231412 NR Description: expressed protein [Arabidopsis thaliana]
  misc_feature (25)..(230): Homolog of NCBI NO: 15239667 NR Description: hypothetical protein [Arabidopsis thaliana]
  misc_feature (25)..(230): Homolog of NCBI NO: 34897474 NR Description: unknown protein [Oryza sativa (japonica
  misc_feature (25)..(173): Homolog of NCBI NO: 30682503 NR Description: expressed protein [Arabidopsis thaliana]
  misc_feature (25)..(245): Homolog of NCBI NO: 22655198 NR Description: unknown protein [Arabidopsis thaliana]
  misc_feature (25)..(246): Homolog of NCBI NO: 21553655 NR Description: unknown [Arabidopsis thaliana]
  misc_feature (25)..(244): Homolog of NCBI NO: 9759015 NR Description: gene_id:K16E1.4~unknown protein [Arabidopsis
  misc_feature (25)..(246): Homolog of NCBI NO: 18422225 NR Description: expressed protein [Arabidopsis thaliana]
NWAHRIVNFSDPIVNLWGSELRRKMIQLLFTVIFSEASMIALLLFKTPLRKLVIMGLDRLKRGRGPLMVKTVAGTVLVVLLSSVYSMLKIQKRGIQEGAVVNPTDQVLMAKHLLEATLMVAVLFLALMIDRLHHYIRELRIRRKGMEAVKKQTRGTEDGKVANSEEIKSVEEERARLRAELSRLESELQSKTKDVDGAEANIAALRKQSEGFLLEYDRLLEENQNLRNQLQSLDRKLSHSGSKKNM

SEQ ID NO: 59040 - protein, 222 aa, Glycine max
  peptide (1)..(222): Ceres Seq. ID no. 15227120
  misc_feature (4)..(193): Pfam Name: B-cell receptor-associated protein 31-like Pfam Description: B-cell receptor-associated protein 31-like
  misc_feature (1)..(131): Homolog of NCBI NO: 21618114 NR Description: unknown [Arabidopsis thaliana]
  misc_feature (1)..(131): Homolog of NCBI NO: 18402620 NR Description: expressed protein [Arabidopsis thaliana]
  misc_feature (1)..(206): Homolog of NCBI NO: 15231412 NR Description: expressed protein [Arabidopsis thaliana]
  misc_feature (1)..(206): Homolog of NCBI NO: 15239667 NR Description: hypothetical protein [Arabidopsis thaliana]
  misc_feature (1)..(206): Homolog of NCBI NO: 34897474 NR Description: unknown protein [Oryza sativa (japonica
  misc_feature (1)..(149): Homolog of NCBI NO: 30682503 NR Description: expressed protein [Arabidopsis thaliana]
  misc_feature (1)..(221): Homolog of NCBI NO: 22655198 NR Description: unknown protein [Arabidopsis thaliana]
  misc_feature (1)..(222): Homolog of NCBI NO: 21553655 NR Description: unknown [Arabidopsis thaliana]
  misc_feature (1)..(220): Homolog of NCBI NO: 9759015 NR Description: gene_id:K16E1.4~unknown protein [Arabidopsis
  misc_feature (1)..(222): Homolog of NCBI NO: 18422225 NR Description: expressed protein [Arabidopsis thaliana]
MIQLLFTVIFSEASMIALLLFKTPLRKLVIMGLDRLKRGRGPLMVKTVAGTVLVVLLSSVYSMLKIQKRGIQEGAVVNPTDQVLMAKHLLEATLMVAVLFLALMIDRLHHYIRELRIRRKGMEAVKKQTRGTEDGKVANSEEIKSVEEERARLRAELSRLESELQSKTKDVDGAEANIAALRKQSEGFLLEYDRLLEENQNLRNQLQSLDRKLSHSGSKKNM

SEQ ID NO: 59041 - protein, 208 aa, Glycine max
  peptide (1)..(208): Ceres Seq. ID no. 15227121
  misc_feature (1)..(179): Pfam Name: B-cell receptor-associated protein 31-like Pfam Description: B-cell receptor-associated protein 31-like
  misc_feature (1)..(117): Homolog of NCBI NO: 21618114 NR Description: unknown [Arabidopsis thaliana]
  misc_feature (1)..(117): Homolog of NCBI NO: 18402620 NR Description: expressed protein [Arabidopsis thaliana]
  misc_feature (1)..(192): Homolog of NCBI NO: 15231412 NR Description: expressed protein [Arabidopsis thaliana]
  misc_feature (1)..(192): Homolog of NCBI NO: 15239667 NR Description: hypothetical protein [Arabidopsis thaliana]
  misc_feature (1)..(192): Homolog of NCBI NO: 34897474 NR Description: unknown protein [Oryza sativa (japonica
  misc_feature (1)..(135): Homolog of NCBI NO: 30682503 NR Description: expressed protein [Arabidopsis thaliana]
  misc_feature (1)..(207): Homolog of NCBI NO: 22655198 NR Description: unknown protein [Arabidopsis thaliana]
  misc_feature (1)..(208): Homolog of NCBI NO: 21553655 NR Description: unknown [Arabidopsis thaliana]
  misc_feature (1)..(206): Homolog of NCBI NO: 9759015 NR Description: gene_id:K16E1.4~unknown protein [Arabidopsis
  misc_feature (1)..(208): Homolog of NCBI NO: 18422225 NR Description: expressed protein [Arabidopsis thaliana]
MIALLLFKTPLRKLVIMGLDRLKRGRGPLMVKTVAGTVLVVLLSSVYSMLKIQKRGIQEGAVVNPTDQVLMAKHLLEATLMVAVLFLALMIDRLHHYIRELRIRRKGMEAVKKQTRGTEDGKVANSEEIKSVEEERARLRAELSRLESELQSKTKDVDGAEANIAALRKQSEGFLLEYDRLLEENQNLRNQLQSLDRKLSHSGSKKNM

SEQ ID NO: 59042 - protein, 192 aa, Glycine max
  peptide (1)..(192): Ceres Seq. ID no. 15227122
  misc_feature (1)..(163): Pfam Name: B-cell receptor-associated protein 31-like Pfam Description: B-cell receptor-associated protein 31-like
  misc_feature (1)..(101): Homolog of NCBI NO: 21618114 NR Description: unknown [Arabidopsis thaliana]
  misc_feature (1)..(101): Homolog of NCBI NO: 18402620 NR Description: expressed protein [Arabidopsis thaliana]
  misc_feature (1)..(176): Homolog of NCBI NO: 15231412 NR Description: expressed protein [Arabidopsis thaliana]
  misc_feature (1)..(176): Homolog of NCBI NO: 15239667 NR Description: hypothetical protein [Arabidopsis thaliana]
  misc_feature (1)..(176): Homolog of NCBI NO: 34897474 NR Description: unknown protein [Oryza sativa (japonica
  misc_feature (1)..(119): Homolog of NCBI NO: 30682503 NR Description: expressed protein [Arabidopsis thaliana]
  misc_feature (1)..(191): Homolog of NCBI NO: 22655198 NR Description: unknown protein [Arabidopsis thaliana]
  misc_feature (1)..(192): Homolog of NCBI NO: 21553655 NR Description: unknown [Arabidopsis thaliana]
  misc_feature (1)..(190): Homolog of NCBI NO: 9759015 NR Description: gene_id:K16E1.4~unknown protein [Arabidopsis
  misc_feature (1)..(192): Homolog of NCBI NO: 18422225 NR Description: expressed protein [Arabidopsis thaliana]
MGLDRLKRGRGPLMVKTVAGTVLVVLLSSVYSMLKIQKRGIQEGAVVNPTDQVLMAKHLLEATLMVAVLFLALMIDRLHHYIRELRIRRKGMEAVKKQTRGTEDGKVANSEEIKSVEEERARLRAELSRLESELQSKTKDVDGAEANIAALRKQSEGFLLEYDRLLEENQNLRNQLQSLDRKLSHSGSKKNM

SEQ ID NO: 59043 - DNA, 1325 bp, Glycine max
  misc_feature (1)..(1325): Ceres Seq. ID no. 13594168
atttttcactacttcacttgactagtccaattatctgatgccatatcaaaaccatgtctgacccttctaccctcttaccctcctcccaccaccaccacaaccaccatgtgccactcatccaaggcggcgccaccgcaccctcctcctcctccaccaccctagcccgagaataccgcaagggcaactggaccatccaagagaccctcattctcaccactgcaaaaaagctcgacgacgagcgcaggctcaaaacccctgctgcatgtagcacctccaccaccaccaccagaaccagcggcgagctccggtggaaatgggtggagaactattgctggagccatggctgcttgcgaagccagaaccaatgcaacgacaaatgggacaacctcctccgcgattacaaaaaggttcgcgactacgagtccaaatcaaacgacaacgacaacaacaacaacaaacacttcccttcttattggaccctcaacaaacaacaacgtaaggaacagaacctcccctccaacatggtcttcgaagtctaccaaaccatcgccgatgtcctccaacgaaaacaaacacaatcccaaagacaacatcaacaacctctggctattccattagttacttcctcaccctcaccacttcaaacacttccaccacctcctctaccaccaccgccgcctccgccacctcctcctccgccagttagctccaccactccggtaggctcagagagatcggaatcatcaggaactgagcacagtgaggatgatgatgatgggtcggaatcaaaacgtaggaaagttaagaaccttggttcaagaataatgcaaagtgcatcggtgttggcacgagctcttaggagttgtgaggagaagaaggagaaacggcaccgtgaaatgattgagctggagcaaaggaggattcagatggaggaagctcggaatgaggttcaccggcaaggcatcgcgacccttgtcgccgccgtcaccaacctttccggtgccattgagtcactcattaataattctgaacgccatggccaaagataattaattaatatggcaccatataataataataatatatgcttcctcgcctagctagcagtttattattattatgtgattgatcagaaaatcatataatatctatcggccattctttccctcttcaaattcaattgttgtctaatatttttgagtcggttttaccaccaattgatttctcatgattatatgtcagcagctgatatgtgatcgatccatatggtatatgtttcattattctttggtggagatcaaaccaagccctaacattgattgttt

SEQ ID NO: 59044 - protein, 331 aa, Glycine max
  peptide (1)..(331): Ceres Seq. ID no. 13594169
  misc_feature (182)..(232): Pfam Name: Formin Homology 2 Domain Pfam Description: Formin Homology 2 Domain
  misc_feature (190)..(222): Homolog of NCBI NO: 11068076 NR Description: PxORF73 peptide [Plutella xylostella
  misc_feature (193)..(215): Homolog of NCBI NO: 11068076 NR Description: PxORF73 peptide [Plutella xylostella
  misc_feature (193)..(222): Homolog of NCBI NO: 11068076 NR Description: PxORF73 peptide [Plutella xylostella
  misc_feature (26)..(240): Homolog of NCBI NO: 40538915 NR Description: hypothetical protein [Oryza sativa (japonica
  misc_feature (29)..(249): Homolog of NCBI NO: 15227458 NR Description: proline-rich protein family [Arabidopsis
  misc_feature (181)..(249): Homolog of NCBI NO: 6692131 NR Description: T19E23.10 [Arabidopsis thaliana]
  misc_feature (220)..(328): Homolog of NCBI NO: 6692131 NR Description: T19E23.10 [Arabidopsis thaliana]
  misc_feature (28)..(176): Homolog of NCBI NO: 6692131 NR Description: T19E23.10 [Arabidopsis thaliana]
  misc_feature (28)..(176): Homolog of NCBI NO: 15221676 NR Description: proline-rich protein family [Arabidopsis thaliana]
  misc_feature (157)..(328): Homolog of NCBI NO: 15221676 NR Description: proline-rich protein family [Arabidopsis thaliana]
MSDPSTLLPSSHHHHNHHVPLIQGGATAPSSSSTTLAREYRKGNWTIQETLILTTAKKLDDERRLKTPAACSTSTTTTRTSGELRWKWVENYCWSHGCLRSQNQCNDKWDNLLRDYKKVRDYESKSNDNDNNNNKHFPSYWTLNKQQRKEQNLPSNMVFEVYQTIADVLQRKQTQSQRQHQQPLAIPLVTSSPSPLQTLPPPPLPPPPPPPPPPPPVSSTTPVGSERSESSGTEHSEDDDDGSESKRRKVKNLGSRIMQSASVLARALRSCEEKKEKRHREMIELEQRRIQMEEARNEVHRQGIATLVAAVTNLSGAIESLINNSERHGQR

SEQ ID NO: 59045 - protein, 175 aa, Glycine max
  peptide (1)..(175): Ceres Seq. ID no. 13594170
  misc_feature (26)..(76): Pfam Name: Formin Homology 2 Domain Pfam Description: Formin Homology 2 Domain
  misc_feature (34)..(66): Homolog of NCBI NO: 11068076 NR Description: PxORF73 peptide [Plutella xylostella
  misc_feature (37)..(59): Homolog of NCBI NO: 11068076 NR Description: PxORF73 peptide [Plutella xylostella
  misc_feature (37)..(66): Homolog of NCBI NO: 11068076 NR Description: PxORF73 peptide [Plutella xylostella
  misc_feature (1)..(84): Homolog of NCBI NO: 40538915 NR Description: hypothetical protein [Oryza sativa (japonica
  misc_feature (1)..(93): Homolog of NCBI NO: 15227458 NR Description: proline-rich protein family [Arabidopsis
  misc_feature (25)..(93): Homolog of NCBI NO: 6692131 NR Description: T19E23.10 [Arabidopsis thaliana]
  misc_feature (64)..(172): Homolog of NCBI NO: 6692131 NR Description: T19E23.10 [Arabidopsis thaliana]
  misc_feature (1)..(20): Homolog of NCBI NO: 6692131 NR Description: T19E23.10 [Arabidopsis thaliana]
  misc_feature (1)..(20): Homolog of NCBI NO: 15221676 NR Description: proline-rich protein family [Arabidopsis thaliana]
  misc_feature (1)..(172): Homolog of NCBI NO: 15221676 NR Description: proline-rich protein family [Arabidopsis thaliana]
MVFEVYQTIADVLQRKQTQSQRQHQQPLAIPLVTSSPSPLQTLPPPPLPPPPPPPPPPPPVSSTTPVGSERSESSGTEHSEDDDDGSESKRRKVKNLGSRIMQSASVLARALRSCEEKKEKRHREMIELEQRRIQMEEARNEVHRQGIATLVAAVTNLSGAIESLINNSERHGQR

SEQ ID NO: 59046 - DNA, 1278 bp, Glycine max
  misc_feature (1)..(1278): Ceres Seq. ID no. 15175857
gtactcaaaccctaatccccaataaaaacacactcaaaaacccttttttttttcttattcatcctctagttcttctttgacattcacaatgccttcaattccagaagagccattgttggcaccgaacccggaccggttctgcatgttcccaatccaatatcctcaaatctgggaaatgtacaagaaagccgaagcctcgttctggacggcggaggaggtggacctctcgcaggacctccgccactgggactccctgaccgacggcgagcgccacttcgtcagtcacgtcctcgccttcttcgccgcctccgacggcatcgtacttgagaacctcgctgggcgcttcacgaaggaaatccaaatccccgaggcccgcgccttctacggcttccagatcgccatcgagaacattcactccgagatgtacagcctcctcctcgaaacctacatcaaggactcctcccagaagagccacctcttccgcgccatcgacaccatcccgtgcgttaccaagaaagcccagtgggccctacgctggatcgattcttccgactccttcgccgagcgtctcgttgccttcgcatgtgtggaaggtatcttcttctccggaagcttctgcgctgtcttctggctcaaaaaacgtggactcatgcccgggctcactttctcaaatgaactaatatcacgcgatgaaggtcttcattgtgatttcgcgtgtcttttatactctctgctgagacagaagctcaccgaggagcgcgtaagggagattgtgaaggacgcggtggacattgaacgggagtttgtgtgcgacgcgcttccctgcgcgttggtggggatgaacggtgatttgatgagccagtacattgaatttgttgcggatcggttgctgggtgcgctagggtgcgggaaggtgtacaatgttcagaatccgttcgattggatggagctgatttctctgcaggggaagaccaacttcttcgagaagcgcgtcggggaatatcagaaggcttctgttatgtccagcttgaacgggaacggtggtgggaaccacgtgttcaagatggatgaggatttctaatttattattatgggaatgagaattaggtttaggggcgaatgctgataatgatagtatttctgtattgttaaatatatttacgtttttttttcttttttacttttttagcatactatttattttttttgtaatggttattgttcatttgttgtttttgatctctctccttcagcaatgggatgctaaattatactttc

SEQ ID NO: 59047 - protein, 330 aa, Glycine max
  peptide (1)..(330): Ceres Seq. ID no. 15175858
  misc_feature (7)..(287): Pfam Name: Ribonucleotide reductase, small chain Pfam Description: Ribonucleotide reductase, small chain
  misc_feature (6)..(330): Homolog of NCBI NO: 34898038 NR Description: putative ribonucleoside-diphosphate reductase
  misc_feature (1)..(330): Homolog of NCBI NO: 15232077 NR Description: ribonucleotide reductase small subunit -related
  misc_feature (1)..(330): Homolog of NCBI NO: 1710401 NR Description: RIBONUCLEOSIDE-DIPHOSPHATE REDUCTASE SMALL CHAIN
MPSIPEEPLLAPNPDRFCMFPIQYPQIWEMYKKAEASFWTAEEVDLSQDLRHWDSLTDGERHFVSHVLAFFAASDGIVLENLAGRFTKEIQIPEARAFYGFQIAIENIHSEMYSLLLETYIKDSSQKSHLFRAIDTIPCVTKKAQWALRWIDSSDSFAERLVAFACVEGIFFSGSFCAVFWLKKRGLMPGLTFSNELISRDEGLHCDFACLLYSLLRQKLTEERVREIVKDAVDIEREFVCDALPCALVGMNGDLMSQYIEFVADRLLGALGCGKVYNVQNPFDWMELISLQGKTNFFEKRVGEYQKASVMSSLNGNGGGNHVFKMDEDF

SEQ ID NO: 59048 - protein, 312 aa, Glycine max
  peptide (1)..(312): Ceres Seq. ID no. 15175859
  misc_feature (1)..(269): Pfam Name: Ribonucleotide reductase, small chain Pfam Description: Ribonucleotide reductase, small chain
  misc_feature (1)..(312): Homolog of NCBI NO: 34898038 NR Description: putative ribonucleoside-diphosphate reductase
  misc_feature (1)..(312): Homolog of NCBI NO: 15232077 NR Description: ribonucleotide reductase small subunit -related
  misc_feature (1)..(312): Homolog of NCBI NO: 1710401 NR Description: RIBONUCLEOSIDE-DIPHOSPHATE REDUCTASE SMALL CHAIN
MFPIQYPQIWEMYKKAEASFWTAEEVDLSQDLRHWDSLTDGERHFVSHVLAFFAASDGIVLENLAGRFTKEIQIPEARAFYGFQIAIENIHSEMYSLLLETYIKDSSQKSHLFRAIDTIPCVTKKAQWALRWIDSSDSFAERLVAFACVEGIFFSGSFCAVFWLKKRGLMPGLTFSNELISRDEGLHCDFACLLYSLLRQKLTEERVREIVKDAVDIEREFVCDALPCALVGMNGDLMSQYIEFVADRLLGALGCGKVYNVQNPFDWMELISLQGKTNFFEKRVGEYQKASVMSSLNGNGGGNHVFKMDEDF

SEQ ID NO: 59049 - protein, 301 aa, Glycine max
  peptide (1)..(301): Ceres Seq. ID no. 15175860
  misc_feature (1)..(258): Pfam Name: Ribonucleotide reductase, small chain Pfam Description: Ribonucleotide reductase, small chain
  misc_feature (1)..(301): Homolog of NCBI NO: 34898038 NR Description: putative ribonucleoside-diphosphate reductase
  misc_feature (1)..(301): Homolog of NCBI NO: 15232077 NR Description: ribonucleotide reductase small subunit -related
  misc_feature (1)..(301): Homolog of NCBI NO: 1710401 NR Description: RIBONUCLEOSIDE-DIPHOSPHATE REDUCTASE SMALL CHAIN
MYKKAEASFWTAEEVDLSQDLRHWDSLTDGERHFVSHVLAFFAASDGIVLENLAGRFTKEIQIPEARAFYGFQIAIENIHSEMYSLLLETYIKDSSQKSHLFRAIDTIPCVTKKAQWALRWIDSSDSFAERLVAFACVEGIFFSGSFCAVFWLKKRGLMPGLTFSNELISRDEGLHCDFACLLYSLLRQKLTEERVREIVKDAVDIEREFVCDALPCALVGMNGDLMSQYIEFVADRLLGALGCGKVYNVQNPFDWMELISLQGKTNFFEKRVGEYQKASVMSSLNGNGGGNHVFKMDEDF

SEQ ID NO: 59050 - DNA, 1111 bp, Glycine max
  misc_feature (1)..(1111): Ceres Seq. ID no. 14311256
ataagaagataattggaagattgaagaaggagtgattgtaatctggaaggatgaggagtactattgttttacgattgggaagacgtgcgcgtattccattccaacgagcattagcaacgcagagtaacaataataacactctggtgtttatccctctccctcgctgcctcagcgcaacgcggtcgtttcactttcagcgcaattcaccgtttggattctccagcgggcatgggcaacgcaggagcatgttcatccaaacgcagcccacgccaaatccctcgtctctcatgttttatcccggcaagcccgtcatggaagttggaagctccgacttcccaaaccctcgttctgcaatgaactctcccctcgccaaatcgctcttcgcaatcgacggcgttactcgcgttttctttggatctgatttcgttaccgttacgaaatcggaagaggctgcgtgggaattcctcaagcctgaagtcttcgccgccattatggatttctactcctccgctcagcctctctttttagattctcaagccgccgcggccatggatacagctattcaccaagatgattctgaaacagttgcaatgatcaaggaattgttagagactcgaattcgacctgcagtgcaagatgatggcggggacattgaatatagaggttttgacctagatactggaatagtaaaacttagaatgcaaggggcatgcagtggctgcccaagttcatcagtgactctgaaatcaggcattgaaaatatgctgatgcattatgttcctgaggtcaaaggtgtggaacaagaattggatgctgaggatgatggagcagcattaagtggagaaattaaatagttgaacttttttttgttttttctcaaaattgctacttgcatttagtctcttcatgcatgcattttcgcactcaacagagacttagaagtacaacagcagtacatgatggaaacaaaaaaaggtgtgagtctacacaaaaaatatattgaataagtcgtgagttggatacattatagtatggcatgaaatcatcgttccatgctagttggatcttcctgacatagatgaaagtaatttatgacacgatgccattacat

SEQ ID NO: 59051 - protein, 267 aa, Glycine max
  peptide (1)..(267): Ceres Seq. ID no. 14311257
  misc_feature (182)..(252): Pfam Name: NifU-like domain Pfam Description: NifU-like domain
  misc_feature (64)..(257): Homolog of NCBI NO: 12834577 NR Description: unnamed protein product [Mus musculus]
  misc_feature (66)..(257): Homolog of NCBI NO: 26324295 NR Description: unnamed protein product [Mus musculus]
  misc_feature (64)..(256): Homolog of NCBI NO: 37681825 NR Description: HIRA interacting protein 5 [Danio rerio]
  misc_feature (63)..(257): Homolog of NCBI NO: 24643765 NR Description: CG32857-PA [Drosophila melanogaster]
  misc_feature (63)..(257): Homolog of NCBI NO: 6554171 NR Description: TO42 [Drosophila melanogaster]
  misc_feature (63)..(257): Homolog of NCBI NO: 31203061 NR Description: ENSANGP00000019230 [Anopheles gambiae]
  misc_feature (100)..(267): Homolog of NCBI NO: 15223842 NR Description: expressed protein [Arabidopsis thaliana]
  misc_feature (40)..(267): Homolog of NCBI NO: 25405462 NR Description: unknown protein, 90320-88994 [imported] -
  misc_feature (61)..(267): Homolog of NCBI NO: 18402817 NR Description: expressed protein [Arabidopsis thaliana]
  misc_feature (61)..(267): Homolog of NCBI NO: 34897632 NR Description: hypothetical protein [Oryza sativa]
MRSTIVLRLGRRARIPFQRALATQSNNNNTLVFIPLPRCLSATRSFHFQRNSPFGFSSGHGQRRSMFIQTQPTPNPSSLMFYPGKPVMEVGSSDFPNPRSAMNSPLAKSLFAIDGVTRVFFGSDFVTVTKSEEAAWEFLKPEVFAAIMDFYSSAQPLFLDSQAAAAMDTAIHQDDSETVAMIKELLETRIRPAVQDDGGDIEYRGFDLDTGIVKLRMQGACSGCPSSSVTLKSGIENMLMHYVPEVKGVEQELDAEDDGAALSGEIK

SEQ ID NO: 59052 - protein, 202 aa, Glycine max
  peptide (1)..(202): Ceres Seq. ID no. 14311258
  misc_feature (117)..(187): Pfam Name: NifU-like domain Pfam Description: NifU-like domain
  misc_feature (1)..(192): Homolog of NCBI NO: 12834577 NR Description: unnamed protein product [Mus musculus]
  misc_feature (1)..(192): Homolog of NCBI NO: 26324295 NR Description: unnamed protein product [Mus musculus]
  misc_feature (1)..(191): Homolog of NCBI NO: 37681825 NR Description: HIRA interacting protein 5 [Danio rerio]
  misc_feature (1)..(192): Homolog of NCBI NO: 24643765 NR Description: CG32857-PA [Drosophila melanogaster]
  misc_feature (1)..(192): Homolog of NCBI NO: 6554171 NR Description: TO42 [Drosophila melanogaster]
  misc_feature (1)..(192): Homolog of NCBI NO: 31203061 NR Description: ENSANGP00000019230 [Anopheles gambiae]
  misc_feature (35)..(202): Homolog of NCBI NO: 15223842 NR Description: expressed protein [Arabidopsis thaliana]
  misc_feature (1)..(202): Homolog of NCBI NO: 25405462 NR Description: unknown protein, 90320-88994 [imported] -
  misc_feature (1)..(202): Homolog of NCBI NO: 18402817 NR Description: expressed protein [Arabidopsis thaliana]
  misc_feature (1)..(202): Homolog of NCBI NO: 34897632 NR Description: hypothetical protein [Oryza sativa]
MFIQTQPTPNPSSLMFYPGKPVMEVGSSDFPNPRSAMNSPLAKSLFAIDGVTRVFFGSDFVTVTKSEEAAWEFLKPEVFAAIMDFYSSAQPLFLDSQAAAAMDTAIHQDDSETVAMIKELLETRIRPAVQDDGGDIEYRGFDLDTGIVKLRMQGACSGCPSSSVTLKSGIENMLMHYVPEVKGVEQELDAEDDGAALSGEIK

SEQ ID NO: 59053 - protein, 188 aa, Glycine max
  peptide (1)..(188): Ceres Seq. ID no. 14311259
  misc_feature (103)..(173): Pfam Name: NifU-like domain Pfam Description: NifU-like domain
  misc_feature (1)..(178): Homolog of NCBI NO: 12834577 NR Description: unnamed protein product [Mus musculus]
  misc_feature (1)..(178): Homolog of NCBI NO: 26324295 NR Description: unnamed protein product [Mus musculus]
  misc_feature (1)..(177): Homolog of NCBI NO: 37681825 NR Description: HIRA interacting protein 5 [Danio rerio]
  misc_feature (1)..(178): Homolog of NCBI NO: 24643765 NR Description: CG32857-PA [Drosophila melanogaster]
  misc_feature (1)..(178): Homolog of NCBI NO: 6554171 NR Description: TO42 [Drosophila melanogaster]
  misc_feature (1)..(178): Homolog of NCBI NO: 31203061 NR Description: ENSANGP00000019230 [Anopheles gambiae]
  misc_feature (21)..(188): Homolog of NCBI NO: 15223842 NR Description: expressed protein [Arabidopsis thaliana]
  misc_feature (1)..(188): Homolog of NCBI NO: 25405462 NR Description: unknown protein, 90320-88994 [imported] -
  misc_feature (1)..(188): Homolog of NCBI NO: 18402817 NR Description: expressed protein [Arabidopsis thaliana]
  misc_feature (1)..(188): Homolog of NCBI NO: 34897632 NR Description: hypothetical protein [Oryza sativa]
MFYPGKPVMEVGSSDFPNPRSAMNSPLAKSLFAIDGVTRVFFGSDFVTVTKSEEAAWEFLKPEVFAAIMDFYSSAQPLFLDSQAAAAMDTAIHQDDSETVAMIKELLETRIRPAVQDDGGDIEYRGFDLDTGIVKLRMQGACSGCPSSSVTLKSGIENMLMHYVPEVKGVEQELDAEDDGAALSGEIK

SEQ ID NO: 59054 - DNA, 1263 bp, Glycine max
  misc_feature (1)..(1263): Ceres Seq. ID no. 14311832
actggattgcaccgtctcttttctttcccctttgttaggaacaacaccacgccacctttgtttacgaactcgtcgacttgatgactcatcacaacgccaccaccaccgcctaacgacctagagcaccttctctctcctctaattggccattgcttaagttgacttgctgcgaaggttgctttgatcatttgaagcgcctgaaaatcgttgtgcgaattttgagggttctgttcttgtaatccgaaaatggccgcgattcggaggcgggtgtggcagttatcttcaatcgcaggtttcggggcttcgagatcggaagtgtcgtcgtcattgtcgtcgtcccaaagagcaattttcgatccattttctgtttcggggaccagacacttttcccaagtggtgaaatccaaccgcaagcacttgttcctcgttgacaccttggcccttgttaggagactggaaggggaaggagtgccctcgaagcaagccgaggcgataaccgctgccataactgaggttttgaatgacagtctcgaaaatgtgtctcagtcgttggtatcaaaggcgcagatgcagaaaattgaaatgatgcaagaatccaacctgtctaagtttaaagcggaggtgcagagctcacagggacaccatttttctctcttacaacacgagactgagaagcttaggaatgatatagagaagatgcgtaatgagttgaggtatgagatagacaaagtcactgctgggcagcgattagatttgaaccttgaaagggggagaataagggaggaattgtctaatcagaatgctgaaactaacaacctgacaaacaaacttgatagagagatccattctttaagagcacaactggaagcagccaaatatgatgtcataaaatattgcataggaacacttgtttcgatttctgctgttggtcttgctgttttacgcatattgatgtaaatggattgtattccgattaacatccacaaagatgaggtgaaaaagaatcaagggtagctccgtagctgcattgaagatttatcttctgtcagagaaacaattgcattacaatactagtacaacttttttttttggtccatactagtggagctgaaaggaacgagctccaatcaggcacgaattgggcctgttttttaagccccattctatattcttttgttaatttatttgacatgccctttgggatatttgtgcaatttatgcgtggctgtatggtatgagtacaatacaagcaccttggattat

SEQ ID NO: 59055 - protein, 236 aa, Glycine max
  peptide (1)..(236): Ceres Seq. ID no. 14311833
  misc_feature (6)..(198): Homolog of NCBI NO: 20149663 NR Description: hypothetical protein MDS025 [Homo sapiens]
  misc_feature (6)..(198): Homolog of NCBI NO: 10197624 NR Description: MDS025 [Homo sapiens]
  misc_feature (102)..(236): Homolog of NCBI NO: 32422519 NR Description: predicted protein [Neurospora crassa]
  misc_feature (36)..(236): Homolog of NCBI NO: 19115424 NR Description: hypothetical conserved protein
  misc_feature (45)..(236): Homolog of NCBI NO: 40743676 NR Description: hypothetical protein AN5773.2 [Aspergillus
  misc_feature (79)..(235): Homolog of NCBI NO: 14318473 NR Description: Hypothetical ORF; Yfl046wp [Saccharomyces
  misc_feature (45)..(130): Homolog of NCBI NO: 25411710 NR Description: hypothetical protein At2g16460 [imported] -
  misc_feature (11)..(236): Homolog of NCBI NO: 11357624 NR Description: hypothetical protein F24M12.130 - Arabidopsis
  misc_feature (11)..(236): Homolog of NCBI NO: 18409266 NR Description: expressed protein [Arabidopsis thaliana]
  misc_feature (45)..(236): Homolog of NCBI NO: 18398123 NR Description: expressed protein [Arabidopsis thaliana]
MAAIRRRVWQLSSIAGFGASRSEVSSSLSSSQRAIFDPFSVSGTRHFSQVVKSNRKHLFLVDTLALVRRLEGEGVPSKQAEAITAAITEVLNDSLENVSQSLVSKAQMQKIEMMQESNLSKFKAEVQSSQGHHFSLLQHETEKLRNDIEKMRNELRYEIDKVTAGQRLDLNLERGRIREELSNQNAETNNLTNKLDREIHSLRAQLEAAKYDVIKYCIGTLVSISAVGLAVLRILM

SEQ ID NO: 59056 - protein, 129 aa, Glycine max
  peptide (1)..(129): Ceres Seq. ID no. 14311834
  misc_feature (1)..(91): Homolog of NCBI NO: 20149663 NR Description: hypothetical protein MDS025 [Homo sapiens]
  misc_feature (1)..(91): Homolog of NCBI NO: 10197624 NR Description: MDS025 [Homo sapiens]
  misc_feature (1)..(129): Homolog of NCBI NO: 32422519 NR Description: predicted protein [Neurospora crassa]
  misc_feature (1)..(129): Homolog of NCBI NO: 19115424 NR Description: hypothetical conserved protein
  misc_feature (1)..(129): Homolog of NCBI NO: 40743676 NR Description: hypothetical protein AN5773.2 [Aspergillus
  misc_feature (1)..(128): Homolog of NCBI NO: 14318473 NR Description: Hypothetical ORF; Yfl046wp [Saccharomyces
  misc_feature (1)..(23): Homolog of NCBI NO: 25411710 NR Description: hypothetical protein At2g16460 [imported] -
  misc_feature (1)..(129): Homolog of NCBI NO: 11357624 NR Description: hypothetical protein F24M12.130 - Arabidopsis
  misc_feature (1)..(129): Homolog of NCBI NO: 18409266 NR Description: expressed protein [Arabidopsis thaliana]
  misc_feature (1)..(129): Homolog of NCBI NO: 18398123 NR Description: expressed protein [Arabidopsis thaliana]
MQKIEMMQESNLSKFKAEVQSSQGHHFSLLQHETEKLRNDIEKMRNELRYEIDKVTAGQRLDLNLERGRIREELSNQNAETNNLTNKLDREIHSLRAQLEAAKYDVIKYCIGTLVSISAVGLAVLRILM

SEQ ID NO: 59057 - protein, 124 aa, Glycine max
  peptide (1)..(124): Ceres Seq. ID no. 14311835
  misc_feature (1)..(86): Homolog of NCBI NO: 20149663 NR Description: hypothetical protein MDS025 [Homo sapiens]
  misc_feature (1)..(86): Homolog of NCBI NO: 10197624 NR Description: MDS025 [Homo sapiens]
  misc_feature (1)..(124): Homolog of NCBI NO: 32422519 NR Description: predicted protein [Neurospora crassa]
  misc_feature (1)..(124): Homolog of NCBI NO: 19115424 NR Description: hypothetical conserved protein
  misc_feature (1)..(124): Homolog of NCBI NO: 40743676 NR Description: hypothetical protein AN5773.2 [Aspergillus
  misc_feature (1)..(123): Homolog of NCBI NO: 14318473 NR Description: Hypothetical ORF; Yfl046wp [Saccharomyces
  misc_feature (1)..(18): Homolog of NCBI NO: 25411710 NR Description: hypothetical protein At2g16460 [imported] -
  misc_feature (1)..(124): Homolog of NCBI NO: 11357624 NR Description: hypothetical protein F24M12.130 - Arabidopsis
  misc_feature (1)..(124): Homolog of NCBI NO: 18409266 NR Description: expressed protein [Arabidopsis thaliana]
  misc_feature (1)..(124): Homolog of NCBI NO: 18398123 NR Description: expressed protein [Arabidopsis thaliana]
MMQESNLSKFKAEVQSSQGHHFSLLQHETEKLRNDIEKMRNELRYEIDKVTAGQRLDLNLERGRIREELSNQNAETNNLTNKLDREIHSLRAQLEAAKYDVIKYCIGTLVSISAVGLAVLRILM

SEQ ID NO: 59058 - DNA, 1576 bp, Glycine max
  misc_feature (1)..(1576): Ceres Seq. ID no. 14311804
aagataaattgggccgatttggacacacaccccgtcatcttcttcttgttctgtgccgcactctcgctcgcagttacagaaaccatgacgacggtggtgcccacctccgaagaagacgctgccctctctgttgtccgattcgcctctgaactcgcctgggccgatgccggtcccgaggttgctgagcctcaagttagtagactctgcatggaggctgaagagtttatcgttatgggaaaatggttggaactagcatcattgatgattacctctgctgaattggttttctcaaaggtttctgaaacagatatagagtccatcttcactatcatctgcaatcttgtgaccaagactgagaatccagatgaagtgatggagattgtaaaagttataactgcaaaaataattcagcagccaaacgaaaagcctgctgtgcgattgaagactttgatcaatctgtacaatcttttggagactccatactgccagttttatgtctacatgaaggcattgaatttagctgttaatgggaaagtcacagaatacattataccttcattcaaaaagatagatagcttcttgaaagagtggaaaattgggatacctgaacagagagagctctttctcactatctctaatattttgaaggaaaataaaagcatgtcaaaggatgcttttaagttcctgagcaattatctgtcgaccttttcgggagaagatgcacatgttttgagtgaagccaaggaggaggccgcacgtgcaattgaggaatttgtcagagctcctgacatatatcagtgtgatttgcttgacttgcctgctgttgggcaactggagaaggatgccaaatatgctctgttatatcagcttcttaagatttttcttacccagaggctagatgcatacttagaatatcaagctgcaaattccaccttgttgaaaaactatggccttgtgcctgaagaatgcatttccaaaatgaggctgatgtcattgatggatcttacctctgatggttctggccaaattccatatgaacttattagggacacacttcagatcaatgatgatgaagtggaactatgggtggttagagcaataactgccaagttaattgactgtaagatggaccaaatgcatcaatcagtagttgttagtcatcctactgatcgtgtgtttggtcagcaccaatggcaagcactgagaacaaagctagcgacatggagaggaaacattgcaaatgttatcagtaccattcaggccaacaaaataacggaggatgggtctcaggcagcccaaggtttggtagttaggtgagaggacgttttcaactgaagcaattctctgaagcatctagattttatcccggtgaagttttttttaatcttaaaacagagaaggaaaaaattttactccccaactttgtgacagaaccattttgttttaagcttttccattttgatgttatgtttgaccagcctcacgatagcgttgagtatattatacctgtggactgttgtcctagtagctcctaggaatcaatatacagctatttaacttttagtgttttctgaac

SEQ ID NO: 59059 - protein, 438 aa, Glycine max
  peptide (1)..(438): Ceres Seq. ID no. 14311805
  misc_feature (285)..(385): Pfam Name: PCI domain Pfam Description: PCI domain
  misc_feature (42)..(419): Homolog of NCBI NO: 23397429 NR Description: dendritic cell protein [Homo sapiens]
  misc_feature (42)..(419): Homolog of NCBI NO: 34856621 NR Description: similar to Ga17 protein [Rattus norvegicus]
  misc_feature (42)..(419): Homolog of NCBI NO: 21703762 NR Description: dendritic cell protein GA17 [Mus musculus]
  misc_feature (83)..(438): Homolog of NCBI NO: 32489165 NR Description: OSJNBa0094O15.2 [Oryza sativa (japonica
  misc_feature (29)..(380): Homolog of NCBI NO: 6041797 NR Description: unknown protein [Arabidopsis thaliana]
  misc_feature (29)..(391): Homolog of NCBI NO: 30678503 NR Description: expressed protein [Arabidopsis thaliana]
  misc_feature (29)..(438): Homolog of NCBI NO: 22330807 NR Description: expressed protein [Arabidopsis thaliana]
  misc_feature (379)..(438): Homolog of NCBI NO: 15242346 NR Description: expressed protein [Arabidopsis thaliana]
  misc_feature (29)..(385): Homolog of NCBI NO: 15242346 NR Description: expressed protein [Arabidopsis thaliana]
  misc_feature (29)..(438): Homolog of NCBI NO: 30685439 NR Description: expressed protein [Arabidopsis thaliana]
KINWADLDTHPVIFFLFCAALSLAVTETMTTVVPTSEEDAALSVVRFASELAWADAGPEVAEPQVSRLCMEAEEFIVMGKWLELASLMITSAELVFSKVSETDIESIFTIICNLVTKTENPDEVMEIVKVITAKIIQQPNEKPAVRLKTLINLYNLLETPYCQFYVYMKALNLAVNGKVTEYIIPSFKKIDSFLKEWKIGIPEQRELFLTISNILKENKSMSKDAFKFLSNYLSTFSGEDAHVLSEAKEEAARAIEEFVRAPDIYQCDLLDLPAVGQLEKDAKYALLYQLLKIFLTQRLDAYLEYQAANSTLLKNYGLVPEECISKMRLMSLMDLTSDGSGQIPYELIRDTLQINDDEVELWVVRAITAKLIDCKMDQMHQSVVVSHPTDRVFGQHQWQALRTKLATWRGNIANVISTIQANKITEDGSQAAQGLVVR

SEQ ID NO: 59060 - protein, 410 aa, Glycine max
  peptide (1)..(410): Ceres Seq. ID no. 14311806
  misc_feature (257)..(357): Pfam Name: PCI domain Pfam Description: PCI domain
  misc_feature (14)..(391): Homolog of NCBI NO: 23397429 NR Description: dendritic cell protein [Homo sapiens]
  misc_feature (14)..(391): Homolog of NCBI NO: 34856621 NR Description: similar to Ga17 protein [Rattus norvegicus]
  misc_feature (14)..(391): Homolog of NCBI NO: 21703762 NR Description: dendritic cell protein GA17 [Mus musculus]
  misc_feature (55)..(410): Homolog of NCBI NO: 32489165 NR Description: OSJNBa0094O15.2 [Oryza sativa (japonica
  misc_feature (1)..(352): Homolog of NCBI NO: 6041797 NR Description: unknown protein [Arabidopsis thaliana]
  misc_feature (1)..(363): Homolog of NCBI NO: 30678503 NR Description: expressed protein [Arabidopsis thaliana]
  misc_feature (1)..(410): Homolog of NCBI NO: 22330807 NR Description: expressed protein [Arabidopsis thaliana]
  misc_feature (351)..(410): Homolog of NCBI NO: 15242346 NR Description: expressed protein [Arabidopsis thaliana]
  misc_feature (1)..(357): Homolog of NCBI NO: 15242346 NR Description: expressed protein [Arabidopsis thaliana]
  misc_feature (1)..(410): Homolog of NCBI NO: 30685439 NR Description: expressed protein [Arabidopsis thaliana]
MTTVVPTSEEDAALSVVRFASELAWADAGPEVAEPQVSRLCMEAEEFIVMGKWLELASLMITSAELVFSKVSETDIESIFTIICNLVTKTENPDEVMEIVKVITAKIIQQPNEKPAVRLKTLINLYNLLETPYCQFYVYMKALNLAVNGKVTEYIIPSFKKIDSFLKEWKIGIPEQRELFLTISNILKENKSMSKDAFKFLSNYLSTFSGEDAHVLSEAKEEAARAIEEFVRAPDIYQCDLLDLPAVGQLEKDAKYALLYQLLKIFLTQRLDAYLEYQAANSTLLKNYGLVPEECISKMRLMSLMDLTSDGSGQIPYELIRDTLQINDDEVELWVVRAITAKLIDCKMDQMHQSVVVSHPTDRVFGQHQWQALRTKLATWRGNIANVISTIQANKITEDGSQAAQGLVVR

SEQ ID NO: 59061 - protein, 369 aa, Glycine max
  peptide (1)..(369): Ceres Seq. ID no. 14311807
  misc_feature (216)..(316): Pfam Name: PCI domain Pfam Description: PCI domain
  misc_feature (1)..(350): Homolog of NCBI NO: 23397429 NR Description: dendritic cell protein [Homo sapiens]
  misc_feature (1)..(350): Homolog of NCBI NO: 34856621 NR Description: similar to Ga17 protein [Rattus norvegicus]
  misc_feature (1)..(350): Homolog of NCBI NO: 21703762 NR Description: dendritic cell protein GA17 [Mus musculus]
  misc_feature (14)..(369): Homolog of NCBI NO: 32489165 NR Description: OSJNBa0094O15.2 [Oryza sativa (japonica
  misc_feature (1)..(311): Homolog of NCBI NO: 6041797 NR Description: unknown protein [Arabidopsis thaliana]
  misc_feature (1)..(322): Homolog of NCBI NO: 30678503 NR Description: expressed protein [Arabidopsis thaliana]
  misc_feature (1)..(369): Homolog of NCBI NO: 22330807 NR Description: expressed protein [Arabidopsis thaliana]
  misc_feature (310)..(369): Homolog of NCBI NO: 15242346 NR Description: expressed protein [Arabidopsis thaliana]
  misc_feature (1)..(316): Homolog of NCBI NO: 15242346 NR Description: expressed protein [Arabidopsis thaliana]
  misc_feature (1)..(369): Homolog of NCBI NO: 30685439 NR Description: expressed protein [Arabidopsis thaliana]
MEAEEFIVMGKWLELASLMITSAELVFSKVSETDIESIFTIICNLVTKTENPDEVMEIVKVITAKIIQQPNEKPAVRLKTLINLYNLLETPYCQFYVYMKALNLAVNGKVTEYIIPSFKKIDSFLKEWKIGIPEQRELFLTISNILKENKSMSKDAFKFLSNYLSTFSGEDAHVLSEAKEEAARAIEEFVRAPDIYQCDLLDLPAVGQLEKDAKYALLYQLLKIFLTQRLDAYLEYQAANSTLLKNYGLVPEECISKMRLMSLMDLTSDGSGQIPYELIRDTLQINDDEVELWVVRAITAKLIDCKMDQMHQSVVVSHPTDRVFGQHQWQALRTKLATWRGNIANVISTIQANKITEDGSQAAQGLVVR

SEQ ID NO: 59062 - DNA, 1187 bp, Glycine max
  misc_feature (1)..(1187): Ceres Seq. ID no. 14308225
aagccagagaaagagaaggaaccaacaacaaagagcagagagaaagagaggaccattccaaccctaatttctctgctaaaccctagttgtttggcatttcctctcttctccctcgtaaatcttctcccattccctccggtagctttccagatccaaataaatcatggttttctgggtttttggctacggttcactggtgtggaaccctggattcgattacgacgagaagattattggtttcatcaaggactacagacgcgtgtttgatttagcgtgcattgatcaccggggaacgcctgaaaacccagcgagaacttgcacattggaggagaaagaaggggctatttgctggggagctgcttattgtgttcgaggaggccctgaaaaggaaaaattggctatgcagtatttggagcgacgggaatgtgaatatgacagaaagactcttgtaaacttcttcaaggaaggagattcactgcatcctactttaactgatgtaatagtattcacatctactccagacaaagtgaacaacaaatactacctgggacctgctccacttgaagacatggctaggcaaatagcaactgcatacggcccttgcggaaacaacagggattacattttccttctagaaaaggccatgcatgatattggccatgaggatgacttggtgatagagcttgccaatgaagtgaagaaagtacttggagtgggaaatgtagtaccaaaggagaagaaacaggttggagcagcacaacttccacaccctcctcatgtgccaatccctacccttcaactgctcccgctgccagaacctattgctttggatagctgacgcggaaactgacgctgagttcggcaactaaactgatttactgcggaccctactaaccctaattcaaattttaaataacatcacatatattcctcttcgcctagttttagcggcttcttcagccattcccttgagatattgcttaaattcagtgaggcgcaatattttgaattggaatgaatgttcgcagatgttataattgaaaaagttcaatttttctatttatttcgtttacggcaatcttacagagttttttttccaccagttctgcatcccaatcttacggagttatttatagcttttaattgctggtacttcgaaatgaataatattacttctgttttgagcg

SEQ ID NO: 59063 - protein, 224 aa, Glycine max
  peptide (1)..(224): Ceres Seq. ID no. 14308226
  misc_feature (4)..(181): Pfam Name: ChaC-like protein Pfam Description: ChaC-like protein
  misc_feature (1)..(180): Homolog of NCBI NO: 38344831 NR Description: OSJNBa0064H22.12 [Oryza sativa (japonica
  misc_feature (148)..(221): Homolog of NCBI NO: 7486662 NR Description: hypothetical protein F8F16.110 - Arabidopsis
  misc_feature (100)..(165): Homolog of NCBI NO: 7486662 NR Description: hypothetical protein F8F16.110 - Arabidopsis
  misc_feature (1)..(81): Homolog of NCBI NO: 7486662 NR Description: hypothetical protein F8F16.110 - Arabidopsis
  misc_feature (1)..(81): Homolog of NCBI NO: 7486723 NR Description: hypothetical protein F9D12.14 - Arabidopsis
  misc_feature (100)..(208): Homolog of NCBI NO: 7486723 NR Description: hypothetical protein F9D12.14 - Arabidopsis
  misc_feature (1)..(208): Homolog of NCBI NO: 15239626 NR Description: expressed protein [Arabidopsis thaliana]
  misc_feature (1)..(221): Homolog of NCBI NO: 21593515 NR Description: unknown [Arabidopsis thaliana]
  misc_feature (1)..(221): Homolog of NCBI NO: 18417778 NR Description: expressed protein [Arabidopsis thaliana]
  misc_feature (1)..(224): Homolog of NCBI NO: 27525010 NR Description: putative cation transporter [Beta procumbens]
MVFWVFGYGSLVWNPGFDYDEKIIGFIKDYRRVFDLACIDHRGTPENPARTCTLEEKEGAICWGAAYCVRGGPEKEKLAMQYLERRECEYDRKTLVNFFKEGDSLHPTLTDVIVFTSTPDKVNNKYYLGPAPLEDMARQIATAYGPCGNNRDYIFLLEKAMHDIGHEDDLVIELANEVKKVLGVGNVVPKEKKQVGAAQLPHPPHVPIPTLQLLPLPEPIALDS

SEQ ID NO: 59064 - protein, 145 aa, Glycine max
  peptide (1)..(145): Ceres Seq. ID no. 14308227
  misc_feature (1)..(102): Pfam Name: ChaC-like protein Pfam Description: ChaC-like protein
  misc_feature (1)..(103): Homolog of NCBI NO: 12083292 NR Description: unknown protein [Arabidopsis thaliana]
  misc_feature (1)..(103): Homolog of NCBI NO: 18401334 NR Description: expressed protein [Arabidopsis thaliana]
  misc_feature (1)..(101): Homolog of NCBI NO: 38344831 NR Description: OSJNBa0064H22.12 [Oryza sativa (japonica
  misc_feature (69)..(142): Homolog of NCBI NO: 7486662 NR Description: hypothetical protein F8F16.110 - Arabidopsis
  misc_feature (21)..(86): Homolog of NCBI NO: 7486662 NR Description: hypothetical protein F8F16.110 - Arabidopsis
  misc_feature (21)..(129): Homolog of NCBI NO: 7486723 NR Description: hypothetical protein F9D12.14 - Arabidopsis
  misc_feature (1)..(129): Homolog of NCBI NO: 15239626 NR Description: expressed protein [Arabidopsis thaliana]
  misc_feature (1)..(142): Homolog of NCBI NO: 21593515 NR Description: unknown [Arabidopsis thaliana]
  misc_feature (1)..(142): Homolog of NCBI NO: 18417778 NR Description: expressed protein [Arabidopsis thaliana]
  misc_feature (1)..(145): Homolog of NCBI NO: 27525010 NR Description: putative cation transporter [Beta procumbens]
MQYLERRECEYDRKTLVNFFKEGDSLHPTLTDVIVFTSTPDKVNNKYYLGPAPLEDMARQIATAYGPCGNNRDYIFLLEKAMHDIGHEDDLVIELANEVKKVLGVGNVVPKEKKQVGAAQLPHPPHVPIPTLQLLPLPEPIALDS

SEQ ID NO: 59065 - DNA, 1402 bp, Glycine max
  misc_feature (1)..(1402): Ceres Seq. ID no. 14308433
gtcacaagttctttcactggaaggagaacaagaagaaaaaaccgacacaaagatctagtcctagctagaatcaaacaggggcgatctcaccttcaagaacacatcgccatggcaaggaacttgcttcttgtgctttttgcagtagccaccctcctccatggctcagcagcccaaaccagacacatggtcggtgatgccacgggctggatcatccctgctggcggcgctgccacctacaccgcctgggcttccaacaaaaccttcaccgtaaacgacactctcgtgttcaacttcgccaccggccaacacaacgtggccaaggtaacgaaatcggctttcgacgcgtgcaacggcgggagcgccgttttcaccctgacctccggtccagcgaccgtgaccctgaacgaaacaggggagcaatactacatttgctccgttggatcacactgttccgctggccagaaactggcaattaacgttaacagagcttcttctaccggtccttcccctgcacctcaacccagaggaagtggttctccaccaagggctagccctgtccccacacaagcaccacaagccagtagccccactcctccaccaaggtctgcaccagcacctgcttttggtccatcctctgaaccagctactttcattgttggagaaaccgctggctggattgttcctggcaacgcttccttttacacagcttgggcctctggcaaaaacttcagggttggagacgtccttgtgttcaactacgcatcaaatacacacaacgtagaggaggttacaaaggccaacttcgatgcttgcagctcagcctctcctattgccactttcaccactccacctgcgagagtgaccctcaacaaatctggtcaacatttcttcatctgtggaattccagggcactgtttgggaggtcaaaagcttgccatcaacgtcaccggcagcagcaccgccaccccaccttccgccgcggccccccccaccactccttctagcccttctccagccggtgctgtcactcctcccccacagaactctggtgctgcatctcttggagttgttggagtatttgccaccctgctttcagttgccgccacttttttctattagatactccacgagattattctagtcaggagcttccgagtcatcatcatcgctctttgattgtgtttcatgaattcagtttttttcttatttttttgaggatgacaataaagttagctttaatttaatttctcttcatcggctacagttttggttttttgttatgtttttgagtaaaaataaattggtacggtgtgaatatgttaacaagtgtatttctttgatagttaacatcgttgtattacagtgcatatatttggaattggagataaaaaatatttgtgac

SEQ ID NO: 59066 - protein, 372 aa, Glycine max
  peptide (1)..(372): Ceres Seq. ID no. 14308434
  misc_feature (69)..(154): Pfam Name: Plastocyanin-like domain Pfam Description: Plastocyanin-like domain
  misc_feature (38)..(205): Homolog of NCBI NO: 7430876 NR Description: blue copper protein stellacyanin precursor -
  misc_feature (217)..(363): Homolog of NCBI NO: 2493318 NR Description: Blue copper protein precursor
  misc_feature (210)..(371): Homolog of NCBI NO: 7430876 NR Description: blue copper protein stellacyanin precursor -
  misc_feature (212)..(371): Homolog of NCBI NO: 15240310 NR Description: plastocyanin-like domain containing protein
  misc_feature (218)..(371): Homolog of NCBI NO: 10798754 NR Description: elicitor inducible gene Nt-SA1-1 [Nicotiana
  misc_feature (37)..(203): Homolog of NCBI NO: 9885806 NR Description: stellacyanin-like protein CASLP1 precursor
  misc_feature (216)..(355): Homolog of NCBI NO: 8515096 NR Description: phytocyanin homolog [Pinus taeda]
  misc_feature (36)..(223): Homolog of NCBI NO: 8515096 NR Description: phytocyanin homolog [Pinus taeda]
  misc_feature (39)..(203): Homolog of NCBI NO: 10798754 NR Description: elicitor inducible gene Nt-SA1-1 [Nicotiana
  misc_feature (37)..(367): Homolog of NCBI NO: 7670832 NR Description: dicyanin [Lycopersicon esculentum]
VTSSFTGRRTRRKNRHKDLVLARIKQGRSHLQEHIAMARNLLLVLFAVATLLHGSAAQTRHMVGDATGWIIPAGGAATYTAWASNKTFTVNDTLVFNFATGQHNVAKVTKSAFDACNGGSAVFTLTSGPATVTLNETGEQYYICSVGSHCSAGQKLAINVNRASSTGPSPAPQPRGSGSPPRASPVPTQAPQASSPTPPPRSAPAPAFGPSSEPATFIVGETAGWIVPGNASFYTAWASGKNFRVGDVLVFNYASNTHNVEEVTKANFDACSSASPIATFTTPPARVTLNKSGQHFFICGIPGHCLGGQKLAINVTGSSTATPPSAAAPPTTPSSPSPAGAVTPPPQNSGAASLGVVGVFATLLSVAATFFY

SEQ ID NO: 59067 - protein, 336 aa, Glycine max
  peptide (1)..(336): Ceres Seq. ID no. 14308435
  misc_feature (33)..(118): Pfam Name: Plastocyanin-like domain Pfam Description: Plastocyanin-like domain
  misc_feature (2)..(169): Homolog of NCBI NO: 7430876 NR Description: blue copper protein stellacyanin precursor -
  misc_feature (181)..(327): Homolog of NCBI NO: 2493318 NR Description: Blue copper protein precursor
  misc_feature (174)..(335): Homolog of NCBI NO: 7430876 NR Description: blue copper protein stellacyanin precursor -
  misc_feature (176)..(335): Homolog of NCBI NO: 15240310 NR Description: plastocyanin-like domain containing protein
  misc_feature (182)..(335): Homolog of NCBI NO: 10798754 NR Description: elicitor inducible gene Nt-SA1-1 [Nicotiana
  misc_feature (1)..(167): Homolog of NCBI NO: 9885806 NR Description: stellacyanin-like protein CASLP1 precursor
  misc_feature (180)..(319): Homolog of NCBI NO: 8515096 NR Description: phytocyanin homolog [Pinus taeda]
  misc_feature (1)..(187): Homolog of NCBI NO: 8515096 NR Description: phytocyanin homolog [Pinus taeda]
  misc_feature (3)..(167): Homolog of NCBI NO: 10798754 NR Description: elicitor inducible gene Nt-SA1-1 [Nicotiana
  misc_feature (1)..(331): Homolog of NCBI NO: 7670832 NR Description: dicyanin [Lycopersicon esculentum]
MARNLLLVLFAVATLLHGSAAQTRHMVGDATGWIIPAGGAATYTAWASNKTFTVNDTLVFNFATGQHNVAKVTKSAFDACNGGSAVFTLTSGPATVTLNETGEQYYICSVGSHCSAGQKLAINVNRASSTGPSPAPQPRGSGSPPRASPVPTQAPQASSPTPPPRSAPAPAFGPSSEPATFIVGETAGWIVPGNASFYTAWASGKNFRVGDVLVFNYASNTHNVEEVTKANFDACSSASPIATFTTPPARVTLNKSGQHFFICGIPGHCLGGQKLAINVTGSSTATPPSAAAPPTTPSSPSPAGAVTPPPQNSGAASLGVVGVFATLLSVAATFFY

SEQ ID NO: 59068 - protein, 311 aa, Glycine max
  peptide (1)..(311): Ceres Seq. ID no. 14308436
  misc_feature (8)..(93): Pfam Name: Plastocyanin-like domain Pfam Description: Plastocyanin-like domain
  misc_feature (1)..(144): Homolog of NCBI NO: 7430876 NR Description: blue copper protein stellacyanin precursor -
  misc_feature (156)..(302): Homolog of NCBI NO: 2493318 NR Description: Blue copper protein precursor
  misc_feature (149)..(310): Homolog of NCBI NO: 7430876 NR Description: blue copper protein stellacyanin precursor -
  misc_feature (151)..(310): Homolog of NCBI NO: 15240310 NR Description: plastocyanin-like domain containing protein
  misc_feature (157)..(310): Homolog of NCBI NO: 10798754 NR Description: elicitor inducible gene Nt-SA1-1 [Nicotiana
  misc_feature (1)..(142): Homolog of NCBI NO: 9885806 NR Description: stellacyanin-like protein CASLP1 precursor
  misc_feature (155)..(294): Homolog of NCBI NO: 8515096 NR Description: phytocyanin homolog [Pinus taeda]
  misc_feature (1)..(162): Homolog of NCBI NO: 8515096 NR Description: phytocyanin homolog [Pinus taeda]
  misc_feature (1)..(142): Homolog of NCBI NO: 10798754 NR Description: elicitor inducible gene Nt-SA1-1 [Nicotiana
  misc_feature (1)..(306): Homolog of NCBI NO: 7670832 NR Description: dicyanin [Lycopersicon esculentum]
MVGDATGWIIPAGGAATYTAWASNKTFTVNDTLVFNFATGQHNVAKVTKSAFDACNGGSAVFTLTSGPATVTLNETGEQYYICSVGSHCSAGQKLAINVNRASSTGPSPAPQPRGSGSPPRASPVPTQAPQASSPTPPPRSAPAPAFGPSSEPATFIVGETAGWIVPGNASFYTAWASGKNFRVGDVLVFNYASNTHNVEEVTKANFDACSSASPIATFTTPPARVTLNKSGQHFFICGIPGHCLGGQKLAINVTGSSTATPPSAAAPPTTPSSPSPAGAVTPPPQNSGAASLGVVGVFATLLSVAATFFY

SEQ ID NO: 59069 - DNA, 1476 bp, Glycine max
  misc_feature (1)..(1476): Ceres Seq. ID no. 14308168
aaagtagagagaagagaagcaattaccccttttcataaaaccctagcaagtaaaaaccgtcccttttcgtttctgttctctgtgcttcgaaaaccctaactaaactcgcgtggtagctccaatgggaggaaagaggaagaagagcgatgatgatgatgacgtggaagcagaagcagaagcttcaggttggaagaagaaaacgagaacgacgtcggagagagagaaggagaagaaggagccattgcgtccttcgatgataaagaacaaggagaagcgatcggagctgcacgcgaaactgaagcaccagaagaagctcgagaagcgcgccaaggccaaggctcgggacgctgctctcaagaaagctctcgagctcggcgaggagcctccagagaagaaggtccctcgcactatcgagaacacgagggaactcgacgagaccgtttgcaagcccgatgacgaagagttatttgctggaaatgatgctgatgaatttggtccaattttgaatcagcaacaaactcccaagatattaatcaccacttgccgcttccattctactaggggacctgcttttatatcagagttgctttcagttataccaaatgcacattacttcaagagaggaacatatgatctgaaaaagattgtagaatatgcaaagaagaaggacttcacttctattatagttgttcacaccaatcgtagggaaccagatgctcttttaatcataggtgtacctgatgggcctactgctcatttcaagctctcgaaacttgttttgcgcaaggatatcaagaatcatggaaatccaaccggtcacaagcccgagcttgtattgaataacttcacaacacgtctagggcatcgagttggaaggttgatacagtcacttttcccacaagatccagaatttaaaggccggcgagtagtcactttccacaaccagagagacttcatattcttccggcatcatcggtatatttttgaaaccaaagaagttaaaaaagcagagtccaaaggtaaaaaggacaaagatggcgagagtgagaatgttcctgaacagaaaacaattgcccgacttcaggaatgtggtcctcgtttcacattaaaattgattagcctgcagcatggaacatttgacaccaagggtggggaatatgagtgggttcacaagccggaaatggacactagccgaaggaggttcttcctatgacttgtttgggaaggttgcattttggacatcttttttgctggaaataggttttatccggtgaagagggttaattatcttgaggttgttgggatctttcaacttaattctggtgtatcatttttttatttttttttattgggggctaaagtcctatcatctctgtaagccgtgagcaattttgaccttacatctattggtggttgaggaagagataacaaaggtttcttataagcaaatatataagcaattttgtattatggtcc

SEQ ID NO: 59070 - protein, 363 aa, Glycine max
  peptide (1)..(363): Ceres Seq. ID no. 14308169
  misc_feature (320)..(363): Homolog of NCBI NO: 17225079 NR Description: RNA processing factor 1 [Homo sapiens]
  misc_feature (320)..(363): Homolog of NCBI NO: 13376605 NR Description: RNA processing factor 1 [Homo sapiens]
  misc_feature (44)..(292): Homolog of NCBI NO: 17225079 NR Description: RNA processing factor 1 [Homo sapiens]
  misc_feature (44)..(292): Homolog of NCBI NO: 13376605 NR Description: RNA processing factor 1 [Homo sapiens]
  misc_feature (320)..(363): Homolog of NCBI NO: 33440502 NR Description: Unknown (protein for IMAGE:5694049) [Mus musculus]
  misc_feature (2)..(292): Homolog of NCBI NO: 33440502 NR Description: Unknown (protein for IMAGE:5694049) [Mus musculus]
  misc_feature (320)..(363): Homolog of NCBI NO: 27371215 NR Description: Similar to RNA processing factor 1 [Xenopus
  misc_feature (1)..(292): Homolog of NCBI NO: 27371215 NR Description: Similar to RNA processing factor 1 [Xenopus
  misc_feature (1)..(357): Homolog of NCBI NO: 7485389 NR Description: hypothetical protein F11O4.6 - Arabidopsis
  misc_feature (1)..(363): Homolog of NCBI NO: 18411672 NR Description: expressed protein [Arabidopsis thaliana]
MGGKRKKSDDDDDVEAEAEASGWKKKTRTTSEREKEKKEPLRPSMIKNKEKRSELHAKLKHQKKLEKRAKAKARDAALKKALELGEEPPEKKVPRTIENTRELDETVCKPDDEELFAGNDADEFGPILNQQQTPKILITTCRFHSTRGPAFISELLSVIPNAHYFKRGTYDLKKIVEYAKKKDFTSIIVVHTNRREPDALLIIGVPDGPTAHFKLSKLVLRKDIKNHGNPTGHKPELVLNNFTTRLGHRVGRLIQSLFPQDPEFKGRRVVTFHNQRDFIFFRHHRYIFETKEVKKAESKGKKDKDGESENVPEQKTIARLQECGPRFTLKLISLQHGTFDTKGGEYEWVHKPEMDTSRRRFFL

SEQ ID NO: 59071 - protein, 319 aa, Glycine max
  peptide (1)..(319): Ceres Seq. ID no. 14308170
  misc_feature (276)..(319): Homolog of NCBI NO: 17225079 NR Description: RNA processing factor 1 [Homo sapiens]
  misc_feature (276)..(319): Homolog of NCBI NO: 13376605 NR Description: RNA processing factor 1 [Homo sapiens]
  misc_feature (1)..(248): Homolog of NCBI NO: 17225079 NR Description: RNA processing factor 1 [Homo sapiens]
  misc_feature (1)..(248): Homolog of NCBI NO: 13376605 NR Description: RNA processing factor 1 [Homo sapiens]
  misc_feature (276)..(319): Homolog of NCBI NO: 33440502 NR Description: Unknown (protein for IMAGE:5694049) [Mus musculus]
  misc_feature (1)..(248): Homolog of NCBI NO: 33440502 NR Description: Unknown (protein for IMAGE:5694049) [Mus musculus]
  misc_feature (276)..(319): Homolog of NCBI NO: 27371215 NR Description: Similar to RNA processing factor 1 [Xenopus
  misc_feature (1)..(248): Homolog of NCBI NO: 27371215 NR Description: Similar to RNA processing factor 1 [Xenopus
  misc_feature (1)..(313): Homolog of NCBI NO: 7485389 NR Description: hypothetical protein F11O4.6 - Arabidopsis
  misc_feature (1)..(319): Homolog of NCBI NO: 18411672 NR Description: expressed protein [Arabidopsis thaliana]
MIKNKEKRSELHAKLKHQKKLEKRAKAKARDAALKKALELGEEPPEKKVPRTIENTRELDETVCKPDDEELFAGNDADEFGPILNQQQTPKILITTCRFHSTRGPAFISELLSVIPNAHYFKRGTYDLKKIVEYAKKKDFTSIIVVHTNRREPDALLIIGVPDGPTAHFKLSKLVLRKDIKNHGNPTGHKPELVLNNFTTRLGHRVGRLIQSLFPQDPEFKGRRVVTFHNQRDFIFFRHHRYIFETKEVKKAESKGKKDKDGESENVPEQKTIARLQECGPRFTLKLISLQHGTFDTKGGEYEWVHKPEMDTSRRRFFL

SEQ ID NO: 59072 - DNA, 1150 bp, Glycine max
  misc_feature (1)..(1150): Ceres Seq. ID no. 14308198
ttttcctaaatacacacacaaaaccggttcctctcttaaccctctgaaagccaaaagagaaaaaaaaaatgcagccccaccagaaccctcccgcactggattccgacccgcagctcccgcagatcaaaatccaccaccctgcctccccacgccaccatcacccttcctccgccggcgccgcgacccccacccccaccgccggcgcgcgtcgcaaaatcggcgtggccgtcgacctctccgacgagagcgcctacgcggtccgctgggccgtgcagcactacatccgccccggcgacgccgtgatcctgctccacgtcagcgctaccaacgtcctcttcggcgccgactggggctccatcgacctctccatcaacaccgaccccaactccgacgaggatgccgtcagcgccgtcaacaacagcaacgaccacaacagcaagcgcaagctggaggacgacttcgacgcctttacggcgtccaaggcggcggatctcgcgaaaccgttacgggaattgcagattccgttcaagatccatatcgtgaaggatcatgacatgaaggagaggctttgcttggaggtggagaggcttgggctgagtgctgttattatggggagtagaggctttggcgctgtgaggcgtggcagcgatgggaagcttgggagtgttagtgattactgcgttcatcactgtgtttgtcctgttgtggtggtgcgttatcccgatgataaggatgcggtcgcggcggccaccacggccgagcccgtggtggcggtcaaggacggagacgagggcgaggccgtcgtccagccggtgccgcataagaaagaggattagttggagccaactcatcacttcaaccctatctctgaagagtgtttctgatccgaagagataggtggaaatatggttgtagagtgctctctttctcttcctgtcaggttgtacttagagcatttcctgcatatgaactgtggaaagattatggatgattttgtatggcttgatatgatctcggttccattaggctttggacgattgtttttagttccgaagtggtctatactctttcatttagatgtacaagtttgcctgtgactgtttttggggttattttcttcccatatgatgtgggaaatcggattaaaaag

SEQ ID NO: 59073 - protein, 255 aa, Glycine max
  peptide (1)..(255): Ceres Seq. ID no. 14308199
  misc_feature (48)..(216): Pfam Name: Universal stress protein family Pfam Description: Universal stress protein family
  misc_feature (137)..(241): Homolog of NCBI NO: 15232490 NR Description: CHP-rich zinc finger protein, putative
  misc_feature (32)..(222): Homolog of NCBI NO: 30682187 NR Description: expressed protein [Arabidopsis thaliana]
  misc_feature (32)..(222): Homolog of NCBI NO: 25402657 NR Description: protein T23J18.3 [imported] - Arabidopsis
  misc_feature (7)..(250): Homolog of NCBI NO: 34910112 NR Description: B1100D10.31 [Oryza sativa (japonica
  misc_feature (5)..(252): Homolog of NCBI NO: 33146953 NR Description: CHP-rich zinc finger protein-like
  misc_feature (5)..(252): Homolog of NCBI NO: 28971968 NR Description: CHP-rich zinc finger protein-like
  misc_feature (8)..(240): Homolog of NCBI NO: 18423628 NR Description: expressed protein [Arabidopsis thaliana]
  misc_feature (8)..(240): Homolog of NCBI NO: 8885586 NR Description: gene_id:F24B18.5~pir||T05756~similar to unknown
  misc_feature (11)..(243): Homolog of NCBI NO: 18416966 NR Description: expressed protein [Arabidopsis thaliana]
  misc_feature (11)..(243): Homolog of NCBI NO: 7486798 NR Description: hypothetical protein M4I22.130 - Arabidopsis
MQPHQNPPALDSDPQLPQIKIHHPASPRHHHPSSAGAATPTPTAGARRKIGVAVDLSDESAYAVRWAVQHYIRPGDAVILLHVSATNVLFGADWGSIDLSINTDPNSDEDAVSAVNNSNDHNSKRKLEDDFDAFTASKAADLAKPLRELQIPFKIHIVKDHDMKERLCLEVERLGLSAVIMGSRGFGAVRRGSDGKLGSVSDYCVHHCVCPVVVVRYPDDKDAVAAATTAEPVVAVKDGDEGEAVVQPVPHKKED

SEQ ID NO: 59074 - protein, 183 aa, Glycine max
  peptide (1)..(183): Ceres Seq. ID no. 14308200
  misc_feature (25)..(54): Homolog of NCBI NO: 20138131 NR Description: Vegetative cell wall protein gp1 precursor
FPKYTHKTGSSLNPLKAKREKKNAAPPEPSRTGFRPAAPADQNPPPCLPTPPSPFLRRRRDPHPHRRRASQNRRGRRPLRRERLRGPLGRAALHPPRRRRDPAPRQRYQRPLRRRLGLHRPLHQHRPQLRRGCRQRRQQQQRPQQQAQAGGRLRRLYGVQGGGSRETVTGIADSVQDPYREGS

SEQ ID NO: 59075 - DNA, 886 bp, Glycine max
  misc_feature (1)..(886): Ceres Seq. ID no. 13594206
ataagtatttcattttcagcgttccatgggttgggtttggaccaatccatagccgaagaagagaaaaaagagacaaggaccgtcttgagttaatttgattcagtgtagcagccagcagccataagcaacgcaacaattccatttccagtttctgattcgtcacgtcagacaaaggaaggggttagggtgtgacctgagatcaaaatgttgcggaggcttctctcttctcacctcaaaaccctagcctcctccgccgccgccgccgccaccgccactccccgatctgcttccgcctccgccagattcgccgctctctctcgctcctgcctctacttctcaacccaatccgaggatgctactgcgatcaaaaagaaggttgaggacataatgccaatcgctactggccacgagcgcgaggagcttcaggctgagctcgagggaaggaatattcttgaaatagaccatcccgaaggtccattcggcacaaaggaagcacctgctgttgtcaaatcttactatgataaaaggatagtcggatgcccaggaggtgaaggtgaggatgagcatgatgttgtctggttttggctggagaaagacaagccccatgaatgtccagtgtgcgcacagtattttgttcttgaagtggtaggacctggtggaccacccgatggacatggtgatgatgatcaccattgattgcatccttcaattaaatctggaataaattctggaaagatggagagacattgtttagcatacactctggcctttcaaaatcctgtggcctaagtttgattttgatttgtctataccttattgtgtcacaacttttgagatagaaagtttatgcgattatttgaacgcaggatgctcatttgcttgagct

SEQ ID NO: 59076 - protein, 163 aa, Glycine max
  peptide (1)..(163): Ceres Seq. ID no. 13594207
  misc_feature (53)..(151): Pfam Name: Cytochrome c oxidase subunit Vb Pfam Description: Cytochrome c oxidase subunit Vb
  misc_feature (40)..(145): Homolog of NCBI NO: 40644927 NR Description: sperm protein 8 [Vulpes vulpes]
  misc_feature (65)..(145): Homolog of NCBI NO: 117102 NR Description: CYTOCHROME C OXIDASE POLYPEPTIDE VB (VI)
  misc_feature (65)..(145): Homolog of NCBI NO: 223590 NR Description: oxidase IV,cytochrome
  misc_feature (118)..(163): Homolog of NCBI NO: 5903035 NR Description: Similar to gb|D85381 cytochrome c oxidase subunit precursor from Oryza sativa. ESTs gb|R30504 and gb|AA598195 come
  misc_feature (1)..(104): Homolog of NCBI NO: 7484634 NR Description: probable cytochrome-c oxidase (EC 1.9.3.1) Vb
  misc_feature (42)..(163): Homolog of NCBI NO: 5803264 NR Description: ESTs AU057456(S21460),AU057455(S21460) correspond a region of the predicted gene.~Similar to cytochrome c oxidase
  misc_feature (1)..(163): Homolog of NCBI NO: 34912592 NR Description: cytochrome c oxidase subunit Vb precursor
  misc_feature (1)..(162): Homolog of NCBI NO: 15220092 NR Description: cytochrome c oxidase subunit -related
  misc_feature (1)..(163): Homolog of NCBI NO: 15232644 NR Description: cytochrome c oxidase subunit Vb -related
  misc_feature (1)..(162): Homolog of NCBI NO: 21592567 NR Description: cytochrome c oxidase subunit, putative
MLRRLLSSHLKTLASSAAAAATATPRSASASARFAALSRSCLYFSTQSEDATAIKKKVEDIMPIATGHEREELQAELEGRNILEIDHPEGPFGTKEAPAVVKSYYDKRIVGCPGGEGEDEHDVVWFWLEKDKPHECPVCAQYFVLEVVGPGGPPDGHGDDDHH

SEQ ID NO: 59077 - protein, 102 aa, Glycine max
  peptide (1)..(102): Ceres Seq. ID no. 13594208
  misc_feature (1)..(90): Pfam Name: Cytochrome c oxidase subunit Vb Pfam Description: Cytochrome c oxidase subunit Vb
  misc_feature (1)..(84): Homolog of NCBI NO: 40644927 NR Description: sperm protein 8 [Vulpes vulpes]
  misc_feature (4)..(84): Homolog of NCBI NO: 117102 NR Description: CYTOCHROME C OXIDASE POLYPEPTIDE VB (VI)
  misc_feature (4)..(84): Homolog of NCBI NO: 223590 NR Description: oxidase IV,cytochrome
  misc_feature (57)..(102): Homolog of NCBI NO: 5903035 NR Description: Similar to gb|D85381 cytochrome c oxidase subunit precursor from Oryza sativa. ESTs gb|R30504 and gb|AA598195 come
  misc_feature (1)..(43): Homolog of NCBI NO: 7484634 NR Description: probable cytochrome-c oxidase (EC 1.9.3.1) Vb
  misc_feature (1)..(102): Homolog of NCBI NO: 5803264 NR Description: ESTs AU057456(S21460),AU057455(S21460) correspond a region of the predicted gene.~Similar to cytochrome c oxidase
  misc_feature (1)..(102): Homolog of NCBI NO: 34912592 NR Description: cytochrome c oxidase subunit Vb precursor
  misc_feature (1)..(101): Homolog of NCBI NO: 15220092 NR Description: cytochrome c oxidase subunit -related
  misc_feature (1)..(102): Homolog of NCBI NO: 15232644 NR Description: cytochrome c oxidase subunit Vb -related
  misc_feature (1)..(101): Homolog of NCBI NO: 21592567 NR Description: cytochrome c oxidase subunit, putative
MPIATGHEREELQAELEGRNILEIDHPEGPFGTKEAPAVVKSYYDKRIVGCPGGEGEDEHDVVWFWLEKDKPHECPVCAQYFVLEVVGPGGPPDGHGDDDHH

SEQ ID NO: 59078 - DNA, 1903 bp, Glycine max
  misc_feature (1)..(1903): Ceres Seq. ID no. 15226493
aaactatcaaataataatgtatgtggtgtttagttaactggtaagtaagggaaggtagaaattgaggagattgaattgcaatagcaatgagtgtgtcttcaaattcgaaggaatcgatggaattatgcatatttgatttgcggagaggccaacacgaaggccaagagctcgataagattctcttcttcttccccgccggtttgcccttttcaaagcaactctccgtcattggcctcagcgaaggactcatcactttcactagaatcttctcgccagaggctgcctgcgacgtcatcgaagcagaaagacattctcatgttttctacgaggccgaacccgatatctggatagtcatggttgccgacaaaagcaatgattcagaacctatatggagagttgatgcattaagaaaagttctcaaggaaattcactcactttttgtcatgtttcatggatctattagagcaatgctggagaaagaacccggcggaggactaacaagacggcatttgtatacctttatcatggattatctgagggattttcttgcggggaaaaagctccttttaccttcattccgtgattgcttaaaggaacgtggaactgttcagatgctgacaataggtcgcgaggctgcaattgaggttcagtcccttgtcagggtgcttgaatcttcttctggaaacactccctgctactctttggttttatttcaagacctgctagtgtccacaagtctatctcctgatgacaccataaatttattcacatatgctgtgctaaggttgactccccatgctctatcttctggaacaagttcctggtcctacttacggaaaggaagttctgcatccaatgttgccactgagtctaacatggcccatccaagctctttgtctgaaagtttttatggctcatctgatatgtcctctggtgaagataaccactatcatgttgtgaggcccttacagagtgacaaatggtctaaaggaaaagatggttatcttgtcactgatttatggggtgcagaagttggtacgtgggtgtttgcctctccaacagtttggcttcaacatacaggagagaaaatgtatctttgtgtttatcagcatagaagccttactttgatgcttctgattcctgtatcatccattcctaacggggagcaaggtgtgtcggcagtgaggcagcaagttgttgaaaatgcatcacttaaaatattgaaagttgaagagaaactatcgaaaggatggggtggagataatgcttatcacgttagtgggtaccgctacttacttgtagatggtgatagaaatgtatccagggcttctccagcaacaaaagttacaactttaacaaaggagtccttacttgctatgaataagcttaggcaagaggtggagttagagaagagtagagcaaaactggatagccgtaattgtgaaaaagacttagaggtgtgcattagagcaaaaaataatgcatgggttatttctcgagtcacaagagggaaggagctttacatggttctagagaaagctaatgaaacccttctatatgcttcagatgctgttgagaagtttagcgacaggtattgcaatggaacattttctctggactaaagaaaaccaagcatgtgcgaccgaggaatagcacgttaggtcttctaactgtttacccagtaaagtcgggaagttttccactgttgatttttctcaccgggaaattcaagaatggaagaaagaatgctactctgtgtatatctctctgtatattaagtgtaatttgtttatacttgttaaagggtgctttatcaaatcttgtcaccggtaactttctttttaatccgaaattgggtcagttccgagagaaattgttttccaaaaagtttcatttatttcac

SEQ ID NO: 59079 - protein, 511 aa, Glycine max
  peptide (1)..(511): Ceres Seq. ID no. 15226494
  misc_feature (15)..(236): Homolog of NCBI NO: 37674289 NR Description: chromosome 7 open reading frame 28B
  misc_feature (232)..(502): Homolog of NCBI NO: 14517360 NR Description: At1g80910/F23A5_21 [Arabidopsis thaliana]
  misc_feature (190)..(511): Homolog of NCBI NO: 18266049 NR Description: myrosinase precursor [Brassica oleracea]
  misc_feature (281)..(511): Homolog of NCBI NO: 38175489 NR Description: putative myrosinase precursor
  misc_feature (1)..(263): Homolog of NCBI NO: 38175489 NR Description: putative myrosinase precursor
  misc_feature (1)..(511): Homolog of NCBI NO: 21618002 NR Description: unknown [Arabidopsis thaliana]
  misc_feature (1)..(511): Homolog of NCBI NO: 18394314 NR Description: expressed protein [Arabidopsis thaliana]
  misc_feature (1)..(511): Homolog of NCBI NO: 15220866 NR Description: myrosinase precursor -related [Arabidopsis
  misc_feature (1)..(511): Homolog of NCBI NO: 25372816 NR Description: F23A5.27 [imported] - Arabidopsis thaliana
  misc_feature (1)..(511): Homolog of NCBI NO: 30684673 NR Description: expressed protein [Arabidopsis thaliana]
MSVSSNSKESMELCIFDLRRGQHEGQELDKILFFFPAGLPFSKQLSVIGLSEGLITFTRIFSPEAACDVIEAERHSHVFYEAEPDIWIVMVADKSNDSEPIWRVDALRKVLKEIHSLFVMFHGSIRAMLEKEPGGGLTRRHLYTFIMDYLRDFLAGKKLLLPSFRDCLKERGTVQMLTIGREAAIEVQSLVRVLESSSGNTPCYSLVLFQDLLVSTSLSPDDTINLFTYAVLRLTPHALSSGTSSWSYLRKGSSASNVATESNMAHPSSLSESFYGSSDMSSGEDNHYHVVRPLQSDKWSKGKDGYLVTDLWGAEVGTWVFASPTVWLQHTGEKMYLCVYQHRSLTLMLLIPVSSIPNGEQGVSAVRQQVVENASLKILKVEEKLSKGWGGDNAYHVSGYRYLLVDGDRNVSRASPATKVTTLTKESLLAMNKLRQEVELEKSRAKLDSRNCEKDLEVCIRAKNNAWVISRVTRGKELYMVLEKANETLLYASDAVEKFSDRYCNGTFSLD

SEQ ID NO: 59080 - protein, 501 aa, Glycine max
  peptide (1)..(501): Ceres Seq. ID no. 15226495
  misc_feature (5)..(226): Homolog of NCBI NO: 37674289 NR Description: chromosome 7 open reading frame 28B
  misc_feature (222)..(492): Homolog of NCBI NO: 14517360 NR Description: At1g80910/F23A5_21 [Arabidopsis thaliana]
  misc_feature (180)..(501): Homolog of NCBI NO: 18266049 NR Description: myrosinase precursor [Brassica oleracea]
  misc_feature (271)..(501): Homolog of NCBI NO: 38175489 NR Description: putative myrosinase precursor
  misc_feature (1)..(253): Homolog of NCBI NO: 38175489 NR Description: putative myrosinase precursor
  misc_feature (1)..(501): Homolog of NCBI NO: 21618002 NR Description: unknown [Arabidopsis thaliana]
  misc_feature (1)..(501): Homolog of NCBI NO: 18394314 NR Description: expressed protein [Arabidopsis thaliana]
  misc_feature (1)..(501): Homolog of NCBI NO: 15220866 NR Description: myrosinase precursor -related [Arabidopsis
  misc_feature (1)..(501): Homolog of NCBI NO: 25372816 NR Description: F23A5.27 [imported] - Arabidopsis thaliana
  misc_feature (1)..(501): Homolog of NCBI NO: 30684673 NR Description: expressed protein [Arabidopsis thaliana]
MELCIFDLRRGQHEGQELDKILFFFPAGLPFSKQLSVIGLSEGLITFTRIFSPEAACDVIEAERHSHVFYEAEPDIWIVMVADKSNDSEPIWRVDALRKVLKEIHSLFVMFHGSIRAMLEKEPGGGLTRRHLYTFIMDYLRDFLAGKKLLLPSFRDCLKERGTVQMLTIGREAAIEVQSLVRVLESSSGNTPCYSLVLFQDLLVSTSLSPDDTINLFTYAVLRLTPHALSSGTSSWSYLRKGSSASNVATESNMAHPSSLSESFYGSSDMSSGEDNHYHVVRPLQSDKWSKGKDGYLVTDLWGAEVGTWVFASPTVWLQHTGEKMYLCVYQHRSLTLMLLIPVSSIPNGEQGVSAVRQQVVENASLKILKVEEKLSKGWGGDNAYHVSGYRYLLVDGDRNVSRASPATKVTTLTKESLLAMNKLRQEVELEKSRAKLDSRNCEKDLEVCIRAKNNAWVISRVTRGKELYMVLEKANETLLYASDAVEKFSDRYCNGTFSLD

SEQ ID NO: 59081 - protein, 422 aa, Glycine max
  peptide (1)..(422): Ceres Seq. ID no. 15226496
  misc_feature (1)..(147): Homolog of NCBI NO: 37674289 NR Description: chromosome 7 open reading frame 28B
  misc_feature (143)..(413): Homolog of NCBI NO: 14517360 NR Description: At1g80910/F23A5_21 [Arabidopsis thaliana]
  misc_feature (101)..(422): Homolog of NCBI NO: 18266049 NR Description: myrosinase precursor [Brassica oleracea]
  misc_feature (192)..(422): Homolog of NCBI NO: 38175489 NR Description: putative myrosinase precursor
  misc_feature (1)..(174): Homolog of NCBI NO: 38175489 NR Description: putative myrosinase precursor
  misc_feature (1)..(422): Homolog of NCBI NO: 21618002 NR Description: unknown [Arabidopsis thaliana]
  misc_feature (1)..(422): Homolog of NCBI NO: 18394314 NR Description: expressed protein [Arabidopsis thaliana]
  misc_feature (1)..(422): Homolog of NCBI NO: 15220866 NR Description: myrosinase precursor -related [Arabidopsis
  misc_feature (1)..(422): Homolog of NCBI NO: 25372816 NR Description: F23A5.27 [imported] - Arabidopsis thaliana
  misc_feature (1)..(422): Homolog of NCBI NO: 30684673 NR Description: expressed protein [Arabidopsis thaliana]
MVADKSNDSEPIWRVDALRKVLKEIHSLFVMFHGSIRAMLEKEPGGGLTRRHLYTFIMDYLRDFLAGKKLLLPSFRDCLKERGTVQMLTIGREAAIEVQSLVRVLESSSGNTPCYSLVLFQDLLVSTSLSPDDTINLFTYAVLRLTPHALSSGTSSWSYLRKGSSASNVATESNMAHPSSLSESFYGSSDMSSGEDNHYHVVRPLQSDKWSKGKDGYLVTDLWGAEVGTWVFASPTVWLQHTGEKMYLCVYQHRSLTLMLLIPVSSIPNGEQGVSAVRQQVVENASLKILKVEEKLSKGWGGDNAYHVSGYRYLLVDGDRNVSRASPATKVTTLTKESLLAMNKLRQEVELEKSRAKLDSRNCEKDLEVCIRAKNNAWVISRVTRGKELYMVLEKANETLLYASDAVEKFSDRYCNGTFSLD

SEQ ID NO: 59082 - DNA, 955 bp, Glycine max
  misc_feature (1)..(955): Ceres Seq. ID no. 13594139
acatgccaaaattaacacccctgaatttcacactccctctcccaaactcatcatcctataatacaaagggtttggaatatatatcaaatatcaaaatacatcacaacatcaaaatggcctcaattgttactatggccaccattgtcacattagtcctcgcactagcatgttgtggcatgtctgccccgacctcagtgccgaaaaccactgcagcggccccggccccggagagcaatggctgcttgatggcactagcaaacatgtcagattgtctgacctatgttgaggatgggagtaagttgtcaaagcccgacaaagggtgctgccctgagttggcagggttggttgatagcaaccccatttgcttgtgtgagatgctaggcaaacctgactctattggcatcaaaattgatttgaacaaagccctcaagcttccttctgtttgtggagtgaccactccccctgttagcacctgtttccgctgtgggagtccccgtgtccttgcctccatcaatgagtgaaggtccaagtattgcaccgggagccttcagtccttcaaatgcagatgctgcgaatcctgcttcaagtcctaactctgcttctagtcctgcaggtgggctaggcccttcgtccgaggatgctgctgccagcccttctcaaaacaaaaatgaagtttcagccattcacccttctgctttgactaatttcttttttggccttttcactttatttgtctctgtattcttctgattttacacacatttattctgtgtcattattttagtggatattttatttcctcattatttgtatgttgtgagccactttgattaaagcttttgttgtaattttatgcactgttgcaatattgttactgtcattattagtgagccatacactttaattaggaacttcatgcctgcatttttacgccggagatattcattttttttgg

SEQ ID NO: 59083 - protein, 172 aa, Glycine max
  peptide (1)..(172): Ceres Seq. ID no. 13594140
  misc_feature (80)..(158): Pfam Name: Protease inhibitor/seed storage/LTP family Pfam Description: Protease inhibitor/seed storage/LTP family
  misc_feature (80)..(158): Homolog of NCBI NO: 15225509 NR Description: protease inhibitor/seed storage/lipid transfer
  misc_feature (40)..(169): Homolog of NCBI NO: 10176956 NR Description: contains similarity to nonspecific lipid-transfer
  misc_feature (70)..(164): Homolog of NCBI NO: 25553596 NR Description: OJ1656_E11.27 [Oryza sativa (japonica
  misc_feature (59)..(164): Homolog of NCBI NO: 25553595 NR Description: OJ1656_E11.26 [Oryza sativa (japonica
  misc_feature (38)..(172): Homolog of NCBI NO: 25407863 NR Description: hypothetical protein At2g27130 [imported] -
  misc_feature (38)..(164): Homolog of NCBI NO: 21617892 NR Description: lipid-transfer protein-like protein [Arabidopsis
  misc_feature (38)..(164): Homolog of NCBI NO: 15229756 NR Description: protease inhibitor/seed storage/lipid transfer
  misc_feature (38)..(172): Homolog of NCBI NO: 18401329 NR Description: protease inhibitor/seed storage/lipid transfer
  misc_feature (38)..(172): Homolog of NCBI NO: 21618293 NR Description: unknown [Arabidopsis thaliana]
  misc_feature (38)..(168): Homolog of NCBI NO: 34909226 NR Description: P0432B10.23 [Oryza sativa (japonica
MPKLTPLNFTLPLPNSSSYNTKGLEYISNIKIHHNIKMASIVTMATIVTLVLALACCGMSAPTSVPKTTAAAPAPESNGCLMALANMSDCLTYVEDGSKLSKPDKGCCPELAGLVDSNPICLCEMLGKPDSIGIKIDLNKALKLPSVCGVTTPPVSTCFRCGSPRVLASINE

SEQ ID NO: 59084 - protein, 135 aa, Glycine max
  peptide (1)..(135): Ceres Seq. ID no. 13594141
  misc_feature (43)..(121): Pfam Name: Protease inhibitor/seed storage/LTP family Pfam Description: Protease inhibitor/seed storage/LTP family
  misc_feature (43)..(121): Homolog of NCBI NO: 15225509 NR Description: protease inhibitor/seed storage/lipid transfer
  misc_feature (3)..(132): Homolog of NCBI NO: 10176956 NR Description: contains similarity to nonspecific lipid-transfer
  misc_feature (33)..(127): Homolog of NCBI NO: 25553596 NR Description: OJ1656_E11.27 [Oryza sativa (japonica
  misc_feature (22)..(127): Homolog of NCBI NO: 25553595 NR Description: OJ1656_E11.26 [Oryza sativa (japonica
  misc_feature (1)..(135): Homolog of NCBI NO: 25407863 NR Description: hypothetical protein At2g27130 [imported] -
  misc_feature (1)..(127): Homolog of NCBI NO: 21617892 NR Description: lipid-transfer protein-like protein [Arabidopsis
  misc_feature (1)..(127): Homolog of NCBI NO: 15229756 NR Description: protease inhibitor/seed storage/lipid transfer
  misc_feature (1)..(135): Homolog of NCBI NO: 18401329 NR Description: protease inhibitor/seed storage/lipid transfer
  misc_feature (1)..(135): Homolog of NCBI NO: 21618293 NR Description: unknown [Arabidopsis thaliana]
  misc_feature (1)..(131): Homolog of NCBI NO: 34909226 NR Description: P0432B10.23 [Oryza sativa (japonica
MASIVTMATIVTLVLALACCGMSAPTSVPKTTAAAPAPESNGCLMALANMSDCLTYVEDGSKLSKPDKGCCPELAGLVDSNPICLCEMLGKPDSIGIKIDLNKALKLPSVCGVTTPPVSTCFRCGSPRVLASINE

SEQ ID NO: 59085 - protein, 129 aa, Glycine max
  peptide (1)..(129): Ceres Seq. ID no. 13594142
  misc_feature (37)..(115): Pfam Name: Protease inhibitor/seed storage/LTP family Pfam Description: Protease inhibitor/seed storage/LTP family
  misc_feature (37)..(115): Homolog of NCBI NO: 15225509 NR Description: protease inhibitor/seed storage/lipid transfer
  misc_feature (1)..(126): Homolog of NCBI NO: 10176956 NR Description: contains similarity to nonspecific lipid-transfer
  misc_feature (27)..(121): Homolog of NCBI NO: 25553596 NR Description: OJ1656_E11.27 [Oryza sativa (japonica
  misc_feature (16)..(121): Homolog of NCBI NO: 25553595 NR Description: OJ1656_E11.26 [Oryza sativa (japonica
  misc_feature (1)..(129): Homolog of NCBI NO: 25407863 NR Description: hypothetical protein At2g27130 [imported] -
  misc_feature (1)..(121): Homolog of NCBI NO: 21617892 NR Description: lipid-transfer protein-like protein [Arabidopsis
  misc_feature (1)..(121): Homolog of NCBI NO: 15229756 NR Description: protease inhibitor/seed storage/lipid transfer
  misc_feature (1)..(129): Homolog of NCBI NO: 18401329 NR Description: protease inhibitor/seed storage/lipid transfer
  misc_feature (1)..(129): Homolog of NCBI NO: 21618293 NR Description: unknown [Arabidopsis thaliana]
  misc_feature (1)..(125): Homolog of NCBI NO: 34909226 NR Description: P0432B10.23 [Oryza sativa (japonica
MATIVTLVLALACCGMSAPTSVPKTTAAAPAPESNGCLMALANMSDCLTYVEDGSKLSKPDKGCCPELAGLVDSNPICLCEMLGKPDSIGIKIDLNKALKLPSVCGVTTPPVSTCFRCGSPRVLASINE

SEQ ID NO: 59086 - DNA, 1529 bp, Glycine max
  misc_feature (1)..(1529): Ceres Seq. ID no. 14312270
accataacgtgacaccaaattctcattctggcgcgcgtcctcacatccccacagttaccactattcctcttttcttcatcatcatcttcttcttcttcttcttcttcttcttgcatttacatcaactcttctcccaacccataaaaaaaaaaaaaaaagttcgtattttccctcccatgatcgaccctcatggtcacagactccaagcccatcattccccggcgcggcctcgtcgtcggcaactactgtcatgacgtcctccaccgcgacggcgagaccgtcgccgagaccctcggcggcgccgcctccttcatctccgttatcctcgatgccctctcccttcccttccacaccgtctccaaggtgggccccaacttcgcctacaccgccgacacatcgaatcaccccccgttaataatcccaacctcccaaaccacgctcttccacgctcacttcggttcgggccacccggaccgcctcctgaaccgcgtccgatcctgcgattcaatccaacccaccgacctcccggaccaacaaccccggttcgggttcggactcgcggtcggggtcggcggtgagattctcccggagacagtggaaaaaatgctctcgatctgcgaccacgtgttcgtggacattcaggctctgattcgcaggttcgacaacatcaacggtcgcgtgagccacgtggcgctaagagagagcgggttcttccacctcttgccgcgtgtggcgtttctcaaggcttctgcggatgaggccgtttttattgacgtggaggaggtgaggaagtggtgttgcgtggtcgtcacgcacgggaaggatggttgcgaggtgttttgtgaaaacggtgcgtttaaggtggcgccgttcgaggctgatcaggttgatcccaccggcgccggggactgttttctcggcgggtttgcggcggggattgtgaggggcctggccgtgcctgatgcggctctgttggggaacttctttggatccattgctgtggcgcaagtgggaccgcccaagcttgacttcaacttgattcagatggttaaggatgagatgcacaaaaggaagctgcaggatattcccttcttagaaagaagagatgagtcgccagggtttcagaagccacctgaacaagatcaattctatgcatctcttgttactgccaaagccataattacttgccagattcaagaatctggtcggaatctgctaagctctcctaaagtgtttgagcaaaataatgcaaagacaagactttcactggcttctgtgcacgaggaaccaattccaagcgttgatggtaaaccctaacatgggatggttggagttccaaatctcactgtaactctccagtgcccttccttttcatatcaaaaatagagatttcttagcatccaggaatctgtcaatttatggtgccttttccacacctagtctcacgtgcagcctaatttgtagttctacttgtaccaaattactaataaattattcttaaaaagaaaatcgagattgaaattccattc

SEQ ID NO: 59087 - protein, 375 aa, Glycine max
  peptide (1)..(375): Ceres Seq. ID no. 14312271
  misc_feature (11)..(284): Pfam Name: pfkB family carbohydrate kinase Pfam Description: pfkB family carbohydrate kinase
  misc_feature (13)..(285): Homolog of NCBI NO: 31126792 NR Description: unknown protein [Oryza sativa (japonica
  misc_feature (13)..(338): Homolog of NCBI NO: 29788872 NR Description: unknown protein [Oryza sativa (japonica
  misc_feature (9)..(286): Homolog of NCBI NO: 8843793 NR Description: gene_id:MZN1.17~pir||T01971~similar to unknown
  misc_feature (9)..(297): Homolog of NCBI NO: 15237741 NR Description: pfkB type carbohydrate kinase protein family
MVTDSKPIIPRRGLVVGNYCHDVLHRDGETVAETLGGAASFISVILDALSLPFHTVSKVGPNFAYTADTSNHPPLIIPTSQTTLFHAHFGSGHPDRLLNRVRSCDSIQPTDLPDQQPRFGFGLAVGVGGEILPETVEKMLSICDHVFVDIQALIRRFDNINGRVSHVALRESGFFHLLPRVAFLKASADEAVFIDVEEVRKWCCVVVTHGKDGCEVFCENGAFKVAPFEADQVDPTGAGDCFLGGFAAGIVRGLAVPDAALLGNFFGSIAVAQVGPPKLDFNLIQMVKDEMHKRKLQDIPFLERRDESPGFQKPPEQDQFYASLVTAKAIITCQIQESGRNLLSSPKVFEQNNAKTRLSLASVHEEPIPSVDGKP

SEQ ID NO: 59088 - protein, 237 aa, Glycine max
  peptide (1)..(237): Ceres Seq. ID no. 14312272
  misc_feature (1)..(146): Pfam Name: pfkB family carbohydrate kinase Pfam Description: pfkB family carbohydrate kinase
  misc_feature (1)..(147): Homolog of NCBI NO: 31126792 NR Description: unknown protein [Oryza sativa (japonica
  misc_feature (1)..(200): Homolog of NCBI NO: 29788872 NR Description: unknown protein [Oryza sativa (japonica
  misc_feature (1)..(148): Homolog of NCBI NO: 8843793 NR Description: gene_id:MZN1.17~pir||T01971~similar to unknown
  misc_feature (1)..(159): Homolog of NCBI NO: 15237741 NR Description: pfkB type carbohydrate kinase protein family
MLSICDHVFVDIQALIRRFDNINGRVSHVALRESGFFHLLPRVAFLKASADEAVFIDVEEVRKWCCVVVTHGKDGCEVFCENGAFKVAPFEADQVDPTGAGDCFLGGFAAGIVRGLAVPDAALLGNFFGSIAVAQVGPPKLDFNLIQMVKDEMHKRKLQDIPFLERRDESPGFQKPPEQDQFYASLVTAKAIITCQIQESGRNLLSSPKVFEQNNAKTRLSLASVHEEPIPSVDGKP

SEQ ID NO: 59089 - DNA, 1737 bp, Glycine max
  misc_feature (1)..(1737): Ceres Seq. ID no. 13594209
aaaaaattaacattgaattttgacctgttacataagagtttgggatcaagaatcatggtgaatcacctatctttctataaataccacaaaattgaagctgaacgcatgagttctaatatatcattcaaaagtttttgaaatgttgtcaccccttcttctatttctatgcctaactcttcctttgtttttgttgtccttcttcaaataccgtaaaaccttcaagaatccaccacttccaccaggtcctagaggccttcccataatagggaatcttcatcaactagatagtccttctcttcatgagcagctatggcatctctcaaagaaatatggtcctttattttcccttcaatttggattaaggccagccatagttgtttcctctccaaaattggccaaagaggtaatgaaagacaatgaccttgagtgctgtggacgacctaaattactaggccaacagaaactaacctataatgggttagacatgggattttcctcatacgatagttattggagagaaatcagaaaaatttgtgttgtccatgtccttagctccaaacgtgtccaaagctttacctcaataagacattttgaggtcaagcagatgataaaaaaaatatctaggcatgcctcatcttcaaaagttacaaatttaaatgaagtgcttatatcccttattagtactattgtatgtagaattgttttggggagaaggtatgaagaggagggatctgaaggtagcagattccataagttgttcaatgagtgtgaagctatgttgggtaacttctttgtttcagattatattcctttcatgggttggattgataaactcaggggactggatgcacgtcttgaacgcaatttcaaggagatggataagttctaccaagaagccattgatgaacacatgaattctaagaaaaaaactccagaggaagaggatttagttgatgtcttacttcaactgaaagagaacaacacgtttcccatagatctcaccaatgataacatcaaagcagtgctcttgaacttacttgtaggagctacaggtacaactgaagtcacaacaatctgggccatgactgaactaataaaaaatccaagcattatgaagaaagtgcaagaagaaattagaggcttaagtggtaagaaagatttcttggatgaagatgatattcaaaagttttcctacttaagggcagtgataaaagagacacttagattgcacttaccagcaccactacttataccaagagaaacaaataaaaaatgcatgttagatggctacgaaattccagccaagacattattatatgtgaatgcttgggcaattcatagagatcctaaggcttggaaagatccagaagagtttatacctgagaggtttttaaattgcgacatagatctttatggacaagattttgagtttattccattcggtgctggtcgtagattgtgccctggtatgaatatggcatttgctgcattggatcttatacttgctaatcttctttattcctttgactgggaattgccccaaggaatgaaaaaggaagacattgatactgaagtgttgccaggagttacacagcataagaagaatcctctgtgtgttgtggccaagtgctatatgtaaaatccaaaagtcgtaactactgctgaaaaaaataaaataaaataattaatgattgtactcttccaacgaagattattaaataaagatgtaagccctcc

SEQ ID NO: 59090 - protein, 499 aa, Glycine max; identical to SEQ ID NO: 53070
  peptide (1)..(499): Ceres Seq. ID no. 13594210
  misc_feature (33)..(494): Pfam Name: Cytochrome P450 Pfam Description: Cytochrome P450
  misc_feature (11)..(499): Homolog of NCBI NO: 16507125 NR Description: cytochrome P450 [Citrus sinensis]
  misc_feature (7)..(498): Homolog of NCBI NO: 13516748 NR Description: cytochrome P450 [Asparagus officinalis]
  misc_feature (19)..(491): Homolog of NCBI NO: 15235968 NR Description: cytochrome P450 83B1 [Arabidopsis thaliana]
  misc_feature (7)..(494): Homolog of NCBI NO: 28393289 NR Description: putative cytochrome p450 [Arabidopsis thaliana]
  misc_feature (7)..(494): Homolog of NCBI NO: 30696845 NR Description: cytochrome P450 71B10 [Arabidopsis thaliana]
  misc_feature (7)..(494): Homolog of NCBI NO: 13878390 NR Description: Cytochrome P450 71B10
  misc_feature (4)..(499): Homolog of NCBI NO: 15231542 NR Description: cytochrome p450 family [Arabidopsis thaliana]
  misc_feature (6)..(499): Homolog of NCBI NO: 15231541 NR Description: cytochrome P450 71B36 [Arabidopsis thaliana]
  misc_feature (1)..(498): Homolog of NCBI NO: 17644125 NR Description: cytochrome P450-1 [Musa acuminata]
  misc_feature (6)..(499): Homolog of NCBI NO: 25282608 NR Description: cytochrome P-450LXXIA1 [similarity] - avocado

SEQ ID NO: 59091 - protein, 410 aa, Glycine max; identical to SEQ ID NO: 53071
  peptide (1)..(410): Ceres Seq. ID no. 13594211
  misc_feature (1)..(405): Pfam Name: Cytochrome P450 Pfam Description: Cytochrome P450
  misc_feature (1)..(410): Homolog of NCBI NO: 16507125 NR Description: cytochrome P450 [Citrus sinensis]
  misc_feature (1)..(409): Homolog of NCBI NO: 13516748 NR Description: cytochrome P450 [Asparagus officinalis]
  misc_feature (1)..(402): Homolog of NCBI NO: 15235968 NR Description: cytochrome P450 83B1 [Arabidopsis thaliana]
  misc_feature (1)..(405): Homolog of NCBI NO: 28393289 NR Description: putative cytochrome p450 [Arabidopsis thaliana]
  misc_feature (1)..(405): Homolog of NCBI NO: 30696845 NR Description: cytochrome P450 71B10 [Arabidopsis thaliana]
  misc_feature (1)..(405): Homolog of NCBI NO: 13878390 NR Description: Cytochrome P450 71B10
  misc_feature (1)..(410): Homolog of NCBI NO: 15231542 NR Description: cytochrome p450 family [Arabidopsis thaliana]
  misc_feature (1)..(410): Homolog of NCBI NO: 15231541 NR Description: cytochrome P450 71B36 [Arabidopsis thaliana]
  misc_feature (1)..(409): Homolog of NCBI NO: 17644125 NR Description: cytochrome P450-1 [Musa acuminata]
  misc_feature (1)..(410): Homolog of NCBI NO: 25282608 NR Description: cytochrome P-450LXXIA1 [similarity] - avocado

SEQ ID NO: 59092 - protein, 384 aa, Glycine max; identical to SEQ ID NO: 53072
  peptide (1)..(384): Ceres Seq. ID no. 13594212
  misc_feature (1)..(379): Pfam Name: Cytochrome P450 Pfam Description: Cytochrome P450
  misc_feature (1)..(384): Homolog of NCBI NO: 16507125 NR Description: cytochrome P450 [Citrus sinensis]
  misc_feature (1)..(383): Homolog of NCBI NO: 13516748 NR Description: cytochrome P450 [Asparagus officinalis]
  misc_feature (1)..(376): Homolog of NCBI NO: 15235968 NR Description: cytochrome P450 83B1 [Arabidopsis thaliana]
  misc_feature (1)..(379): Homolog of NCBI NO: 28393289 NR Description: putative cytochrome p450 [Arabidopsis thaliana]
  misc_feature (1)..(379): Homolog of NCBI NO: 30696845 NR Description: cytochrome P450 71B10 [Arabidopsis thaliana]
  misc_feature (1)..(379): Homolog of NCBI NO: 13878390 NR Description: Cytochrome P450 71B10
  misc_feature (1)..(384): Homolog of NCBI NO: 15231542 NR Description: cytochrome p450 family [Arabidopsis thaliana]
  misc_feature (1)..(384): Homolog of NCBI NO: 15231541 NR Description: cytochrome P450 71B36 [Arabidopsis thaliana]
  misc_feature (1)..(383): Homolog of NCBI NO: 17644125 NR Description: cytochrome P450-1 [Musa acuminata]
  misc_feature (1)..(384): Homolog of NCBI NO: 25282608 NR Description: cytochrome P-450LXXIA1 [similarity] - avocado

SEQ ID NO: 59093 - DNA, 940 bp, Glycine max
  misc_feature (1)..(940): Ceres Seq. ID no. 14308320
gtactgcttacattgagaaattagattgaaaatcaaattcatctctatccattaatattcaatactcttttttctttttttctggctcctttggcctctgttctgtgttcagtcttcaaccacctcaacacatagacgacgcgccacttgtttttgctccaaaccgccctctgattcccgaacccaatgacttctccgctggtggcggagggcgccgccgtcacggcgttccgatcggtgatgctccgggtgcagcaggcggcggagagatccgggtccaaacccgaccgggtccgggtcgtggcggtttccaagacgaaacccgtcactctgattcaacaactctacgacgccggtcaccgacacttcggcgaaaactacgtccaagaaatcattgaaaaagctcctcagcttcccccagacgttgagtggcatttcattgggcatttgcaaagcaacaaagtcaaaacacttttgggtggagttccaaatctggccatggttgagagtgtggacaatcagaagatagcaaataatcttgaccgtatggtatcaacccttggaagaaatcctctgaaggttttggtgcaagtaaatacaagtggagaagaatccaaatctggtattgatccttccgattgtgttgagcttgcaaaacatgtgaaattgagctgcccaaacctagtgttctctggcctaatgacgataggaatgccagactatacctcaactccacagaactttcagacactatcaaattgcagaactgaagtatgcaaggcacttgaaatgcccgaggaggaatgtgaactgtcaatgggcatgtctggtgattttgagttagcgattgaaatgggtagtaccaatgtaagaattggatccacaatatttggaccgagggagtatgcaaagaaacagtaatagcaagaagttgtaatcc

SEQ ID NO: 59094 - protein, 244 aa, Glycine max
  peptide (1)..(244): Ceres Seq. ID no. 14308321
  misc_feature (13)..(240): Pfam Name: Alanine racemase, N-terminal domain Pfam Description: Alanine racemase, N-terminal domain
  misc_feature (37)..(243): Homolog of NCBI NO: 34879017 NR Description: similar to Proline synthetase associated [Rattus
  misc_feature (97)..(221): Homolog of NCBI NO: 19386824 NR Description: B1147A04.19 [Oryza sativa (japonica
  misc_feature (5)..(243): Homolog of NCBI NO: 16930823 NR Description: proline synthetase co-transcribed [Mus musculus]
  misc_feature (7)..(243): Homolog of NCBI NO: 6005842 NR Description: proline synthetase co-transcribed homolog
  misc_feature (5)..(244): Homolog of NCBI NO: 11359716 NR Description: conserved hypothetical protein [imported] -
  misc_feature (1)..(233): Homolog of NCBI NO: 7445224 NR Description: hypothetical protein F10M23.200 - Arabidopsis
  misc_feature (12)..(243): Homolog of NCBI NO: 18391333 NR Description: Proline synthetase associated protein -related
  misc_feature (12)..(243): Homolog of NCBI NO: 30682530 NR Description: Proline synthetase associated protein -related
  misc_feature (1)..(243): Homolog of NCBI NO: 18416879 NR Description: Proline synthetase associated protein -related
  misc_feature (1)..(243): Homolog of NCBI NO: 14030629 NR Description: AT4g26860/F10M23_200 [Arabidopsis thaliana]
MTSPLVAEGAAVTAFRSVMLRVQQAAERSGSKPDRVRVVAVSKTKPVTLIQQLYDAGHRHFGENYVQEIIEKAPQLPPDVEWHFIGHLQSNKVKTLLGGVPNLAMVESVDNQKIANNLDRMVSTLGRNPLKVLVQVNTSGEESKSGIDPSDCVELAKHVKLSCPNLVFSGLMTIGMPDYTSTPQNFQTLSNCRTEVCKALEMPEEECELSMGMSGDFELAIEMGSTNVRIGSTIFGPREYAKKQ

SEQ ID NO: 59095 - protein, 226 aa, Glycine max
  peptide (1)..(226): Ceres Seq. ID no. 14308322
  misc_feature (1)..(222): Pfam Name: Alanine racemase, N-terminal domain Pfam Description: Alanine racemase, N-terminal domain
  misc_feature (19)..(225): Homolog of NCBI NO: 34879017 NR Description: similar to Proline synthetase associated [Rattus
  misc_feature (79)..(203): Homolog of NCBI NO: 19386824 NR Description: B1147A04.19 [Oryza sativa (japonica
  misc_feature (1)..(225): Homolog of NCBI NO: 16930823 NR Description: proline synthetase co-transcribed [Mus musculus]
  misc_feature (1)..(225): Homolog of NCBI NO: 6005842 NR Description: proline synthetase co-transcribed homolog
  misc_feature (1)..(226): Homolog of NCBI NO: 11359716 NR Description: conserved hypothetical protein [imported] -
  misc_feature (1)..(215): Homolog of NCBI NO: 7445224 NR Description: hypothetical protein F10M23.200 - Arabidopsis
  misc_feature (1)..(225): Homolog of NCBI NO: 18391333 NR Description: Proline synthetase associated protein -related
  misc_feature (1)..(225): Homolog of NCBI NO: 30682530 NR Description: Proline synthetase associated protein -related
  misc_feature (1)..(225): Homolog of NCBI NO: 18416879 NR Description: Proline synthetase associated protein -related
  misc_feature (1)..(225): Homolog of NCBI NO: 14030629 NR Description: AT4g26860/F10M23_200 [Arabidopsis thaliana]
MLRVQQAAERSGSKPDRVRVVAVSKTKPVTLIQQLYDAGHRHFGENYVQEIIEKAPQLPPDVEWHFIGHLQSNKVKTLLGGVPNLAMVESVDNQKIANNLDRMVSTLGRNPLKVLVQVNTSGEESKSGIDPSDCVELAKHVKLSCPNLVFSGLMTIGMPDYTSTPQNFQTLSNCRTEVCKALEMPEEECELSMGMSGDFELAIEMGSTNVRIGSTIFGPREYAKKQ

SEQ ID NO: 59096 - protein, 140 aa, Glycine max
  peptide (1)..(140): Ceres Seq. ID no. 14308323
  misc_feature (1)..(136): Pfam Name: Alanine racemase, N-terminal domain Pfam Description: Alanine racemase, N-terminal domain
  misc_feature (1)..(139): Homolog of NCBI NO: 34879017 NR Description: similar to Proline synthetase associated [Rattus
  misc_feature (1)..(117): Homolog of NCBI NO: 19386824 NR Description: B1147A04.19 [Oryza sativa (japonica
  misc_feature (1)..(139): Homolog of NCBI NO: 16930823 NR Description: proline synthetase co-transcribed [Mus musculus]
  misc_feature (1)..(139): Homolog of NCBI NO: 6005842 NR Description: proline synthetase co-transcribed homolog
  misc_feature (1)..(140): Homolog of NCBI NO: 11359716 NR Description: conserved hypothetical protein [imported] -
  misc_feature (1)..(129): Homolog of NCBI NO: 7445224 NR Description: hypothetical protein F10M23.200 - Arabidopsis
  misc_feature (1)..(139): Homolog of NCBI NO: 18391333 NR Description: Proline synthetase associated protein -related
  misc_feature (1)..(139): Homolog of NCBI NO: 30682530 NR Description: Proline synthetase associated protein -related
  misc_feature (1)..(139): Homolog of NCBI NO: 18416879 NR Description: Proline synthetase associated protein -related
  misc_feature (1)..(139): Homolog of NCBI NO: 14030629 NR Description: AT4g26860/F10M23_200 [Arabidopsis thaliana]
MVESVDNQKIANNLDRMVSTLGRNPLKVLVQVNTSGEESKSGIDPSDCVELAKHVKLSCPNLVFSGLMTIGMPDYTSTPQNFQTLSNCRTEVCKALEMPEEECELSMGMSGDFELAIEMGSTNVRIGSTIFGPREYAKKQ

SEQ ID NO: 59097 - DNA, 1861 bp, Glycine max
  misc_feature (1)..(1861): Ceres Seq. ID no. 14310527
acaattcctcaaatcacagcgaggaagaaacatcattttctcatgatagcagtatggaactgacagaaaatactagtgatgatccaatgccagaactgcacaatcctactacgctcaaagaaagatgtcttgagtctcttgattttcctggaaccgagacagtcaagaatatgcctgcctttggagctactgaagaacacttgagtggaaagcaaagtttagctggcagttatgataatgaggagaagatatcaagtgacagtgataatatttatcttgtagagatcaaagatactacctcaagttccttaaatgagccagttgaaattataagaagcagtcatgaggaggctccaaccaatgaaacagtcaatgatgttccagaagatttgctatccagtgtgaatacagaaaatccagatatcaaatctgagtcacctggaagagatgttgaaaccaagaatctgaatggtgataatggggaaaaaatttccatgtccaaaagtttagtcctagaaggtttagttagatcactcagatctaatttgattggttcaggagcacctgtaaacgaaccaactgccaacaacagaaaagaaggaattgaaaatgttaaacaggaaactgagactcttgaagagttccctacaaaggaacaatctgaagctcatattagtgctgttgtagaacctgagacccctgtagagaaacagaataacacaggattgtggtacttggtgtataagcacatggtatcaaatatggatgaaaacaattccgagtcactaattgatggggcagatgaaaaagagtcagggtttgatgggagcagaacaagaggagcttccttctctcatgaaagtacacccgtgactgatgaagagatgaaatttaaggaccatgtcgtagctgatccagaagttgcacgccaacagaatgaagccatcaagatggtagaagaagcaattgattcaattcttccagatgatcaggatgacttatcagacaaggaatcactcactgacagcacaatttcagacaactccaaacaatccaacagaactgaaagagtatacagtgaaggcctgaaccaaaaagaagaacagatggaatccgggaacggaatgatccaaaaacaagaagaatcagcaccaaaggagcaaaacaaaacaaaccagaaaatgtctacaagctggagcaatcttaaaaaagtgatcctgcttaggagattcatcaagtcattggaaaaagtaaggaaattcaacccaagagggcctagatatctacctctagagcctgattcagaagctgaaaaagttaacttaaggcatcaagacatggaagaacgaaaaggtacggaagaatggatgcttgattatgcacttcgacaggttgtttccaaattaacccctgctaggaaaagaaaagtggagctgctggtggaagcttttgaaacagtcatgccaactataaaaacttgaaactgggcaaactggcaaagagtggaatagctttgtatgcaaaaaaaattcaagctgaaaggtcaacaaggagatgtatatgatcataatcatttgggatgtcagcagttttttgttttgtggaaactgtgtctggtgtcatatattttttatagtctcttaggaggaaacttagagtatagaatgtttcatgattcagcaacaacaaaattcaatatagggatatttccccctttttttaacctttcatatctctcttggtgttctcaggtggatgttttgtatgaaagatttgcattacaaataccatagacaatctttaaatgtcatgatgtatgtcttttgtgtggaacataatagaatggcctaatccgtattgc

SEQ ID NO: 59098 - protein, 492 aa, Glycine max
  peptide (1)..(492): Ceres Seq. ID no. 14310528
  misc_feature (284)..(485): Homolog of NCBI NO: 33945880 NR Description: hypothetical protein [Lotus corniculatus var.
  misc_feature (284)..(487): Homolog of NCBI NO: 25956269 NR Description: unnamed protein product [Lotus corniculatus var.
  misc_feature (300)..(486): Homolog of NCBI NO: 15237600 NR Description: Calmodulin-binding protein [Arabidopsis thaliana]
  misc_feature (300)..(486): Homolog of NCBI NO: 24637243 NR Description: pathogen-induced calmodulin-binding protein
  misc_feature (290)..(488): Homolog of NCBI NO: 15224955 NR Description: Calmodulin-binding protein [Arabidopsis thaliana]
  misc_feature (316)..(489): Homolog of NCBI NO: 15237600 NR Description: Calmodulin-binding protein [Arabidopsis thaliana]
  misc_feature (316)..(489): Homolog of NCBI NO: 24637243 NR Description: pathogen-induced calmodulin-binding protein
  misc_feature (75)..(488): Homolog of NCBI NO: 17933110 NR Description: PNCBP [Solanum tuberosum]
  misc_feature (97)..(488): Homolog of NCBI NO: 17933110 NR Description: PNCBP [Solanum tuberosum]
  misc_feature (316)..(491): Homolog of NCBI NO: 24637279 NR Description: pathogen-induced calmodulin-binding protein
NSSNHSEEETSFSHDSSMELTENTSDDPMPELHNPTTLKERCLESLDFPGTETVKNMPAFGATEEHLSGKQSLAGSYDNEEKISSDSDNIYLVEIKDTTSSSLNEPVEIIRSSHEEAPTNETVNDVPEDLLSSVNTENPDIKSESPGRDVETKNLNGDNGEKISMSKSLVLEGLVRSLRSNLIGSGAPVNEPTANNRKEGIENVKQETETLEEFPTKEQSEAHISAVVEPETPVEKQNNTGLWYLVYKHMVSNMDENNSESLIDGADEKESGFDGSRTRGASFSHESTPVTDEEMKFKDHVVADPEVARQQNEAIKMVEEAIDSILPDDQDDLSDKESLTDSTISDNSKQSNRTERVYSEGLNQKEEQMESGNGMIQKQEESAPKEQNKTNQKMSTSWSNLKKVILLRRFIKSLEKVRKFNPRGPRYLPLEPDSEAEKVNLRHQDMEERKGTEEWMLDYALRQVVSKLTPARKRKVELLVEAFETVMPTIKT

SEQ ID NO: 59099 - protein, 475 aa, Glycine max
  peptide (1)..(475): Ceres Seq. ID no. 14310529
  misc_feature (267)..(468): Homolog of NCBI NO: 33945880 NR Description: hypothetical protein [Lotus corniculatus var.
  misc_feature (267)..(470): Homolog of NCBI NO: 25956269 NR Description: unnamed protein product [Lotus corniculatus var.
  misc_feature (283)..(469): Homolog of NCBI NO: 15237600 NR Description: Calmodulin-binding protein [Arabidopsis thaliana]
  misc_feature (283)..(469): Homolog of NCBI NO: 24637243 NR Description: pathogen-induced calmodulin-binding protein
  misc_feature (273)..(471): Homolog of NCBI NO: 15224955 NR Description: Calmodulin-binding protein [Arabidopsis thaliana]
  misc_feature (299)..(472): Homolog of NCBI NO: 15237600 NR Description: Calmodulin-binding protein [Arabidopsis thaliana]
  misc_feature (299)..(472): Homolog of NCBI NO: 24637243 NR Description: pathogen-induced calmodulin-binding protein
  misc_feature (58)..(471): Homolog of NCBI NO: 17933110 NR Description: PNCBP [Solanum tuberosum]
  misc_feature (80)..(471): Homolog of NCBI NO: 17933110 NR Description: PNCBP [Solanum tuberosum]
  misc_feature (299)..(474): Homolog of NCBI NO: 24637279 NR Description: pathogen-induced calmodulin-binding protein
MELTENTSDDPMPELHNPTTLKERCLESLDFPGTETVKNMPAFGATEEHLSGKQSLAGSYDNEEKISSDSDNIYLVEIKDTTSSSLNEPVEIIRSSHEEAPTNETVNDVPEDLLSSVNTENPDIKSESPGRDVETKNLNGDNGEKISMSKSLVLEGLVRSLRSNLIGSGAPVNEPTANNRKEGIENVKQETETLEEFPTKEQSEAHISAVVEPETPVEKQNNTGLWYLVYKHMVSNMDENNSESLIDGADEKESGFDGSRTRGASFSHESTPVTDEEMKFKDHVVADPEVARQQNEAIKMVEEAIDSILPDDQDDLSDKESLTDSTISDNSKQSNRTERVYSEGLNQKEEQMESGNGMIQKQEESAPKEQNKTNQKMSTSWSNLKKVILLRRFIKSLEKVRKFNPRGPRYLPLEPDSEAEKVNLRHQDMEERKGTEEWMLDYALRQVVSKLTPARKRKVELLVEAFETVMPTIKT

SEQ ID NO: 59100 - protein, 464 aa, Glycine max
  peptide (1)..(464): Ceres Seq. ID no. 14310530
  misc_feature (256)..(457): Homolog of NCBI NO: 33945880 NR Description: hypothetical protein [Lotus corniculatus var.
  misc_feature (256)..(459): Homolog of NCBI NO: 25956269 NR Description: unnamed protein product [Lotus corniculatus var.
  misc_feature (272)..(458): Homolog of NCBI NO: 15237600 NR Description: Calmodulin-binding protein [Arabidopsis thaliana]
  misc_feature (272)..(458): Homolog of NCBI NO: 24637243 NR Description: pathogen-induced calmodulin-binding protein
  misc_feature (262)..(460): Homolog of NCBI NO: 15224955 NR Description: Calmodulin-binding protein [Arabidopsis thaliana]
  misc_feature (288)..(461): Homolog of NCBI NO: 15237600 NR Description: Calmodulin-binding protein [Arabidopsis thaliana]
  misc_feature (288)..(461): Homolog of NCBI NO: 24637243 NR Description: pathogen-induced calmodulin-binding protein
  misc_feature (47)..(460): Homolog of NCBI NO: 17933110 NR Description: PNCBP [Solanum tuberosum]
  misc_feature (69)..(460): Homolog of NCBI NO: 17933110 NR Description: PNCBP [Solanum tuberosum]
  misc_feature (288)..(463): Homolog of NCBI NO: 24637279 NR Description: pathogen-induced calmodulin-binding protein
MPELHNPTTLKERCLESLDFPGTETVKNMPAFGATEEHLSGKQSLAGSYDNEEKISSDSDNIYLVEIKDTTSSSLNEPVEIIRSSHEEAPTNETVNDVPEDLLSSVNTENPDIKSESPGRDVETKNLNGDNGEKISMSKSLVLEGLVRSLRSNLIGSGAPVNEPTANNRKEGIENVKQETETLEEFPTKEQSEAHISAVVEPETPVEKQNNTGLWYLVYKHMVSNMDENNSESLIDGADEKESGFDGSRTRGASFSHESTPVTDEEMKFKDHVVADPEVARQQNEAIKMVEEAIDSILPDDQDDLSDKESLTDSTISDNSKQSNRTERVYSEGLNQKEEQMESGNGMIQKQEESAPKEQNKTNQKMSTSWSNLKKVILLRRFIKSLEKVRKFNPRGPRYLPLEPDSEAEKVNLRHQDMEERKGTEEWMLDYALRQVVSKLTPARKRKVELLVEAFETVMPTIKT

SEQ ID NO: 59101 - DNA, 1271 bp, Glycine max
  misc_feature (1)..(1271): Ceres Seq. ID no. 14310543
attttttcttcatcatccaccactttatttgtcacttgctttcatgcaattaacacttctaccaccttttttcattttctcactctcttcactaaaatgagtgacacacaccaacctttcatgtccgtacaaccacccatgaagctccacaaccacccatttaacccacaagcctcaagctcaaattttgacggcgacccaccatgcaaaaccgccggaaaaacaaaaccacctcacacgaagctcctccgggtcattctcaccgaccacgacgccaccgattctgactcctccggcgacgacgaagacccaaaaaacacaaaaaaacacaaaaaggtgaaaagacaaattacccacatcaccataaaccttccctttttctcaaaatccccaactccaacatcaacaccttcttcttcttcgcttgacccgacccgttcgacccgacccaagaaacgactcggcgtccctcgccgccggaacaagttccgcggcgtccggcagcgaccatggggacggtggacggcagaaatccgtgacccgactcagagaaaacgggtctggctcggaaccttcgacacggcggaggaagccgccgccgtgtacgacgaggccgcggtgaagctcaagggccctaacgccgtcaccaacttccccctctccgccgccggaaacacggaacatgatacccctccgccggagacggtgttctccggcgaaggtctttcatctccgacgtccgttctcacttactgcgacggagactcgacgccgttcgacggttttcgttacggcgaggtcgacgcgttcgggtttgagtttgacatcgacgcgccgtttagtttaacggccgttaacttaggggtgctgagtcagcggttcgggaaggaagagtttggcgagtttgacccgaacgagttcttgacgtggccgagttaaggggcttctttgtcatttcgcgaaatatccagggactggtttagtaattctactaaagttctttttgtcgtattgttttgtcctacgtggaattccaaaactaccctcgtgactaaagagtttttgtgcagcttagaagagtgttagagtgctagagagcaatagagtgagaacaatttcgtaatggaagtggaagagaattttgtcctatgttaatttgtgtaattaagccttaattgtattgttatggagaaagaggatatgatggaaagtattagaaggattctattgtagtttcttatataattttataaagtaaaaatgttagtatt

SEQ ID NO: 59102 - protein, 312 aa, Glycine max
  peptide (1)..(312): Ceres Seq. ID no. 14310544
  misc_feature (160)..(221): Pfam Name: AP2 domain Pfam Description: AP2 domain
  misc_feature (81)..(259): Homolog of NCBI NO: 15225959 NR Description: AP2 domain transcription factor, putative
  misc_feature (81)..(257): Homolog of NCBI NO: 15233169 NR Description: AP2 domain transcription factor, putative
  misc_feature (78)..(239): Homolog of NCBI NO: 34898320 NR Description: Similar to Nicotiana tabacum mRNA for ERF1,
  misc_feature (70)..(257): Homolog of NCBI NO: 15237053 NR Description: AP2 domain transcription factor, putative
  misc_feature (75)..(236): Homolog of NCBI NO: 15236595 NR Description: AP2 domain transcription factor, putative
  misc_feature (75)..(236): Homolog of NCBI NO: 22655200 NR Description: putative Ap2 domain protein [Arabidopsis thaliana]
  misc_feature (81)..(251): Homolog of NCBI NO: 15234337 NR Description: putative protein; protein id: At4g27950.1
  misc_feature (81)..(260): Homolog of NCBI NO: 15238705 NR Description: putative protein; protein id: At5g53290.1
  misc_feature (79)..(307): Homolog of NCBI NO: 7489208 NR Description: Tsi1 protein - common tobacco
  misc_feature (93)..(307): Homolog of NCBI NO: 7531181 NR Description: PATHOGENESIS-RELATED GENES TRANSCRIPTIONAL
IFSSSSTTLFVTCFHAINTSTTFFHFLTLFTKMSDTHQPFMSVQPPMKLHNHPFNPQASSSNFDGDPPCKTAGKTKPPHTKLLRVILTDHDATDSDSSGDDEDPKNTKKHKKVKRQITHITINLPFFSKSPTPTSTPSSSSLDPTRSTRPKKRLGVPRRRNKFRGVRQRPWGRWTAEIRDPTQRKRVWLGTFDTAEEAAAVYDEAAVKLKGPNAVTNFPLSAAGNTEHDTPPPETVFSGEGLSSPTSVLTYCDGDSTPFDGFRYGEVDAFGFEFDIDAPFSLTAVNLGVLSQRFGKEEFGEFDPNEFLTWPS

SEQ ID NO: 59103 - protein, 280 aa, Glycine max
  peptide (1)..(280): Ceres Seq. ID no. 14310545
  misc_feature (128)..(189): Pfam Name: AP2 domain Pfam Description: AP2 domain
  misc_feature (49)..(227): Homolog of NCBI NO: 15225959 NR Description: AP2 domain transcription factor, putative
  misc_feature (49)..(225): Homolog of NCBI NO: 15233169 NR Description: AP2 domain transcription factor, putative
  misc_feature (46)..(207): Homolog of NCBI NO: 34898320 NR Description: Similar to Nicotiana tabacum mRNA for ERF1,
  misc_feature (38)..(225): Homolog of NCBI NO: 15237053 NR Description: AP2 domain transcription factor, putative
  misc_feature (43)..(204): Homolog of NCBI NO: 15236595 NR Description: AP2 domain transcription factor, putative
  misc_feature (43)..(204): Homolog of NCBI NO: 22655200 NR Description: putative Ap2 domain protein [Arabidopsis thaliana]
  misc_feature (49)..(219): Homolog of NCBI NO: 15234337 NR Description: putative protein; protein id: At4g27950.1
  misc_feature (49)..(228): Homolog of NCBI NO: 15238705 NR Description: putative protein; protein id: At5g53290.1
  misc_feature (47)..(275): Homolog of NCBI NO: 7489208 NR Description: Tsi1 protein - common tobacco
  misc_feature (61)..(275): Homolog of NCBI NO: 7531181 NR Description: PATHOGENESIS-RELATED GENES TRANSCRIPTIONAL
MSDTHQPFMSVQPPMKLHNHPFNPQASSSNFDGDPPCKTAGKTKPPHTKLLRVILTDHDATDSDSSGDDEDPKNTKKHKKVKRQITHITINLPFFSKSPTPTSTPSSSSLDPTRSTRPKKRLGVPRRRNKFRGVRQRPWGRWTAEIRDPTQRKRVWLGTFDTAEEAAAVYDEAAVKLKGPNAVTNFPLSAAGNTEHDTPPPETVFSGEGLSSPTSVLTYCDGDSTPFDGFRYGEVDAFGFEFDIDAPFSLTAVNLGVLSQRFGKEEFGEFDPNEFLTWPS

SEQ ID NO: 59104 - protein, 272 aa, Glycine max
  peptide (1)..(272): Ceres Seq. ID no. 14310546
  misc_feature (120)..(181): Pfam Name: AP2 domain Pfam Description: AP2 domain
  misc_feature (41)..(219): Homolog of NCBI NO: 15225959 NR Description: AP2 domain transcription factor, putative
  misc_feature (41)..(217): Homolog of NCBI NO: 15233169 NR Description: AP2 domain transcription factor, putative
  misc_feature (38)..(199): Homolog of NCBI NO: 34898320 NR Description: Similar to Nicotiana tabacum mRNA for ERF1,
  misc_feature (30)..(217): Homolog of NCBI NO: 15237053 NR Description: AP2 domain transcription factor, putative
  misc_feature (35)..(196): Homolog of NCBI NO: 15236595 NR Description: AP2 domain transcription factor, putative
  misc_feature (35)..(196): Homolog of NCBI NO: 22655200 NR Description: putative Ap2 domain protein [Arabidopsis thaliana]
  misc_feature (41)..(211): Homolog of NCBI NO: 15234337 NR Description: putative protein; protein id: At4g27950.1
  misc_feature (41)..(220): Homolog of NCBI NO: 15238705 NR Description: putative protein; protein id: At5g53290.1
  misc_feature (39)..(267): Homolog of NCBI NO: 7489208 NR Description: Tsi1 protein - common tobacco
  misc_feature (53)..(267): Homolog of NCBI NO: 7531181 NR Description: PATHOGENESIS-RELATED GENES TRANSCRIPTIONAL
MSVQPPMKLHNHPFNPQASSSNFDGDPPCKTAGKTKPPHTKLLRVILTDHDATDSDSSGDDEDPKNTKKHKKVKRQITHITINLPFFSKSPTPTSTPSSSSLDPTRSTRPKKRLGVPRRRNKFRGVRQRPWGRWTAEIRDPTQRKRVWLGTFDTAEEAAAVYDEAAVKLKGPNAVTNFPLSAAGNTEHDTPPPETVFSGEGLSSPTSVLTYCDGDSTPFDGFRYGEVDAFGFEFDIDAPFSLTAVNLGVLSQRFGKEEFGEFDPNEFLTWPS

SEQ ID NO: 59105 - DNA, 1749 bp, Glycine max
  misc_feature (1)..(1749): Ceres Seq. ID no. 15177963
acaataacaactcgataagaacacaataaactccttcctcatttctcatttctcattcaacaccatggcaagaaaaaccaagtccattttcttggccttcttactactatgctctttctcactgggggtagtggtagtagcccaagaggaggcaatagcaaaatccgaaagtgaagcattaggggaaccagagaaaagagaaacacttgaaatcatcattggtggaggtggttcacctgctccttctccctctccccctacatattgcccacctcctccaccaaaaccactgagccggttggagaaagcaaaacgtgttcttctcaaattcaaaaccacaatcgacgaccccaattgttacacgcaaaactggagccaggacacagacgcgtgtaaattcaatggggtacgatgcgccaatttcccagacgatcagcagcgagcagtagctggacttgacctaaacggagcaaaactcgccactaaaaacggtggcaatttgcccctcacgggtctcctcgacagcatacccgagttaacattcttccacgttaactccaacaacttctccttcgtcggtggcttccccaacaacattaccaggttccgtttcttcttcgagcttgatctcagtaacaacaaagtcagtggcaagttcccaacgcaagcaattcagaacaaccagttagtcttcctggacctcaggttcaaccagctcaccgggcccattgacccgaaactcttcgagagggacctggacgtgatttttgtgaacaacaacaagttcacggggtacctcccggagaatttcgggtccacgccggcccggtacctcacgtttgcccacaacagcctctcgggctcgctccctaagagcgtgggctacgcgccgaacctcaccgaggttctcttcttgaagaaccagttcgaagggtgtctgcccttcgaaatcggttacctcaagaaggccgtagtgtttgatataagtgaaaatctcttgaccggtcccatcccgctctccttcggatgcctgaagaaaattcaatttctcaatttggcgcacaacaagctctacggctgtgttcccgacaacctttgccaaattccttctatccgcaacaatgggaatctctctttggcgaacaattatttcaacgaaattggaccttcgtgttggagtttgataaaatccaaggttttggatgtgtcaggaaactgcattccggggcttcctaaccaaaagtctcccaaagaatgctaccagttttacaaaacaaagaaaacatgtccgaacccgaattcattttactacgttccgtgcaaatcgtactgggggaggcagagcaagcccactagtccaccttctgagccagtgacttacaagactctcaaaccacatcgtctcagattgtgatcagatatcataggatagctcatattagtcccttgtgcaggcgggactttgcctttgtgttgggtttcattttttatttttctcacaacaatcctctggtcagatagaaacctctcctctgatgcgttgattcaaatcctgttcactggtttcatattattactgtggttatgtttgtatgtttttctttcatgattagctgttgttattttgtattttgtatgccccgtgaataagcgctgtcgtggagttgggcatcttgactattacaagtttggtgtcactcaaatgtaatttcccaagttgtcgaataaaattggtactatatttggacg

SEQ ID NO: 59106 - protein, 449 aa, Glycine max
  peptide (1)..(449): Ceres Seq. ID no. 15177964
  misc_feature (79)..(436): Homolog of NCBI NO: 15220780 NR Description: leucine-rich repeat extensin family [Arabidopsis
  misc_feature (79)..(436): Homolog of NCBI NO: 7484956 NR Description: extensin homolog F24O1.18 - Arabidopsis thaliana
  misc_feature (78)..(433): Homolog of NCBI NO: 15230120 NR Description: leucine-rich repeat extensin family [Arabidopsis
  misc_feature (78)..(436): Homolog of NCBI NO: 15233976 NR Description: leucine-rich repeat extensin family [Arabidopsis
  misc_feature (78)..(436): Homolog of NCBI NO: 15235668 NR Description: leucine-rich repeat extensin family [Arabidopsis
  misc_feature (55)..(419): Homolog of NCBI NO: 32488397 NR Description: OSJNBa0043A12.27 [Oryza sativa (japonica
  misc_feature (78)..(415): Homolog of NCBI NO: 30680322 NR Description: extensin-related protein [Arabidopsis thaliana]
  misc_feature (53)..(441): Homolog of NCBI NO: 32490271 NR Description: OSJNBb0116K07.13 [Oryza sativa (japonica
  misc_feature (60)..(448): Homolog of NCBI NO: 15230349 NR Description: leucine rich repeat protein family [Arabidopsis
  misc_feature (58)..(448): Homolog of NCBI NO: 15222811 NR Description: leucine rich repeat protein family [Arabidopsis
MARKTKSIFLAFLLLCSFSLGVVVVAQEEAIAKSESEALGEPEKRETLEIIIGGGGSPAPSPSPPTYCPPPPPKPLSRLEKAKRVLLKFKTTIDDPNCYTQNWSQDTDACKFNGVRCANFPDDQQRAVAGLDLNGAKLATKNGGNLPLTGLLDSIPELTFFHVNSNNFSFVGGFPNNITRFRFFFELDLSNNKVSGKFPTQAIQNNQLVFLDLRFNQLTGPIDPKLFERDLDVIFVNNNKFTGYLPENFGSTPARYLTFAHNSLSGSLPKSVGYAPNLTEVLFLKNQFEGCLPFEIGYLKKAVVFDISENLLTGPIPLSFGCLKKIQFLNLAHNKLYGCVPDNLCQIPSIRNNGNLSLANNYFNEIGPSCWSLIKSKVLDVSGNCIPGLPNQKSPKECYQFYKTKKTCPNPNSFYYVPCKSYWGRQSKPTSPPSEPVTYKTLKPHRLRL

SEQ ID NO: 59107 - DNA, 985 bp, Glycine max
  misc_feature (1)..(985): Ceres Seq. ID no. 12383917
cagctacgtaggccccccccccagtagcatcgacaaccaaatgtttgtaccaaacatctgcttaccagcctgaaaaaaacaaccttgtttgtacctctcaacaagttgtcttacataatactgaagatacgacggcaacaatgctggcaccacctaaactagacagacataaagattctgcagctccagacttccatctccattgtgaaaaccataactgtattgctgacaacatgaagcaccagctgccacctgatcatgatgctgaatctataaagaaaatggccactgctgctccacattgtggatcatcaaatgcggttgaagtgctagttgaaggtaatgttggaaaccacagtatcaatagaagtgcctcaggcagcaacaatggaagcaatggacaaaatgggagcagcacggcggttaatgctggagggacaaacatgaaaagcaacaatggactcactgggaatagtggcagtggtgatgctagcggaagtgtaagtgccaacagagtagatcaaaacaagacttctcaaagggaagcggccttaactaaatttcgccaaaagagaaaagagagaagggagaggtgctttcataaaaaggttcgatatcagagcagaaagagattagctgaacaacgacctcgatttcgtggacaatttgttcgacagtcctctaacgaaaatgcaagtgaggcaacaacagatagctgattcagagcatttgccacaatggcataatgatggggatatgcgagaaaaggtcgaggagtctgcatgtagaatttgggaattgttctgtgtgtttgtgttaaaaaggtataatgactctggttattccaacttgttcatttgaaacctgaatcaatttatgtggtgagagattgttatatgctgattgatgctcggataacttatagcgactcaataatttcaattacttgtcgatcttgtgcttgaagaatcaaatgtgttagttc

SEQ ID NO: 59108 - protein, 192 aa, Glycine max
  peptide (1)..(192): Ceres Seq. ID no. 12383918
  misc_feature (139)..(181): Pfam Name: CCT motif Pfam Description: CCT motif
  misc_feature (120)..(185): Homolog of NCBI NO: 18420797 NR Description: putative protein
  misc_feature (120)..(185): Homolog of NCBI NO: 9758535 NR Description: contains similarity to two-component response
  misc_feature (69)..(187): Homolog of NCBI NO: 18424319 NR Description: pseudo-response regulator - like
  misc_feature (85)..(186): Homolog of NCBI NO: 18407171 NR Description: expressed protein
  misc_feature (89)..(187): Homolog of NCBI NO: 28193631 NR Description: timing of CAB expression 1-like protein
  misc_feature (85)..(186): Homolog of NCBI NO: 20466420 NR Description: unknown protein [Arabidopsis thaliana]
  misc_feature (50)..(187): Homolog of NCBI NO: 34394035 NR Description: putative pseudo-response regulator
  misc_feature (34)..(191): Homolog of NCBI NO: 24796813 NR Description: putative pseudo-response regulator
  misc_feature (1)..(181): Homolog of NCBI NO: 18414032 NR Description: putative protein
  misc_feature (1)..(181): Homolog of NCBI NO: 11357905 NR Description: hypothetical protein F9G14.120 - Arabidopsis
MLAPPKLDRHKDSAAPDFHLHCENHNCIADNMKHQLPPDHDAESIKKMATAAPHCGSSNAVEVLVEGNVGNHSINRSASGSNNGSNGQNGSSTAVNAGGTNMKSNNGLTGNSGSGDASGSVSANRVDQNKTSQREAALTKFRQKRKERRERCFHKKVRYQSRKRLAEQRPRFRGQFVRQSSNENASEATTDS

SEQ ID NO: 59109 - protein, 161 aa, Glycine max
  peptide (1)..(161): Ceres Seq. ID no. 12383919
  misc_feature (108)..(150): Pfam Name: CCT motif Pfam Description: CCT motif
  misc_feature (89)..(154): Homolog of NCBI NO: 18420797 NR Description: putative protein
  misc_feature (89)..(154): Homolog of NCBI NO: 9758535 NR Description: contains similarity to two-component response
  misc_feature (38)..(156): Homolog of NCBI NO: 18424319 NR Description: pseudo-response regulator - like
  misc_feature (54)..(155): Homolog of NCBI NO: 18407171 NR Description: expressed protein
  misc_feature (58)..(156): Homolog of NCBI NO: 28193631 NR Description: timing of CAB expression 1-like protein
  misc_feature (54)..(155): Homolog of NCBI NO: 20466420 NR Description: unknown protein [Arabidopsis thaliana]
  misc_feature (19)..(156): Homolog of NCBI NO: 34394035 NR Description: putative pseudo-response regulator
  misc_feature (3)..(160): Homolog of NCBI NO: 24796813 NR Description: putative pseudo-response regulator
  misc_feature (1)..(150): Homolog of NCBI NO: 18414032 NR Description: putative protein
  misc_feature (1)..(150): Homolog of NCBI NO: 11357905 NR Description: hypothetical protein F9G14.120 - Arabidopsis
MKHQLPPDHDAESIKKMATAAPHCGSSNAVEVLVEGNVGNHSINRSASGSNNGSNGQNGSSTAVNAGGTNMKSNNGLTGNSGSGDASGSVSANRVDQNKTSQREAALTKFRQKRKERRERCFHKKVRYQSRKRLAEQRPRFRGQFVRQSSNENASEATTDS

SEQ ID NO: 59110 - protein, 145 aa, Glycine max
  peptide (1)..(145): Ceres Seq. ID no. 12383920
  misc_feature (92)..(134): Pfam Name: CCT motif Pfam Description: CCT motif
  misc_feature (73)..(138): Homolog of NCBI NO: 18420797 NR Description: putative protein
  misc_feature (73)..(138): Homolog of NCBI NO: 9758535 NR Description: contains similarity to two-component response
  misc_feature (22)..(140): Homolog of NCBI NO: 18424319 NR Description: pseudo-response regulator - like
  misc_feature (38)..(139): Homolog of NCBI NO: 18407171 NR Description: expressed protein
  misc_feature (42)..(140): Homolog of NCBI NO: 28193631 NR Description: timing of CAB expression 1-like protein
  misc_feature (38)..(139): Homolog of NCBI NO: 20466420 NR Description: unknown protein [Arabidopsis thaliana]
  misc_feature (3)..(140): Homolog of NCBI NO: 34394035 NR Description: putative pseudo-response regulator
  misc_feature (1)..(144): Homolog of NCBI NO: 24796813 NR Description: putative pseudo-response regulator
  misc_feature (1)..(134): Homolog of NCBI NO: 18414032 NR Description: putative protein
  misc_feature (1)..(134): Homolog of NCBI NO: 11357905 NR Description: hypothetical protein F9G14.120 - Arabidopsis
MATAAPHCGSSNAVEVLVEGNVGNHSINRSASGSNNGSNGQNGSSTAVNAGGTNMKSNNGLTGNSGSGDASGSVSANRVDQNKTSQREAALTKFRQKRKERRERCFHKKVRYQSRKRLAEQRPRFRGQFVRQSSNENASEATTDS

SEQ ID NO: 59111 - DNA, 1437 bp, Glycine max
  misc_feature (1)..(1437): Ceres Seq. ID no. 15172464
gcaagacgttttaggatatccaagggaaagtgaatcccaactctctcgagagccacgaaaccagaacttcgagtgactcaacctcaaaaaagctaaatcctttgatgaagaaaaagcagcagaaaaagaccgaagaatctacaacagtttcttgatccctcttatagcctttgagcattgaaagggttttcctcaaattgccatgatttgattcctcaacaccccacacacacgtagttaaaatgggttttactaggaaacccatgtttcctgtgttgctggttttgttcatcacaagtcttcttgagccgccccatgttgcagaatctacttcttctgattactccactttggtctacaagggctgctcaaaggagcctttcacagatcccaatggggtgtactctcaggcactttcagcactctttggctcattggtttcacaatccaccaaagccaagttctacaaaaccacttctggctctggccagaacaccataactggcctcttccaatgcagaggggatctcaccaattctgattgctacaactgtgtcagcaggctcccagttctgtgtgacaaactttgtggcaaaaccactgctgccagagtccaacttctaggatgttatattctctatgaggttgcagggttctcccaaatctcaggtatgcagatgttgtacaagacctgtggggcaacaaatgctgctgggagggggtttgaagagaggagggacactgctttctcagtgatggaaaatggggtggttagtggccatggcttctacactaccagctaccagtccttgtatgtcatggggcagtgtgagggagatgttggtgactcagattgtggggagtgtgtgaagaatgctgtgcagagagctcaggttgaatgcggtagctctatttcaggacaagtgtttttgcacaagtgcttcattagttatagctattacccaaatggggttccttctagatcatcttcttcatcatcagcttcatactcttcatcttcttcagggcaaaatccagggaaaacagctgctataatattaggaggtgcagttgcggtggcttttctggttatattgttgctatttgcaaggagtttgaagaagaaacatgatgattattgacagcagaaaatgaattctgagaaggcaaaattattctttgtgatgcattgtttttacaagattagttgatggatgaggggtggaaaatggaagttttgtggtaaatagagtttttgcttgatgcagaaacaatactacaggatggttcactgtaatgattgttgtagctaggtagttaagattttgttgttgggaagagcaatataattagaacctgaaagtgagattttttttctgactagggtgtaactgtaaattacccaacagaatgaatgtttgtcaaaattttgggtcc

SEQ ID NO: 59112 - protein, 299 aa, Glycine max
  peptide (1)..(299): Ceres Seq. ID no. 15172465
  misc_feature (86)..(140): Pfam Name: Domain of unknown function DUF26 Pfam Description: Domain of unknown function DUF26
  misc_feature (12)..(292): Homolog of NCBI NO: 30693130 NR Description: expressed protein [Arabidopsis thaliana]
  misc_feature (55)..(291): Homolog of NCBI NO: 6721149 NR Description: hypothetical protein, 3' partial [Arabidopsis
  misc_feature (55)..(297): Homolog of NCBI NO: 15229281 NR Description: hypothetical protein [Arabidopsis thaliana]
  misc_feature (24)..(246): Homolog of NCBI NO: 9758557 NR Description: gb|AAB80651.1~gene_id:MRH10.9~similar to unknown
  misc_feature (24)..(287): Homolog of NCBI NO: 26451089 NR Description: unknown protein [Arabidopsis thaliana]
  misc_feature (24)..(299): Homolog of NCBI NO: 30694417 NR Description: expressed protein [Arabidopsis thaliana]
  misc_feature (1)..(264): Homolog of NCBI NO: 25408259 NR Description: hypothetical protein At2g33330 [imported] -
  misc_feature (12)..(264): Homolog of NCBI NO: 15219740 NR Description: hypothetical protein [Arabidopsis thaliana]
  misc_feature (1)..(299): Homolog of NCBI NO: 18403243 NR Description: expressed protein [Arabidopsis thaliana]
  misc_feature (12)..(299): Homolog of NCBI NO: 38566686 NR Description: At1g04520 [Arabidopsis thaliana]
MGFTRKPMFPVLLVLFITSLLEPPHVAESTSSDYSTLVYKGCSKEPFTDPNGVYSQALSALFGSLVSQSTKAKFYKTTSGSGQNTITGLFQCRGDLTNSDCYNCVSRLPVLCDKLCGKTTAARVQLLGCYILYEVAGFSQISGMQMLYKTCGATNAAGRGFEERRDTAFSVMENGVVSGHGFYTTSYQSLYVMGQCEGDVGDSDCGECVKNAVQRAQVECGSSISGQVFLHKCFISYSYYPNGVPSRSSSSSSASYSSSSSGQNPGKTAAIILGGAVAVAFLVILLLFARSLKKKHDDY

SEQ ID NO: 59113 - protein, 292 aa, Glycine max
  peptide (1)..(292): Ceres Seq. ID no. 15172466
  misc_feature (79)..(133): Pfam Name: Domain of unknown function DUF26 Pfam Description: Domain of unknown function DUF26
  misc_feature (5)..(285): Homolog of NCBI NO: 30693130 NR Description: expressed protein [Arabidopsis thaliana]
  misc_feature (48)..(284): Homolog of NCBI NO: 6721149 NR Description: hypothetical protein, 3' partial [Arabidopsis
  misc_feature (48)..(290): Homolog of NCBI NO: 15229281 NR Description: hypothetical protein [Arabidopsis thaliana]
  misc_feature (17)..(239): Homolog of NCBI NO: 9758557 NR Description: gb|AAB80651.1~gene_id:MRH10.9~similar to unknown
  misc_feature (17)..(280): Homolog of NCBI NO: 26451089 NR Description: unknown protein [Arabidopsis thaliana]
  misc_feature (17)..(292): Homolog of NCBI NO: 30694417 NR Description: expressed protein [Arabidopsis thaliana]
  misc_feature (1)..(257): Homolog of NCBI NO: 25408259 NR Description: hypothetical protein At2g33330 [imported] -
  misc_feature (5)..(257): Homolog of NCBI NO: 15219740 NR Description: hypothetical protein [Arabidopsis thaliana]
  misc_feature (1)..(292): Homolog of NCBI NO: 18403243 NR Description: expressed protein [Arabidopsis thaliana]
  misc_feature (5)..(292): Homolog of NCBI NO: 38566686 NR Description: At1g04520 [Arabidopsis thaliana]
MFPVLLVLFITSLLEPPHVAESTSSDYSTLVYKGCSKEPFTDPNGVYSQALSALFGSLVSQSTKAKFYKTTSGSGQNTITGLFQCRGDLTNSDCYNCVSRLPVLCDKLCGKTTAARVQLLGCYILYEVAGFSQISGMQMLYKTCGATNAAGRGFEERRDTAFSVMENGVVSGHGFYTTSYQSLYVMGQCEGDVGDSDCGECVKNAVQRAQVECGSSISGQVFLHKCFISYSYYPNGVPSRSSSSSSASYSSSSSGQNPGKTAAIILGGAVAVAFLVILLLFARSLKKKHDDY

SEQ ID NO: 59114 - protein, 156 aa, Glycine max
  peptide (1)..(156): Ceres Seq. ID no. 15172467
  misc_feature (1)..(149): Homolog of NCBI NO: 30693130 NR Description: expressed protein [Arabidopsis thaliana]
  misc_feature (1)..(148): Homolog of NCBI NO: 6721149 NR Description: hypothetical protein, 3' partial [Arabidopsis
  misc_feature (1)..(154): Homolog of NCBI NO: 15229281 NR Description: hypothetical protein [Arabidopsis thaliana]
  misc_feature (1)..(103): Homolog of NCBI NO: 9758557 NR Description: gb|AAB80651.1~gene_id:MRH10.9~similar to unknown
  misc_feature (1)..(144): Homolog of NCBI NO: 26451089 NR Description: unknown protein [Arabidopsis thaliana]
  misc_feature (1)..(156): Homolog of NCBI NO: 30694417 NR Description: expressed protein [Arabidopsis thaliana]
  misc_feature (1)..(121): Homolog of NCBI NO: 25408259 NR Description: hypothetical protein At2g33330 [imported] -
  misc_feature (1)..(121): Homolog of NCBI NO: 15219740 NR Description: hypothetical protein [Arabidopsis thaliana]
  misc_feature (1)..(156): Homolog of NCBI NO: 18403243 NR Description: expressed protein [Arabidopsis thaliana]
  misc_feature (1)..(156): Homolog of NCBI NO: 38566686 NR Description: At1g04520 [Arabidopsis thaliana]
MQMLYKTCGATNAAGRGFEERRDTAFSVMENGVVSGHGFYTTSYQSLYVMGQCEGDVGDSDCGECVKNAVQRAQVECGSSISGQVFLHKCFISYSYYPNGVPSRSSSSSSASYSSSSSGQNPGKTAAIILGGAVAVAFLVILLLFARSLKKKHDDY

SEQ ID NO: 59115 - DNA, 1000 bp, Glycine max
  misc_feature (1)..(1000): Ceres Seq. ID no. 15169084
ggtgttgttgagattctaaaaattgccagttacattcccttcacaagattctcacaaacaactcttgagaaagaaagaatggctgccaacacattgatgagttctgccatctcagccttcccatctctcctttcctcctcaaaatccagatttgccgcagcagttcctctttccagctttgttgtcaccaatgcctcttcttctcgcttttccatgagtgctgactggatgcctggccagcctagacccccctaccttgatggttcagcacctggtgactttggattcgaccctcttcgtcttggtgaagtaccagagaatcttgagaggttcaaagagtcagaactcattcactgcagatgggccatgcttgctgttccagggattttggttccagaggcattgggcttaggcaactgggtaaaggctcaggaatgggctgcagttcctggtggccaagcaacctacctaggcaacccagttccatggggcaccctacccaccattctggccattgaattccttgctatttccttcgtggagcaccaaaggagcatggagaaggaccctaaaaagaagaaataccctggtggtgcttttgatcctttgggatactctaaggaccctaaaacattccacgaatacaaagtcaaagaaattaaaaatggacgtcttgctttgttggcttttgtgggattctgtgttcaacaatcagcttatcccggcactggacctttggagaacttggctgctcacttggctgacccatggcacaacaacattggaaacgtcattattccacaatcgattttgccttgaaaaaaaatatatatttgtttcaatagctacctgtataactccgtgtaacaatttgtaatgaatcggatcgatcttgctacgttggtatcgctgtgctgtaattaaactttgaattcaaactcatagatactctggcaactagttggtatgaaagagaggcttgaagcaaacttccaagtcc

SEQ ID NO: 59116 - protein, 272 aa, Glycine max
  peptide (1)..(272): Ceres Seq. ID no. 15169085
  misc_feature (81)..(238): Pfam Name: Chlorophyll A-B binding protein Pfam Description: Chlorophyll A-B binding protein
  misc_feature (68)..(272): Homolog of NCBI NO: 20790 NR Description: Type 1 chlorophyll a /b-binding protein [Pinus
  misc_feature (27)..(272): Homolog of NCBI NO: 99485 NR Description: chlorophyll a/b-binding protein type 1 precursor,
  misc_feature (27)..(270): Homolog of NCBI NO: 6685157 NR Description: chlorophyll a/b binding protein precursor
  misc_feature (27)..(272): Homolog of NCBI NO: 3789954 NR Description: chlorophyll a/b-binding protein precursor [Oryza
  misc_feature (27)..(267): Homolog of NCBI NO: 13265501 NR Description: AT3g54890 [Arabidopsis thaliana]
  misc_feature (27)..(267): Homolog of NCBI NO: 15233115 NR Description: light-harvesting chlorophyll a/b binding protein
  misc_feature (27)..(272): Homolog of NCBI NO: 115764 NR Description: Chlorophyll A-B binding protein 6A, chloroplast
  misc_feature (27)..(272): Homolog of NCBI NO: 82079 NR Description: chlorophyll a/b-binding protein type I precursor
  misc_feature (27)..(272): Homolog of NCBI NO: 82078 NR Description: chlorophyll a/b-binding protein type I precursor
  misc_feature (27)..(272): Homolog of NCBI NO: 625547 NR Description: chlorophyll a/b-binding protein type I - common
GVVEILKIASYIPFTRFSQTTLEKERMAANTLMSSAISAFPSLLSSSKSRFAAAVPLSSFVVTNASSSRFSMSADWMPGQPRPPYLDGSAPGDFGFDPLRLGEVPENLERFKESELIHCRWAMLAVPGILVPEALGLGNWVKAQEWAAVPGGQATYLGNPVPWGTLPTILAIEFLAISFVEHQRSMEKDPKKKKYPGGAFDPLGYSKDPKTFHEYKVKEIKNGRLALLAFVGFCVQQSAYPGTGPLENLAAHLADPWHNNIGNVIIPQSILP

SEQ ID NO: 59117 - protein, 246 aa, Glycine max
  peptide (1)..(246): Ceres Seq. ID no. 15169086
  misc_feature (55)..(212): Pfam Name: Chlorophyll A-B binding protein Pfam Description: Chlorophyll A-B binding protein
  misc_feature (42)..(246): Homolog of NCBI NO: 20790 NR Description: Type 1 chlorophyll a /b-binding protein [Pinus
  misc_feature (1)..(246): Homolog of NCBI NO: 99485 NR Description: chlorophyll a/b-binding protein type 1 precursor,
  misc_feature (1)..(244): Homolog of NCBI NO: 6685157 NR Description: chlorophyll a/b binding protein precursor
  misc_feature (1)..(246): Homolog of NCBI NO: 3789954 NR Description: chlorophyll a/b-binding protein precursor [Oryza
  misc_feature (1)..(241): Homolog of NCBI NO: 13265501 NR Description: AT3g54890 [Arabidopsis thaliana]
  misc_feature (1)..(241): Homolog of NCBI NO: 15233115 NR Description: light-harvesting chlorophyll a/b binding protein
  misc_feature (1)..(246): Homolog of NCBI NO: 115764 NR Description: Chlorophyll A-B binding protein 6A, chloroplast
  misc_feature (1)..(246): Homolog of NCBI NO: 82079 NR Description: chlorophyll a/b-binding protein type I precursor
  misc_feature (1)..(246): Homolog of NCBI NO: 82078 NR Description: chlorophyll a/b-binding protein type I precursor
  misc_feature (1)..(246): Homolog of NCBI NO: 625547 NR Description: chlorophyll a/b-binding protein type I - common
MAANTLMSSAISAFPSLLSSSKSRFAAAVPLSSFVVTNASSSRFSMSADWMPGQPRPPYLDGSAPGDFGFDPLRLGEVPENLERFKESELIHCRWAMLAVPGILVPEALGLGNWVKAQEWAAVPGGQATYLGNPVPWGTLPTILAIEFLAISFVEHQRSMEKDPKKKKYPGGAFDPLGYSKDPKTFHEYKVKEIKNGRLALLAFVGFCVQQSAYPGTGPLENLAAHLADPWHNNIGNVIIPQSILP

SEQ ID NO: 59118 - protein, 240 aa, Glycine max
  peptide (1)..(240): Ceres Seq. ID no. 15169087
  misc_feature (49)..(206): Pfam Name: Chlorophyll A-B binding protein Pfam Description: Chlorophyll A-B binding protein
  misc_feature (36)..(240): Homolog of NCBI NO: 20790 NR Description: Type 1 chlorophyll a /b-binding protein [Pinus
  misc_feature (1)..(240): Homolog of NCBI NO: 99485 NR Description: chlorophyll a/b-binding protein type 1 precursor,
  misc_feature (1)..(238): Homolog of NCBI NO: 6685157 NR Description: chlorophyll a/b binding protein precursor
  misc_feature (1)..(240): Homolog of NCBI NO: 3789954 NR Description: chlorophyll a/b-binding protein precursor [Oryza
  misc_feature (1)..(235): Homolog of NCBI NO: 13265501 NR Description: AT3g54890 [Arabidopsis thaliana]
  misc_feature (1)..(235): Homolog of NCBI NO: 15233115 NR Description: light-harvesting chlorophyll a/b binding protein
  misc_feature (1)..(240): Homolog of NCBI NO: 115764 NR Description: Chlorophyll A-B binding protein 6A, chloroplast
  misc_feature (1)..(240): Homolog of NCBI NO: 82079 NR Description: chlorophyll a/b-binding protein type I precursor
  misc_feature (1)..(240): Homolog of NCBI NO: 82078 NR Description: chlorophyll a/b-binding protein type I precursor
  misc_feature (1)..(240): Homolog of NCBI NO: 625547 NR Description: chlorophyll a/b-binding protein type I - common
MSSAISAFPSLLSSSKSRFAAAVPLSSFVVTNASSSRFSMSADWMPGQPRPPYLDGSAPGDFGFDPLRLGEVPENLERFKESELIHCRWAMLAVPGILVPEALGLGNWVKAQEWAAVPGGQATYLGNPVPWGTLPTILAIEFLAISFVEHQRSMEKDPKKKKYPGGAFDPLGYSKDPKTFHEYKVKEIKNGRLALLAFVGFCVQQSAYPGTGPLENLAAHLADPWHNNIGNVIIPQSILP

SEQ ID NO: 59119 - DNA, 1539 bp, Glycine max
  misc_feature (1)..(1539): Ceres Seq. ID no. 14312981
aagcgaacacggttagtagcggcagagaaaggagatggaatcggcgggggagtggctggagaaggcgttggtggagttgtgctccaagattgaaactggcttgggtttaggtttggaccaagacatcatcaaaggcctcgtctcttactgtgaccttgccgagccacgagatgccaaagagtaccttgacaatataatcggtcaggatgcagggaaaactgtgattgaagaatatttacgacggagaggttactcagaatccagcatcggctcaaatgttccaactaccaaattacatgcgtatgtcaaaccgccttcagttgagacatctgctagtggaactaagaaatcatttaaaacaccgaaagtggcaggccgcggtaatcatgcagaaccgaacaagaatgcgagtagcagtaatcaggaaaatcagactccaactgtagttagtgaatcaaaaacatcgcaaaaggggaaccaattgaattccaagaagaagaaagccgggaaagttgtctcacttgctgaggctgccaaaggatccattgtgttccagcagggaagaccatgctcctgtcaagcacgtcgtcacgggctggtcagcaactgcttatcttgtggcaaaatagtctgtgaacaagaaggagaggggccttgccatttttgtggtgcacttgtgttaagagagggcagctcgtatgctggtctggaagaaagtttgcctcccttgtcagagtctgaggctgttgctgaagcttatgcaaagagactggttgaatatgaccgaaactctgcagctcgtacaacagttattgatgaccaaagtgactactatgagattgatggaaacagttggttgtcaaaggaggagaaagaactgttgaagaagaaacaagaggagatggaagaagctgagaaagccaaacgtaatagagttgttgtgacttttgatctagttggccgcaaggtccttgtaaataaagatgaagcttcagaattacagtttgaaaatagaatattgcgtcctccggatgcaagggaagtgaaccgtatcaaaccaaatccaactctaacgtttcaacctgtttttgtggacctgggctttggtaggaaatccactaaagataagcaatcacataaaggcataagcaagggcttgtgcttggagattacagggcgagtgcagcatgatagaaatgaccagaagtatgttatgatggaaaaccaattggcaacagcttcaaatgaaaatgtttggcaagtatcttcaggaaatggaatgcacatcatggaagatgatggtcaatgtttactgaactatgataagtaaagtgccttatccagcttttagcgattattgttacattcttcatttgctttctcccattttctttttgatttgcgcgtctaagccatgaaattgatggtcctaattacttttttcagaaagaaagttaagaattttaggcagcgctatttttgtttatacactgctcagatattaaatatcagtcaactactattatctatttgtattag

SEQ ID NO: 59120 - protein, 431 aa, Glycine max
  peptide (1)..(431): Ceres Seq. ID no. 14312982
  misc_feature (175)..(226): Pfam Name: Putative zinc finger motif, C2HC5-type Pfam Description: Putative zinc finger motif, C2HC5-type
  misc_feature (192)..(328): Homolog of NCBI NO: 703112 NR Description: thyroid receptor interactor
  misc_feature (1)..(348): Homolog of NCBI NO: 19863480 NR Description: Activating signal cointegrator 1 (ASC-1) (Thyroid
  misc_feature (1)..(348): Homolog of NCBI NO: 32189376 NR Description: thyroid hormone receptor interactor 4
  misc_feature (128)..(329): Homolog of NCBI NO: 20129087 NR Description: CG11710-PB [Drosophila melanogaster]
  misc_feature (128)..(329): Homolog of NCBI NO: 24643521 NR Description: CG11710-PA [Drosophila melanogaster]
  misc_feature (3)..(183): Homolog of NCBI NO: 15228204 NR Description: expressed protein [Arabidopsis thaliana]
  misc_feature (192)..(322): Homolog of NCBI NO: 37606133 NR Description: SI:dZ221I3.1 (novel protein similar to human and
  misc_feature (49)..(215): Homolog of NCBI NO: 37606133 NR Description: SI:dZ221I3.1 (novel protein similar to human and
  misc_feature (97)..(330): Homolog of NCBI NO: 31203161 NR Description: ENSANGP00000017311 [Anopheles gambiae]
  misc_feature (23)..(430): Homolog of NCBI NO: 15228204 NR Description: expressed protein [Arabidopsis thaliana]
MESAGEWLEKALVELCSKIETGLGLGLDQDIIKGLVSYCDLAEPRDAKEYLDNIIGQDAGKTVIEEYLRRRGYSESSIGSNVPTTKLHAYVKPPSVETSASGTKKSFKTPKVAGRGNHAEPNKNASSSNQENQTPTVVSESKTSQKGNQLNSKKKKAGKVVSLAEAAKGSIVFQQGRPCSCQARRHGLVSNCLSCGKIVCEQEGEGPCHFCGALVLREGSSYAGLEESLPPLSESEAVAEAYAKRLVEYDRNSAARTTVIDDQSDYYEIDGNSWLSKEEKELLKKKQEEMEEAEKAKRNRVVVTFDLVGRKVLVNKDEASELQFENRILRPPDAREVNRIKPNPTLTFQPVFVDLGFGRKSTKDKQSHKGISKGLCLEITGRVQHDRNDQKYVMMENQLATASNENVWQVSSGNGMHIMEDDGQCLLNYDK

SEQ ID NO: 59121 - DNA, 1289 bp, Glycine max
  misc_feature (1)..(1289): Ceres Seq. ID no. 14312989
ggtccacgtgtacttgttgaaggtcgggttgagcaagaactcacatgttactaattcattgttggatctttatgcaaagtgtggggccatcagggaggctcaacgagtgttcagtgagatgagtgaaaggaatgcggtgtcttggacatcgttgattgttggcttggctgttaatgggtttggtgaggaagcacttgagcttttcaaagagatggagggacaaggactggtgcctagtgagatcacttttgttggtgtcttgtatgcgtgcagccattgtgggatgttggacgaagggtttgagtactttagaagaatgaaagaggaatgtggaatcatacctaggatagagcactatggttgcatggtggatttgttgagtagggcgggtttagtgaaacaagcgtatgagtatattcagaacatgccagtgcagccaaatgcagttatttggaggaccttgttaggggcatgtacaatacatggacatttgggtttgggagagatagctagatcccacctattgaacttggagcctaaacatagtggtgattatgtgcttctttcaaatctttatgcctccgaacgtcgttggtctgatgtacaagtgataaggaggtcaatgctgaaggatggtgttaagaaaacccctggctatagtctagttgagttgggcaaccgtgtttatgaatttactatgggtgatagatctcatcctcaaagtcaggatgtatatgcactactagagaagattacagaattgttgaagttagaaggttatgtgcctcatactgctaatgtacttgcagacatagaggaagaggagaaggaacaagctttgtcttatcatagtgaaaaagttgcaattgcttttatgctcttaaatacaccaccagggaccccaatcagggttatgaagaatttaagagtttgtgcagattgtcatatggctatcaaactcatagcaaagatttacgatagagagattgttatcagggatcgcagtaggttccatcattttagaggtggttcatgttcctgtaaagattactggtaatatagtaatcatcaggatttgataatggcatcttgagagtcaagttctgcattgatttccaagtacaatgtggtgctttaaaatagaggcagtgagacatactttaatatgttgtaataattctccgcaatcctctctgctgcaagggtcaaccaattcaattcaagcctcttgatacatggatgagttagtgaacatgcttaagattatggaagtttggtacaaattgcgt

SEQ ID NO: 59122 - protein, 351 aa, Glycine max
  peptide (1)..(351): Ceres Seq. ID no. 14312990
  misc_feature (117)..(151): Pfam Name: PPR repeat Pfam Description: PPR repeat
  misc_feature (1)..(351): Homolog of NCBI NO: 21741755 NR Description: OSJNBa0060B20.9 [Oryza sativa (japonica
  misc_feature (1)..(351): Homolog of NCBI NO: 15235498 NR Description: pentatricopeptide (PPR) repeat-containing protein
  misc_feature (1)..(351): Homolog of NCBI NO: 15235537 NR Description: pentatricopeptide (PPR) repeat-containing protein
  misc_feature (3)..(351): Homolog of NCBI NO: 34910298 NR Description: P0013F10.8 [Oryza sativa (japonica
  misc_feature (1)..(351): Homolog of NCBI NO: 34394298 NR Description: putative pentatricopeptide (PPR)
  misc_feature (1)..(351): Homolog of NCBI NO: 29124127 NR Description: hypothetical protein [Oryza sativa (japonica
  misc_feature (5)..(336): Homolog of NCBI NO: 30685297 NR Description: BRCT domain-containing protein [Arabidopsis
  misc_feature (1)..(336): Homolog of NCBI NO: 7486979 NR Description: hypothetical protein T13K14.230 - Arabidopsis
  misc_feature (1)..(336): Homolog of NCBI NO: 7486585 NR Description: hypothetical protein F7J7.10 - Arabidopsis
  misc_feature (1)..(351): Homolog of NCBI NO: 34393394 NR Description: putative pentatricopeptide (PPR)
VHVYLLKVGLSKNSHVTNSLLDLYAKCGAIREAQRVFSEMSERNAVSWTSLIVGLAVNGFGEEALELFKEMEGQGLVPSEITFVGVLYACSHCGMLDEGFEYFRRMKEECGIIPRIEHYGCMVDLLSRAGLVKQAYEYIQNMPVQPNAVIWRTLLGACTIHGHLGLGEIARSHLLNLEPKHSGDYVLLSNLYASERRWSDVQVIRRSMLKDGVKKTPGYSLVELGNRVYEFTMGDRSHPQSQDVYALLEKITELLKLEGYVPHTANVLADIEEEEKEQALSYHSEKVAIAFMLLNTPPGTPIRVMKNLRVCADCHMAIKLIAKIYDREIVIRDRSRFHHFRGGSCSCKDYW

SEQ ID NO: 59123 - protein, 312 aa, Glycine max
  peptide (1)..(312): Ceres Seq. ID no. 14312991
  misc_feature (78)..(112): Pfam Name: PPR repeat Pfam Description: PPR repeat
  misc_feature (1)..(312): Homolog of NCBI NO: 21741755 NR Description: OSJNBa0060B20.9 [Oryza sativa (japonica
  misc_feature (1)..(312): Homolog of NCBI NO: 15235498 NR Description: pentatricopeptide (PPR) repeat-containing protein
  misc_feature (1)..(312): Homolog of NCBI NO: 15235537 NR Description: pentatricopeptide (PPR) repeat-containing protein
  misc_feature (1)..(312): Homolog of NCBI NO: 34910298 NR Description: P0013F10.8 [Oryza sativa (japonica
  misc_feature (1)..(312): Homolog of NCBI NO: 34394298 NR Description: putative pentatricopeptide (PPR)
  misc_feature (1)..(312): Homolog of NCBI NO: 29124127 NR Description: hypothetical protein [Oryza sativa (japonica
  misc_feature (1)..(297): Homolog of NCBI NO: 30685297 NR Description: BRCT domain-containing protein [Arabidopsis
  misc_feature (1)..(297): Homolog of NCBI NO: 7486979 NR Description: hypothetical protein T13K14.230 - Arabidopsis
  misc_feature (1)..(297): Homolog of NCBI NO: 7486585 NR Description: hypothetical protein F7J7.10 - Arabidopsis
  misc_feature (1)..(312): Homolog of NCBI NO: 34393394 NR Description: putative pentatricopeptide (PPR)
MSERNAVSWTSLIVGLAVNGFGEEALELFKEMEGQGLVPSEITFVGVLYACSHCGMLDEGFEYFRRMKEECGIIPRIEHYGCMVDLLSRAGLVKQAYEYIQNMPVQPNAVIWRTLLGACTIHGHLGLGEIARSHLLNLEPKHSGDYVLLSNLYASERRWSDVQVIRRSMLKDGVKKTPGYSLVELGNRVYEFTMGDRSHPQSQDVYALLEKITELLKLEGYVPHTANVLADIEEEEKEQALSYHSEKVAIAFMLLNTPPGTPIRVMKNLRVCADCHMAIKLIAKIYDREIVIRDRSRFHHFRGGSCSCKDYW

SEQ ID NO: 59124 - protein, 281 aa, Glycine max
  peptide (1)..(281): Ceres Seq. ID no. 14312992
  misc_feature (47)..(81): Pfam Name: PPR repeat Pfam Description: PPR repeat
  misc_feature (1)..(281): Homolog of NCBI NO: 21741755 NR Description: OSJNBa0060B20.9 [Oryza sativa (japonica
  misc_feature (1)..(281): Homolog of NCBI NO: 15235498 NR Description: pentatricopeptide (PPR) repeat-containing protein
  misc_feature (1)..(281): Homolog of NCBI NO: 15235537 NR Description: pentatricopeptide (PPR) repeat-containing protein
  misc_feature (1)..(281): Homolog of NCBI NO: 34910298 NR Description: P0013F10.8 [Oryza sativa (japonica
  misc_feature (1)..(281): Homolog of NCBI NO: 34394298 NR Description: putative pentatricopeptide (PPR)
  misc_feature (1)..(281): Homolog of NCBI NO: 29124127 NR Description: hypothetical protein [Oryza sativa (japonica
  misc_feature (1)..(266): Homolog of NCBI NO: 30685297 NR Description: BRCT domain-containing protein [Arabidopsis
  misc_feature (1)..(266): Homolog of NCBI NO: 7486979 NR Description: hypothetical protein T13K14.230 - Arabidopsis
  misc_feature (1)..(266): Homolog of NCBI NO: 7486585 NR Description: hypothetical protein F7J7.10 - Arabidopsis
  misc_feature (1)..(281): Homolog of NCBI NO: 34393394 NR Description: putative pentatricopeptide (PPR)
MEGQGLVPSEITFVGVLYACSHCGMLDEGFEYFRRMKEECGIIPRIEHYGCMVDLLSRAGLVKQAYEYIQNMPVQPNAVIWRTLLGACTIHGHLGLGEIARSHLLNLEPKHSGDYVLLSNLYASERRWSDVQVIRRSMLKDGVKKTPGYSLVELGNRVYEFTMGDRSHPQSQDVYALLEKITELLKLEGYVPHTANVLADIEEEEKEQALSYHSEKVAIAFMLLNTPPGTPIRVMKNLRVCADCHMAIKLIAKIYDREIVIRDRSRFHHFRGGSCSCKDYW

SEQ ID NO: 59125 - DNA, 1228 bp, Glycine max
  misc_feature (1)..(1228): Ceres Seq. ID no. 14316469
aaaaaaaaaaaagcgtaataagaaataacgagagaaaaattctggggtttagaggagaaaaggggagaaagggtgggtattgcttcacacaaacacaacagtgtctgctgcaccttgcaatggtttcgctatcaacatggtttcgctacattgcccacaagctcgaatactccttctccctcagctggaagaactacaaaggaggtcaaattacagacagagaggtacgtgatgttgtttggaaaaacttctttcaaggaaagctgacgtacttgcactggaataaaggagaggagatggcccctactattgatggaaaagcagtaactcttgttcggaaattaccagttgtagacccaacgcgtgtttttgtaggagatgttgtggttgtgaaggaccctgagaagccagataactacctactcagaagattaactgcagttgaaggctatgaaatggtttctactgatgaaaaggatgaagcctttgttctcgagaaggatcaatgctgggtagtggctgaaaatgaaaaattgaaagccaaggaagcgaaggatagccgaacatttggtccagttcagatgacagacattgtaggcagagtcatatattgcctgcgaagtgctgtagaccatggccgggtacaaaacagttatttcggcatgcgaaaggatacaccagtgctggaagtggaacttgatgttgatgagatggcaaagagtcacaaagcctgaaacatttgtcccgagaaacactaactagtttgctttacgcatgccttagtttcttcttgtggattttccttgaagcacagattgaataataaaaaatatgatttttaaattgttgcaatgggatgatggtgttatgtggatgtcctctgcatgctaggcaattggctagctcttcccaagcagaaattggaagcggtctgtgttaaagcttgagttcgacattattgtatgctaagttctagcaaggactcctctgccctttgttctattcatatttggctgtaaaattgaccgagttttggtcatttttgttaatagtcgaggatgatagaaaaaaaggctgcattgttagaaataatagtttcagatattttcattttatgaagacctagtgcctcgactgagtgttcacttcttgccaatttgtctttctagggaacaatcgttgatatctgttctctttagtcagttgagtgaaaaagaacgtttaagtg

SEQ ID NO: 59126 - protein, 243 aa, Glycine max
  peptide (1)..(243): Ceres Seq. ID no. 14316470
  misc_feature (40)..(217): Homolog of NCBI NO: 25408133 NR Description: hypothetical protein At2g31140 [imported] -
  misc_feature (40)..(243): Homolog of NCBI NO: 25406903 NR Description: hypothetical protein [imported] - Arabidopsis
  misc_feature (40)..(243): Homolog of NCBI NO: 15221421 NR Description: expressed protein [Arabidopsis thaliana]
  misc_feature (40)..(243): Homolog of NCBI NO: 30684839 NR Description: expressed protein [Arabidopsis thaliana]
  misc_feature (40)..(242): Homolog of NCBI NO: 38344766 NR Description: OSJNBa0068L06.9 [Oryza sativa (japonica
KKKSVIRNNERKILGFRGEKGRKGGYCFTQTQQCLLHLAMVSLSTWFRYIAHKLEYSFSLSWKNYKGGQITDREVRDVVWKNFFQGKLTYLHWNKGEEMAPTIDGKAVTLVRKLPVVDPTRVFVGDVVVVKDPEKPDNYLLRRLTAVEGYEMVSTDEKDEAFVLEKDQCWVVAENEKLKAKEAKDSRTFGPVQMTDIVGRVIYCLRSAVDHGRVQNSYFGMRKDTPVLEVELDVDEMAKSHKA

SEQ ID NO: 59127 - protein, 204 aa, Glycine max
  peptide (1)..(204): Ceres Seq. ID no. 14316471
  misc_feature (1)..(178): Homolog of NCBI NO: 25408133 NR Description: hypothetical protein At2g31140 [imported] -
  misc_feature (1)..(204): Homolog of NCBI NO: 25406903 NR Description: hypothetical protein [imported] - Arabidopsis
  misc_feature (1)..(204): Homolog of NCBI NO: 15221421 NR Description: expressed protein [Arabidopsis thaliana]
  misc_feature (1)..(204): Homolog of NCBI NO: 30684839 NR Description: expressed protein [Arabidopsis thaliana]
  misc_feature (1)..(203): Homolog of NCBI NO: 38344766 NR Description: OSJNBa0068L06.9 [Oryza sativa (japonica
MVSLSTWFRYIAHKLEYSFSLSWKNYKGGQITDREVRDVVWKNFFQGKLTYLHWNKGEEMAPTIDGKAVTLVRKLPVVDPTRVFVGDVVVVKDPEKPDNYLLRRLTAVEGYEMVSTDEKDEAFVLEKDQCWVVAENEKLKAKEAKDSRTFGPVQMTDIVGRVIYCLRSAVDHGRVQNSYFGMRKDTPVLEVELDVDEMAKSHKA

SEQ ID NO: 59128 - protein, 145 aa, Glycine max
  peptide (1)..(145): Ceres Seq. ID no. 14316472
  misc_feature (1)..(119): Homolog of NCBI NO: 25408133 NR Description: hypothetical protein At2g31140 [imported] -
  misc_feature (1)..(145): Homolog of NCBI NO: 25406903 NR Description: hypothetical protein [imported] - Arabidopsis
  misc_feature (1)..(145): Homolog of NCBI NO: 15221421 NR Description: expressed protein [Arabidopsis thaliana]
  misc_feature (1)..(145): Homolog of NCBI NO: 30684839 NR Description: expressed protein [Arabidopsis thaliana]
  misc_feature (1)..(144): Homolog of NCBI NO: 38344766 NR Description: OSJNBa0068L06.9 [Oryza sativa (japonica
MAPTIDGKAVTLVRKLPVVDPTRVFVGDVVVVKDPEKPDNYLLRRLTAVEGYEMVSTDEKDEAFVLEKDQCWVVAENEKLKAKEAKDSRTFGPVQMTDIVGRVIYCLRSAVDHGRVQNSYFGMRKDTPVLEVELDVDEMAKSHKA

SEQ ID NO: 59129 - DNA, 1335 bp, Glycine max
  misc_feature (1)..(1335): Ceres Seq. ID no. 15168378
atgatttagaaacacctggcagaaacacagacgtgctagtcattcattagcaacaaattttatatgaacattttaataaatgtaacatttgttgacagaaatttaactatatgcttctaacaatagacaaataagtaaatgttcacaggtttatcggggaactcttcccagtgggcaagtggtagccataaaacgagctcaaagagaatcaaagcagggagggctagaattcaaagctgaaattgaactcctttcaagggtccaccacaagaatctggttagccttgtgggattctgctttgaacgagaagaacaaatgctggtttatgagtttgttccaaatggaactttgaaggatgctctcacaggggaatctggaattgtgttgagctggagtagaagactgaaagtagcccttggtgctgccaggggtttggcttatcttcatgaacatgctgatccccctattatacacagggacatcaaatcaaacaacattttgctgaatgaaaactatactgcaaaagtttctgattttggtctctccaagtctatcttagatgatgaaaaagattacttctccactcaagttaaaggaacaatgggctacttggatccagattattatactagtcagaagttgactgaaaagagtgatgtctatagttttggagtgctaatactggagctgattactgcaagaaagccaatagaacgagggaaatacattgtgaaagtggtcaggagtacaattgataagacaaaagacttgtatggtcttcacaaaattattgacccggccatctgttcaggatcaacactggagggttttgagaagtttgtggaccttgcaatggagtgtgttgaagattcaggagctgacaggcccgcaatgagtgatgtggttaaagaaattgaagacatgttgcagtctgttggtatgcacctaacatctgaatcagtaacatccacaacatctagtcatagatatcaggaggtaagtatagtgagtttccatctggaccaaccttacagcaatgagtcctttggttcaagtgcagaacatattcaaaaattgaacctagttagttaagttagtcttttttctcaagattgaagtcaagagagacttgtttattagtatttcttggccaaaacacagaaaagtagaaattgtggaatttagagtttgtggctgtgagcttcagagtataagtgtggtagcaaggttaacatttccttgactatcatttcttttccttctttctctcccactaaagatgtgaaatgtacaatgaatataggttttgatatggaacatgtagaatataaagt

SEQ ID NO: 59130 - protein, 258 aa, Glycine max
  peptide (1)..(258): Ceres Seq. ID no. 15168379
  misc_feature (1)..(131): Pfam Name: Protein kinase domain Pfam Description: Protein kinase domain
  misc_feature (1)..(223): Homolog of NCBI NO: 30679474 NR Description: leucine-rich repeat transmembrane protein kinase,
  misc_feature (1)..(223): Homolog of NCBI NO: 11346408 NR Description: hypothetical protein T20L15.220 - Arabidopsis
  misc_feature (1)..(220): Homolog of NCBI NO: 34909276 NR Description: P0454H12.21 [Oryza sativa (japonica
  misc_feature (1)..(248): Homolog of NCBI NO: 30699436 NR Description: leucine-rich repeat transmembrane protein kinase,
  misc_feature (1)..(248): Homolog of NCBI NO: 7715608 NR Description: F20B17.5 [Arabidopsis thaliana]
  misc_feature (1)..(218): Homolog of NCBI NO: 34909240 NR Description: putative receptor protein kinase
  misc_feature (1)..(248): Homolog of NCBI NO: 15240549 NR Description: leucine-rich repeat transmembrane protein kinase,
  misc_feature (1)..(244): Homolog of NCBI NO: 15240547 NR Description: leucine-rich repeat transmembrane protein kinase,
  misc_feature (1)..(219): Homolog of NCBI NO: 8978273 NR Description: receptor protein kinase-like [Arabidopsis
  misc_feature (1)..(244): Homolog of NCBI NO: 30695748 NR Description: receptor protein kinase-related [Arabidopsis
MLVYEFVPNGTLKDALTGESGIVLSWSRRLKVALGAARGLAYLHEHADPPIIHRDIKSNNILLNENYTAKVSDFGLSKSILDDEKDYFSTQVKGTMGYLDPDYYTSQKLTEKSDVYSFGVLILELITARKPIERGKYIVKVVRSTIDKTKDLYGLHKIIDPAICSGSTLEGFEKFVDLAMECVEDSGADRPAMSDVVKEIEDMLQSVGMHLTSESVTSTTSSHRYQEVSIVSFHLDQPYSNESFGSSAEHIQKLNLVS

SEQ ID NO: 59131 - protein, 163 aa, Glycine max
  peptide (1)..(163): Ceres Seq. ID no. 15168380
  misc_feature (1)..(128): Homolog of NCBI NO: 30679474 NR Description: leucine-rich repeat transmembrane protein kinase,
  misc_feature (1)..(128): Homolog of NCBI NO: 11346408 NR Description: hypothetical protein T20L15.220 - Arabidopsis
  misc_feature (1)..(125): Homolog of NCBI NO: 34909276 NR Description: P0454H12.21 [Oryza sativa (japonica
  misc_feature (1)..(153): Homolog of NCBI NO: 30699436 NR Description: leucine-rich repeat transmembrane protein kinase,
  misc_feature (1)..(153): Homolog of NCBI NO: 7715608 NR Description: F20B17.5 [Arabidopsis thaliana]
  misc_feature (1)..(123): Homolog of NCBI NO: 34909240 NR Description: putative receptor protein kinase
  misc_feature (1)..(153): Homolog of NCBI NO: 15240549 NR Description: leucine-rich repeat transmembrane protein kinase,
  misc_feature (1)..(149): Homolog of NCBI NO: 15240547 NR Description: leucine-rich repeat transmembrane protein kinase,
  misc_feature (1)..(124): Homolog of NCBI NO: 8978273 NR Description: receptor protein kinase-like [Arabidopsis
  misc_feature (1)..(149): Homolog of NCBI NO: 30695748 NR Description: receptor protein kinase-related [Arabidopsis
MGYLDPDYYTSQKLTEKSDVYSFGVLILELITARKPIERGKYIVKVVRSTIDKTKDLYGLHKIIDPAICSGSTLEGFEKFVDLAMECVEDSGADRPAMSDVVKEIEDMLQSVGMHLTSESVTSTTSSHRYQEVSIVSFHLDQPYSNESFGSSAEHIQKLNLVS

SEQ ID NO: 59132 - DNA, 579 bp, Glycine max
  misc_feature (1)..(579): Ceres Seq. ID no. 15170567
acaatcacaacttggtaaaggtactccgtgcaagaaagatgaagctcgagttcgcaaatgtgctacttctgtgccttgtccttagctcttctttcttggaaatctcaatggctggttctcctttctgtgactcaaagtgcgcgcagaggtgtgccaaagctggggttcaggacagatgcttgaggttttgcgggatctgctgcgagaagtgcaactgtgtcccatctgggacttacggaaacaaggacgagtgcccttgctacagggacatgaagaactccaagggcaaggacaaatgcccttgaagaatatctaatttcatcatcacactccattccaataaactaccttgtattgtatcttcagccttccttttcagagtattgcattatgccacggatctatgtacctacccttcaacttaagtattccgtctagttaattagcatagctacccttcaacttatgtgttccgacctagttaattaattagcttattaattatttacgagagtaaaacatcgttttagttctgtcatcttagtctttgaagttatataaagaaattcaaattaaaat

SEQ ID NO: 59133 - protein, 100 aa, Glycine max
  peptide (1)..(100): Ceres Seq. ID no. 15170568
  misc_feature (13)..(100): Pfam Name: Gibberellin regulated protein Pfam Description: Gibberellin regulated protein
  misc_feature (42)..(100): Homolog of NCBI NO: 121689 NR Description: GAST1 protein precursor
  misc_feature (11)..(100): Homolog of NCBI NO: 2129596 NR Description: gibberellin-regulated protein GASA5 precursor -
  misc_feature (20)..(100): Homolog of NCBI NO: 40538965 NR Description: putative  gibberellin regulated protein
  misc_feature (41)..(100): Homolog of NCBI NO: 15226025 NR Description: gibberellin-regulated proteins -related
  misc_feature (51)..(100): Homolog of NCBI NO: 4102634 NR Description: Snakin-1 [Solanum tuberosum]
  misc_feature (13)..(100): Homolog of NCBI NO: 7447292 NR Description: gibberellin-stimulated transcript 1 like protein
  misc_feature (13)..(100): Homolog of NCBI NO: 15225493 NR Description: gibberellin-regulated proteins -related
  misc_feature (13)..(100): Homolog of NCBI NO: 9757905 NR Description: contains similarity to gibberellin-stimulated
  misc_feature (13)..(100): Homolog of NCBI NO: 18424288 NR Description: expressed protein [Arabidopsis thaliana]
  misc_feature (13)..(100): Homolog of NCBI NO: 14627134 NR Description: snakin-1 [Solanum tuberosum]
NHNLVKVLRARKMKLEFANVLLLCLVLSSSFLEISMAGSPFCDSKCAQRCAKAGVQDRCLRFCGICCEKCNCVPSGTYGNKDECPCYRDMKNSKGKDKCP

SEQ ID NO: 59134 - protein, 88 aa, Glycine max
  peptide (1)..(88): Ceres Seq. ID no. 15170569
  misc_feature (1)..(88): Pfam Name: Gibberellin regulated protein Pfam Description: Gibberellin regulated protein
  misc_feature (30)..(88): Homolog of NCBI NO: 121689 NR Description: GAST1 protein precursor
  misc_feature (1)..(88): Homolog of NCBI NO: 2129596 NR Description: gibberellin-regulated protein GASA5 precursor -
  misc_feature (8)..(88): Homolog of NCBI NO: 40538965 NR Description: putative  gibberellin regulated protein
  misc_feature (29)..(88): Homolog of NCBI NO: 15226025 NR Description: gibberellin-regulated proteins -related
  misc_feature (39)..(88): Homolog of NCBI NO: 4102634 NR Description: Snakin-1 [Solanum tuberosum]
  misc_feature (1)..(88): Homolog of NCBI NO: 7447292 NR Description: gibberellin-stimulated transcript 1 like protein
  misc_feature (1)..(88): Homolog of NCBI NO: 15225493 NR Description: gibberellin-regulated proteins -related
  misc_feature (1)..(88): Homolog of NCBI NO: 9757905 NR Description: contains similarity to gibberellin-stimulated
  misc_feature (1)..(88): Homolog of NCBI NO: 18424288 NR Description: expressed protein [Arabidopsis thaliana]
  misc_feature (1)..(88): Homolog of NCBI NO: 14627134 NR Description: snakin-1 [Solanum tuberosum]
MKLEFANVLLLCLVLSSSFLEISMAGSPFCDSKCAQRCAKAGVQDRCLRFCGICCEKCNCVPSGTYGNKDECPCYRDMKNSKGKDKCP

SEQ ID NO: 59135 - protein, 65 aa, Glycine max
  peptide (1)..(65): Ceres Seq. ID no. 15170570
  misc_feature (1)..(65): Pfam Name: Gibberellin regulated protein Pfam Description: Gibberellin regulated protein
  misc_feature (7)..(65): Homolog of NCBI NO: 121689 NR Description: GAST1 protein precursor
  misc_feature (1)..(65): Homolog of NCBI NO: 2129596 NR Description: gibberellin-regulated protein GASA5 precursor -
  misc_feature (1)..(65): Homolog of NCBI NO: 40538965 NR Description: putative  gibberellin regulated protein
  misc_feature (6)..(65): Homolog of NCBI NO: 15226025 NR Description: gibberellin-regulated proteins -related
  misc_feature (16)..(65): Homolog of NCBI NO: 4102634 NR Description: Snakin-1 [Solanum tuberosum]
  misc_feature (1)..(65): Homolog of NCBI NO: 7447292 NR Description: gibberellin-stimulated transcript 1 like protein
  misc_feature (1)..(65): Homolog of NCBI NO: 15225493 NR Description: gibberellin-regulated proteins -related
  misc_feature (1)..(65): Homolog of NCBI NO: 9757905 NR Description: contains similarity to gibberellin-stimulated
  misc_feature (1)..(65): Homolog of NCBI NO: 18424288 NR Description: expressed protein [Arabidopsis thaliana]
  misc_feature (1)..(65): Homolog of NCBI NO: 14627134 NR Description: snakin-1 [Solanum tuberosum]
MAGSPFCDSKCAQRCAKAGVQDRCLRFCGICCEKCNCVPSGTYGNKDECPCYRDMKNSKGKDKCP

SEQ ID NO: 59136 - DNA, 1291 bp, Glycine max
  misc_feature (1)..(1291): Ceres Seq. ID no. 15177607
gtgtccttgccggttcgtgcagaaaggtccattgcattgcagtgtaagtatttacaaagcaaagcgaagcaagcattcactgaatgcgctctatctctctctttcgatctgggtactaaccctaacccgcttcgaaccgtggcttcctcaggctcgcagaacctctctcgaagaaaaccttcttcttcttcgtcttcgtcttctcaacaaacacccgggtcgacccggatcgtttaccgagaatctcggatcccatcggaatccgatttcccgatctggcagcagaactggttcatcgcattgctcttcgtcatggctctcggattcttcgccctcgccattttcctcttcctcactctcgactctgacatcgctccttcttccaccgcctccgcctccgcctccgccgcttcctccgaaggcgtcgaggtgcaggttacttacggcacggttctgaagcttatgcacgagaagaccaaatttcggttgcattctcatgacgtgccctacggttctggcagtggacaacaatcggttactggtttcccaaatgtcgacgattccaatagttactggattgtaagacctgagccaggaacttctgctaaacaaggtgaccccattaaaagtggcacaatcattagattgcagcacatgagaacaaggaagtggctgcacagccatttgcatgcatccccgatatcaggcaatcttgaggtcagttgttttggaggagaatccgaatctgacaccggggactattggaagcttataatagaaggaagtggaaagacttggaagcaggatcagaggattcgccttcagcatattgacactggaggctatctacatagtcatgataagaaatacagtcgtattgctgggggtcagcaggaggtttgtggtgttcgtgaaaagcgtgctgacaatgtgtggttggcagccgaaggtgtctaccttcccgttacggaaagcaaatgagttacttagtatcgatacttattctaaacgggtaaaccatggatagtgggagtgggtggctggcaccggttctgataacaaatgcaggtttttctattgaaggataaatatacaggagcatttaggattagataacggtagtaatattttgtcataggtacactttgttatgtagtaagtgcatgccccattttcattttccccgctgaaaatacttggtgtctgttgttttgtgaacgccatataccattcctctaataggactacgaaacgcaatgagtctatttttcaattgaattattatacggat

SEQ ID NO: 59137 - protein, 326 aa, Glycine max
  peptide (1)..(326): Ceres Seq. ID no. 15177608
  misc_feature (263)..(317): Pfam Name: MIR domain Pfam Description: MIR domain
  misc_feature (135)..(324): Homolog of NCBI NO: 38571762 NR Description: Unknown (protein for IMAGE:5693309) [Mus musculus]
  misc_feature (135)..(324): Homolog of NCBI NO: 2137796 NR Description: stromal cell-derived factor 2 - mouse
  misc_feature (137)..(326): Homolog of NCBI NO: 29840881 NR Description: similar to GenBank Accession Number AE003603
  misc_feature (133)..(324): Homolog of NCBI NO: 30584855 NR Description: Homo sapiens stromal cell-derived factor 2
  misc_feature (133)..(324): Homolog of NCBI NO: 14141195 NR Description: stromal cell-derived factor 2 precursor [Homo
  misc_feature (146)..(324): Homolog of NCBI NO: 31241809 NR Description: ENSANGP00000013320 [Anopheles gambiae]
  misc_feature (131)..(320): Homolog of NCBI NO: 24644197 NR Description: CG11999-PA [Drosophila melanogaster]
  misc_feature (155)..(325): Homolog of NCBI NO: 25412278 NR Description: hypothetical protein At2g25110 [imported] -
  misc_feature (105)..(325): Homolog of NCBI NO: 21593658 NR Description: unknown [Arabidopsis thaliana]
  misc_feature (105)..(325): Homolog of NCBI NO: 18400721 NR Description: expressed protein [Arabidopsis thaliana]
VSLPVRAERSIALQCKYLQSKAKQAFTECALSLSFDLGTNPNPLRTVASSGSQNLSRRKPSSSSSSSSQQTPGSTRIVYRESRIPSESDFPIWQQNWFIALLFVMALGFFALAIFLFLTLDSDIAPSSTASASASAASSEGVEVQVTYGTVLKLMHEKTKFRLHSHDVPYGSGSGQQSVTGFPNVDDSNSYWIVRPEPGTSAKQGDPIKSGTIIRLQHMRTRKWLHSHLHASPISGNLEVSCFGGESESDTGDYWKLIIEGSGKTWKQDQRIRLQHIDTGGYLHSHDKKYSRIAGGQQEVCGVREKRADNVWLAAEGVYLPVTESK

SEQ ID NO: 59138 - protein, 222 aa, Glycine max
  peptide (1)..(222): Ceres Seq. ID no. 15177609
  misc_feature (159)..(213): Pfam Name: MIR domain Pfam Description: MIR domain
  misc_feature (31)..(220): Homolog of NCBI NO: 38571762 NR Description: Unknown (protein for IMAGE:5693309) [Mus musculus]
  misc_feature (31)..(220): Homolog of NCBI NO: 2137796 NR Description: stromal cell-derived factor 2 - mouse
  misc_feature (33)..(222): Homolog of NCBI NO: 29840881 NR Description: similar to GenBank Accession Number AE003603
  misc_feature (29)..(220): Homolog of NCBI NO: 30584855 NR Description: Homo sapiens stromal cell-derived factor 2
  misc_feature (29)..(220): Homolog of NCBI NO: 14141195 NR Description: stromal cell-derived factor 2 precursor [Homo
  misc_feature (42)..(220): Homolog of NCBI NO: 31241809 NR Description: ENSANGP00000013320 [Anopheles gambiae]
  misc_feature (27)..(216): Homolog of NCBI NO: 24644197 NR Description: CG11999-PA [Drosophila melanogaster]
  misc_feature (51)..(221): Homolog of NCBI NO: 25412278 NR Description: hypothetical protein At2g25110 [imported] -
  misc_feature (1)..(221): Homolog of NCBI NO: 21593658 NR Description: unknown [Arabidopsis thaliana]
  misc_feature (1)..(221): Homolog of NCBI NO: 18400721 NR Description: expressed protein [Arabidopsis thaliana]
MALGFFALAIFLFLTLDSDIAPSSTASASASAASSEGVEVQVTYGTVLKLMHEKTKFRLHSHDVPYGSGSGQQSVTGFPNVDDSNSYWIVRPEPGTSAKQGDPIKSGTIIRLQHMRTRKWLHSHLHASPISGNLEVSCFGGESESDTGDYWKLIIEGSGKTWKQDQRIRLQHIDTGGYLHSHDKKYSRIAGGQQEVCGVREKRADNVWLAAEGVYLPVTESK

SEQ ID NO: 59139 - protein, 172 aa, Glycine max
  peptide (1)..(172): Ceres Seq. ID no. 15177610
  misc_feature (109)..(163): Pfam Name: MIR domain Pfam Description: MIR domain
  misc_feature (1)..(170): Homolog of NCBI NO: 40254617 NR Description: stromal cell derived factor 2 [Mus musculus]
  misc_feature (1)..(170): Homolog of NCBI NO: 2137796 NR Description: stromal cell-derived factor 2 - mouse
  misc_feature (1)..(172): Homolog of NCBI NO: 29840881 NR Description: similar to GenBank Accession Number AE003603
  misc_feature (1)..(170): Homolog of NCBI NO: 30584855 NR Description: Homo sapiens stromal cell-derived factor 2
  misc_feature (1)..(170): Homolog of NCBI NO: 14141195 NR Description: stromal cell-derived factor 2 precursor [Homo
  misc_feature (1)..(170): Homolog of NCBI NO: 31241809 NR Description: ENSANGP00000013320 [Anopheles gambiae]
  misc_feature (1)..(166): Homolog of NCBI NO: 24644197 NR Description: CG11999-PA [Drosophila melanogaster]
  misc_feature (1)..(171): Homolog of NCBI NO: 25412278 NR Description: hypothetical protein At2g25110 [imported] -
  misc_feature (1)..(171): Homolog of NCBI NO: 21593658 NR Description: unknown [Arabidopsis thaliana]
  misc_feature (1)..(171): Homolog of NCBI NO: 18400721 NR Description: expressed protein [Arabidopsis thaliana]
MHEKTKFRLHSHDVPYGSGSGQQSVTGFPNVDDSNSYWIVRPEPGTSAKQGDPIKSGTIIRLQHMRTRKWLHSHLHASPISGNLEVSCFGGESESDTGDYWKLIIEGSGKTWKQDQRIRLQHIDTGGYLHSHDKKYSRIAGGQQEVCGVREKRADNVWLAAEGVYLPVTESK

SEQ ID NO: 59140 - DNA, 1493 bp, Glycine max
  misc_feature (1)..(1493): Ceres Seq. ID no. 14308795
ggtaaaaggtactctctctcctctcatctttggatccccaaatctagggcttcttcttcttgtctgcgaaaatttcttgaatcactgtcttaattttcgtcatcaatttccgatttcgaatcttcgtctttgtttactttccatcgttgaagctgtgttgtgcttacttcactgtgctggttttgggtttcaagggatggaaaacatgcagagcttctggcaattgggtgatgaactccgtgggcactcaaaagcatcggaggatcacaagtggttaatggttgcctcgaaactggccgaacagacaagattgaagggggagcgtgtgaacaaccttgatctttcaaagggacccattgaaacaaggtcaagggataaatttgggttccaggaagagaacaaatttgattctcttaacttgagcatgttgaacctggactctaaatttactgagaatgtgagcaaaagctcacttcgaaatggtgtttatggtatgaatgcagtgtatcagaaaaacaatgcaaacttggtgagtaatgtgatcagtaacaagtacaatggcagtattcagcataacaaagagatcaacaacaacactggcaacaacatcaacaccaatgaaagcaacaacacaaatgcaactgacaaaaggtttaagaccttgcctgctgcggagacactcccccgcaatgaggtgcttggaggatacatctttgtctgtaacaatgacacaatgcaggaagacttgaaacgtcagctatttggtttgcctccaaggtatcgagattctgttagggcaataacaccagggctacctttatttctttataactatactactcatcagctgcatggtatttttgaggcagcaagttttggtggctctaacatagatccaactgcctgggaggataaaaaatgcaaaggggaatcaaggtttccagctcaggtaagaatccgtgtcaggaagctctgcaaggcattggaagaagattctttcaggccagtattgcatcattatgacgggccaaagtttcgtcttgaactgtcagttccagagactctggatctgttggacctatgtgaacaagctggttcagcagcataagcaagaatcaaacaaagaatgaatgtgcaaaataggtaggttttggtgtgccagctgtgtggttttggcagattttccgtgaagcgtaagcttggaaagtgaatcatcatcatgttttgggggaagtaaagggagcgtgttgttgagagtgagagaccctttgttggtgaataaatggttgttgtggtatctatcccctggaagatgctttgtagctgttacatgacatttaatacctttgtatgattaagtaaagtacagactactgtttgtactgctaaagtatgtatctgttgaaccaagaaaaaaattaaagttaaaaagcttcatgtattactaaactctatgttgagttggttgaagtgatcttttattttaaaaaaag

SEQ ID NO: 59141 - protein, 368 aa, Glycine max
  peptide (1)..(368): Ceres Seq. ID no. 14308796
  misc_feature (216)..(360): Homolog of NCBI NO: 34896110 NR Description: P0701D05.9 [Oryza sativa (japonica
  misc_feature (245)..(356): Homolog of NCBI NO: 7488804 NR Description: gda-1 protein - garden pea
  misc_feature (88)..(354): Homolog of NCBI NO: 34913876 NR Description: B1156H12.22 [Oryza sativa (japonica
  misc_feature (163)..(360): Homolog of NCBI NO: 9757950 NR Description: gene_id:MJC20.15~similar to unknown
  misc_feature (110)..(360): Homolog of NCBI NO: 18422167 NR Description: expressed protein [Arabidopsis thaliana]
  misc_feature (173)..(363): Homolog of NCBI NO: 584825 NR Description: B2 PROTEIN
  misc_feature (153)..(368): Homolog of NCBI NO: 21665866 NR Description: GDA2 protein [Pisum sativum]
  misc_feature (69)..(367): Homolog of NCBI NO: 15232081 NR Description: gda-1 -related [Arabidopsis thaliana]
  misc_feature (69)..(367): Homolog of NCBI NO: 21592623 NR Description: gda-1, putative [Arabidopsis thaliana]
  misc_feature (66)..(368): Homolog of NCBI NO: 2369766 NR Description: hypothetical protein [Citrus x paradisi]
VKGTLSPLIFGSPNLGLLLLVCENFLNHCLNFRHQFPISNLRLCLLSIVEAVLCLLHCAGFGFQGMENMQSFWQLGDELRGHSKASEDHKWLMVASKLAEQTRLKGERVNNLDLSKGPIETRSRDKFGFQEENKFDSLNLSMLNLDSKFTENVSKSSLRNGVYGMNAVYQKNNANLVSNVISNKYNGSIQHNKEINNNTGNNINTNESNNTNATDKRFKTLPAAETLPRNEVLGGYIFVCNNDTMQEDLKRQLFGLPPRYRDSVRAITPGLPLFLYNYTTHQLHGIFEAASFGGSNIDPTAWEDKKCKGESRFPAQVRIRVRKLCKALEEDSFRPVLHHYDGPKFRLELSVPETLDLLDLCEQAGSAA

SEQ ID NO: 59142 - protein, 303 aa, Glycine max; identical to SEQ ID NO: 58575
  peptide (1)..(303): Ceres Seq. ID no. 14308797
  misc_feature (151)..(295): Homolog of NCBI NO: 34896110 NR Description: P0701D05.9 [Oryza sativa (japonica
  misc_feature (180)..(291): Homolog of NCBI NO: 7488804 NR Description: gda-1 protein - garden pea
  misc_feature (23)..(289): Homolog of NCBI NO: 34913876 NR Description: B1156H12.22 [Oryza sativa (japonica
  misc_feature (98)..(295): Homolog of NCBI NO: 9757950 NR Description: gene_id:MJC20.15~similar to unknown
  misc_feature (45)..(295): Homolog of NCBI NO: 18422167 NR Description: expressed protein [Arabidopsis thaliana]
  misc_feature (108)..(298): Homolog of NCBI NO: 584825 NR Description: B2 PROTEIN
  misc_feature (88)..(303): Homolog of NCBI NO: 21665866 NR Description: GDA2 protein [Pisum sativum]
  misc_feature (4)..(302): Homolog of NCBI NO: 15232081 NR Description: gda-1 -related [Arabidopsis thaliana]
  misc_feature (4)..(302): Homolog of NCBI NO: 21592623 NR Description: gda-1, putative [Arabidopsis thaliana]
  misc_feature (1)..(303): Homolog of NCBI NO: 2369766 NR Description: hypothetical protein [Citrus x paradisi]

SEQ ID NO: 59143 - protein, 300 aa, Glycine max; identical to SEQ ID NO: 58576
  peptide (1)..(300): Ceres Seq. ID no. 14308798
  misc_feature (148)..(292): Homolog of NCBI NO: 34896110 NR Description: P0701D05.9 [Oryza sativa (japonica
  misc_feature (177)..(288): Homolog of NCBI NO: 7488804 NR Description: gda-1 protein - garden pea
  misc_feature (20)..(286): Homolog of NCBI NO: 34913876 NR Description: B1156H12.22 [Oryza sativa (japonica
  misc_feature (95)..(292): Homolog of NCBI NO: 9757950 NR Description: gene_id:MJC20.15~similar to unknown
  misc_feature (42)..(292): Homolog of NCBI NO: 18422167 NR Description: expressed protein [Arabidopsis thaliana]
  misc_feature (105)..(295): Homolog of NCBI NO: 584825 NR Description: B2 PROTEIN
  misc_feature (85)..(300): Homolog of NCBI NO: 21665866 NR Description: GDA2 protein [Pisum sativum]
  misc_feature (1)..(299): Homolog of NCBI NO: 15232081 NR Description: gda-1 -related [Arabidopsis thaliana]
  misc_feature (1)..(299): Homolog of NCBI NO: 21592623 NR Description: gda-1, putative [Arabidopsis thaliana]
  misc_feature (1)..(300): Homolog of NCBI NO: 2369766 NR Description: hypothetical protein [Citrus x paradisi]

SEQ ID NO: 59144 - DNA, 1256 bp, Glycine max
  misc_feature (1)..(1256): Ceres Seq. ID no. 13594176
cattacctagaaaatcctaatcgaaaaaattctgttgattcgcaattcaaattattcgtctcgctctcaatagagaagaaaaaaaaaactgcgtttttcaaatcggtaaattggctgacacatagtaaagaatcatattaatgtcgtcaagaacattgaggagaagactctatcatggggatgttgatggcaaaaggcaggagcatttggagacttcgggattggattctttgagtgagcccttgctggcagacgatgattatattgagaataagaagatatgtactcttgaagatctatgggatgatgagaagaagaaggcgcagtttcattggacattcatattctcaaaccttattgtgcaatgggctcagtggttagcaaatttggtattaggatctggatctattcttgggcgtcttttatcttttccttctgctgcactaaatatgcaaaacaataggatgtttcctccatctctaagccctctgcaggaagaaagactaagaaatctacgacaacggcttgaagttccctttgatggttctaaagcagagcaccaagacgcacttaaacaattgtggaaattggcttacccggacagggagcttccttcacttaaatcagacctttggaaggaaatgggatggcaaggttctgacccttcaacagattttaggggtggaggatttatttcattagagaatctcatcttctttgcgatgaagtatcctgattcattccagcgattattgcataaacaagatggaaccagagctgagtgggaatacccatttgcagtagctggaatcaatatttcttttatgttagcacagatgctggatcttcaagcagggcttccatcttctttgtccggaattcgttttctcaaattgcttgaagaagatgaaatggcatttgatatccttttttgtgttgcctttcaaatgatggatgctcagtggctagcaaagcgtgcgtcatatatggaatttaatgatgttttgagatccacaagaacgcagttagagcgtgagcttggtcttgaagacatcttcagcgtgaaagatttacctgcttacaacatgttgagatgattgacaattgcctttcagttcaacatttctcttcctttttttttttgtttcttttggcggagaatgttacatgaaatgtatctaaagcatttgtcattttatctctatatagaaacgtgaaaatcaaatatcagatcaatctttctgctgatttccatc

SEQ ID NO: 59145 - protein, 318 aa, Glycine max
  peptide (1)..(318): Ceres Seq. ID no. 13594177
  misc_feature (139)..(299): Pfam Name: Protein of unknown function, DUF609 Pfam Description: Protein of unknown function, DUF609
  misc_feature (81)..(317): Homolog of NCBI NO: 38345956 NR Description: OSJNBb0038F03.14 [Oryza sativa (japonica
  misc_feature (81)..(317): Homolog of NCBI NO: 18406626 NR Description: expressed protein [Arabidopsis thaliana]
  misc_feature (113)..(317): Homolog of NCBI NO: 18408759 NR Description: expressed protein [Arabidopsis thaliana]
  misc_feature (81)..(317): Homolog of NCBI NO: 14140119 NR Description: putative protein [Oryza sativa]
  misc_feature (81)..(317): Homolog of NCBI NO: 18411543 NR Description: expressed protein [Arabidopsis thaliana]
  misc_feature (97)..(317): Homolog of NCBI NO: 38344760 NR Description: OSJNBa0068L06.3 [Oryza sativa (japonica
  misc_feature (84)..(317): Homolog of NCBI NO: 15218859 NR Description: hypothetical protein [Arabidopsis thaliana]
  misc_feature (139)..(317): Homolog of NCBI NO: 6091761 NR Description: hypothetical protein [Arabidopsis thaliana]
  misc_feature (1)..(317): Homolog of NCBI NO: 21555509 NR Description: unknown [Arabidopsis thaliana]
  misc_feature (1)..(317): Homolog of NCBI NO: 18396599 NR Description: expressed protein [Arabidopsis thaliana]
MSSRTLRRRLYHGDVDGKRQEHLETSGLDSLSEPLLADDDYIENKKICTLEDLWDDEKKKAQFHWTFIFSNLIVQWAQWLANLVLGSGSILGRLLSFPSAALNMQNNRMFPPSLSPLQEERLRNLRQRLEVPFDGSKAEHQDALKQLWKLAYPDRELPSLKSDLWKEMGWQGSDPSTDFRGGGFISLENLIFFAMKYPDSFQRLLHKQDGTRAEWEYPFAVAGINISFMLAQMLDLQAGLPSSLSGIRFLKLLEEDEMAFDILFCVAFQMMDAQWLAKRASYMEFNDVLRSTRTQLERELGLEDIFSVKDLPAYNMLR

SEQ ID NO: 59146 - protein, 215 aa, Glycine max
  peptide (1)..(215): Ceres Seq. ID no. 13594178
  misc_feature (36)..(196): Pfam Name: Protein of unknown function, DUF609 Pfam Description: Protein of unknown function, DUF609
  misc_feature (1)..(214): Homolog of NCBI NO: 38345956 NR Description: OSJNBb0038F03.14 [Oryza sativa (japonica
  misc_feature (1)..(214): Homolog of NCBI NO: 18406626 NR Description: expressed protein [Arabidopsis thaliana]
  misc_feature (10)..(214): Homolog of NCBI NO: 18408759 NR Description: expressed protein [Arabidopsis thaliana]
  misc_feature (1)..(214): Homolog of NCBI NO: 14140119 NR Description: putative protein [Oryza sativa]
  misc_feature (1)..(214): Homolog of NCBI NO: 18411543 NR Description: expressed protein [Arabidopsis thaliana]
  misc_feature (1)..(214): Homolog of NCBI NO: 38344760 NR Description: OSJNBa0068L06.3 [Oryza sativa (japonica
  misc_feature (1)..(214): Homolog of NCBI NO: 15218859 NR Description: hypothetical protein [Arabidopsis thaliana]
  misc_feature (36)..(214): Homolog of NCBI NO: 6091761 NR Description: hypothetical protein [Arabidopsis thaliana]
  misc_feature (1)..(214): Homolog of NCBI NO: 21555509 NR Description: unknown [Arabidopsis thaliana]
  misc_feature (1)..(214): Homolog of NCBI NO: 18396599 NR Description: expressed protein [Arabidopsis thaliana]
MQNNRMFPPSLSPLQEERLRNLRQRLEVPFDGSKAEHQDALKQLWKLAYPDRELPSLKSDLWKEMGWQGSDPSTDFRGGGFISLENLIFFAMKYPDSFQRLLHKQDGTRAEWEYPFAVAGINISFMLAQMLDLQAGLPSSLSGIRFLKLLEEDEMAFDILFCVAFQMMDAQWLAKRASYMEFNDVLRSTRTQLERELGLEDIFSVKDLPAYNMLR

SEQ ID NO: 59147 - protein, 210 aa, Glycine max
  peptide (1)..(210): Ceres Seq. ID no. 13594179
  misc_feature (31)..(191): Pfam Name: Protein of unknown function, DUF609 Pfam Description: Protein of unknown function, DUF609
  misc_feature (1)..(209): Homolog of NCBI NO: 38345956 NR Description: OSJNBb0038F03.14 [Oryza sativa (japonica
  misc_feature (1)..(209): Homolog of NCBI NO: 18406626 NR Description: expressed protein [Arabidopsis thaliana]
  misc_feature (5)..(209): Homolog of NCBI NO: 18408759 NR Description: expressed protein [Arabidopsis thaliana]
  misc_feature (1)..(209): Homolog of NCBI NO: 14140119 NR Description: putative protein [Oryza sativa]
  misc_feature (1)..(209): Homolog of NCBI NO: 18411543 NR Description: expressed protein [Arabidopsis thaliana]
  misc_feature (1)..(209): Homolog of NCBI NO: 38344760 NR Description: OSJNBa0068L06.3 [Oryza sativa (japonica
  misc_feature (1)..(209): Homolog of NCBI NO: 15218859 NR Description: hypothetical protein [Arabidopsis thaliana]
  misc_feature (31)..(209): Homolog of NCBI NO: 6091761 NR Description: hypothetical protein [Arabidopsis thaliana]
  misc_feature (1)..(209): Homolog of NCBI NO: 21555509 NR Description: unknown [Arabidopsis thaliana]
  misc_feature (1)..(209): Homolog of NCBI NO: 18396599 NR Description: expressed protein [Arabidopsis thaliana]
MFPPSLSPLQEERLRNLRQRLEVPFDGSKAEHQDALKQLWKLAYPDRELPSLKSDLWKEMGWQGSDPSTDFRGGGFISLENLIFFAMKYPDSFQRLLHKQDGTRAEWEYPFAVAGINISFMLAQMLDLQAGLPSSLSGIRFLKLLEEDEMAFDILFCVAFQMMDAQWLAKRASYMEFNDVLRSTRTQLERELGLEDIFSVKDLPAYNMLR

SEQ ID NO: 59148 - DNA, 1420 bp, Glycine max
  misc_feature (1)..(1420): Ceres Seq. ID no. 14312254
ctttctctctcgtaatacaatttctctctctagaataaaacagcttctaccgcctccaagtcctacaagaacccattccctctcacaccgcccccaaaatctcactcttctgccttctcttttctcttctcttcttcctccaaaacaagtaaacaaacaacactctcacattcaccacaacacaaacacaaacacaaacaaagacaacaaccttgtttgtctgcaatcaaaacctttcaagctggcgttcgagaaccaagacacccctgtccgagaaatcaagcccaagaaccggagaatcatgggtgctggaggccctgatgacgaggacaataggtggccaccatggctgaaacctcttctcaaagagagcttctttgttcaatgcaagcttcacgctgattcgcacaagagcgagtgcaacatgtattgcttagattgtatgaacggtgctctctgctctctctgcctcgcttaccacaaagatcaccgtgctattcagataagaaggtcttcataccatgatgtgattagggttaatgagattcagaaggtgttggacatcacaggggtccaaacctacattatcaacagcgcaagggttgttttcttgaatgagaggcctcagccaaggcctggtaaaggtgtcaccaacacttgtgaagtctgcgagcgcagccttcttgattccttccgattctgttctcttggttgcaagattgttgggacttcaaggaacttccagaagaagaaaaagtcagcggcaatgggatcagacacagaggattcttcgtacagcagcaacagcagccatgggaagaagaacagcttcacaccgtccacaccgcctccaacttctgttaattacagaacggccaagagaagaaagggaattccacaccgtgccccaatgggtgggctagtcatagaatactagaaattaagttagtagtaactttaggttatttgctataatgccccctgataaattttacctcaaaacgcaactttctccgtgcagtttcacccgtcacaacacactcgagctttttgctgtaaaaggccggtgctggaattgtgttcccttctctgttccttgttaatagcgtttgtctatataggaaaaatccaatagaagtgaaaaaaaggttgagaaagtagaaaaaaaataagacatgtgatctgtgaaatagtttgagagaaaaagaatggtgcagcaaaataagcaaatgttcctttcaaccaaagtacaggaagatgaggaacattataggtttggtttctagagcaattatacgtaagttttggggtgggtgtaaatagtggcttggggaagaagacagtgacaatgtactctttccaaatagatggattgtttatggaatggtgaaaaataataatagtactaatagattttctc

SEQ ID NO: 59149 - protein, 311 aa, Glycine max
  peptide (1)..(311): Ceres Seq. ID no. 14312255
  misc_feature (113)..(298): Pfam Name: Protein of unknown function, DUF597 Pfam Description: Protein of unknown function, DUF597
  misc_feature (108)..(246): Homolog of NCBI NO: 21536890 NR Description: unknown [Arabidopsis thaliana]
  misc_feature (108)..(246): Homolog of NCBI NO: 25337904 NR Description: unknown protein F14G6.19 [imported] - Arabidopsis
  misc_feature (108)..(246): Homolog of NCBI NO: 18411153 NR Description: expressed protein [Arabidopsis thaliana]
  misc_feature (81)..(303): Homolog of NCBI NO: 15237491 NR Description: expressed protein [Arabidopsis thaliana]
  misc_feature (85)..(311): Homolog of NCBI NO: 37537092 NR Description: unknown protein [Oryza sativa (japonica
  misc_feature (97)..(285): Homolog of NCBI NO: 38346725 NR Description: OSJNBa0086O06.23 [Oryza sativa (japonica
  misc_feature (81)..(287): Homolog of NCBI NO: 15236696 NR Description: expressed protein [Arabidopsis thaliana]
  misc_feature (105)..(311): Homolog of NCBI NO: 21554139 NR Description: unknown [Arabidopsis thaliana]
  misc_feature (105)..(311): Homolog of NCBI NO: 18398555 NR Description: expressed protein [Arabidopsis thaliana]
  misc_feature (80)..(311): Homolog of NCBI NO: 6714272 NR Description: F6N18.8 [Arabidopsis thaliana]
FLSRNTISLSRIKQLLPPPSPTRTHSLSHRPQNLTLLPSLFSSLLPPKQVNKQHSHIHHNTNTNTNKDNNLVCLQSKPFKLAFENQDTPVREIKPKNRRIMGAGGPDDEDNRWPPWLKPLLKESFFVQCKLHADSHKSECNMYCLDCMNGALCSLCLAYHKDHRAIQIRRSSYHDVIRVNEIQKVLDITGVQTYIINSARVVFLNERPQPRPGKGVTNTCEVCERSLLDSFRFCSLGCKIVGTSRNFQKKKKSAAMGSDTEDSSYSSNSSHGKKNSFTPSTPPPTSVNYRTAKRRKGIPHRAPMGGLVIEY

SEQ ID NO: 59150 - protein, 211 aa, Glycine max
  peptide (1)..(211): Ceres Seq. ID no. 14312256
  misc_feature (13)..(198): Pfam Name: Protein of unknown function, DUF597 Pfam Description: Protein of unknown function, DUF597
  misc_feature (8)..(146): Homolog of NCBI NO: 21536890 NR Description: unknown [Arabidopsis thaliana]
  misc_feature (8)..(146): Homolog of NCBI NO: 25337904 NR Description: unknown protein F14G6.19 [imported] - Arabidopsis
  misc_feature (8)..(146): Homolog of NCBI NO: 18411153 NR Description: expressed protein [Arabidopsis thaliana]
  misc_feature (1)..(203): Homolog of NCBI NO: 15237491 NR Description: expressed protein [Arabidopsis thaliana]
  misc_feature (1)..(211): Homolog of NCBI NO: 37537092 NR Description: unknown protein [Oryza sativa (japonica
  misc_feature (1)..(185): Homolog of NCBI NO: 38346725 NR Description: OSJNBa0086O06.23 [Oryza sativa (japonica
  misc_feature (1)..(187): Homolog of NCBI NO: 15236696 NR Description: expressed protein [Arabidopsis thaliana]
  misc_feature (5)..(211): Homolog of NCBI NO: 21554139 NR Description: unknown [Arabidopsis thaliana]
  misc_feature (5)..(211): Homolog of NCBI NO: 18398555 NR Description: expressed protein [Arabidopsis thaliana]
  misc_feature (1)..(211): Homolog of NCBI NO: 6714272 NR Description: F6N18.8 [Arabidopsis thaliana]
MGAGGPDDEDNRWPPWLKPLLKESFFVQCKLHADSHKSECNMYCLDCMNGALCSLCLAYHKDHRAIQIRRSSYHDVIRVNEIQKVLDITGVQTYIINSARVVFLNERPQPRPGKGVTNTCEVCERSLLDSFRFCSLGCKIVGTSRNFQKKKKSAAMGSDTEDSSYSSNSSHGKKNSFTPSTPPPTSVNYRTAKRRKGIPHRAPMGGLVIEY

SEQ ID NO: 59151 - protein, 170 aa, Glycine max
  peptide (1)..(170): Ceres Seq. ID no. 14312257
  misc_feature (1)..(157): Pfam Name: Protein of unknown function, DUF597 Pfam Description: Protein of unknown function, DUF597
  misc_feature (1)..(105): Homolog of NCBI NO: 21536890 NR Description: unknown [Arabidopsis thaliana]
  misc_feature (1)..(105): Homolog of NCBI NO: 25337904 NR Description: unknown protein F14G6.19 [imported] - Arabidopsis
  misc_feature (1)..(105): Homolog of NCBI NO: 18411153 NR Description: expressed protein [Arabidopsis thaliana]
  misc_feature (1)..(162): Homolog of NCBI NO: 15237491 NR Description: expressed protein [Arabidopsis thaliana]
  misc_feature (1)..(170): Homolog of NCBI NO: 37537092 NR Description: unknown protein [Oryza sativa (japonica
  misc_feature (1)..(144): Homolog of NCBI NO: 38346725 NR Description: OSJNBa0086O06.23 [Oryza sativa (japonica
  misc_feature (1)..(146): Homolog of NCBI NO: 15236696 NR Description: expressed protein [Arabidopsis thaliana]
  misc_feature (1)..(170): Homolog of NCBI NO: 21554139 NR Description: unknown [Arabidopsis thaliana]
  misc_feature (1)..(170): Homolog of NCBI NO: 18398555 NR Description: expressed protein [Arabidopsis thaliana]
  misc_feature (1)..(170): Homolog of NCBI NO: 6714272 NR Description: F6N18.8 [Arabidopsis thaliana]
MYCLDCMNGALCSLCLAYHKDHRAIQIRRSSYHDVIRVNEIQKVLDITGVQTYIINSARVVFLNERPQPRPGKGVTNTCEVCERSLLDSFRFCSLGCKIVGTSRNFQKKKKSAAMGSDTEDSSYSSNSSHGKKNSFTPSTPPPTSVNYRTAKRRKGIPHRAPMGGLVIEY

SEQ ID NO: 59152 - DNA, 711 bp, Glycine max
  misc_feature (1)..(711): Ceres Seq. ID no. 14304144
acctcttgctcttgcttatactaactaactcttcttgagaaactctttctcacacgccaagagtaacatgggatttccagtggggtacacagagttgatgctgccgaaggtgtttctgcaggtgctatccgtattgggcttgataagaaaactcatcaccgtcctcttgtgctacatgggcttccacgatttcttcgaatccgacattgcgtggccggagagggcgccggaattccagtcggtgtgggcggtgctcataagggaaatcctaccggtggtgaagttctcggagatggagatggagatggcggaggcgccggagagctgcgcggtgtgtctgtacgagttcgagggagaggacgagatcagacggctgacgaactgccgccacatattccacagagggtgtctggaccgttggatgggatacgatcaaagaacgtgtcccctgtgtcggacacccttcataccccaccatatgcaagctgccttcaatgatagactttgggctgcttcagggattcctgatttctattacaatcatgaatgactctagggaaaaaaaatcctagatttggggacgggagtgttctgtttaggttgttgagtatgtgttcagtgttcaatgttcgtgtaaatattatacaaaatggaaagcggagaattgttgttaaaaaaaaaaaaaaaaaaaaaaaaaaaaaaaaaaaaacc

SEQ ID NO: 59153 - protein, 160 aa, Glycine max
  peptide (1)..(160): Ceres Seq. ID no. 14304145
  misc_feature (87)..(129): Pfam Name: Zinc finger, C3HC4 type (RING finger) Pfam Description: Zinc finger, C3HC4 type (RING finger)
  misc_feature (1)..(135): Homolog of NCBI NO: 15233352 NR Description: RING-H2 finger protein, putative [Arabidopsis
  misc_feature (1)..(135): Homolog of NCBI NO: 11358776 NR Description: RING-H2 finger protein RHA1a [imported] -
  misc_feature (1)..(150): Homolog of NCBI NO: 11358777 NR Description: RING-H2 finger protein RHA1b [imported] -
  misc_feature (52)..(154): Homolog of NCBI NO: 32488512 NR Description: OSJNBa0011J08.19 [Oryza sativa (japonica
  misc_feature (1)..(46): Homolog of NCBI NO: 15238072 NR Description: RING-H2 zinc finger protein, putative
  misc_feature (56)..(150): Homolog of NCBI NO: 15238072 NR Description: RING-H2 zinc finger protein, putative
  misc_feature (1)..(46): Homolog of NCBI NO: 21554155 NR Description: RING zinc finger protein-like [Arabidopsis
  misc_feature (56)..(150): Homolog of NCBI NO: 21554155 NR Description: RING zinc finger protein-like [Arabidopsis
  misc_feature (1)..(150): Homolog of NCBI NO: 15222553 NR Description: RING-H2 finger protein, putative [Arabidopsis
  misc_feature (1)..(156): Homolog of NCBI NO: 15233117 NR Description: BRH1 RING finger protein [Arabidopsis thaliana]
MGFPVGYTELMLPKVFLQVLSVLGLIRKLITVLLCYMGFHDFFESDIAWPERAPEFQSVWAVLIREILPVVKFSEMEMEMAEAPESCAVCLYEFEGEDEIRRLTNCRHIFHRGCLDRWMGYDQRTCPLCRTPFIPHHMQAAFNDRLWAASGIPDFYYNHE

SEQ ID NO: 59154 - protein, 150 aa, Glycine max
  peptide (1)..(150): Ceres Seq. ID no. 14304146
  misc_feature (77)..(119): Pfam Name: Zinc finger, C3HC4 type (RING finger) Pfam Description: Zinc finger, C3HC4 type (RING finger)
  misc_feature (1)..(125): Homolog of NCBI NO: 15233352 NR Description: RING-H2 finger protein, putative [Arabidopsis
  misc_feature (1)..(125): Homolog of NCBI NO: 11358776 NR Description: RING-H2 finger protein RHA1a [imported] -
  misc_feature (1)..(140): Homolog of NCBI NO: 11358777 NR Description: RING-H2 finger protein RHA1b [imported] -
  misc_feature (42)..(144): Homolog of NCBI NO: 32488512 NR Description: OSJNBa0011J08.19 [Oryza sativa (japonica
  misc_feature (1)..(36): Homolog of NCBI NO: 15238072 NR Description: RING-H2 zinc finger protein, putative
  misc_feature (46)..(140): Homolog of NCBI NO: 15238072 NR Description: RING-H2 zinc finger protein, putative
  misc_feature (1)..(36): Homolog of NCBI NO: 21554155 NR Description: RING zinc finger protein-like [Arabidopsis
  misc_feature (46)..(140): Homolog of NCBI NO: 21554155 NR Description: RING zinc finger protein-like [Arabidopsis
  misc_feature (1)..(140): Homolog of NCBI NO: 15222553 NR Description: RING-H2 finger protein, putative [Arabidopsis
  misc_feature (1)..(146): Homolog of NCBI NO: 15233117 NR Description: BRH1 RING finger protein [Arabidopsis thaliana]
MLPKVFLQVLSVLGLIRKLITVLLCYMGFHDFFESDIAWPERAPEFQSVWAVLIREILPVVKFSEMEMEMAEAPESCAVCLYEFEGEDEIRRLTNCRHIFHRGCLDRWMGYDQRTCPLCRTPFIPHHMQAAFNDRLWAASGIPDFYYNHE

SEQ ID NO: 59155 - protein, 124 aa, Glycine max
  peptide (1)..(124): Ceres Seq. ID no. 14304147
  misc_feature (51)..(93): Pfam Name: Zinc finger, C3HC4 type (RING finger) Pfam Description: Zinc finger, C3HC4 type (RING finger)
  misc_feature (1)..(99): Homolog of NCBI NO: 15229284 NR Description: zinc finger (C3HC4-type RING finger) protein
  misc_feature (1)..(114): Homolog of NCBI NO: 15233350 NR Description: RING-H2 finger protein RHA1b [Arabidopsis
  misc_feature (1)..(99): Homolog of NCBI NO: 15233352 NR Description: RING-H2 finger protein, putative [Arabidopsis
  misc_feature (1)..(99): Homolog of NCBI NO: 11358776 NR Description: RING-H2 finger protein RHA1a [imported] -
  misc_feature (1)..(114): Homolog of NCBI NO: 11358777 NR Description: RING-H2 finger protein RHA1b [imported] -
  misc_feature (16)..(118): Homolog of NCBI NO: 32488512 NR Description: OSJNBa0011J08.19 [Oryza sativa (japonica
  misc_feature (20)..(114): Homolog of NCBI NO: 15238072 NR Description: RING-H2 zinc finger protein, putative
  misc_feature (20)..(114): Homolog of NCBI NO: 21554155 NR Description: RING zinc finger protein-like [Arabidopsis
  misc_feature (1)..(114): Homolog of NCBI NO: 15222553 NR Description: RING-H2 finger protein, putative [Arabidopsis
  misc_feature (1)..(120): Homolog of NCBI NO: 15233117 NR Description: BRH1 RING finger protein [Arabidopsis thaliana]
MGFHDFFESDIAWPERAPEFQSVWAVLIREILPVVKFSEMEMEMAEAPESCAVCLYEFEGEDEIRRLTNCRHIFHRGCLDRWMGYDQRTCPLCRTPFIPHHMQAAFNDRLWAASGIPDFYYNHE

SEQ ID NO: 59156 - DNA, 1632 bp, Glycine max
  misc_feature (1)..(1632): Ceres Seq. ID no. 15172426
gaagggaagaaccactaccaaacttcaactcactttctctctctcattctccctctctctcaccccctccgatctataaatcattctctctctctctctctctctcttacttacaaagtaaagagtagagtttgttctgtgaagaactgagggaggttcaggtccatgatattttgaaatctctctgtagtaggaagaccatgggacgagcttcatcattacttataatttttttggttcttggttcttcctttgccacctataatgtggtaacgatgataaggcactacggatcttcagaaggtgtggctgttaatgatggtgcattgttttttgaccctattactgagatgcctgatcatgtaaagaatcggaagacatctaaagtgccctttcatgtcgcgttaacggcgacggatgctccatataacaaatggcagtgccgcgtcatgtattactggtataaacaacaaaagaagttacctgggtctgagatgggaggattcacgaggattctacattctggaaatcctgacaacttgatggatgaaattcctactgttgtggttgatccccttccagcaggtttggatcggggatacattgttctgaataggccatgggcctttgttcagtggctggaaaagactaaaatagaggaagaatatgtgttaatggcagagcccgatcacatatttgtgcgtcctctgcccaatctggcctatggaggacatccggctgcttttccatttttttacattagacctgatgagaatgaaaaaatcataaggaagttttatcctgaggagctgggaccagttacaaatgttgatccaattggaaattcgcctgtaattataagaaaggatttgattgcaaagattgcccccacatggatgaatatttctttgaagatgaaagaggatccagagactgataaagcttttggatgggtgctagaaatgtatgcttatgctgttgcatctgctctgcatggtgtgaggcacattctgcggaaagacttcatgctgcagcccccatgggatcttgaaactaacaagaagtacattatacattacacttacggatgtgactacaatatgaagggtgaattgacttatggcaaagttggtgaatggagatttgacaaaaggtcgcatctacgaggacctccaccaaaaaacttgcccctgcccccaccaggggttcctgaaagtgtggtaacccttgtaaagatggtgaacgaggctagtgctaacatcccaaattgggacacatcgtaaatattttccacctcatcatgatgatatcccaagtgcacattttaaaaagaaaaaaaattgacaatgagtctttttttttttttttttatcacgagtttagtcttattagatggatagatgaatgtaagcaataccattttatatgacaattaaatacaggataaatatttatatttttttttcttgttggtgatatttttgaatggtatttgggctcgtaccacaatggctgatactttgttcattaagtattggcttcgaaattgcttatgtatatgttagacaattcttgtattgtatgccatgcatagccctagacaacataataattgtttctcttcatttctac

SEQ ID NO: 59157 - protein, 360 aa, Glycine max
  peptide (1)..(360): Ceres Seq. ID no. 15172427
  misc_feature (41)..(317): Homolog of NCBI NO: 22330795 NR Description: expressed protein [Arabidopsis thaliana]
  misc_feature (3)..(158): Homolog of NCBI NO: 34903224 NR Description: unnamed protein product [Oryza sativa (japonica
  misc_feature (57)..(134): Homolog of NCBI NO: 25371351 NR Description: hypothetical protein At2g25260 [imported] -
  misc_feature (193)..(355): Homolog of NCBI NO: 25371351 NR Description: hypothetical protein At2g25260 [imported] -
  misc_feature (57)..(134): Homolog of NCBI NO: 30682704 NR Description: expressed protein [Arabidopsis thaliana]
  misc_feature (193)..(359): Homolog of NCBI NO: 30682704 NR Description: expressed protein [Arabidopsis thaliana]
  misc_feature (2)..(359): Homolog of NCBI NO: 24413996 NR Description: hypothetical protein~similar to Arabidopsis
  misc_feature (1)..(357): Homolog of NCBI NO: 22327055 NR Description: expressed protein [Arabidopsis thaliana]
  misc_feature (1)..(359): Homolog of NCBI NO: 15240642 NR Description: expressed protein [Arabidopsis thaliana]
MGRASSLLIIFLVLGSSFATYNVVTMIRHYGSSEGVAVNDGALFFDPITEMPDHVKNRKTSKVPFHVALTATDAPYNKWQCRVMYYWYKQQKKLPGSEMGGFTRILHSGNPDNLMDEIPTVVVDPLPAGLDRGYIVLNRPWAFVQWLEKTKIEEEYVLMAEPDHIFVRPLPNLAYGGHPAAFPFFYIRPDENEKIIRKFYPEELGPVTNVDPIGNSPVIIRKDLIAKIAPTWMNISLKMKEDPETDKAFGWVLEMYAYAVASALHGVRHILRKDFMLQPPWDLETNKKYIIHYTYGCDYNMKGELTYGKVGEWRFDKRSHLRGPPPKNLPLPPPGVPESVVTLVKMVNEASANIPNWDTS

SEQ ID NO: 59158 - protein, 335 aa, Glycine max
  peptide (1)..(335): Ceres Seq. ID no. 15172428
  misc_feature (16)..(292): Homolog of NCBI NO: 22330795 NR Description: expressed protein [Arabidopsis thaliana]
  misc_feature (1)..(133): Homolog of NCBI NO: 34903224 NR Description: unnamed protein product [Oryza sativa (japonica
  misc_feature (32)..(109): Homolog of NCBI NO: 25371351 NR Description: hypothetical protein At2g25260 [imported] -
  misc_feature (168)..(330): Homolog of NCBI NO: 25371351 NR Description: hypothetical protein At2g25260 [imported] -
  misc_feature (32)..(109): Homolog of NCBI NO: 30682704 NR Description: expressed protein [Arabidopsis thaliana]
  misc_feature (168)..(334): Homolog of NCBI NO: 30682704 NR Description: expressed protein [Arabidopsis thaliana]
  misc_feature (1)..(334): Homolog of NCBI NO: 24413996 NR Description: hypothetical protein~similar to Arabidopsis
  misc_feature (1)..(332): Homolog of NCBI NO: 22327055 NR Description: expressed protein [Arabidopsis thaliana]
  misc_feature (1)..(334): Homolog of NCBI NO: 15240642 NR Description: expressed protein [Arabidopsis thaliana]
MIRHYGSSEGVAVNDGALFFDPITEMPDHVKNRKTSKVPFHVALTATDAPYNKWQCRVMYYWYKQQKKLPGSEMGGFTRILHSGNPDNLMDEIPTVVVDPLPAGLDRGYIVLNRPWAFVQWLEKTKIEEEYVLMAEPDHIFVRPLPNLAYGGHPAAFPFFYIRPDENEKIIRKFYPEELGPVTNVDPIGNSPVIIRKDLIAKIAPTWMNISLKMKEDPETDKAFGWVLEMYAYAVASALHGVRHILRKDFMLQPPWDLETNKKYIIHYTYGCDYNMKGELTYGKVGEWRFDKRSHLRGPPPKNLPLPPPGVPESVVTLVKMVNEASANIPNWDTS

SEQ ID NO: 59159 - protein, 310 aa, Glycine max
  peptide (1)..(310): Ceres Seq. ID no. 15172429
  misc_feature (1)..(267): Homolog of NCBI NO: 22330795 NR Description: expressed protein [Arabidopsis thaliana]
  misc_feature (1)..(108): Homolog of NCBI NO: 34903224 NR Description: unnamed protein product [Oryza sativa (japonica
  misc_feature (7)..(84): Homolog of NCBI NO: 25371351 NR Description: hypothetical protein At2g25260 [imported] -
  misc_feature (143)..(305): Homolog of NCBI NO: 25371351 NR Description: hypothetical protein At2g25260 [imported] -
  misc_feature (7)..(84): Homolog of NCBI NO: 30682704 NR Description: expressed protein [Arabidopsis thaliana]
  misc_feature (143)..(309): Homolog of NCBI NO: 30682704 NR Description: expressed protein [Arabidopsis thaliana]
  misc_feature (1)..(309): Homolog of NCBI NO: 24413996 NR Description: hypothetical protein~similar to Arabidopsis
  misc_feature (1)..(307): Homolog of NCBI NO: 22327055 NR Description: expressed protein [Arabidopsis thaliana]
  misc_feature (1)..(309): Homolog of NCBI NO: 15240642 NR Description: expressed protein [Arabidopsis thaliana]
MPDHVKNRKTSKVPFHVALTATDAPYNKWQCRVMYYWYKQQKKLPGSEMGGFTRILHSGNPDNLMDEIPTVVVDPLPAGLDRGYIVLNRPWAFVQWLEKTKIEEEYVLMAEPDHIFVRPLPNLAYGGHPAAFPFFYIRPDENEKIIRKFYPEELGPVTNVDPIGNSPVIIRKDLIAKIAPTWMNISLKMKEDPETDKAFGWVLEMYAYAVASALHGVRHILRKDFMLQPPWDLETNKKYIIHYTYGCDYNMKGELTYGKVGEWRFDKRSHLRGPPPKNLPLPPPGVPESVVTLVKMVNEASANIPNWDTS

SEQ ID NO: 59160 - DNA, 1016 bp, Glycine max
  misc_feature (1)..(1016): Ceres Seq. ID no. 15172402
aaaacctcacatattttcgtccattaccacttccacttttcctctctctcgttttggtcactccaaagtccaaatcgatcactcttcactctcattattcccaacctaacaacaacaatgatcccagaacactactccgactcatctctcttccacagctccctccttaccctcttcctaatcgcaccccccaccttcctctccctcaccttcctccaggccccctacggcaagcaccacaggcccggctgggggcccaacctccctccccccttagcctggctcctcatggaaagcccaaccctctggctcaccctcctgctcttcccactgggcctccactcccacaaccccaaagcccaggccctcatcacccccttcctaatccactacttcaaccgcaccatcctctaccctctccacctcctcctcactccttcaaagaaaaccacaccgggcttccccctcagcgtagccctaatggcattcgccttcaacgttctcaattcctacctccaggcccgaacggtctctcactacaacaatcaccatgatgactcgggctttttctggttccggtttttgtgtgggcttttggtgtttttattggggatggggattaatgtatgggctgatagggttttgttgcggctcaagagcgagggaaagggctacgtggtgccgcgcggtgggttgttcgagctcgtggcgtgtccgaattactttggggagattgtcgagtggctcggctgggccgtgatgacttggtcatgggccgggctgggcttttttgtttacacttttgcgaatttgggtccaagggcccgggccaaccgtaggtggtatttggagaagtttggggaggattatccaaaggagagaaaggctgttattccttacttgtattgagtttttttttaatgattttcttttattggatttggaattgggaatgtgggtaaaatgatgaataattgaatgtggtgatgaatgatgcaatgcagctcaacttgctc

SEQ ID NO: 59161 - protein, 302 aa, Glycine max
  peptide (1)..(302): Ceres Seq. ID no. 15172403
  misc_feature (152)..(302): Pfam Name: 3-oxo-5-alpha-steroid 4-dehydrogenase Pfam Description: 3-oxo-5-alpha-steroid 4-dehydrogenase
KTSHIFVHYHFHFSSLSFWSLQSPNRSLFTLIIPNLTTTMIPEHYSDSSLFHSSLLTLFLIAPPTFLSLTFLQAPYGKHHRPGWGPNLPPPLAWLLMESPTLWLTLLLFPLGLHSHNPKAQALITPFLIHYFNRTILYPLHLLLTPSKKTTPGFPLSVALMAFAFNVLNSYLQARTVSHYNNHHDDSGFFWFRFLCGLLVFLLGMGINVWADRVLLRLKSEGKGYVVPRGGLFELVACPNYFGEIVEWLGWAVMTWSWAGLGFFVYTFANLGPRARANRRWYLEKFGEDYPKERKAVIPYLY

SEQ ID NO: 59162 - protein, 263 aa, Glycine max
  peptide (1)..(263): Ceres Seq. ID no. 15172404
  misc_feature (113)..(263): Pfam Name: 3-oxo-5-alpha-steroid 4-dehydrogenase Pfam Description: 3-oxo-5-alpha-steroid 4-dehydrogenase
MIPEHYSDSSLFHSSLLTLFLIAPPTFLSLTFLQAPYGKHHRPGWGPNLPPPLAWLLMESPTLWLTLLLFPLGLHSHNPKAQALITPFLIHYFNRTILYPLHLLLTPSKKTTPGFPLSVALMAFAFNVLNSYLQARTVSHYNNHHDDSGFFWFRFLCGLLVFLLGMGINVWADRVLLRLKSEGKGYVVPRGGLFELVACPNYFGEIVEWLGWAVMTWSWAGLGFFVYTFANLGPRARANRRWYLEKFGEDYPKERKAVIPYLY

SEQ ID NO: 59163 - protein, 206 aa, Glycine max
  peptide (1)..(206): Ceres Seq. ID no. 15172405
  misc_feature (56)..(206): Pfam Name: 3-oxo-5-alpha-steroid 4-dehydrogenase Pfam Description: 3-oxo-5-alpha-steroid 4-dehydrogenase
MESPTLWLTLLLFPLGLHSHNPKAQALITPFLIHYFNRTILYPLHLLLTPSKKTTPGFPLSVALMAFAFNVLNSYLQARTVSHYNNHHDDSGFFWFRFLCGLLVFLLGMGINVWADRVLLRLKSEGKGYVVPRGGLFELVACPNYFGEIVEWLGWAVMTWSWAGLGFFVYTFANLGPRARANRRWYLEKFGEDYPKERKAVIPYLY

SEQ ID NO: 59164 - DNA, 1175 bp, Glycine max
  misc_feature (1)..(1175): Ceres Seq. ID no. 13581621
gacagtaccgaagagtttaacctattgttgggattgcttgttcctttgatatgaaggtcacaagtctcaagctttcaattgatcatttgacttcaactgagtccctgtttctgatctcttaagattcacttatttaattgttattgtacttcctgatgtttcatttcttcagattgagtctcttcaccattttttgcaactgagattttgggttttgttgatcgtgcctaggtgaaaagctgagatctttattttgagaatagcaattattcatctatttggacgctgggttttatcaaaatgaggaagcgtcaagtcttgaagcattcaattgctattgtaagcatgctggtgtgtgtttgctgcttttttattgtgtctgtgactgttttcaagctcccagaggccccaagaaaagataggcaaatggggttttacccaacaatcagatccagaaaagtttcccttcaagatttcaacttgggtaagtttggggaaatgatgattgacatgttgcctcaagatcttgcttttaccgtatttgttccgtccgaggatgctttcaagcgagatctgcgtctgtcggtgagtgatagtttgaaaccagacgagttcaatgatacttacgcgattgtgactcgtattttggggttttcagctgttcctaggatactttcttcggctaatgtgcaatcgggtgagcttgtgaactatgattcgttatctgggtttcccttgtatgtctcaaaagacatcgatggaatgcttgttgttaataggattcgatcagaaatagtagatgttaggaagaaggagattgttgtccatgtcatggatggggttattatggatgctgaatttgagcaatcggttttagctgaggatgatacagaggaggattgacttgacggtattcgggttttgccctttgattttggcttcatattttgttgtattcaacggtggcataacagaattaaaaaaaaaaaacaaacagtgccattgtcttttcacttgtacatgttacaatgtatctcttttcctgtacacggccctactgttggctagtcctacaaatcctggaacttgcccccatttcaaaataattgttaaaaaggtatcacgaattacttgtaacgatatatttaatggggatagtctcctcctttgctgtc

SEQ ID NO: 59165 - protein, 200 aa, Glycine max
  peptide (1)..(200): Ceres Seq. ID no. 13581622
  misc_feature (68)..(183): Pfam Name: Fasciclin domain Pfam Description: Fasciclin domain
  misc_feature (60)..(196): Homolog of NCBI NO: 27357986 NR Description: Unknown protein [Oryza sativa (japonica
  misc_feature (1)..(200): Homolog of NCBI NO: 15228748 NR Description: hypothetical protein [Arabidopsis thaliana]
MRKRQVLKHSIAIVSMLVCVCCFFIVSVTVFKLPEAPRKDRQMGFYPTIRSRKVSLQDFNLGKFGEMMIDMLPQDLAFTVFVPSEDAFKRDLRLSVSDSLKPDEFNDTYAIVTRILGFSAVPRILSSANVQSGELVNYDSLSGFPLYVSKDIDGMLVVNRIRSEIVDVRKKEIVVHVMDGVIMDAEFEQSVLAEDDTEED

SEQ ID NO: 59166 - protein, 185 aa, Glycine max
  peptide (1)..(185): Ceres Seq. ID no. 13581623
  misc_feature (53)..(168): Pfam Name: Fasciclin domain Pfam Description: Fasciclin domain
  misc_feature (45)..(181): Homolog of NCBI NO: 27357986 NR Description: Unknown protein [Oryza sativa (japonica
  misc_feature (1)..(185): Homolog of NCBI NO: 15228748 NR Description: hypothetical protein [Arabidopsis thaliana]
MLVCVCCFFIVSVTVFKLPEAPRKDRQMGFYPTIRSRKVSLQDFNLGKFGEMMIDMLPQDLAFTVFVPSEDAFKRDLRLSVSDSLKPDEFNDTYAIVTRILGFSAVPRILSSANVQSGELVNYDSLSGFPLYVSKDIDGMLVVNRIRSEIVDVRKKEIVVHVMDGVIMDAEFEQSVLAEDDTEED

SEQ ID NO: 59167 - protein, 158 aa, Glycine max
  peptide (1)..(158): Ceres Seq. ID no. 13581624
  misc_feature (26)..(141): Pfam Name: Fasciclin domain Pfam Description: Fasciclin domain
  misc_feature (18)..(154): Homolog of NCBI NO: 27357986 NR Description: Unknown protein [Oryza sativa (japonica
  misc_feature (1)..(158): Homolog of NCBI NO: 15228748 NR Description: hypothetical protein [Arabidopsis thaliana]
MGFYPTIRSRKVSLQDFNLGKFGEMMIDMLPQDLAFTVFVPSEDAFKRDLRLSVSDSLKPDEFNDTYAIVTRILGFSAVPRILSSANVQSGELVNYDSLSGFPLYVSKDIDGMLVVNRIRSEIVDVRKKEIVVHVMDGVIMDAEFEQSVLAEDDTEED

SEQ ID NO: 59168 - DNA, 1424 bp, Glycine max
  misc_feature (1)..(1424): Ceres Seq. ID no. 14312250
ataacatatagggagcgagatcccaaaaccaaaaggtggagggcgtgggcgagggatatctatcttcattttcgtcgtcgttcatttttttattttttttttttctgttttccattcgcttcttctctcagaaaagctcgccaatcgatcttgctctcttctacgcttttcgaattccttccattccattatggacgcagattagattcacgttcacattcacttctcttcgtttgcttcaaccactctgctctgctctgctctactctgagatccgatcgcattttcattcagaaaggaaactcgtgtgactgatttatgcgctaattgcaattgcactgcgagcgtccctgtgccgaatcggaagatgggattagtgtttaccaaattgttttcctctcttttcggtaacaaggaagctcgaatcctcgttctcggcctcgacaatgccggcaaaaccactattctctatcggcttcagatgggcgaagttgtctccaccattccaacaattgggtttaatgtcgaaacagtgcagtataacaacattaaatttcaagtctgggatttaggtgggcaaacaagtatcaggccatattggaggtgttactttccaaatactcaagcaataatctatgttgttgattcaagtgacgttgataggcttgtgatagctaaggaggagttccatgcaattttggaggaggaagaactaaaaggtgcagttgttctcattttcgcaaacaagcaggaccttcctggtgcacttgatgatgctgcagtgaccgaggctctagagttacacaagatcaaaaatcgccaatgggctatttttaaaacttctgccataaaaggagaaggactttttgagggccttgactggttgagcaatacactcaaatctggaggtggctaaaggtgtcagtttcaacgaattaaatggacgattgaattcagaaggaaggtggaaatgcgtattttggtatctctttcactgtgaatgatgctataataatatgattattaaagctcgtacacatgttttattccgttttgtgtttacagttaaaaaggtatgaacaatggtcattggttgtctttttcttggttcctttttatatttttaagttagtctcttggctcctctaatagcagtagctgaatggtttctaagaaaaaatttctagtctaatcttgtgtaattgagatacatgggtttactcttaatgtgcttgacgtatcgatgattacatgaggtagttttgtcaatgacataacggctgatgagggcaaaccttcaaagctctttggtgacatgatgaggactgagcagccattgttgttgacaatgtaaatcaaggtagcaaatttttcattaatgtaaaatgtatcgaagacaatatatgatattctttttggatttg

SEQ ID NO: 59169 - protein, 182 aa, Glycine max
  peptide (1)..(182): Ceres Seq. ID no. 14312251
  misc_feature (4)..(177): Pfam Name: ADP-ribosylation factor family Pfam Description: ADP-ribosylation factor family
  misc_feature (1)..(178): Homolog of NCBI NO: 23508140 NR Description: ADP-ribosylation factor-like protein [Plasmodium
  misc_feature (1)..(179): Homolog of NCBI NO: 34909214 NR Description: putative ADP-ribosylation factor
  misc_feature (1)..(177): Homolog of NCBI NO: 29841386 NR Description: similar to GenBank Accession Number M61127
  misc_feature (1)..(179): Homolog of NCBI NO: 39653273 NR Description: ADP-ribosylation factor [Medicago sativa]
  misc_feature (1)..(179): Homolog of NCBI NO: 4502227 NR Description: ADP-ribosylation factor-like 1 [Homo sapiens]
  misc_feature (1)..(179): Homolog of NCBI NO: 11693150 NR Description: ADP-ribosylation factor-like 1 [Rattus
  misc_feature (1)..(179): Homolog of NCBI NO: 13385340 NR Description: ADP-ribosylation-like 1 [Mus musculus]
  misc_feature (1)..(179): Homolog of NCBI NO: 40253742 NR Description: putative ADP-ribosylation factor 3
  misc_feature (1)..(182): Homolog of NCBI NO: 30682545 NR Description: ADP-ribosylation factor 3 (ARF3) [Arabidopsis
  misc_feature (1)..(182): Homolog of NCBI NO: 3182922 NR Description: ADP-ribosylation factor 1
MGLVFTKLFSSLFGNKEARILVLGLDNAGKTTILYRLQMGEVVSTIPTIGFNVETVQYNNIKFQVWDLGGQTSIRPYWRCYFPNTQAIIYVVDSSDVDRLVIAKEEFHAILEEEELKGAVVLIFANKQDLPGALDDAAVTEALELHKIKNRQWAIFKTSAIKGEGLFEGLDWLSNTLKSGGG

SEQ ID NO: 59170 - protein, 144 aa, Glycine max
  peptide (1)..(144): Ceres Seq. ID no. 14312252
  misc_feature (1)..(139): Pfam Name: ADP-ribosylation factor family Pfam Description: ADP-ribosylation factor family
  misc_feature (1)..(140): Homolog of NCBI NO: 23508140 NR Description: ADP-ribosylation factor-like protein [Plasmodium
  misc_feature (1)..(141): Homolog of NCBI NO: 34909214 NR Description: putative ADP-ribosylation factor
  misc_feature (1)..(139): Homolog of NCBI NO: 29841386 NR Description: similar to GenBank Accession Number M61127
  misc_feature (1)..(141): Homolog of NCBI NO: 39653273 NR Description: ADP-ribosylation factor [Medicago sativa]
  misc_feature (1)..(141): Homolog of NCBI NO: 4502227 NR Description: ADP-ribosylation factor-like 1 [Homo sapiens]
  misc_feature (1)..(141): Homolog of NCBI NO: 11693150 NR Description: ADP-ribosylation factor-like 1 [Rattus
  misc_feature (1)..(141): Homolog of NCBI NO: 13385340 NR Description: ADP-ribosylation-like 1 [Mus musculus]
  misc_feature (1)..(141): Homolog of NCBI NO: 40253742 NR Description: putative ADP-ribosylation factor 3
  misc_feature (1)..(144): Homolog of NCBI NO: 30682545 NR Description: ADP-ribosylation factor 3 (ARF3) [Arabidopsis
  misc_feature (1)..(144): Homolog of NCBI NO: 3182922 NR Description: ADP-ribosylation factor 1
MGEVVSTIPTIGFNVETVQYNNIKFQVWDLGGQTSIRPYWRCYFPNTQAIIYVVDSSDVDRLVIAKEEFHAILEEEELKGAVVLIFANKQDLPGALDDAAVTEALELHKIKNRQWAIFKTSAIKGEGLFEGLDWLSNTLKSGGG

SEQ ID NO: 59171 - protein, 104 aa, Glycine max
  peptide (1)..(104): Ceres Seq. ID no. 14312253
ITYRERDPKTKRWRAWARDIYLHFRRRSFFYFFFFCFPFASSLRKARQSILLSSTLFEFLPFHYGRRLDSRSHSLLFVCFNHSALLCSTLRSDRIFIQKGNSCD

SEQ ID NO: 59172 - DNA, 1328 bp, Glycine max
  misc_feature (1)..(1328): Ceres Seq. ID no. 14312281
aactgcgtcccccacaatccagtacctgaaaaatccactgcctctctctctctctcctaaccccccccccccagcaaatatatacccttccttcccacaattctatgatcacaatcttctctttctctcctacttctccgcctccttcaaaatcgtcatcaatttcgcgtctttctttctcaattctcttagattctcaattgggtcttcaaaaatgcggatgagttgcaatggatgtcgagttctgagaaaaggttgcagtgaaaattgcagcatcagaccctgtttacaatggatcaaaagcccagaatcccaagccaatgctactgtgtttctcgctaagttttatggtcgtgctggtctcatgaacctcgttaacgcaggccccgaacatcttcgtccagcgatctttcgctcgttgttgtacgaggcatgcggtcggatagtgaacccgatttacgggtctgtcgggctattatggtccgggagctggcagctgtgtcaagccgccgtggaaaacgtcttgaaaggcgcgccgattacgccgatcacgtctgaagccgcggctagcgggcggtgcccaccgctcaaggcttacgacatacgccacgtgttcaaagacgagaactccgccgccgcgtccaacgaaactcagcaccaacgagtcaagacccgctctcgagtgaagcgacccctcgccaagcccaaatccaccgccaaccaaaacaacaacattaacactaagaatacgggaaccgaattcggatcggatgaaccgggtttggtggcatgcgattggaccgaggaggcgttgaaccggtctggaagtcacgattcgacgctgagccaccagtcggaggcggcgaatgcggtggaaagtgagagcattttgtctgctgagacttcgatcctcttccgagatgaaccggaatccaacccgaagcgcttggaccggaccgatgatgttggtttagagcttacgctagggttcgagccggtatcaggtgcgcagcacgtggttccggtgaagaagagaaggattgatttgaaggattttagtggctcgtcgtgcaagatggagctggggcttgaatgctcggcttgaggactagtggctcggctcagttttgactcatcggctttctgtgtttgatataagagaacagaagtacagaaccgttttagtgttgttgttgttgttgttttttttttgtaatttgggttattgttaacccctttgtgaatgcggtgctgtacaacagtacaaactcaaacatgaatgctagtaagtagatgaacaggtgcatttcaaaattgttaccttgggc

SEQ ID NO: 59173 - protein, 367 aa, Glycine max
  peptide (1)..(367): Ceres Seq. ID no. 14312282
  misc_feature (75)..(180): Pfam Name: Protein of unknown function DUF260 Pfam Description: Protein of unknown function DUF260
  misc_feature (72)..(241): Homolog of NCBI NO: 15221429 NR Description: lateral organ boundaries (LOB) domain protein 42
  misc_feature (72)..(332): Homolog of NCBI NO: 34895540 NR Description: unnamed protein product [Oryza sativa (japonica
  misc_feature (72)..(253): Homolog of NCBI NO: 15219829 NR Description: lateral organ boundaries (LOB) domain family
  misc_feature (72)..(295): Homolog of NCBI NO: 34914608 NR Description: P0520B06.17 [Oryza sativa (japonica
  misc_feature (276)..(360): Homolog of NCBI NO: 32395577 NR Description: seed specific protein Bn15D17A [Brassica napus]
  misc_feature (72)..(235): Homolog of NCBI NO: 32395577 NR Description: seed specific protein Bn15D17A [Brassica napus]
  misc_feature (262)..(363): Homolog of NCBI NO: 18396229 NR Description: lateral organ boundaries (LOB) domain protein 41
  misc_feature (72)..(230): Homolog of NCBI NO: 18396229 NR Description: lateral organ boundaries (LOB) domain protein 41
  misc_feature (262)..(363): Homolog of NCBI NO: 21554191 NR Description: unknown [Arabidopsis thaliana]
  misc_feature (72)..(230): Homolog of NCBI NO: 21554191 NR Description: unknown [Arabidopsis thaliana]
TASPTIQYLKNPLPLSLSPNPPPPANIYPSFPQFYDHNLLFLSYFSASFKIVINFASFFLNSLRFSIGSSKMRMSCNGCRVLRKGCSENCSIRPCLQWIKSPESQANATVFLAKFYGRAGLMNLVNAGPEHLRPAIFRSLLYEACGRIVNPIYGSVGLLWSGSWQLCQAAVENVLKGAPITPITSEAAASGRCPPLKAYDIRHVFKDENSAAASNETQHQRVKTRSRVKRPLAKPKSTANQNNNINTKNTGTEFGSDEPGLVACDWTEEALNRSGSHDSTLSHQSEAANAVESESILSAETSILFRDEPESNPKRLDRTDDVGLELTLGFEPVSGAQHVVPVKKRRIDLKDFSGSSCKMELGLECSA

SEQ ID NO: 59174 - protein, 296 aa, Glycine max
  peptide (1)..(296): Ceres Seq. ID no. 14312283
  misc_feature (4)..(109): Pfam Name: Protein of unknown function DUF260 Pfam Description: Protein of unknown function DUF260
  misc_feature (1)..(170): Homolog of NCBI NO: 15221429 NR Description: lateral organ boundaries (LOB) domain protein 42
  misc_feature (1)..(261): Homolog of NCBI NO: 34895540 NR Description: unnamed protein product [Oryza sativa (japonica
  misc_feature (1)..(182): Homolog of NCBI NO: 15219829 NR Description: lateral organ boundaries (LOB) domain family
  misc_feature (1)..(224): Homolog of NCBI NO: 34914608 NR Description: P0520B06.17 [Oryza sativa (japonica
  misc_feature (205)..(289): Homolog of NCBI NO: 32395577 NR Description: seed specific protein Bn15D17A [Brassica napus]
  misc_feature (1)..(164): Homolog of NCBI NO: 32395577 NR Description: seed specific protein Bn15D17A [Brassica napus]
  misc_feature (191)..(292): Homolog of NCBI NO: 18396229 NR Description: lateral organ boundaries (LOB) domain protein 41
  misc_feature (1)..(159): Homolog of NCBI NO: 18396229 NR Description: lateral organ boundaries (LOB) domain protein 41
  misc_feature (191)..(292): Homolog of NCBI NO: 21554191 NR Description: unknown [Arabidopsis thaliana]
  misc_feature (1)..(159): Homolog of NCBI NO: 21554191 NR Description: unknown [Arabidopsis thaliana]
MRMSCNGCRVLRKGCSENCSIRPCLQWIKSPESQANATVFLAKFYGRAGLMNLVNAGPEHLRPAIFRSLLYEACGRIVNPIYGSVGLLWSGSWQLCQAAVENVLKGAPITPITSEAAASGRCPPLKAYDIRHVFKDENSAAASNETQHQRVKTRSRVKRPLAKPKSTANQNNNINTKNTGTEFGSDEPGLVACDWTEEALNRSGSHDSTLSHQSEAANAVESESILSAETSILFRDEPESNPKRLDRTDDVGLELTLGFEPVSGAQHVVPVKKRRIDLKDFSGSSCKMELGLECSA

SEQ ID NO: 59175 - protein, 294 aa, Glycine max
  peptide (1)..(294): Ceres Seq. ID no. 14312284
  misc_feature (2)..(107): Pfam Name: Protein of unknown function DUF260 Pfam Description: Protein of unknown function DUF260
  misc_feature (1)..(168): Homolog of NCBI NO: 15221429 NR Description: lateral organ boundaries (LOB) domain protein 42
  misc_feature (1)..(259): Homolog of NCBI NO: 34895540 NR Description: unnamed protein product [Oryza sativa (japonica
  misc_feature (1)..(180): Homolog of NCBI NO: 15219829 NR Description: lateral organ boundaries (LOB) domain family
  misc_feature (1)..(222): Homolog of NCBI NO: 34914608 NR Description: P0520B06.17 [Oryza sativa (japonica
  misc_feature (203)..(287): Homolog of NCBI NO: 32395577 NR Description: seed specific protein Bn15D17A [Brassica napus]
  misc_feature (1)..(162): Homolog of NCBI NO: 32395577 NR Description: seed specific protein Bn15D17A [Brassica napus]
  misc_feature (189)..(290): Homolog of NCBI NO: 18396229 NR Description: lateral organ boundaries (LOB) domain protein 41
  misc_feature (1)..(157): Homolog of NCBI NO: 18396229 NR Description: lateral organ boundaries (LOB) domain protein 41
  misc_feature (189)..(290): Homolog of NCBI NO: 21554191 NR Description: unknown [Arabidopsis thaliana]
  misc_feature (1)..(157): Homolog of NCBI NO: 21554191 NR Description: unknown [Arabidopsis thaliana]
MSCNGCRVLRKGCSENCSIRPCLQWIKSPESQANATVFLAKFYGRAGLMNLVNAGPEHLRPAIFRSLLYEACGRIVNPIYGSVGLLWSGSWQLCQAAVENVLKGAPITPITSEAAASGRCPPLKAYDIRHVFKDENSAAASNETQHQRVKTRSRVKRPLAKPKSTANQNNNINTKNTGTEFGSDEPGLVACDWTEEALNRSGSHDSTLSHQSEAANAVESESILSAETSILFRDEPESNPKRLDRTDDVGLELTLGFEPVSGAQHVVPVKKRRIDLKDFSGSSCKMELGLECSA

SEQ ID NO: 59176 - DNA, 1767 bp, Glycine max
  misc_feature (1)..(1767): Ceres Seq. ID no. 14312239
attttttctcttcttttcttttctcccttgcacaccttccatgccttctattaattctctagagatcttcttccttctccttaacctcacaactcttgaaaatcctccttatcgatccaacaagcagcaaactcactgaacaaatccacaaacagaaacaaagatcctactcgtgtagatctaataacatcaccttcttcttctcctacagatcatgaattcctttcaagaatttgactcatcaaacacaaacagtaccaaagccaccaatttcccatcatcatcatcagcagcaccagcagcaacagcaccaccatgttcttcttcttcttcttcgaccactctgagccgctacgagaaccaaaagcggcgcgactggaacacgttcgggcagtacctccgcaaccacaggcccccactctcgctctcacggtgcagcggcgcgcacgtgctggagttcctgcggtacctcgaccagttcgggaaaaccaaggttcacacgcagctttgtcccttcttcgggcacccgaaccctccagcaccgtgcccttgtcctctacgccaagcatgggggagcctcgacgcactcatagggcgcctcagagctgcttttgaagagaatggaggaaaacctgaagctaacccttttggcgctcgcgctgtgagactctaccttcgtgaagtgcgtgattcgcaagccaaggctaggggtattagctacgagaaaaagaagcgcaagcgtccccaacaaccttcattgcctccctctaataatgcaaaagttgtgatttgacaataggctgggggcatgtggacaccctttgcaattgcattagaaaaatattgtgtaaacctaaacagcagtactacttttggtagatgcagcagtaatttaagtagtggcagtaaaaaacactgtggagggcctgtgctgctggtgctgctgatgatgatgatgggaaattggtggctttggtactgtttgtgtttgatgagtcaaattcttgaaaggaattcatgatctgtaggagaagaagaaggtgatgttattagatctacacgagtaggatctttgtttctggcgagggatctggtgttattgttgagggatccctggttgcggagcctgttgcaactcccccagctgctgacactaaggctgctgttgctgaggatgacgatgatgatgatgttgatttgtttggtgaagagactgaggaagagaagaaggcagctgaggaacgggcagctgcagtgaaggcatctgcaaaaaagaaagagtctgggaaatcatctgttctgttggatgtaaaaccatgggatgatgaaactgacatgaagaagcttgaagaatcagtgagatctgttcagatggaagggttgctttggggtgcatccaaacttgttcctgttggatacggtattaagaaactgcaaattatgcttactattgtggatgacctagtttctgttgatactcttattgaggaacatctcacagttgagcccatcaatgaatatgtccagagttgtgacattgtggccttcaataaaatataaactacaatcggtgggatttggagatcatggcaactgggagaattgcaagttttagaaactatgttctagggggaactaccctgaattgagaatttttgtctttagaaacccgcttatattatttgtttctatatatctttgttttgtcatcggattatttggatagtaataatttcacctttaatgtgtcaacggattatttggatg

SEQ ID NO: 59177 - protein, 192 aa, Glycine max
  peptide (1)..(192): Ceres Seq. ID no. 14312240
  misc_feature (30)..(159): Pfam Name: Protein of unknown function (DUF640) Pfam Description: Protein of unknown function (DUF640)
  misc_feature (118)..(186): Homolog of NCBI NO: 37536084 NR Description: hypothetical protein [Oryza sativa (japonica
  misc_feature (12)..(94): Homolog of NCBI NO: 38566542 NR Description: At3g23290 [Arabidopsis thaliana]
  misc_feature (99)..(181): Homolog of NCBI NO: 34909440 NR Description: OSJNBa0014K08.14 [Oryza sativa (japonica
  misc_feature (22)..(150): Homolog of NCBI NO: 27260935 NR Description: hypothetical protein [Oryza sativa (japonica
  misc_feature (21)..(192): Homolog of NCBI NO: 34907938 NR Description: B1088C09.17 [Oryza sativa (japonica
  misc_feature (36)..(181): Homolog of NCBI NO: 37535384 NR Description: hypothetical protein [Oryza sativa (japonica
  misc_feature (9)..(182): Homolog of NCBI NO: 38344650 NR Description: OSJNBb0072M01.12 [Oryza sativa (japonica
  misc_feature (1)..(188): Homolog of NCBI NO: 18402578 NR Description: expressed protein [Arabidopsis thaliana]
MNSFQEFDSSNTNSTKATNFPSSSSAAPAATAPPCSSSSSSTTLSRYENQKRRDWNTFGQYLRNHRPPLSLSRCSGAHVLEFLRYLDQFGKTKVHTQLCPFFGHPNPPAPCPCPLRQAWGSLDALIGRLRAAFEENGGKPEANPFGARAVRLYLREVRDSQAKARGISYEKKKRKRPQQPSLPPSNNAKVVI

SEQ ID NO: 59178 - protein, 99 aa, Glycine max
  peptide (1)..(99): Ceres Seq. ID no. 14312241
MFFFFFFDHSEPLREPKAARLEHVRAVPPQPQAPTLALTVQRRARAGVPAVPRPVRENQGSHAALSLLRAPEPSSTVPLSSTPSMGEPRRTHRAPQSCF

SEQ ID NO: 59179 - DNA, 987 bp, Glycine max
  misc_feature (1)..(987): Ceres Seq. ID no. 15168488
atacgtcgtcgttttgccccccagaacctctgaagaagaagaaatggcgagtagcagcagcaacactccgaaggaaagcgttgttgtcgattgcggaaggcgtcgaacctcttgcggctattgcagatcctctcgtcacaatagcatctctcatggcatgtgggcacatagccttactgtggatgactaccaagatcttcttgatcgtggctggagaaggtctggatgttttctttataaaccagagatggaaaggacatgctgcccttcttatacaattcgcttgaaagcaagtgactttgttccttctaaggagcaacttcgtgtatctagacgaatgcaaaggtgggttccatttgacattgcaaggcctctgcttgacagaaaaccttatgttgtcttatcagattcttccattttacaaaatggagagtcatccctacctcaaactacggaagatgtaatgagaaggggttttgatgatgttggccaagaagatgcaaatgatgttccaatgcttgatgatgaagaaatggttgagtctgaatcagaatgctctgatgatgaacctgacctagaaaccacttcagatgatgatccagaaattgctgatgtcagcaaggttttgctagggataaagggatctcatgtgaaatacaaggatctgcgggttgtctttggtcctgagcagcagagttacttggagtcacaattgcggagatacaggaaggttgtgggtccattgctatccgagcgaatcgtctattcgctcggataatataaatattagtacttgagtagttgagtttaataagatgctactgctaatcttcccagaaaaaaaaaaaaaaaaaccctgcaaataagattcatgtattcttctgttggatggtctgatgttggcaatagcaattgtgtgaaccttgaagtttttttataatcaactttcccatgcatttgcatatatggaattcagtgttgtattcc

SEQ ID NO: 59180 - protein, 258 aa, Glycine max
  peptide (1)..(258): Ceres Seq. ID no. 15168489
  misc_feature (26)..(116): Pfam Name: Arginine-tRNA-protein transferase, N terminus Pfam Description: Arginine-tRNA-protein transferase, N terminus
  misc_feature (15)..(117): Homolog of NCBI NO: 31542151 NR Description: arginine-tRNA-protein transferase 1 [Mus
  misc_feature (15)..(117): Homolog of NCBI NO: 29747928 NR Description: Ate1 protein [Mus musculus]
  misc_feature (15)..(117): Homolog of NCBI NO: 13123998 NR Description: Arginyl-tRNA--protein transferase 1
  misc_feature (15)..(117): Homolog of NCBI NO: 3806092 NR Description: arginine-tRNA-protein transferase 1-2p; ATE1-2p
  misc_feature (13)..(117): Homolog of NCBI NO: 34859415 NR Description: similar to Arginine-tRNA-protein transferase 1
  misc_feature (8)..(185): Homolog of NCBI NO: 15229703 NR Description: arginine-tRNA-protein transferase -related
  misc_feature (16)..(117): Homolog of NCBI NO: 15239222 NR Description: arginine-tRNA-protein transferase 1 homolog
  misc_feature (93)..(257): Homolog of NCBI NO: 15239222 NR Description: arginine-tRNA-protein transferase 1 homolog
  misc_feature (16)..(117): Homolog of NCBI NO: 11357175 NR Description: arginine-tRNA-protein transferase 1
  misc_feature (93)..(257): Homolog of NCBI NO: 11357175 NR Description: arginine-tRNA-protein transferase 1
YVVVLPPRTSEEEEMASSSSNTPKESVVVDCGRRRTSCGYCRSSRHNSISHGMWAHSLTVDDYQDLLDRGWRRSGCFLYKPEMERTCCPSYTIRLKASDFVPSKEQLRVSRRMQRWVPFDIARPLLDRKPYVVLSDSSILQNGESSLPQTTEDVMRRGFDDVGQEDANDVPMLDDEEMVESESECSDDEPDLETTSDDDPEIADVSKVLLGIKGSHVKYKDLRVVFGPEQQSYLESQLRRYRKVVGPLLSERIVYSLG

SEQ ID NO: 59181 - protein, 244 aa, Glycine max
  peptide (1)..(244): Ceres Seq. ID no. 15168490
  misc_feature (12)..(102): Pfam Name: Arginine-tRNA-protein transferase, N terminus Pfam Description: Arginine-tRNA-protein transferase, N terminus
  misc_feature (1)..(103): Homolog of NCBI NO: 31542151 NR Description: arginine-tRNA-protein transferase 1 [Mus
  misc_feature (1)..(103): Homolog of NCBI NO: 29747928 NR Description: Ate1 protein [Mus musculus]
  misc_feature (1)..(103): Homolog of NCBI NO: 13123998 NR Description: Arginyl-tRNA--protein transferase 1
  misc_feature (1)..(103): Homolog of NCBI NO: 3806092 NR Description: arginine-tRNA-protein transferase 1-2p; ATE1-2p
  misc_feature (1)..(103): Homolog of NCBI NO: 34859415 NR Description: similar to Arginine-tRNA-protein transferase 1
  misc_feature (1)..(171): Homolog of NCBI NO: 15229703 NR Description: arginine-tRNA-protein transferase -related
  misc_feature (2)..(103): Homolog of NCBI NO: 15239222 NR Description: arginine-tRNA-protein transferase 1 homolog
  misc_feature (79)..(243): Homolog of NCBI NO: 15239222 NR Description: arginine-tRNA-protein transferase 1 homolog
  misc_feature (2)..(103): Homolog of NCBI NO: 11357175 NR Description: arginine-tRNA-protein transferase 1
  misc_feature (79)..(243): Homolog of NCBI NO: 11357175 NR Description: arginine-tRNA-protein transferase 1
MASSSSNTPKESVVVDCGRRRTSCGYCRSSRHNSISHGMWAHSLTVDDYQDLLDRGWRRSGCFLYKPEMERTCCPSYTIRLKASDFVPSKEQLRVSRRMQRWVPFDIARPLLDRKPYVVLSDSSILQNGESSLPQTTEDVMRRGFDDVGQEDANDVPMLDDEEMVESESECSDDEPDLETTSDDDPEIADVSKVLLGIKGSHVKYKDLRVVFGPEQQSYLESQLRRYRKVVGPLLSERIVYSLG

SEQ ID NO: 59182 - protein, 206 aa, Glycine max
  peptide (1)..(206): Ceres Seq. ID no. 15168491
  misc_feature (1)..(64): Pfam Name: Arginine-tRNA-protein transferase, N terminus Pfam Description: Arginine-tRNA-protein transferase, N terminus
  misc_feature (1)..(65): Homolog of NCBI NO: 29747928 NR Description: Ate1 protein [Mus musculus]
  misc_feature (1)..(65): Homolog of NCBI NO: 31542151 NR Description: arginine-tRNA-protein transferase 1 [Mus
  misc_feature (1)..(65): Homolog of NCBI NO: 13123998 NR Description: Arginyl-tRNA--protein transferase 1
  misc_feature (1)..(65): Homolog of NCBI NO: 3806092 NR Description: arginine-tRNA-protein transferase 1-2p; ATE1-2p
  misc_feature (1)..(65): Homolog of NCBI NO: 34859415 NR Description: similar to Arginine-tRNA-protein transferase 1
  misc_feature (1)..(133): Homolog of NCBI NO: 15229703 NR Description: arginine-tRNA-protein transferase -related
  misc_feature (1)..(65): Homolog of NCBI NO: 15239222 NR Description: arginine-tRNA-protein transferase 1 homolog
  misc_feature (41)..(205): Homolog of NCBI NO: 15239222 NR Description: arginine-tRNA-protein transferase 1 homolog
  misc_feature (1)..(65): Homolog of NCBI NO: 11357175 NR Description: arginine-tRNA-protein transferase 1
  misc_feature (41)..(205): Homolog of NCBI NO: 11357175 NR Description: arginine-tRNA-protein transferase 1
MWAHSLTVDDYQDLLDRGWRRSGCFLYKPEMERTCCPSYTIRLKASDFVPSKEQLRVSRRMQRWVPFDIARPLLDRKPYVVLSDSSILQNGESSLPQTTEDVMRRGFDDVGQEDANDVPMLDDEEMVESESECSDDEPDLETTSDDDPEIADVSKVLLGIKGSHVKYKDLRVVFGPEQQSYLESQLRRYRKVVGPLLSERIVYSLG

SEQ ID NO: 59183 - DNA, 1751 bp, Glycine max
  misc_feature (1)..(1751): Ceres Seq. ID no. 14313084
acaaacaccagagttgagtgctccaataataccatggaagctcaagcgtcgttcttgtttattagcttgtttttctctctggtgttgcatttgcttgcaaagcattattacaagccaaaaaccaccctttctcacaaactacccccgggaccaaagaagctacctctgatagggaacctgcatcaactagcaatggctggttcacttccacatcgtactctccgagaccttgcccttaaatacggacctctcatgcatctccaacttggtgaaatttcttccgtggttgtatcctcccccaacatggccaaggagataatgaaaacccatgatcttgcttttgtgcagaggccacaatttcttcctgctcaaattttgacctatgggcaaaatgatattgtttttgctccatatggggattattggagacaaatgaagaaaatatgtgtctcggagcttctaagtgccaagagagttcagtctttctctcatattagagaagacgagacatccaaatttatagaatcaattcgaatatcagaaggttcaccaatcaatcttactagtaaaatttactccttggtaagttcttctgtttccagggtagcatttggcgacaaatctaaggaccaggaagagtttttgtgtgtgcttgaaaaaatgatattagcggggggaggatttgaacctgacgatttgtttccttcgatgaaacttcatctcataaatggaaggaaggccaaattggagaagatgcatgagcaggttgacaagatcgcagacaacattctcagagagcatcaagaaaagcgccaaagggcactacgagaaggcaaggttgacctagaggaggaggatcttgttgatgttcttttgagaatccaacaaagtgacaacctcgagatcaaaattagtaccacaaacatcaaagctgttatattggacgtatttactgctggaacggatacttcagcatcaacacttgaatgggctatggcagaaatgatgagaaacccaagagtgaggaagaaagcacaggctgaagtaagacaagcatttagggaattgaaaataatccatgaaacagatgtagggaaacttacatacttaaagttggtgatcaaagagacattaaggttacacgctccttctcctttattggtccctagagaatgctctgaactaaccatcattgatggatatgaaatacctgtcaagactaaagtcatgataaacgtgtgggcaattggaagagatccccaatattggactgatgctgagaggtttgtcccagagagattcgatggtagttctatcgatttcaaagggaataactttgagtatcttccttttggggcaggaaggagaatgtgcccaggaatgacatttggtttagccaacattatgcttccactcgctctattactctatcacttcaattgggaacttccaaatgagatgaaacctgaggatatggatatgtctgaaaactttggattgacagttacaaggaaaagcgagttgtgtttgattcccattgttaatgatctttgacactgcacgattgatatggttggaggaatcaagtttcttttactaaggaaataaatgtgttttaaaatcgcgtctagcaatatgcatgtctttattgttttaaaagctaggttatctaactagccatccgagctatatttttatactagtgtataataatctttgctgaattttatggtttactctttccaatcttt

SEQ ID NO: 59184 - protein, 517 aa, Glycine max
  peptide (1)..(517): Ceres Seq. ID no. 14313085
  misc_feature (48)..(511): Pfam Name: Cytochrome P450 Pfam Description: Cytochrome P450
TNTRVECSNNTMEAQASFLFISLFFSLVLHLLAKHYYKPKTTLSHKLPPGPKKLPLIGNLHQLAMAGSLPHRTLRDLALKYGPLMHLQLGEISSVVVSSPNMAKEIMKTHDLAFVQRPQFLPAQILTYGQNDIVFAPYGDYWRQMKKICVSELLSAKRVQSFSHIREDETSKFIESIRISEGSPINLTSKIYSLVSSSVSRVAFGDKSKDQEEFLCVLEKMILAGGGFEPDDLFPSMKLHLINGRKAKLEKMHEQVDKIADNILREHQEKRQRALREGKVDLEEEDLVDVLLRIQQSDNLEIKISTTNIKAVILDVFTAGTDTSASTLEWAMAEMMRNPRVRKKAQAEVRQAFRELKIIHETDVGKLTYLKLVIKETLRLHAPSPLLVPRECSELTIIDGYEIPVKTKVMINVWAIGRDPQYWTDAERFVPERFDGSSIDFKGNNFEYLPFGAGRRMCPGMTFGLANIMLPLALLLYHFNWELPNEMKPEDMDMSENFGLTVTRKSELCLIPIVNDL

SEQ ID NO: 59185 - protein, 506 aa, Glycine max
  peptide (1)..(506): Ceres Seq. ID no. 14313086
  misc_feature (37)..(500): Pfam Name: Cytochrome P450 Pfam Description: Cytochrome P450
MEAQASFLFISLFFSLVLHLLAKHYYKPKTTLSHKLPPGPKKLPLIGNLHQLAMAGSLPHRTLRDLALKYGPLMHLQLGEISSVVVSSPNMAKEIMKTHDLAFVQRPQFLPAQILTYGQNDIVFAPYGDYWRQMKKICVSELLSAKRVQSFSHIREDETSKFIESIRISEGSPINLTSKIYSLVSSSVSRVAFGDKSKDQEEFLCVLEKMILAGGGFEPDDLFPSMKLHLINGRKAKLEKMHEQVDKIADNILREHQEKRQRALREGKVDLEEEDLVDVLLRIQQSDNLEIKISTTNIKAVILDVFTAGTDTSASTLEWAMAEMMRNPRVRKKAQAEVRQAFRELKIIHETDVGKLTYLKLVIKETLRLHAPSPLLVPRECSELTIIDGYEIPVKTKVMINVWAIGRDPQYWTDAERFVPERFDGSSIDFKGNNFEYLPFGAGRRMCPGMTFGLANIMLPLALLLYHFNWELPNEMKPEDMDMSENFGLTVTRKSELCLIPIVNDL

SEQ ID NO: 59186 - protein, 453 aa, Glycine max
  peptide (1)..(453): Ceres Seq. ID no. 14313087
  misc_feature (1)..(447): Pfam Name: Cytochrome P450 Pfam Description: Cytochrome P450
MAGSLPHRTLRDLALKYGPLMHLQLGEISSVVVSSPNMAKEIMKTHDLAFVQRPQFLPAQILTYGQNDIVFAPYGDYWRQMKKICVSELLSAKRVQSFSHIREDETSKFIESIRISEGSPINLTSKIYSLVSSSVSRVAFGDKSKDQEEFLCVLEKMILAGGGFEPDDLFPSMKLHLINGRKAKLEKMHEQVDKIADNILREHQEKRQRALREGKVDLEEEDLVDVLLRIQQSDNLEIKISTTNIKAVILDVFTAGTDTSASTLEWAMAEMMRNPRVRKKAQAEVRQAFRELKIIHETDVGKLTYLKLVIKETLRLHAPSPLLVPRECSELTIIDGYEIPVKTKVMINVWAIGRDPQYWTDAERFVPERFDGSSIDFKGNNFEYLPFGAGRRMCPGMTFGLANIMLPLALLLYHFNWELPNEMKPEDMDMSENFGLTVTRKSELCLIPIVNDL

SEQ ID NO: 59187 - DNA, 1478 bp, Glycine max
  misc_feature (1)..(1478): Ceres Seq. ID no. 15168464
aatgccagcagcggggaaggtaagtaggtgtctctcactctcccaccgaatccacattctaaagtaatacgccggagaatgacgtcacactcccactacccacccgacttagacgccgactccgtcacctcctccccacgctccgatcacttccacgacgcgccgccccgcatccgcttcatgtgcagcttcggcggcaagatcctcccccgcccccacgacaaccagctccgctacgtcggcggcgacacccgcatcgtcgccgtcaaccgctccatcactttctccgccctcattctcaaactctccaaactctcaggcatgagcaacataacagccaagtaccagctcccgaacgaggatctggacgcgttgatctcggtcaccacggacgaggacgtggagaacatgatggacgagtacgaccgcgtcgcacacaatcagaacccgcgatcggcgcggctccggctcttcctcttccccgaaggagaagactcccgcgccagcagcatcagctcgctcctaaacggctcagccaagcgcgaaaactggttcctcgacgctttaaacggcggcgtttcgggcctcgaacgaggccgctccgaagcctcttctatggtctctgaagtacccgattacctcttcgggttagacaactccgaagaaataacaaatcaccaacgcgacccgagacccaaacccggacccattattcaagataacgtttccgtttcagatccgggttcgcccgccccggttgtctcgtccccttattgttccacgtcatcagcgccgcccgtgccctctctcccgaaccttccctatgttaaaaccaaacctttaaacttaaatccggttcctgatactgactccaaggaaaatcaaaccgaacctgaaacggaacctcacccgaacctgaacctgaaccaaaacccgaacatgtattcaaataaccctgttgttcactaccctccagaagctgcttattcggcgcattcagtaaacccggttccggtttactatgtttccggtccggttcgaccgggatccgtgccggttcctatgcaaaccccttatcactacgttcaacaatcgtatcatgctgtggtgccacctcaggttcctatcgggtaccatcctttggttccgggttcgggtcaagtatatggagcgggcgtgaggcacatgaccccactgcaaccttacagcccctccaccacggcggtggttcatgacggtttgaaacagcacgtgtatcatgccgtgccaaattcgggtccggttccggttcacccagttattccgatgacgggtttggatgaaccgcagagaggtggagcgtaatttgtgacgggtcggggccccaattcacttaataactgatcccatttttatttagtggatgggtgctgaatttttactaccataccatcatgcaaatggtaatttatgtctatatatatacaagtgccttcact

SEQ ID NO: 59188 - protein, 421 aa, Glycine max
  peptide (1)..(421): Ceres Seq. ID no. 15168465
  misc_feature (46)..(134): Pfam Name: PB1 domain Pfam Description: PB1 domain
  misc_feature (11)..(171): Homolog of NCBI NO: 15242791 NR Description: protein kinase family [Arabidopsis thaliana]
  misc_feature (3)..(231): Homolog of NCBI NO: 15237703 NR Description: octicosapeptide/Phox/Bem1p (PB1)
  misc_feature (3)..(212): Homolog of NCBI NO: 15242462 NR Description: octicosapeptide/Phox/Bem1p (PB1)
  misc_feature (35)..(184): Homolog of NCBI NO: 25410886 NR Description: hypothetical protein At2g01190 [imported] -
  misc_feature (31)..(312): Homolog of NCBI NO: 15229599 NR Description: octicosapeptide/Phox/Bem1p (PB1)
  misc_feature (31)..(262): Homolog of NCBI NO: 21553908 NR Description: unknown [Arabidopsis thaliana]
  misc_feature (31)..(262): Homolog of NCBI NO: 18379168 NR Description: octicosapeptide/Phox/Bem1p (PB1)
  misc_feature (31)..(332): Homolog of NCBI NO: 34895646 NR Description: P0480E02.2 [Oryza sativa (japonica
  misc_feature (8)..(405): Homolog of NCBI NO: 25407315 NR Description: hypothetical protein AT4g05150 [imported] -
  misc_feature (8)..(405): Homolog of NCBI NO: 18412822 NR Description: octicosapeptide/Phox/Bem1p (PB1)
MTSHSHYPPDLDADSVTSSPRSDHFHDAPPRIRFMCSFGGKILPRPHDNQLRYVGGDTRIVAVNRSITFSALILKLSKLSGMSNITAKYQLPNEDLDALISVTTDEDVENMMDEYDRVAHNQNPRSARLRLFLFPEGEDSRASSISSLLNGSAKRENWFLDALNGGVSGLERGRSEASSMVSEVPDYLFGLDNSEEITNHQRDPRPKPGPIIQDNVSVSDPGSPAPVVSSPYCSTSSAPPVPSLPNLPYVKTKPLNLNPVPDTDSKENQTEPETEPHPNLNLNQNPNMYSNNPVVHYPPEAAYSAHSVNPVPVYYVSGPVRPGSVPVPMQTPYHYVQQSYHAVVPPQVPIGYHPLVPGSGQVYGAGVRHMTPLQPYSPSTTAVVHDGLKQHVYHAVPNSGPVPVHPVIPMTGLDEPQRGGA

SEQ ID NO: 59189 - protein, 387 aa, Glycine max
  peptide (1)..(387): Ceres Seq. ID no. 15168466
  misc_feature (12)..(100): Pfam Name: PB1 domain Pfam Description: PB1 domain
  misc_feature (1)..(137): Homolog of NCBI NO: 15242791 NR Description: protein kinase family [Arabidopsis thaliana]
  misc_feature (1)..(197): Homolog of NCBI NO: 15237703 NR Description: octicosapeptide/Phox/Bem1p (PB1)
  misc_feature (1)..(178): Homolog of NCBI NO: 15242462 NR Description: octicosapeptide/Phox/Bem1p (PB1)
  misc_feature (1)..(150): Homolog of NCBI NO: 25410886 NR Description: hypothetical protein At2g01190 [imported] -
  misc_feature (1)..(278): Homolog of NCBI NO: 15229599 NR Description: octicosapeptide/Phox/Bem1p (PB1)
  misc_feature (1)..(228): Homolog of NCBI NO: 21553908 NR Description: unknown [Arabidopsis thaliana]
  misc_feature (1)..(228): Homolog of NCBI NO: 18379168 NR Description: octicosapeptide/Phox/Bem1p (PB1)
  misc_feature (1)..(298): Homolog of NCBI NO: 34895646 NR Description: P0480E02.2 [Oryza sativa (japonica
  misc_feature (1)..(371): Homolog of NCBI NO: 25407315 NR Description: hypothetical protein AT4g05150 [imported] -
  misc_feature (1)..(371): Homolog of NCBI NO: 18412822 NR Description: octicosapeptide/Phox/Bem1p (PB1)
MCSFGGKILPRPHDNQLRYVGGDTRIVAVNRSITFSALILKLSKLSGMSNITAKYQLPNEDLDALISVTTDEDVENMMDEYDRVAHNQNPRSARLRLFLFPEGEDSRASSISSLLNGSAKRENWFLDALNGGVSGLERGRSEASSMVSEVPDYLFGLDNSEEITNHQRDPRPKPGPIIQDNVSVSDPGSPAPVVSSPYCSTSSAPPVPSLPNLPYVKTKPLNLNPVPDTDSKENQTEPETEPHPNLNLNQNPNMYSNNPVVHYPPEAAYSAHSVNPVPVYYVSGPVRPGSVPVPMQTPYHYVQQSYHAVVPPQVPIGYHPLVPGSGQVYGAGVRHMTPLQPYSPSTTAVVHDGLKQHVYHAVPNSGPVPVHPVIPMTGLDEPQRGGA

SEQ ID NO: 59190 - protein, 340 aa, Glycine max
  peptide (1)..(340): Ceres Seq. ID no. 15168467
  misc_feature (1)..(53): Pfam Name: PB1 domain Pfam Description: PB1 domain
  misc_feature (1)..(90): Homolog of NCBI NO: 15242791 NR Description: protein kinase family [Arabidopsis thaliana]
  misc_feature (1)..(150): Homolog of NCBI NO: 15237703 NR Description: octicosapeptide/Phox/Bem1p (PB1)
  misc_feature (1)..(131): Homolog of NCBI NO: 15242462 NR Description: octicosapeptide/Phox/Bem1p (PB1)
  misc_feature (1)..(103): Homolog of NCBI NO: 25410886 NR Description: hypothetical protein At2g01190 [imported] -
  misc_feature (1)..(231): Homolog of NCBI NO: 15229599 NR Description: octicosapeptide/Phox/Bem1p (PB1)
  misc_feature (1)..(181): Homolog of NCBI NO: 21553908 NR Description: unknown [Arabidopsis thaliana]
  misc_feature (1)..(181): Homolog of NCBI NO: 18379168 NR Description: octicosapeptide/Phox/Bem1p (PB1)
  misc_feature (1)..(251): Homolog of NCBI NO: 34895646 NR Description: P0480E02.2 [Oryza sativa (japonica
  misc_feature (1)..(324): Homolog of NCBI NO: 25407315 NR Description: hypothetical protein AT4g05150 [imported] -
  misc_feature (1)..(324): Homolog of NCBI NO: 18412822 NR Description: octicosapeptide/Phox/Bem1p (PB1)
MSNITAKYQLPNEDLDALISVTTDEDVENMMDEYDRVAHNQNPRSARLRLFLFPEGEDSRASSISSLLNGSAKRENWFLDALNGGVSGLERGRSEASSMVSEVPDYLFGLDNSEEITNHQRDPRPKPGPIIQDNVSVSDPGSPAPVVSSPYCSTSSAPPVPSLPNLPYVKTKPLNLNPVPDTDSKENQTEPETEPHPNLNLNQNPNMYSNNPVVHYPPEAAYSAHSVNPVPVYYVSGPVRPGSVPVPMQTPYHYVQQSYHAVVPPQVPIGYHPLVPGSGQVYGAGVRHMTPLQPYSPSTTAVVHDGLKQHVYHAVPNSGPVPVHPVIPMTGLDEPQRGGA

SEQ ID NO: 59191 - DNA, 1774 bp, Glycine max
  misc_feature (1)..(1774): Ceres Seq. ID no. 14312069
aaaaccatcactgcattctctctgaagcctctaattctgtgtgtcagttaaagaaagaagcgcacatgccaaaagggatggcttcagtcaccacattttcactaatgttacagtttctgttctttatactattttcttcgtttggtcagctaagcttagctttcacgtcgcaagagtaccatgaggctcttgagaaatccattctcttcttcgagggacaacgatctgggaaattgccttccaaccagcaacaaacatggaggggagattctggattgtccgatggctcttcctaccatgtggacttagtaggcggttattatgatgctggagacaacgtcaagtttgggttgccaatggcctttaccactacattgttagcatggagtgtgattgaatttggaagctcaatgcaggaccaacttgaaaatgccagagctgctattcgttggagcacggattaccttcttaaggcagccaccaccacccctgacacattatatgtccaagtaggagagccgaacatggatcataggtgctgggaaagggctgaagatatggacactccacgcaacgtgtataaagtatcagctacaaacccaggttcggatgtagcagcagagacggcaactgcattggctgcttcttcaatagtattcagagattctgatccaagctattcctccaaattgcttcaagcagccatcaaagtattcaattttgcagaccgttacaggggttcttatagtgattctcttaattcggttgtctgtccattctactgctcttactctggataccatgatgagcttctctggggtgcatcatggatttataaagcatcaggaattaacacttatatacaatatatacaatccaatggccacatattaggggctgatgatgatggttacacattcagttgggatgacaagcgacctggaacaaaaatcctgctttccaaggaattcctagaggaaaattctgaagagttccaactatataaggcacatgcagacaattacatttgttcgctaatgtcgggaacacccggtttccaggctcagtacacccgaggggggcttctgtacaaagggagcgagagcaatttgcagtacgtaacatcaactagcttccttctcttgacatacgccaaatatctgaacacaaacggcggtaatgtagttcgatgtgggacttcagcagtcacgggcgaaaacctagtaacactagctaaagcacaagtggactacattctgggcaacaatccaacaaagatgtcttatatggtgggttttggagagaggtatccaaagcatatccaccacaggggttcctctctgccttccatccacgcacacactcaacacatttcatgcaacgacggctttcagtttttccattcttcctcgcccaaccctaatatccttgttggagccatcgtaggtggtcctgataacaatgacaacttctctgatgatcgacataactatcagcagtctgagccagcaacatacatcaatgcgccgtttgtaggtgctcttgcctatttctctgccaacccaccaacaacctattaggattaggaattaataatacacctataatcaagttttcaatatcgaccaatgccgttccaaatgtggttgcagacacttaaaaaacctgttgcctatcattaatgcttgtatgcttggtgttaggctgtttgttagttccttcatccttgatgaatgtttatgtttccatcaaaagtgatgtttaattattagtg

SEQ ID NO: 59192 - protein, 525 aa, Glycine max
  peptide (1)..(525): Ceres Seq. ID no. 14312070
  misc_feature (58)..(517): Pfam Name: Glycosyl hydrolase family 9 Pfam Description: Glycosyl hydrolase family 9
  misc_feature (36)..(519): Homolog of NCBI NO: 12957206 NR Description: beta-1,4-glucanase [Atriplex lentiformis]
  misc_feature (59)..(523): Homolog of NCBI NO: 121784 NR Description: Endoglucanase 1 precursor
  misc_feature (34)..(519): Homolog of NCBI NO: 6179388 NR Description: endo-beta-1,4-glucanase [Capsicum annuum]
  misc_feature (34)..(519): Homolog of NCBI NO: 1655545 NR Description: endo-beta-1,4-glucanase [Capsicum annuum]
  misc_feature (33)..(519): Homolog of NCBI NO: 3687887 NR Description: endo-1,4-beta-glucanase [Lycopersicon esculentum]
  misc_feature (26)..(520): Homolog of NCBI NO: 1657374 NR Description: endo-beta-1,4-glucanase [Prunus persica]
  misc_feature (26)..(523): Homolog of NCBI NO: 7488904 NR Description: cellulase (EC 3.2.1.4) - sweet orange
  misc_feature (26)..(519): Homolog of NCBI NO: 4691450 NR Description: endo-1,4-beta glucanase [Populus alba]
  misc_feature (26)..(519): Homolog of NCBI NO: 1125032 NR Description: cellulase precursor [Populus alba]
  misc_feature (26)..(519): Homolog of NCBI NO: 13383303 NR Description: endo-1,4-beta glucanase [Populus alba]
NHHCILSEASNSVCQLKKEAHMPKGMASVTTFSLMLQFLFFILFSSFGQLSLAFTSQEYHEALEKSILFFEGQRSGKLPSNQQQTWRGDSGLSDGSSYHVDLVGGYYDAGDNVKFGLPMAFTTTLLAWSVIEFGSSMQDQLENARAAIRWSTDYLLKAATTTPDTLYVQVGEPNMDHRCWERAEDMDTPRNVYKVSATNPGSDVAAETATALAASSIVFRDSDPSYSSKLLQAAIKVFNFADRYRGSYSDSLNSVVCPFYCSYSGYHDELLWGASWIYKASGINTYIQYIQSNGHILGADDDGYTFSWDDKRPGTKILLSKEFLEENSEEFQLYKAHADNYICSLMSGTPGFQAQYTRGGLLYKGSESNLQYVTSTSFLLLTYAKYLNTNGGNVVRCGTSAVTGENLVTLAKAQVDYILGNNPTKMSYMVGFGERYPKHIHHRGSSLPSIHAHTQHISCNDGFQFFHSSSPNPNILVGAIVGGPDNNDNFSDDRHNYQQSEPATYINAPFVGALAYFSANPPTTY

SEQ ID NO: 59193 - protein, 504 aa, Glycine max
  peptide (1)..(504): Ceres Seq. ID no. 14312071
  misc_feature (37)..(496): Pfam Name: Glycosyl hydrolase family 9 Pfam Description: Glycosyl hydrolase family 9
  misc_feature (15)..(498): Homolog of NCBI NO: 12957206 NR Description: beta-1,4-glucanase [Atriplex lentiformis]
  misc_feature (38)..(502): Homolog of NCBI NO: 121784 NR Description: Endoglucanase 1 precursor
  misc_feature (13)..(498): Homolog of NCBI NO: 6179388 NR Description: endo-beta-1,4-glucanase [Capsicum annuum]
  misc_feature (13)..(498): Homolog of NCBI NO: 1655545 NR Description: endo-beta-1,4-glucanase [Capsicum annuum]
  misc_feature (12)..(498): Homolog of NCBI NO: 3687887 NR Description: endo-1,4-beta-glucanase [Lycopersicon esculentum]
  misc_feature (5)..(499): Homolog of NCBI NO: 1657374 NR Description: endo-beta-1,4-glucanase [Prunus persica]
  misc_feature (5)..(502): Homolog of NCBI NO: 7488904 NR Description: cellulase (EC 3.2.1.4) - sweet orange
  misc_feature (5)..(498): Homolog of NCBI NO: 4691450 NR Description: endo-1,4-beta glucanase [Populus alba]
  misc_feature (5)..(498): Homolog of NCBI NO: 1125032 NR Description: cellulase precursor [Populus alba]
  misc_feature (5)..(498): Homolog of NCBI NO: 13383303 NR Description: endo-1,4-beta glucanase [Populus alba]
MPKGMASVTTFSLMLQFLFFILFSSFGQLSLAFTSQEYHEALEKSILFFEGQRSGKLPSNQQQTWRGDSGLSDGSSYHVDLVGGYYDAGDNVKFGLPMAFTTTLLAWSVIEFGSSMQDQLENARAAIRWSTDYLLKAATTTPDTLYVQVGEPNMDHRCWERAEDMDTPRNVYKVSATNPGSDVAAETATALAASSIVFRDSDPSYSSKLLQAAIKVFNFADRYRGSYSDSLNSVVCPFYCSYSGYHDELLWGASWIYKASGINTYIQYIQSNGHILGADDDGYTFSWDDKRPGTKILLSKEFLEENSEEFQLYKAHADNYICSLMSGTPGFQAQYTRGGLLYKGSESNLQYVTSTSFLLLTYAKYLNTNGGNVVRCGTSAVTGENLVTLAKAQVDYILGNNPTKMSYMVGFGERYPKHIHHRGSSLPSIHAHTQHISCNDGFQFFHSSSPNPNILVGAIVGGPDNNDNFSDDRHNYQQSEPATYINAPFVGALAYFSANPPTTY

SEQ ID NO: 59194 - protein, 500 aa, Glycine max
  peptide (1)..(500): Ceres Seq. ID no. 14312072
  misc_feature (33)..(492): Pfam Name: Glycosyl hydrolase family 9 Pfam Description: Glycosyl hydrolase family 9
  misc_feature (11)..(494): Homolog of NCBI NO: 12957206 NR Description: beta-1,4-glucanase [Atriplex lentiformis]
  misc_feature (34)..(498): Homolog of NCBI NO: 121784 NR Description: Endoglucanase 1 precursor
  misc_feature (9)..(494): Homolog of NCBI NO: 6179388 NR Description: endo-beta-1,4-glucanase [Capsicum annuum]
  misc_feature (9)..(494): Homolog of NCBI NO: 1655545 NR Description: endo-beta-1,4-glucanase [Capsicum annuum]
  misc_feature (8)..(494): Homolog of NCBI NO: 3687887 NR Description: endo-1,4-beta-glucanase [Lycopersicon esculentum]
  misc_feature (1)..(495): Homolog of NCBI NO: 1657374 NR Description: endo-beta-1,4-glucanase [Prunus persica]
  misc_feature (1)..(498): Homolog of NCBI NO: 7488904 NR Description: cellulase (EC 3.2.1.4) - sweet orange
  misc_feature (1)..(494): Homolog of NCBI NO: 4691450 NR Description: endo-1,4-beta glucanase [Populus alba]
  misc_feature (1)..(494): Homolog of NCBI NO: 1125032 NR Description: cellulase precursor [Populus alba]
  misc_feature (1)..(494): Homolog of NCBI NO: 13383303 NR Description: endo-1,4-beta glucanase [Populus alba]
MASVTTFSLMLQFLFFILFSSFGQLSLAFTSQEYHEALEKSILFFEGQRSGKLPSNQQQTWRGDSGLSDGSSYHVDLVGGYYDAGDNVKFGLPMAFTTTLLAWSVIEFGSSMQDQLENARAAIRWSTDYLLKAATTTPDTLYVQVGEPNMDHRCWERAEDMDTPRNVYKVSATNPGSDVAAETATALAASSIVFRDSDPSYSSKLLQAAIKVFNFADRYRGSYSDSLNSVVCPFYCSYSGYHDELLWGASWIYKASGINTYIQYIQSNGHILGADDDGYTFSWDDKRPGTKILLSKEFLEENSEEFQLYKAHADNYICSLMSGTPGFQAQYTRGGLLYKGSESNLQYVTSTSFLLLTYAKYLNTNGGNVVRCGTSAVTGENLVTLAKAQVDYILGNNPTKMSYMVGFGERYPKHIHHRGSSLPSIHAHTQHISCNDGFQFFHSSSPNPNILVGAIVGGPDNNDNFSDDRHNYQQSEPATYINAPFVGALAYFSANPPTTY

SEQ ID NO: 59195 - DNA, 1363 bp, Glycine max
  misc_feature (1)..(1363): Ceres Seq. ID no. 15176843
aatttcgcgcgaagaagaagaaacaaagaaaggtggtgctgggtattctatggcgacacccaacaacagcaacattaacaacgcgacggcgaaaccaggaaccctaggcgttggcgtaggtgcagctcctactccgcccaagtcccagcgcggccacaacaagcccaagtgcaaacagtgtggcaatgtcgctcgttcaaggtgcccctatgaatgttgcaagagttgctgttctagaaatcaaaacccctgtcatatccacgtgttaaaagctaattcaacttttcctgacaaggcatcctcttctggtgcgtctccccttgaccagcaatccttagatccacatccacctcaatcaactgcaggtagagttgcatcacttcgacaactttccaatagttttgctcagttcaataatttacacctttcccttcgttcaaagaagccactaactagaaaggatgctgcatctatcaacgaatggagatttgccaagataaaggaatacaaggagcggaatgttgaagtggaaaatgaagcttttgaccgatacatgcagaatgtagatttactagaagaagtattagctgtgaagtcgttggatgccaatgtgccctctgcattagagtctaatgctactccaatggagagcaatgaggcaatgatccctgggataaaattgcagctaagatcaaattcaatgagaagtgatggtttgagaatgagaatacaacaaattgtaaacgagggattaaagaagctcgagaaaagtgctgtagatggtgacataaatgaatcaattgatggtgaatctaatgaagcttcaaaaaggggaaaggggattgaaaggttatcagctataagtgatcttatggataaaattaataaagcccgaactgaggaggatttgaagccgtgcttagagatgaagacccaactcttcaatttagacgaaggctctagcgcgaaagaccttcaagacaatgaaatgcatgcgaatgaaactgctgaaagtgatgtggtacaaacagaaggattggattattctttaccgaaatttgttaccatcactgagattgatctagaagttctccacaccatagacaaacacttttctacccaggatatagagcagttatgaggctagatttcttaaacgttgtgatttaccttgaaagaaacagaaatataaatgttgtgctgttctaggaaaatgctctctaattagaattaggtagtcaaatgcaagccaaaaatgttttagaaattaatctggatacttgaaccggttgaagtgtgaacagattatattcagtttgagcattatgcaattcaattacggttcaactttagtccattaatc

SEQ ID NO: 59196 - protein, 379 aa, Glycine max
  peptide (1)..(379): Ceres Seq. ID no. 15176844
  misc_feature (57)..(110): Pfam Name: Domain of unknown function (DUF702) Pfam Description: Domain of unknown function (DUF702)
  misc_feature (11)..(87): Homolog of NCBI NO: 29467526 NR Description: P0582D05.16 [Oryza sativa (japonica
  misc_feature (116)..(378): Homolog of NCBI NO: 29467525 NR Description: P0582D05.15 [Oryza sativa (japonica
  misc_feature (28)..(313): Homolog of NCBI NO: 18398564 NR Description: expressed protein [Arabidopsis thaliana]
ISREEEETKKGGAGYSMATPNNSNINNATAKPGTLGVGVGAAPTPPKSQRGHNKPKCKQCGNVARSRCPYECCKSCCSRNQNPCHIHVLKANSTFPDKASSSGASPLDQQSLDPHPPQSTAGRVASLRQLSNSFAQFNNLHLSLRSKKPLTRKDAASINEWRFAKIKEYKERNVEVENEAFDRYMQNVDLLEEVLAVKSLDANVPSALESNATPMESNEAMIPGIKLQLRSNSMRSDGLRMRIQQIVNEGLKKLEKSAVDGDINESIDGESNEASKRGKGIERLSAISDLMDKINKARTEEDLKPCLEMKTQLFNLDEGSSAKDLQDNEMHANETAESDVVQTEGLDYSLPKFVTITEIDLEVLHTIDKHFSTQDIEQL

SEQ ID NO: 59197 - protein, 363 aa, Glycine max
  peptide (1)..(363): Ceres Seq. ID no. 15176845
  misc_feature (41)..(94): Pfam Name: Domain of unknown function (DUF702) Pfam Description: Domain of unknown function (DUF702)
  misc_feature (1)..(71): Homolog of NCBI NO: 29467526 NR Description: P0582D05.16 [Oryza sativa (japonica
  misc_feature (100)..(362): Homolog of NCBI NO: 29467525 NR Description: P0582D05.15 [Oryza sativa (japonica
  misc_feature (12)..(297): Homolog of NCBI NO: 18398564 NR Description: expressed protein [Arabidopsis thaliana]
MATPNNSNINNATAKPGTLGVGVGAAPTPPKSQRGHNKPKCKQCGNVARSRCPYECCKSCCSRNQNPCHIHVLKANSTFPDKASSSGASPLDQQSLDPHPPQSTAGRVASLRQLSNSFAQFNNLHLSLRSKKPLTRKDAASINEWRFAKIKEYKERNVEVENEAFDRYMQNVDLLEEVLAVKSLDANVPSALESNATPMESNEAMIPGIKLQLRSNSMRSDGLRMRIQQIVNEGLKKLEKSAVDGDINESIDGESNEASKRGKGIERLSAISDLMDKINKARTEEDLKPCLEMKTQLFNLDEGSSAKDLQDNEMHANETAESDVVQTEGLDYSLPKFVTITEIDLEVLHTIDKHFSTQDIEQL

SEQ ID NO: 59198 - protein, 195 aa, Glycine max
  peptide (1)..(195): Ceres Seq. ID no. 15176846
  misc_feature (1)..(194): Homolog of NCBI NO: 29467525 NR Description: P0582D05.15 [Oryza sativa (japonica
  misc_feature (1)..(129): Homolog of NCBI NO: 18398564 NR Description: expressed protein [Arabidopsis thaliana]
MQNVDLLEEVLAVKSLDANVPSALESNATPMESNEAMIPGIKLQLRSNSMRSDGLRMRIQQIVNEGLKKLEKSAVDGDINESIDGESNEASKRGKGIERLSAISDLMDKINKARTEEDLKPCLEMKTQLFNLDEGSSAKDLQDNEMHANETAESDVVQTEGLDYSLPKFVTITEIDLEVLHTIDKHFSTQDIEQL

SEQ ID NO: 59199 - DNA, 1520 bp, Glycine max
  misc_feature (1)..(1520): Ceres Seq. ID no. 14313074
acatgtcagtgacgaaatatcttttccacctcgttgtccccactggtccatttcacaattgagattttgcattcagcttcctcccatgcttatcaccattcaccattcaccaccatgttgccatgcgattactgccattccaaacccgccatactcttctgcagaccagattccgctaaactatgcttgctatgcgaccagcacgtgcacgccgccaacgccctctccctcaagcacgtgcgcttccagatttgcgactcctgcaagaccgacaccgctgtcctccgctgctccaccgacaacctcgtcctctgccaccactgcgatgtggaaacccacggtgctgccgcttcctcccaccaccaacgtcaccgcctccacggcctctccggctgcccctccgtcacggagatcgcctccgcgctgtgcctcgatttccgggcccaggatcccgtggtccccaccgccgcctccggcggtcgcgatgaggtgtacgagcaggtgctggaaatcgcgcggcagaggaacgacgacctcggcgccgaacaactcaagttcgacgaatcccccataaacgacgtcgttgttgttgacgagatgctgatgcagcaaacgccgttcacgtctttgcttatgttgccgaattccgaatctgaattcgactcccgaaaaagtaacgataacaacggttacggaaccgaggcaggggatcttctctggaattataaccccgcgtatcagcctcctcaggtgtgggattttcagttacaaaaatcaagagattgccatgaaccaagagttgtaacatttgatggtctagaagttccaaaattatttcaggatgagcacaatatgaagtactcaacaattggtgatgacattgatattctatcaagaaataatcaatcggatcagtcatcatcaagccatgcaaagaagaaagaagagaacaacaaaaaagctaaaggtgggttatcatcagagtccaaactgtttgaatccataccgtacaatggcaccaacaatgtcgtagtcatggagcatcttgttggtgggaatgaaaatgttggcaccttaacagccagggttagtttggaagagttggctaagaatagaggggatgccatgttgcgttacaaggagaagaagaaaactcgaaggtacgataagcacattcgctatgaatcaaggaaggccagggctgatactagaaaaagggtgagagggagatttgtgaaggcaagtgatgttcaagcgtgatgatgagtaccttttcagaaatctcatccgagttcaatgctcgtgtgtgtgtacataagttacactataagagaaatatggatatattatagttttcatgaactccctgagcattgattgatttgaatcttttttggtagttgatttatttgaatttttgtttgttacattatatgggaagaggtttttttgtgtgagattctctcataagagggtgatatataagagagacactgacaataaattggtgagtttgtgtt

SEQ ID NO: 59200 - protein, 381 aa, Glycine max
  peptide (1)..(381): Ceres Seq. ID no. 14313075
  misc_feature (340)..(378): Pfam Name: CCT motif Pfam Description: CCT motif
  misc_feature (4)..(107): Homolog of NCBI NO: 15238918 NR Description: CONSTANS B-box zinc finger family protein
  misc_feature (4)..(378): Homolog of NCBI NO: 7489605 NR Description: zinc-finger protein S3574 [imported] - rice
  misc_feature (4)..(107): Homolog of NCBI NO: 15227152 NR Description: CONSTANS B-box zinc finger family protein
  misc_feature (261)..(378): Homolog of NCBI NO: 15227152 NR Description: CONSTANS B-box zinc finger family protein
  misc_feature (1)..(111): Homolog of NCBI NO: 17432968 NR Description: Zinc finger protein constans-like 9
  misc_feature (202)..(349): Homolog of NCBI NO: 17432968 NR Description: Zinc finger protein constans-like 9
  misc_feature (1)..(111): Homolog of NCBI NO: 30685731 NR Description: CONSTANS B-box zinc finger family protein
  misc_feature (202)..(378): Homolog of NCBI NO: 30685731 NR Description: CONSTANS B-box zinc finger family protein
  misc_feature (2)..(107): Homolog of NCBI NO: 15217814 NR Description: CONSTANS B-box zinc finger family protein
  misc_feature (173)..(378): Homolog of NCBI NO: 15217814 NR Description: CONSTANS B-box zinc finger family protein
MLPCDYCHSKPAILFCRPDSAKLCLLCDQHVHAANALSLKHVRFQICDSCKTDTAVLRCSTDNLVLCHHCDVETHGAAASSHHQRHRLHGLSGCPSVTEIASALCLDFRAQDPVVPTAASGGRDEVYEQVLEIARQRNDDLGAEQLKFDESPINDVVVVDEMLMQQTPFTSLLMLPNSESEFDSRKSNDNNGYGTEAGDLLWNYNPAYQPPQVWDFQLQKSRDCHEPRVVTFDGLEVPKLFQDEHNMKYSTIGDDIDILSRNNQSDQSSSSHAKKKEENNKKAKGGLSSESKLFESIPYNGTNNVVVMEHLVGGNENVGTLTARVSLEELAKNRGDAMLRYKEKKKTRRYDKHIRYESRKARADTRKRVRGRFVKASDVQA

SEQ ID NO: 59201 - protein, 220 aa, Glycine max
  peptide (1)..(220): Ceres Seq. ID no. 14313076
  misc_feature (179)..(217): Pfam Name: CCT motif Pfam Description: CCT motif
  misc_feature (173)..(217): Homolog of NCBI NO: 17433065 NR Description: Zinc finger protein constans-like 12
  misc_feature (122)..(218): Homolog of NCBI NO: 7522220 NR Description: zinc-finger protein C60910 [imported] - rice
  misc_feature (173)..(217): Homolog of NCBI NO: 15231491 NR Description: CONSTANS B-box zinc finger family protein
  misc_feature (161)..(216): Homolog of NCBI NO: 38175538 NR Description: zinc-finger protein C60910-like
  misc_feature (170)..(217): Homolog of NCBI NO: 15238918 NR Description: CONSTANS B-box zinc finger family protein
  misc_feature (1)..(217): Homolog of NCBI NO: 7489605 NR Description: zinc-finger protein S3574 [imported] - rice
  misc_feature (100)..(217): Homolog of NCBI NO: 15227152 NR Description: CONSTANS B-box zinc finger family protein
  misc_feature (41)..(188): Homolog of NCBI NO: 17432968 NR Description: Zinc finger protein constans-like 9
  misc_feature (41)..(217): Homolog of NCBI NO: 30685731 NR Description: CONSTANS B-box zinc finger family protein
  misc_feature (12)..(217): Homolog of NCBI NO: 15217814 NR Description: CONSTANS B-box zinc finger family protein
MLMQQTPFTSLLMLPNSESEFDSRKSNDNNGYGTEAGDLLWNYNPAYQPPQVWDFQLQKSRDCHEPRVVTFDGLEVPKLFQDEHNMKYSTIGDDIDILSRNNQSDQSSSSHAKKKEENNKKAKGGLSSESKLFESIPYNGTNNVVVMEHLVGGNENVGTLTARVSLEELAKNRGDAMLRYKEKKKTRRYDKHIRYESRKARADTRKRVRGRFVKASDVQA

SEQ ID NO: 59202 - protein, 218 aa, Glycine max
  peptide (1)..(218): Ceres Seq. ID no. 14313077
  misc_feature (177)..(215): Pfam Name: CCT motif Pfam Description: CCT motif
  misc_feature (171)..(215): Homolog of NCBI NO: 17433065 NR Description: Zinc finger protein constans-like 12
  misc_feature (120)..(216): Homolog of NCBI NO: 7522220 NR Description: zinc-finger protein C60910 [imported] - rice
  misc_feature (171)..(215): Homolog of NCBI NO: 15231491 NR Description: CONSTANS B-box zinc finger family protein
  misc_feature (159)..(214): Homolog of NCBI NO: 38175538 NR Description: zinc-finger protein C60910-like
  misc_feature (168)..(215): Homolog of NCBI NO: 15238918 NR Description: CONSTANS B-box zinc finger family protein
  misc_feature (1)..(215): Homolog of NCBI NO: 7489605 NR Description: zinc-finger protein S3574 [imported] - rice
  misc_feature (98)..(215): Homolog of NCBI NO: 15227152 NR Description: CONSTANS B-box zinc finger family protein
  misc_feature (39)..(186): Homolog of NCBI NO: 17432968 NR Description: Zinc finger protein constans-like 9
  misc_feature (39)..(215): Homolog of NCBI NO: 30685731 NR Description: CONSTANS B-box zinc finger family protein
  misc_feature (10)..(215): Homolog of NCBI NO: 15217814 NR Description: CONSTANS B-box zinc finger family protein
MQQTPFTSLLMLPNSESEFDSRKSNDNNGYGTEAGDLLWNYNPAYQPPQVWDFQLQKSRDCHEPRVVTFDGLEVPKLFQDEHNMKYSTIGDDIDILSRNNQSDQSSSSHAKKKEENNKKAKGGLSSESKLFESIPYNGTNNVVVMEHLVGGNENVGTLTARVSLEELAKNRGDAMLRYKEKKKTRRYDKHIRYESRKARADTRKRVRGRFVKASDVQA

SEQ ID NO: 59203 - DNA, 1502 bp, Glycine max
  misc_feature (1)..(1502): Ceres Seq. ID no. 14312176
atccctctcggtgctgtgtttagcttccttcttcttcttcctctttcttcttcttctgctgcacccacaaatcaaaaccccccttttccaacccaatttttctccataaaccctagattcaacgaacccgccgaccaagctcgaacctcacgtcgcaaaaaaacacttcttttcccctctccgaggttgtcgtgtcggagcatagccatgttgttccctcgaggaaattgatgatttttcataacattggggtctcgttttgcttgtggggtcaccttgaaggagggaaaagtaacgagctttggggctgaatcgtggtgggtctgttgagtatgcatagatctggagctacgatggcgtggaacgtgttcaagttctgcactgctctgcgtggattgggctcgatcatgatcctgttggttcttggcgttgttggtgccacttactatgctgttgttttgaccaattatggccctgctttgtatgctggaggacttgattctcttgttgccttggcagtgttgatcttgtttcatagcttgttggttatgctgttgtggagttacttttctgttgtttttaccgatccggggagtgtccctccaaactggaagcctacaattgatgaggaaaggggagaggctgatccgttggttgggacagagtttagtaatctgccgtctgatcccaatccacgggttcggtactgtcggaagtgcaatcagctcaagccgcctcgatgccatcattgttcagtttgtgggcgctgtgttttgaagatggaccaccattgtgtgtgggtagtcaactgtgtcggggctctaaattacaaatatttccttcttttcttgttctacacttttcttgagacgactctagtgactgcatccttgctgcctcatttcatagcattctttagtgatggagaaattcctggaacacctggctctcttgctacaacttttcttgctttcgttttaaacctggcctttgcactgagcgtcttaggatttctcatcatgcacatatctttggtggctgctaatacgaccactattgaggcatatgagaagaaaactactccaaaatggcgttatgaccttggtcgtcgaaaaaattttgagcaggtttttgggatggacaagaagtactggttcatccctgcttattcagacgaagatatacgaaagatgccagctctacaaggtcttgactatccttcaaaacctgacttcgattcccaatagttctaaaagctaatatatatccacatcatgtaacaaaagtcatggagactctccacaaccctctacttcactctctaacacaatgtagcgtggagcaatggggggcagggtggtgtgatgctggtttgaggggctaatgtgtttatgttcccataatgataggaactgttttttgtcaagcaatgcaattttctcacctttccttttattcaaattgagtgaaatagcaatttttagtgctggaatttattctct

SEQ ID NO: 59204 - protein, 304 aa, Glycine max
  peptide (1)..(304): Ceres Seq. ID no. 14312177
  misc_feature (117)..(179): Pfam Name: DHHC zinc finger domain Pfam Description: DHHC zinc finger domain
  misc_feature (10)..(304): Homolog of NCBI NO: 31560054 NR Description: RIKEN cDNA 5033406L14 [Mus musculus]
  misc_feature (1)..(304): Homolog of NCBI NO: 29791459 NR Description: Similar to RIKEN cDNA 5033406L14 gene [Homo
  misc_feature (215)..(266): Homolog of NCBI NO: 18411456 NR Description: DHHC-type zinc finger domain-containing protein
  misc_feature (73)..(229): Homolog of NCBI NO: 18411456 NR Description: DHHC-type zinc finger domain-containing protein
  misc_feature (7)..(304): Homolog of NCBI NO: 7486880 NR Description: hypothetical protein T12H17.140 - Arabidopsis
  misc_feature (8)..(304): Homolog of NCBI NO: 18416000 NR Description: DHHC-type zinc finger domain-containing protein
  misc_feature (8)..(304): Homolog of NCBI NO: 21593364 NR Description: unknown [Arabidopsis thaliana]
  misc_feature (8)..(126): Homolog of NCBI NO: 11358343 NR Description: hypothetical protein T4C21.210 - Arabidopsis
  misc_feature (149)..(304): Homolog of NCBI NO: 11358343 NR Description: hypothetical protein T4C21.210 - Arabidopsis
  misc_feature (1)..(304): Homolog of NCBI NO: 22331887 NR Description: DHHC-type zinc finger domain-containing protein
MHRSGATMAWNVFKFCTALRGLGSIMILLVLGVVGATYYAVVLTNYGPALYAGGLDSLVALAVLILFHSLLVMLLWSYFSVVFTDPGSVPPNWKPTIDEERGEADPLVGTEFSNLPSDPNPRVRYCRKCNQLKPPRCHHCSVCGRCVLKMDHHCVWVVNCVGALNYKYFLLFLFYTFLETTLVTASLLPHFIAFFSDGEIPGTPGSLATTFLAFVLNLAFALSVLGFLIMHISLVAANTTTIEAYEKKTTPKWRYDLGRRKNFEQVFGMDKKYWFIPAYSDEDIRKMPALQGLDYPSKPDFDSQ

SEQ ID NO: 59205 - protein, 297 aa, Glycine max
  peptide (1)..(297): Ceres Seq. ID no. 14312178
  misc_feature (110)..(172): Pfam Name: DHHC zinc finger domain Pfam Description: DHHC zinc finger domain
  misc_feature (3)..(297): Homolog of NCBI NO: 31560054 NR Description: RIKEN cDNA 5033406L14 [Mus musculus]
  misc_feature (1)..(297): Homolog of NCBI NO: 29791459 NR Description: Similar to RIKEN cDNA 5033406L14 gene [Homo
  misc_feature (208)..(259): Homolog of NCBI NO: 18411456 NR Description: DHHC-type zinc finger domain-containing protein
  misc_feature (66)..(222): Homolog of NCBI NO: 18411456 NR Description: DHHC-type zinc finger domain-containing protein
  misc_feature (1)..(297): Homolog of NCBI NO: 7486880 NR Description: hypothetical protein T12H17.140 - Arabidopsis
  misc_feature (1)..(297): Homolog of NCBI NO: 18416000 NR Description: DHHC-type zinc finger domain-containing protein
  misc_feature (1)..(297): Homolog of NCBI NO: 21593364 NR Description: unknown [Arabidopsis thaliana]
  misc_feature (1)..(119): Homolog of NCBI NO: 11358343 NR Description: hypothetical protein T4C21.210 - Arabidopsis
  misc_feature (142)..(297): Homolog of NCBI NO: 11358343 NR Description: hypothetical protein T4C21.210 - Arabidopsis
  misc_feature (1)..(297): Homolog of NCBI NO: 22331887 NR Description: DHHC-type zinc finger domain-containing protein
MAWNVFKFCTALRGLGSIMILLVLGVVGATYYAVVLTNYGPALYAGGLDSLVALAVLILFHSLLVMLLWSYFSVVFTDPGSVPPNWKPTIDEERGEADPLVGTEFSNLPSDPNPRVRYCRKCNQLKPPRCHHCSVCGRCVLKMDHHCVWVVNCVGALNYKYFLLFLFYTFLETTLVTASLLPHFIAFFSDGEIPGTPGSLATTFLAFVLNLAFALSVLGFLIMHISLVAANTTTIEAYEKKTTPKWRYDLGRRKNFEQVFGMDKKYWFIPAYSDEDIRKMPALQGLDYPSKPDFDSQ

SEQ ID NO: 59206 - protein, 279 aa, Glycine max
  peptide (1)..(279): Ceres Seq. ID no. 14312179
  misc_feature (92)..(154): Pfam Name: DHHC zinc finger domain Pfam Description: DHHC zinc finger domain
  misc_feature (1)..(279): Homolog of NCBI NO: 31560054 NR Description: RIKEN cDNA 5033406L14 [Mus musculus]
  misc_feature (1)..(279): Homolog of NCBI NO: 29791459 NR Description: Similar to RIKEN cDNA 5033406L14 gene [Homo
  misc_feature (190)..(241): Homolog of NCBI NO: 18411456 NR Description: DHHC-type zinc finger domain-containing protein
  misc_feature (48)..(204): Homolog of NCBI NO: 18411456 NR Description: DHHC-type zinc finger domain-containing protein
  misc_feature (1)..(279): Homolog of NCBI NO: 7486880 NR Description: hypothetical protein T12H17.140 - Arabidopsis
  misc_feature (1)..(279): Homolog of NCBI NO: 18416000 NR Description: DHHC-type zinc finger domain-containing protein
  misc_feature (1)..(279): Homolog of NCBI NO: 21593364 NR Description: unknown [Arabidopsis thaliana]
  misc_feature (1)..(101): Homolog of NCBI NO: 11358343 NR Description: hypothetical protein T4C21.210 - Arabidopsis
  misc_feature (124)..(279): Homolog of NCBI NO: 11358343 NR Description: hypothetical protein T4C21.210 - Arabidopsis
  misc_feature (1)..(279): Homolog of NCBI NO: 22331887 NR Description: DHHC-type zinc finger domain-containing protein
MILLVLGVVGATYYAVVLTNYGPALYAGGLDSLVALAVLILFHSLLVMLLWSYFSVVFTDPGSVPPNWKPTIDEERGEADPLVGTEFSNLPSDPNPRVRYCRKCNQLKPPRCHHCSVCGRCVLKMDHHCVWVVNCVGALNYKYFLLFLFYTFLETTLVTASLLPHFIAFFSDGEIPGTPGSLATTFLAFVLNLAFALSVLGFLIMHISLVAANTTTIEAYEKKTTPKWRYDLGRRKNFEQVFGMDKKYWFIPAYSDEDIRKMPALQGLDYPSKPDFDSQ

SEQ ID NO: 59207 - DNA, 1338 bp, Glycine max
  misc_feature (1)..(1338): Ceres Seq. ID no. 15172430
gacacttcccagtttcaacttcatgcctcagtgaatttctctgcaattttgctcccaaaaatttcatctctcgccattgccgtaggagagcacttcaattttctctccaataagacaattcgttctttcccttctcaatttccggcgagttctcccaatctgtaatttgcccccactctctctattcatcttactgttaccagaaagttggaatatcctccctcttcaatttctcgtaagattcatcgatcacgaacttatattgatttcgctattcttacactgatcttatttttcagtcgattttgttctgcaacatttatcgcttccagaatccagatctggatggacatgaaccatcgtttgcatttggggcaaccttgatttgggttttgaagtgctttatggaaactggggtctctaaatttttaaatttttgtctaatgacgagtggcgtgcctagatttgagtaactgggtcgctgctacagttgtggaagtttgagaattgggcttcgatttgtttgaggaagtttgtcgggtcggcgtcatgttctatggttcggtggtatgggacccttggcttattgttgctcagattgtgtgtcttcaatgtttgtactatatcaccctggggttgttcttgtcgatacttgttggcacacgtgtgtctcggttgagtctcgtgtatttctttgactatgttgcgattactacctctaccgttactggttggtgtgttattgcttcgtttctgctcagctcagttgcaggggcggtatatgtgttttgtttgattgaaagatcaaagaagtgcttggatttttcagccacagtctacattgtccatctttttatatgcattgtgtatgggggttggccctcatctataacatggtggattgtgaatggtactggaattgcagtgatggctttgctcggtgaacgtctgtgcatgaagcgtgaactccaggagatatcattgacacgatttcggtcaaatgtttgattggtagaaggtacttttgaatacaagaaacaagtgctgcaggatggcaactacttttacttctatatattggatgatcatgatcttcaagatgaatcccacgaagtgaatagttctattctgccattgaaagacctgcatttattttctattctttagttggaatagaattgaaacatatataaccagacgagactaagtatataattttacaggaatttccggaagtcttattgtaattttattctttttacccttttgtgagttttcggatctgtttacaatctcatatgttacctctttctatcccattacttttaatgaggttgt

SEQ ID NO: 59208 - protein, 152 aa, Glycine max
  peptide (1)..(152): Ceres Seq. ID no. 15172431
  misc_feature (69)..(145): Homolog of NCBI NO: 39586230 NR Description: Hypothetical protein CBG11978 [Caenorhabditis
  misc_feature (3)..(152): Homolog of NCBI NO: 34860687 NR Description: similar to chromosome 20 open reading frame 169
  misc_feature (3)..(152): Homolog of NCBI NO: 12833500 NR Description: unnamed protein product [Mus musculus]
  misc_feature (1)..(75): Homolog of NCBI NO: 34912286 NR Description: P0451D05.3 [Oryza sativa (japonica
  misc_feature (3)..(152): Homolog of NCBI NO: 14270398 NR Description: hypothetical protein [Homo sapiens]
  misc_feature (3)..(152): Homolog of NCBI NO: 23618848 NR Description: chromosome 20 open reading frame 169 [Homo
  misc_feature (3)..(152): Homolog of NCBI NO: 11561813 NR Description: dJ453C12.4.1 (novel protein (similar to
  misc_feature (1)..(151): Homolog of NCBI NO: 12324600 NR Description: unknown protein; 19658-19089 [Arabidopsis
  misc_feature (1)..(152): Homolog of NCBI NO: 18412584 NR Description: expressed protein [Arabidopsis thaliana]
MFYGSVVWDPWLIVAQIVCLQCLYYITLGLFLSILVGTRVSRLSLVYFFDYVAITTSTVTGWCVIASFLLSSVAGAVYVFCLIERSKKCLDFSATVYIVHLFICIVYGGWPSSITWWIVNGTGIAVMALLGERLCMKRELQEISLTRFRSNV

SEQ ID NO: 59209 - DNA, 1220 bp, Glycine max
  misc_feature (1)..(1220): Ceres Seq. ID no. 14316412
agacgcgtcttttatcacattgaattcatccttctgtgttctgtttctttccttttcttcttgggcgaaaccctaatctccccccttcacccttcgtacaccgcgtcgcatctacttccatcttctctcagatccaatctccgattcttgcttcactatcacaagcaaacatgtctgcggctttggatatgaccctcgaagatataattaagaacaacaagaaatcttccctcgccaacaccaggggccgaggccgagcctcgggacccggacccgctcgccgcctccccaaccgtgccgccaatcgcgccgcaccgtatgccgctgccaaggcgccggagacagcttggaaacacgatatgtacgcgaaccagccagtggccgcggcgtatccaggtggtcgagcgtcttccatcgaaacagggactaagctctacatttccaatttggattatggcgtttccaatgatgatattaaggagttgtttcttgaagttggcgacgtgaaacggcatactgttcattatgacaggagtgggagatccaagggtacggcagaagtagtcttctcgcgccgagctgatgctgtagctgcagtgaagaggtacaacaatgttcagctggatgggaaaccaatgaaggtagagattgtggggacgaacatcgctacacatgctgcaccacccgctgtgaatggaacttttggaaacccaactggagttcctagaagtggacaagggagaagtgggtcattaggaaggccacgtggtgggagtagaggtcgtggcagcattcaacggggccggggacgtggaagaggaggtcgtgatgaaaaggtatctgctgaagatcttgatgctgatttggagaagtatcatgctgaggctatgcaattaaactgaaggaaacaacgatgttctgttttattgctattacatttgcggttgttagggccatgttgatggaacaccgccgaattatgtatctttatcacagtcgtgcttttcggaaaggaaaaggataacttagagtgaaaacttttacagttgatatatgtagtttgggattctgttatgaaatatttgttttcgttgggtatgactatgaaatgtggctgaagaaaccgaagtctgcttgtattatgcactccggcttcctttcattggatttaatcatttgtttattcaagtattcaacaagtgggtttggaagtgggaacc

SEQ ID NO: 59210 - protein, 243 aa, Glycine max
  peptide (1)..(243): Ceres Seq. ID no. 14316413
  misc_feature (88)..(158): Pfam Name: RNA recognition motif. (a.k.a. RRM, RBD, or RNP domain) Pfam Description: RNA recognition motif. (a.k.a. RRM, RBD, or RNP
  misc_feature (27)..(219): Homolog of NCBI NO: 38175495 NR Description: putative transcriptional coactivator(DIP2)
  misc_feature (1)..(237): Homolog of NCBI NO: 30524924 NR Description: RNA and export factor binding protein 2
  misc_feature (1)..(237): Homolog of NCBI NO: 7159945 NR Description: RNA and export factor binding protein 2-I [Mus
  misc_feature (1)..(218): Homolog of NCBI NO: 33146678 NR Description: putative RNA and export factor binding protein
  misc_feature (23)..(218): Homolog of NCBI NO: 30679669 NR Description: RNA and export factor binding protein, putative
  misc_feature (23)..(218): Homolog of NCBI NO: 11358209 NR Description: hypothetical protein T22P11.120 - Arabidopsis
  misc_feature (1)..(243): Homolog of NCBI NO: 30697313 NR Description: RNA and export factor binding protein, putative
  misc_feature (1)..(243): Homolog of NCBI NO: 9757916 NR Description: RNA and export factor binding protein 2-I-like
  misc_feature (1)..(243): Homolog of NCBI NO: 30697310 NR Description: RNA and export factor binding protein, putative
  misc_feature (1)..(243): Homolog of NCBI NO: 21555029 NR Description: transcriptional coactivator-like protein
MSAALDMTLEDIIKNNKKSSLANTRGRGRASGPGPARRLPNRAANRAAPYAAAKAPETAWKHDMYANQPVAAAYPGGRASSIETGTKLYISNLDYGVSNDDIKELFLEVGDVKRHTVHYDRSGRSKGTAEVVFSRRADAVAAVKRYNNVQLDGKPMKVEIVGTNIATHAAPPAVNGTFGNPTGVPRSGQGRSGSLGRPRGGSRGRGSIQRGRGRGRGGRDEKVSAEDLDADLEKYHAEAMQLN

SEQ ID NO: 59211 - protein, 237 aa, Glycine max
  peptide (1)..(237): Ceres Seq. ID no. 14316414
  misc_feature (82)..(152): Pfam Name: RNA recognition motif. (a.k.a. RRM, RBD, or RNP domain) Pfam Description: RNA recognition motif. (a.k.a. RRM, RBD, or RNP
  misc_feature (21)..(213): Homolog of NCBI NO: 38175495 NR Description: putative transcriptional coactivator(DIP2)
  misc_feature (1)..(231): Homolog of NCBI NO: 30524924 NR Description: RNA and export factor binding protein 2
  misc_feature (1)..(231): Homolog of NCBI NO: 7159945 NR Description: RNA and export factor binding protein 2-I [Mus
  misc_feature (1)..(212): Homolog of NCBI NO: 33146678 NR Description: putative RNA and export factor binding protein
  misc_feature (17)..(212): Homolog of NCBI NO: 30679669 NR Description: RNA and export factor binding protein, putative
  misc_feature (17)..(212): Homolog of NCBI NO: 11358209 NR Description: hypothetical protein T22P11.120 - Arabidopsis
  misc_feature (1)..(237): Homolog of NCBI NO: 30697313 NR Description: RNA and export factor binding protein, putative
  misc_feature (1)..(237): Homolog of NCBI NO: 9757916 NR Description: RNA and export factor binding protein 2-I-like
  misc_feature (1)..(237): Homolog of NCBI NO: 30697310 NR Description: RNA and export factor binding protein, putative
  misc_feature (1)..(237): Homolog of NCBI NO: 21555029 NR Description: transcriptional coactivator-like protein
MTLEDIIKNNKKSSLANTRGRGRASGPGPARRLPNRAANRAAPYAAAKAPETAWKHDMYANQPVAAAYPGGRASSIETGTKLYISNLDYGVSNDDIKELFLEVGDVKRHTVHYDRSGRSKGTAEVVFSRRADAVAAVKRYNNVQLDGKPMKVEIVGTNIATHAAPPAVNGTFGNPTGVPRSGQGRSGSLGRPRGGSRGRGSIQRGRGRGRGGRDEKVSAEDLDADLEKYHAEAMQLN

SEQ ID NO: 59212 - protein, 180 aa, Glycine max
  peptide (1)..(180): Ceres Seq. ID no. 14316415
  misc_feature (25)..(95): Pfam Name: RNA recognition motif. (a.k.a. RRM, RBD, or RNP domain) Pfam Description: RNA recognition motif. (a.k.a. RRM, RBD, or RNP
  misc_feature (1)..(156): Homolog of NCBI NO: 38175495 NR Description: putative transcriptional coactivator(DIP2)
  misc_feature (1)..(174): Homolog of NCBI NO: 30524924 NR Description: RNA and export factor binding protein 2
  misc_feature (1)..(174): Homolog of NCBI NO: 7159945 NR Description: RNA and export factor binding protein 2-I [Mus
  misc_feature (1)..(155): Homolog of NCBI NO: 33146678 NR Description: putative RNA and export factor binding protein
  misc_feature (1)..(155): Homolog of NCBI NO: 30679669 NR Description: RNA and export factor binding protein, putative
  misc_feature (1)..(155): Homolog of NCBI NO: 11358209 NR Description: hypothetical protein T22P11.120 - Arabidopsis
  misc_feature (1)..(180): Homolog of NCBI NO: 30697313 NR Description: RNA and export factor binding protein, putative
  misc_feature (1)..(180): Homolog of NCBI NO: 9757916 NR Description: RNA and export factor binding protein 2-I-like
  misc_feature (1)..(180): Homolog of NCBI NO: 30697310 NR Description: RNA and export factor binding protein, putative
  misc_feature (1)..(180): Homolog of NCBI NO: 21555029 NR Description: transcriptional coactivator-like protein
MYANQPVAAAYPGGRASSIETGTKLYISNLDYGVSNDDIKELFLEVGDVKRHTVHYDRSGRSKGTAEVVFSRRADAVAAVKRYNNVQLDGKPMKVEIVGTNIATHAAPPAVNGTFGNPTGVPRSGQGRSGSLGRPRGGSRGRGSIQRGRGRGRGGRDEKVSAEDLDADLEKYHAEAMQLN

SEQ ID NO: 59213 - DNA, 1312 bp, Glycine max
  misc_feature (1)..(1312): Ceres Seq. ID no. 14316436
acttcatttcactcacccctttaactgccatccattctttctctcttgaggggcaggggtaccacctcaaagaatatcctctttgatccctttctctatttccttttctttattattattatataataacaccctctaaatacttcctttacccctctttctctctctcatcttaaacacaaacaaatatactactacttcaaactttgatatgcaactggcggcagaactccaacgcacccatcaccgccaccaaaggcaaaggcaacaacaggacaccacccccatgtgccgccaaatccagctcactatctccgatcacaccgtcgccggagacgccgtcgctgacgacggcgaggatctcttcattccgcccctcaacttcgccatggttgataatggcattttccgctccggcttccccgaacccgccaacttctccttcctccaaaccctcggccttcgttccatcatatatctgtgtcctgagccgtatccggaggccaacatggagttcctcaagtcaaatgggatcaagctttttcagtttgggattgagggccataaggagccttttgtgaacatcccagaggacacaatccgtgaagcactagaagttgttcttgatgtcaggaaccacccagttataattcactgtaagcggggaaagcaccgaacaggttgcttggtaggatgctatagaaaattgcaaaaatggtgcttgtcatccgtctttgatgaataccaacgctttgcagccgccaaagcaagagtttcagatcagaggttcgtagagttgtttgatatttccagcatgaaacatttgcccatacccttttcatgtttgaagaggtaacatataccaagctatgctgagttgggtttactttctttagtttgtgaaagtgaagccaaggttcttcctttgaataaataggaaaaggtgatgaactccttcaatgcattgcagcggcaaaggaataattcttctcccattttcaaaataagacaagaaaattctaggaatagtagagcattacctgtatttgtatgtgttaaaattctgccctatatttcccttctctccctacaattggcccttagtgtacctcaccaccttttgtcctattttctttctctttatttttatgtttttctttgctgctccccattcatcaacaatgagtgtagatatatcttgattttttctcgaggctcagagaaattcaagaaggctacaaaaatgacttgtttgtctacccaaaatcttggtgggtagtaaagcagaggaacttataaaattttatttgct

SEQ ID NO: 59214 - protein, 214 aa, Glycine max
  peptide (1)..(214): Ceres Seq. ID no. 14316437
  misc_feature (53)..(211): Pfam Name: Tyrosine phosphatase family Pfam Description: Tyrosine phosphatase family
  misc_feature (53)..(205): Homolog of NCBI NO: 6324296 NR Description: Synthetic interaction with Whi2; Siw14p
  misc_feature (41)..(203): Homolog of NCBI NO: 15237359 NR Description: expressed protein [Arabidopsis thaliana]
  misc_feature (41)..(203): Homolog of NCBI NO: 21553927 NR Description: unknown [Arabidopsis thaliana]
  misc_feature (46)..(203): Homolog of NCBI NO: 15232985 NR Description: expressed protein [Arabidopsis thaliana]
  misc_feature (48)..(214): Homolog of NCBI NO: 7487406 NR Description: hypothetical protein T24M8.4 - Arabidopsis
  misc_feature (48)..(119): Homolog of NCBI NO: 30102538 NR Description: At2g32960 [Arabidopsis thaliana]
  misc_feature (120)..(214): Homolog of NCBI NO: 30102538 NR Description: At2g32960 [Arabidopsis thaliana]
  misc_feature (48)..(214): Homolog of NCBI NO: 15225761 NR Description: expressed protein [Arabidopsis thaliana]
  misc_feature (48)..(214): Homolog of NCBI NO: 18412419 NR Description: expressed protein [Arabidopsis thaliana]
  misc_feature (48)..(211): Homolog of NCBI NO: 15220383 NR Description: unkown protein [Arabidopsis thaliana]
MQLAAELQRTHHRHQRQRQQQDTTPMCRQIQLTISDHTVAGDAVADDGEDLFIPPLNFAMVDNGIFRSGFPEPANFSFLQTLGLRSIIYLCPEPYPEANMEFLKSNGIKLFQFGIEGHKEPFVNIPEDTIREALEVVLDVRNHPVIIHCKRGKHRTGCLVGCYRKLQKWCLSSVFDEYQRFAAAKARVSDQRFVELFDISSMKHLPIPFSCLKR

SEQ ID NO: 59215 - protein, 189 aa, Glycine max
  peptide (1)..(189): Ceres Seq. ID no. 14316438
  misc_feature (28)..(186): Pfam Name: Tyrosine phosphatase family Pfam Description: Tyrosine phosphatase family
  misc_feature (28)..(180): Homolog of NCBI NO: 6324296 NR Description: Synthetic interaction with Whi2; Siw14p
  misc_feature (16)..(178): Homolog of NCBI NO: 15237359 NR Description: expressed protein [Arabidopsis thaliana]
  misc_feature (16)..(178): Homolog of NCBI NO: 21553927 NR Description: unknown [Arabidopsis thaliana]
  misc_feature (21)..(178): Homolog of NCBI NO: 15232985 NR Description: expressed protein [Arabidopsis thaliana]
  misc_feature (23)..(189): Homolog of NCBI NO: 7487406 NR Description: hypothetical protein T24M8.4 - Arabidopsis
  misc_feature (23)..(94): Homolog of NCBI NO: 30102538 NR Description: At2g32960 [Arabidopsis thaliana]
  misc_feature (95)..(189): Homolog of NCBI NO: 30102538 NR Description: At2g32960 [Arabidopsis thaliana]
  misc_feature (23)..(189): Homolog of NCBI NO: 15225761 NR Description: expressed protein [Arabidopsis thaliana]
  misc_feature (23)..(189): Homolog of NCBI NO: 18412419 NR Description: expressed protein [Arabidopsis thaliana]
  misc_feature (23)..(186): Homolog of NCBI NO: 15220383 NR Description: unkown protein [Arabidopsis thaliana]
MCRQIQLTISDHTVAGDAVADDGEDLFIPPLNFAMVDNGIFRSGFPEPANFSFLQTLGLRSIIYLCPEPYPEANMEFLKSNGIKLFQFGIEGHKEPFVNIPEDTIREALEVVLDVRNHPVIIHCKRGKHRTGCLVGCYRKLQKWCLSSVFDEYQRFAAAKARVSDQRFVELFDISSMKHLPIPFSCLKR

SEQ ID NO: 59216 - protein, 155 aa, Glycine max
  peptide (1)..(155): Ceres Seq. ID no. 14316439
  misc_feature (1)..(152): Pfam Name: Tyrosine phosphatase family Pfam Description: Tyrosine phosphatase family
  misc_feature (1)..(146): Homolog of NCBI NO: 6324296 NR Description: Synthetic interaction with Whi2; Siw14p
  misc_feature (1)..(144): Homolog of NCBI NO: 15237359 NR Description: expressed protein [Arabidopsis thaliana]
  misc_feature (1)..(144): Homolog of NCBI NO: 21553927 NR Description: unknown [Arabidopsis thaliana]
  misc_feature (1)..(144): Homolog of NCBI NO: 15232985 NR Description: expressed protein [Arabidopsis thaliana]
  misc_feature (1)..(155): Homolog of NCBI NO: 7487406 NR Description: hypothetical protein T24M8.4 - Arabidopsis
  misc_feature (1)..(60): Homolog of NCBI NO: 30102538 NR Description: At2g32960 [Arabidopsis thaliana]
  misc_feature (61)..(155): Homolog of NCBI NO: 30102538 NR Description: At2g32960 [Arabidopsis thaliana]
  misc_feature (1)..(155): Homolog of NCBI NO: 15225761 NR Description: expressed protein [Arabidopsis thaliana]
  misc_feature (1)..(155): Homolog of NCBI NO: 18412419 NR Description: expressed protein [Arabidopsis thaliana]
  misc_feature (1)..(152): Homolog of NCBI NO: 15220383 NR Description: unkown protein [Arabidopsis thaliana]
MVDNGIFRSGFPEPANFSFLQTLGLRSIIYLCPEPYPEANMEFLKSNGIKLFQFGIEGHKEPFVNIPEDTIREALEVVLDVRNHPVIIHCKRGKHRTGCLVGCYRKLQKWCLSSVFDEYQRFAAAKARVSDQRFVELFDISSMKHLPIPFSCLKR

SEQ ID NO: 59217 - DNA, 1265 bp, Glycine max
  misc_feature (1)..(1265): Ceres Seq. ID no. 15177710
gtattatacgtccccttgtcctgcccctgcccctataccatagaacattagtacccccacacacacccctcctctatctttcactattattgccacacaaatcaattaactgaatgcttagagagagaaagaggagaaggagtagtgataaggtgatcatagagcatattataagagagtgaaaactaatggaggttggcctcaagaaggagaacatggggtttgaggaaactgagttaaggcttggactgcctggaaacggaggcactgaagaagtgctcatcaggaagaggggtttctctgagactgaaactggtcatgaagatgagtctgccaccactgtggatttgatgcttaatctttcttctaaggaggccgcaaccactgctgctgctgctgcagatccaactgataagcacaagactttgcctaaggagaagacccttctgccagcagatcctgctaagcctccagccaagacgcaggtggtgggttggccacctgtgcggtccttccggaagaacatgttggctgtgcaaaagagcgttggagaagagagcgagaagaacagcagccctaatgcaagctttgtcaaagttagcatggatggagcaccttaccttcgcaaagtggacttgaagatgtacaagagttaccgagagctctctgattctttaggcaaaatgttcagctccttcacctttggcaattgtgaatcccaaggaatgaaggatttcatgaatgagagcaagctgaatgatctcttgaacagctctgattatgtcccaacctatgaggacaaggatggtgactggatgcttgtcggtgatgtcccatgggagatgtttgttgaatcatgcaagcgtttacgcatcatgaaaggaaaggaggctattggtcttggtcttgcaccaagagccatggcaaaatgcaagaacaggagctagactagtcgcacaattcatgacctgccccatcctttgtaattgtggtgcccagttggcttagtaactaaagtaaggataagctgcagcagacacggatggacattgcagggtgttgaattatagttaatttgtgtatcattatggtttgttataatatttcaaacaaaacaatgagatgcatgtctaattaagtactaattatgaacaggaacataatgactctcaatcatgttgttagacttggctttcttatatatctttgcttgttctgtgtgagtgcttgcttaataataattttaagatgtgtttgtctgttgt

SEQ ID NO: 59218 - protein, 252 aa, Glycine max
  peptide (1)..(252): Ceres Seq. ID no. 15177711
  misc_feature (10)..(242): Pfam Name: AUX/IAA family Pfam Description: AUX/IAA family
  misc_feature (10)..(252): Homolog of NCBI NO: 15229343 NR Description: auxin-responsive protein IAA16 (Indoleacetic
  misc_feature (89)..(251): Homolog of NCBI NO: 22725714 NR Description: auxin-responsive protein IAA1; MjAux/IAA1
  misc_feature (10)..(252): Homolog of NCBI NO: 22328628 NR Description: auxin-responsive protein, putative [Arabidopsis
  misc_feature (10)..(252): Homolog of NCBI NO: 15228943 NR Description: auxin-responsive protein IAA7 (Indoleacetic
  misc_feature (10)..(252): Homolog of NCBI NO: 21593352 NR Description: indoleacetic acid (IAA)-inducible gene (IAA7)
  misc_feature (5)..(252): Homolog of NCBI NO: 5139697 NR Description: expressed in cucumber hypocotyls [Cucumis sativus]
  misc_feature (7)..(252): Homolog of NCBI NO: 4887020 NR Description: Nt-iaa28 deduced protein [Nicotiana tabacum]
  misc_feature (1)..(239): Homolog of NCBI NO: 20269061 NR Description: aux/IAA protein [Populus tremula x Populus
  misc_feature (10)..(252): Homolog of NCBI NO: 20385508 NR Description: auxin-regulated protein [Populus tremula x
  misc_feature (10)..(252): Homolog of NCBI NO: 114734 NR Description: AUXIN-INDUCED PROTEIN AUX28
MEVGLKKENMGFEETELRLGLPGNGGTEEVLIRKRGFSETETGHEDESATTVDLMLNLSSKEAATTAAAAADPTDKHKTLPKEKTLLPADPAKPPAKTQVVGWPPVRSFRKNMLAVQKSVGEESEKNSSPNASFVKVSMDGAPYLRKVDLKMYKSYRELSDSLGKMFSSFTFGNCESQGMKDFMNESKLNDLLNSSDYVPTYEDKDGDWMLVGDVPWEMFVESCKRLRIMKGKEAIGLGLAPRAMAKCKNRS

SEQ ID NO: 59219 - protein, 243 aa, Glycine max
  peptide (1)..(243): Ceres Seq. ID no. 15177712
  misc_feature (1)..(233): Pfam Name: AUX/IAA family Pfam Description: AUX/IAA family
  misc_feature (1)..(243): Homolog of NCBI NO: 15229343 NR Description: auxin-responsive protein IAA16 (Indoleacetic
  misc_feature (80)..(242): Homolog of NCBI NO: 22725714 NR Description: auxin-responsive protein IAA1; MjAux/IAA1
  misc_feature (1)..(243): Homolog of NCBI NO: 22328628 NR Description: auxin-responsive protein, putative [Arabidopsis
  misc_feature (1)..(243): Homolog of NCBI NO: 15228943 NR Description: auxin-responsive protein IAA7 (Indoleacetic
  misc_feature (1)..(243): Homolog of NCBI NO: 21593352 NR Description: indoleacetic acid (IAA)-inducible gene (IAA7)
  misc_feature (1)..(243): Homolog of NCBI NO: 5139697 NR Description: expressed in cucumber hypocotyls [Cucumis sativus]
  misc_feature (1)..(243): Homolog of NCBI NO: 4887020 NR Description: Nt-iaa28 deduced protein [Nicotiana tabacum]
  misc_feature (1)..(230): Homolog of NCBI NO: 20269061 NR Description: aux/IAA protein [Populus tremula x Populus
  misc_feature (1)..(243): Homolog of NCBI NO: 20385508 NR Description: auxin-regulated protein [Populus tremula x
  misc_feature (1)..(243): Homolog of NCBI NO: 114734 NR Description: AUXIN-INDUCED PROTEIN AUX28
MGFEETELRLGLPGNGGTEEVLIRKRGFSETETGHEDESATTVDLMLNLSSKEAATTAAAAADPTDKHKTLPKEKTLLPADPAKPPAKTQVVGWPPVRSFRKNMLAVQKSVGEESEKNSSPNASFVKVSMDGAPYLRKVDLKMYKSYRELSDSLGKMFSSFTFGNCESQGMKDFMNESKLNDLLNSSDYVPTYEDKDGDWMLVGDVPWEMFVESCKRLRIMKGKEAIGLGLAPRAMAKCKNRS

SEQ ID NO: 59220 - protein, 198 aa, Glycine max
  peptide (1)..(198): Ceres Seq. ID no. 15177713
  misc_feature (1)..(188): Pfam Name: AUX/IAA family Pfam Description: AUX/IAA family
  misc_feature (1)..(198): Homolog of NCBI NO: 15229343 NR Description: auxin-responsive protein IAA16 (Indoleacetic
  misc_feature (35)..(197): Homolog of NCBI NO: 22725714 NR Description: auxin-responsive protein IAA1; MjAux/IAA1
  misc_feature (1)..(198): Homolog of NCBI NO: 22328628 NR Description: auxin-responsive protein, putative [Arabidopsis
  misc_feature (1)..(198): Homolog of NCBI NO: 15228943 NR Description: auxin-responsive protein IAA7 (Indoleacetic
  misc_feature (1)..(198): Homolog of NCBI NO: 21593352 NR Description: indoleacetic acid (IAA)-inducible gene (IAA7)
  misc_feature (1)..(198): Homolog of NCBI NO: 5139697 NR Description: expressed in cucumber hypocotyls [Cucumis sativus]
  misc_feature (1)..(198): Homolog of NCBI NO: 4887020 NR Description: Nt-iaa28 deduced protein [Nicotiana tabacum]
  misc_feature (1)..(185): Homolog of NCBI NO: 20269061 NR Description: aux/IAA protein [Populus tremula x Populus
  misc_feature (1)..(198): Homolog of NCBI NO: 20385508 NR Description: auxin-regulated protein [Populus tremula x
  misc_feature (1)..(198): Homolog of NCBI NO: 114734 NR Description: AUXIN-INDUCED PROTEIN AUX28
MLNLSSKEAATTAAAAADPTDKHKTLPKEKTLLPADPAKPPAKTQVVGWPPVRSFRKNMLAVQKSVGEESEKNSSPNASFVKVSMDGAPYLRKVDLKMYKSYRELSDSLGKMFSSFTFGNCESQGMKDFMNESKLNDLLNSSDYVPTYEDKDGDWMLVGDVPWEMFVESCKRLRIMKGKEAIGLGLAPRAMAKCKNRS

SEQ ID NO: 59221 - DNA, 1424 bp, Glycine max
  misc_feature (1)..(1424): Ceres Seq. ID no. 15177799
ccctctcagcatctgtgtatttttccgttgcaattgcaacctccctcttcacactttccctcctccgtcttcttcctctgcacgcattttccgctgcagcaactccaaagccgccagctcagcatcctcgaaatcaggtgttgcaatctggcatggatttcctctggagcgagaatgcgacgacgccgcgcgcctcgcatttctccgtcgcgatctgcttcgccttcgccagtttcgcggccaggttcttccttgacagattcgtctttcgcagtttggccattaggatgttgacaaagggcagagctccttcacgtattactaaggaaatgcaagtaaagattggaaaatgctcagagtcaatgtggaagctaacatattatgctgcagttgaagcatttgttcttaaaattacctaccatgaaccctggttcactaatacgaagttatacttcaatgactggccaaatcatgagttgaagagtcccctagtgttgtactacatgtgccagtgtgggttctacatatatagcattgctgctattctcacatgggagactcgaaggaaggatttttcagtgatgtttactcaccatgtaattactgttttactgattgggatttcatatctaacaagtttttttagggttggctccataatcctcgcccttcatgatgcaagtgacgtattcatggaagctgccaaggttttcaagtattctggaagggagtttggtgcaagtgtgtgttttggattctttgctgtttcgtggctcatactgcggctaattttctttccattttgggttattaaagcaacgagcattgatcttcagcaagtcttaagcctgtcagagggttttcatatgtttctttactatgtttttaatacaatgctcataatgctgctcatcttccatatatattggtggaagctcatttgtgcgatgatcttgaggcagctgaaaaataggggaaaagttggcgaggatataagatcagattcagatgatgactgaatagacgaagaagggttttgttgagttttctttgctcccgctagttggtggtggtagctctgatggatactgtttttgacttgtctatagatttctaggagttcagttggttaatacaaccagtggaggagatctgaattttcgttagtttcaaaattttcattgattaccaagtaaaaagggagtaggaaaccgtccaaagcatattttgattcttatatttttgctgtataaatgataggcattcctgtataattgtttttccaaacgaacccgtttaggttaactaggggttgaatgacaagtggcttataacaaatatgaaggagaaagaaaaacttacagtcattctacttttgtagttgcgcttttgaggaataagccgcagactggtgcattgtactg

SEQ ID NO: 59222 - protein, 338 aa, Glycine max
  peptide (1)..(338): Ceres Seq. ID no. 15177800
  misc_feature (135)..(338): Pfam Name: Longevity-assurance protein (LAG1) Pfam Description: Longevity-assurance protein (LAG1)
  misc_feature (105)..(338): Homolog of NCBI NO: 31241781 NR Description: ENSANGP00000012836 [Anopheles gambiae]
  misc_feature (116)..(338): Homolog of NCBI NO: 21358551 NR Description: Longevity assurance gene 1 CG3576-PB [Drosophila
  misc_feature (46)..(273): Homolog of NCBI NO: 30683361 NR Description: longevity assurance protein -related [Arabidopsis
  misc_feature (55)..(338): Homolog of NCBI NO: 7688742 NR Description: ASC1 [Lycopersicon esculentum]
  misc_feature (75)..(338): Homolog of NCBI NO: 18404559 NR Description: LAG1 homolog 1 [Arabidopsis thaliana]
  misc_feature (53)..(338): Homolog of NCBI NO: 16974114 NR Description: putative resistance protein [Lycopersicon
  misc_feature (46)..(338): Homolog of NCBI NO: 25518747 NR Description: hypothetical protein F13B4.7 - Arabidopsis
  misc_feature (62)..(338): Homolog of NCBI NO: 34901974 NR Description: unknown protein [Oryza sativa (japonica
  misc_feature (66)..(338): Homolog of NCBI NO: 7658241 NR Description: LAG1 homolog 2 [Arabidopsis thaliana]
  misc_feature (66)..(338): Homolog of NCBI NO: 15230323 NR Description: longevity factor-related protein [Arabidopsis
LSASVYFSVAIATSLFTLSLLRLLPLHAFSAAATPKPPAQHPRNQVLQSGMDFLWSENATTPRASHFSVAICFAFASFAARFFLDRFVFRSLAIRMLTKGRAPSRITKEMQVKIGKCSESMWKLTYYAAVEAFVLKITYHEPWFTNTKLYFNDWPNHELKSPLVLYYMCQCGFYIYSIAAILTWETRRKDFSVMFTHHVITVLLIGISYLTSFFRVGSIILALHDASDVFMEAAKVFKYSGREFGASVCFGFFAVSWLILRLIFFPFWVIKATSIDLQQVLSLSEGFHMFLYYVFNTMLIMLLIFHIYWWKLICAMILRQLKNRGKVGEDIRSDSDDD

SEQ ID NO: 59223 - protein, 288 aa, Glycine max
  peptide (1)..(288): Ceres Seq. ID no. 15177801
  misc_feature (85)..(288): Pfam Name: Longevity-assurance protein (LAG1) Pfam Description: Longevity-assurance protein (LAG1)
  misc_feature (55)..(288): Homolog of NCBI NO: 31241781 NR Description: ENSANGP00000012836 [Anopheles gambiae]
  misc_feature (66)..(288): Homolog of NCBI NO: 21358551 NR Description: Longevity assurance gene 1 CG3576-PB [Drosophila
  misc_feature (1)..(223): Homolog of NCBI NO: 30683361 NR Description: longevity assurance protein -related [Arabidopsis
  misc_feature (5)..(288): Homolog of NCBI NO: 7688742 NR Description: ASC1 [Lycopersicon esculentum]
  misc_feature (25)..(288): Homolog of NCBI NO: 18404559 NR Description: LAG1 homolog 1 [Arabidopsis thaliana]
  misc_feature (3)..(288): Homolog of NCBI NO: 16974114 NR Description: putative resistance protein [Lycopersicon
  misc_feature (1)..(288): Homolog of NCBI NO: 25518747 NR Description: hypothetical protein F13B4.7 - Arabidopsis
  misc_feature (12)..(288): Homolog of NCBI NO: 34901974 NR Description: unknown protein [Oryza sativa (japonica
  misc_feature (16)..(288): Homolog of NCBI NO: 7658241 NR Description: LAG1 homolog 2 [Arabidopsis thaliana]
  misc_feature (16)..(288): Homolog of NCBI NO: 15230323 NR Description: longevity factor-related protein [Arabidopsis
MDFLWSENATTPRASHFSVAICFAFASFAARFFLDRFVFRSLAIRMLTKGRAPSRITKEMQVKIGKCSESMWKLTYYAAVEAFVLKITYHEPWFTNTKLYFNDWPNHELKSPLVLYYMCQCGFYIYSIAAILTWETRRKDFSVMFTHHVITVLLIGISYLTSFFRVGSIILALHDASDVFMEAAKVFKYSGREFGASVCFGFFAVSWLILRLIFFPFWVIKATSIDLQQVLSLSEGFHMFLYYVFNTMLIMLLIFHIYWWKLICAMILRQLKNRGKVGEDIRSDSDDD

SEQ ID NO: 59224 - protein, 243 aa, Glycine max
  peptide (1)..(243): Ceres Seq. ID no. 15177802
  misc_feature (40)..(243): Pfam Name: Longevity-assurance protein (LAG1) Pfam Description: Longevity-assurance protein (LAG1)
  misc_feature (10)..(243): Homolog of NCBI NO: 31241781 NR Description: ENSANGP00000012836 [Anopheles gambiae]
  misc_feature (21)..(243): Homolog of NCBI NO: 21358551 NR Description: Longevity assurance gene 1 CG3576-PB [Drosophila
  misc_feature (1)..(178): Homolog of NCBI NO: 30683361 NR Description: longevity assurance protein -related [Arabidopsis
  misc_feature (1)..(243): Homolog of NCBI NO: 7688742 NR Description: ASC1 [Lycopersicon esculentum]
  misc_feature (1)..(243): Homolog of NCBI NO: 18404559 NR Description: LAG1 homolog 1 [Arabidopsis thaliana]
  misc_feature (1)..(243): Homolog of NCBI NO: 16974114 NR Description: putative resistance protein [Lycopersicon
  misc_feature (1)..(243): Homolog of NCBI NO: 25518747 NR Description: hypothetical protein F13B4.7 - Arabidopsis
  misc_feature (1)..(243): Homolog of NCBI NO: 34901974 NR Description: unknown protein [Oryza sativa (japonica
  misc_feature (1)..(243): Homolog of NCBI NO: 7658241 NR Description: LAG1 homolog 2 [Arabidopsis thaliana]
  misc_feature (1)..(243): Homolog of NCBI NO: 15230323 NR Description: longevity factor-related protein [Arabidopsis
MLTKGRAPSRITKEMQVKIGKCSESMWKLTYYAAVEAFVLKITYHEPWFTNTKLYFNDWPNHELKSPLVLYYMCQCGFYIYSIAAILTWETRRKDFSVMFTHHVITVLLIGISYLTSFFRVGSIILALHDASDVFMEAAKVFKYSGREFGASVCFGFFAVSWLILRLIFFPFWVIKATSIDLQQVLSLSEGFHMFLYYVFNTMLIMLLIFHIYWWKLICAMILRQLKNRGKVGEDIRSDSDDD

SEQ ID NO: 59225 - DNA, 1323 bp, Glycine max
  misc_feature (1)..(1323): Ceres Seq. ID no. 14312266
ctgatcgagagacgaaggcagaggaaagatcgcgttatgtggcctcttgtctccttacttgcaaagccggaacagaaatcgcatataaaatgcgaaaagaaatgaattcaatgttcggagatctgcacaggatctctctccgtgtccgttgaactttctttacgccctcctcgtaacataaaaattcagatcccgccaactctgaagacctctattctctttccctcccctttccactttcccgagaaaataaacttttccgtcaattttctctccacggtttccttcttcctcacaatggctccgaacttcgacaatcgaagattcgttctcgctcttcgcattttccttctcctctccttattcttcaacctctcaccgaccttcgctcaggattctctcgtgcagaacgcgaaggaagattccgacgaatctgtggatctcggtcgccgcgccaaaattgcattgaatggtatagagaatgattcgatcctttctcttggcttggactccaccggtcctggactcttcgacgcatttttcgcgagtttttcgatgatccttattggggatgagacgtttataatagcagctctcatggctatgcgtcaccctaagtcaattgtcttgtctggtgcgctcagtgctctgattataatgacagtactttctacagggcttggcaggattgtgcctaatttgatttctaggaagcatacaaatagtgctgctacagttctttatgctttctttgggttaaggttactgtacattgcatggagatcatcagattcaaaatcctcacagaagaaagaaatggaagaagttgaagaaaaactggatggtggacaagggaaaacttcagttaggcgcttcttttcaagattttgtacaccaatatttttggagtcttttattttaacattccttgctgagtggggtgaccgtagccagatagcgacaattgcactggcaacccacaaaaatgcaattggagtagcagttggggccactataggacacaccatctgtacctctctggctgtagtgggaggaagcatgctggcatctaagatttcccaacgctcagtagccactgttggtggcttgctcttcctcggattttctgtatcttcatatttctacccgcctctatgatgaatacaagtgcagagtaatctgattcgtaaaggcttgtggcctttctatcctgctttttccccccctacataattgtctttattgtagattttgttgtacttgttccctaggaaagctcgatactaactggaacatgagattttgaatcccatttttttttgc

SEQ ID NO: 59226 - protein, 286 aa, Glycine max
  peptide (1)..(286): Ceres Seq. ID no. 14312267
  misc_feature (202)..(277): Pfam Name: Uncharacterized protein family UPF0016 Pfam Description: Uncharacterized protein family UPF0016
  misc_feature (78)..(285): Homolog of NCBI NO: 21357589 NR Description: CG4196-PC [Drosophila melanogaster]
  misc_feature (77)..(284): Homolog of NCBI NO: 15221462 NR Description: transmembrane protein -related [Arabidopsis
  misc_feature (90)..(281): Homolog of NCBI NO: 21593636 NR Description: transmembrane protein, putative [Arabidopsis
  misc_feature (90)..(281): Homolog of NCBI NO: 15222613 NR Description: transmembrane protein -related [Arabidopsis
  misc_feature (76)..(181): Homolog of NCBI NO: 20385488 NR Description: transmembrane protein HTP-1 [Danio rerio]
  misc_feature (171)..(285): Homolog of NCBI NO: 20385488 NR Description: transmembrane protein HTP-1 [Danio rerio]
  misc_feature (201)..(285): Homolog of NCBI NO: 31240317 NR Description: ENSANGP00000008699 [Anopheles gambiae]
  misc_feature (76)..(181): Homolog of NCBI NO: 31240317 NR Description: ENSANGP00000008699 [Anopheles gambiae]
  misc_feature (15)..(266): Homolog of NCBI NO: 9759042 NR Description: transmembrane protein FT27/PFT27-like
  misc_feature (15)..(286): Homolog of NCBI NO: 18421551 NR Description: transmembrane protein FT27/PFT27-related
MAPNFDNRRFVLALRIFLLLSLFFNLSPTFAQDSLVQNAKEDSDESVDLGRRAKIALNGIENDSILSLGLDSTGPGLFDAFFASFSMILIGDETFIIAALMAMRHPKSIVLSGALSALIIMTVLSTGLGRIVPNLISRKHTNSAATVLYAFFGLRLLYIAWRSSDSKSSQKKEMEEVEEKLDGGQGKTSVRRFFSRFCTPIFLESFILTFLAEWGDRSQIATIALATHKNAIGVAVGATIGHTICTSLAVVGGSMLASKISQRSVATVGGLLFLGFSVSSYFYPPL

SEQ ID NO: 59227 - protein, 200 aa, Glycine max
  peptide (1)..(200): Ceres Seq. ID no. 14312268
  misc_feature (116)..(191): Pfam Name: Uncharacterized protein family UPF0016 Pfam Description: Uncharacterized protein family UPF0016
  misc_feature (1)..(199): Homolog of NCBI NO: 21357589 NR Description: CG4196-PC [Drosophila melanogaster]
  misc_feature (1)..(198): Homolog of NCBI NO: 15221462 NR Description: transmembrane protein -related [Arabidopsis
  misc_feature (4)..(195): Homolog of NCBI NO: 21593636 NR Description: transmembrane protein, putative [Arabidopsis
  misc_feature (4)..(195): Homolog of NCBI NO: 15222613 NR Description: transmembrane protein -related [Arabidopsis
  misc_feature (1)..(95): Homolog of NCBI NO: 20385488 NR Description: transmembrane protein HTP-1 [Danio rerio]
  misc_feature (85)..(199): Homolog of NCBI NO: 20385488 NR Description: transmembrane protein HTP-1 [Danio rerio]
  misc_feature (115)..(199): Homolog of NCBI NO: 31240317 NR Description: ENSANGP00000008699 [Anopheles gambiae]
  misc_feature (1)..(95): Homolog of NCBI NO: 31240317 NR Description: ENSANGP00000008699 [Anopheles gambiae]
  misc_feature (1)..(180): Homolog of NCBI NO: 9759042 NR Description: transmembrane protein FT27/PFT27-like
  misc_feature (1)..(200): Homolog of NCBI NO: 18421551 NR Description: transmembrane protein FT27/PFT27-related
MILIGDETFIIAALMAMRHPKSIVLSGALSALIIMTVLSTGLGRIVPNLISRKHTNSAATVLYAFFGLRLLYIAWRSSDSKSSQKKEMEEVEEKLDGGQGKTSVRRFFSRFCTPIFLESFILTFLAEWGDRSQIATIALATHKNAIGVAVGATIGHTICTSLAVVGGSMLASKISQRSVATVGGLLFLGFSVSSYFYPPL

SEQ ID NO: 59228 - protein, 186 aa, Glycine max
  peptide (1)..(186): Ceres Seq. ID no. 14312269
  misc_feature (102)..(177): Pfam Name: Uncharacterized protein family UPF0016 Pfam Description: Uncharacterized protein family UPF0016
  misc_feature (1)..(185): Homolog of NCBI NO: 21357589 NR Description: CG4196-PC [Drosophila melanogaster]
  misc_feature (1)..(184): Homolog of NCBI NO: 15221462 NR Description: transmembrane protein -related [Arabidopsis
  misc_feature (1)..(181): Homolog of NCBI NO: 21593636 NR Description: transmembrane protein, putative [Arabidopsis
  misc_feature (1)..(181): Homolog of NCBI NO: 15222613 NR Description: transmembrane protein -related [Arabidopsis
  misc_feature (1)..(81): Homolog of NCBI NO: 20385488 NR Description: transmembrane protein HTP-1 [Danio rerio]
  misc_feature (71)..(185): Homolog of NCBI NO: 20385488 NR Description: transmembrane protein HTP-1 [Danio rerio]
  misc_feature (101)..(185): Homolog of NCBI NO: 31240317 NR Description: ENSANGP00000008699 [Anopheles gambiae]
  misc_feature (1)..(81): Homolog of NCBI NO: 31240317 NR Description: ENSANGP00000008699 [Anopheles gambiae]
  misc_feature (1)..(166): Homolog of NCBI NO: 9759042 NR Description: transmembrane protein FT27/PFT27-like
  misc_feature (1)..(186): Homolog of NCBI NO: 18421551 NR Description: transmembrane protein FT27/PFT27-related
MAMRHPKSIVLSGALSALIIMTVLSTGLGRIVPNLISRKHTNSAATVLYAFFGLRLLYIAWRSSDSKSSQKKEMEEVEEKLDGGQGKTSVRRFFSRFCTPIFLESFILTFLAEWGDRSQIATIALATHKNAIGVAVGATIGHTICTSLAVVGGSMLASKISQRSVATVGGLLFLGFSVSSYFYPPL

SEQ ID NO: 59229 - DNA, 966 bp, Glycine max
  misc_feature (1)..(966): Ceres Seq. ID no. 13594228
gggtacactcaccacacactacacactagtttgtgtttttcgcgccactcagttattcatttagaaagctactgctgagttcacaagtttctcaagcttgatggggacacaaaagtctaatatgtttgatgcacctttcaaatacatggtgcctgaagataaggaaattcccgacagacctttgccatcacattggactccttctatgcaggcatataacacttctgggtctactccaactccctttttaaatcaacaggcagctggttctcacatgcctctctacatgtgggtaaatcaggtaaacaacacactacttcaatccgatgctttgcatgatccaaggatgctctccagtaaacccacagtagctggggattttccttcaactaagaagcagcactgtaatttgatgcttgaaaatgcaagttcaaccaaactgaatcaggatttggagacaggcctagatgcatctgacgctaatgctcaacttgtaaatttggaaaaggatgaaataagaagagaaagaaaaagacagtcaaacagggaatcggcgaggagatcaaggatgcggaaagagaaagaatgtgaagagctacataaacaaatggaaatgcttaaggatgaaaactccgtgctcacacagaggctcaagagtctttctgaggagtgcctggagatctgcaatgaaaacgatgccatcgaggaagagctgattaaaatgtatggaccagaatcaatagcagatctattgctcttcaagcctacctgaccctgttgctggttaaggaagaaagcatcttacaactaatcagaatatattgtttcattttttattagggccagttgaattctgaacttgcttatgtcggcttaggttaaggaaggaaatgtaaggttacaaaaaatagggattattataataaaggatttatgaatgaaaattgtagctaaaaaaaaaaaaaa

SEQ ID NO: 59230 - protein, 223 aa, Glycine max
  peptide (1)..(223): Ceres Seq. ID no. 13594229
  misc_feature (138)..(200): Pfam Name: bZIP transcription factor Pfam Description: bZIP transcription factor
  misc_feature (130)..(217): Homolog of NCBI NO: 1169084 NR Description: Light-inducible protein CPRF-3
  misc_feature (128)..(217): Homolog of NCBI NO: 629666 NR Description: G-box-binding protein - tomato
  misc_feature (128)..(217): Homolog of NCBI NO: 13236840 NR Description: G-box binding factor bZIP transcription factor
  misc_feature (135)..(202): Homolog of NCBI NO: 7488675 NR Description: G-box binding factor - soybean
  misc_feature (1)..(98): Homolog of NCBI NO: 7488675 NR Description: G-box binding factor - soybean
  misc_feature (117)..(217): Homolog of NCBI NO: 1076447 NR Description: G-box binding factor 1B - rape (fragment)
  misc_feature (84)..(217): Homolog of NCBI NO: 7488787 NR Description: transcription repressor ROM1 - kidney bean
  misc_feature (130)..(217): Homolog of NCBI NO: 9650824 NR Description: common plant regulatory factor 5 [Petroselinum
  misc_feature (1)..(64): Homolog of NCBI NO: 7488453 NR Description: G-box binding factor 1A - rape
  misc_feature (117)..(217): Homolog of NCBI NO: 7488453 NR Description: G-box binding factor 1A - rape
MGTQKSNMFDAPFKYMVPEDKEIPDRPLPSHWTPSMQAYNTSGSTPTPFLNQQAAGSHMPLYMWVNQVNNTLLQSDALHDPRMLSSKPTVAGDFPSTKKQHCNLMLENASSTKLNQDLETGLDASDANAQLVNLEKDEIRRERKRQSNRESARRSRMRKEKECEELHKQMEMLKDENSVLTQRLKSLSEECLEICNENDAIEEELIKMYGPESIADLLLFKPT

SEQ ID NO: 59231 - protein, 216 aa, Glycine max
  peptide (1)..(216): Ceres Seq. ID no. 13594230
  misc_feature (131)..(193): Pfam Name: bZIP transcription factor Pfam Description: bZIP transcription factor
  misc_feature (123)..(210): Homolog of NCBI NO: 1169084 NR Description: Light-inducible protein CPRF-3
  misc_feature (121)..(210): Homolog of NCBI NO: 629666 NR Description: G-box-binding protein - tomato
  misc_feature (121)..(210): Homolog of NCBI NO: 13236840 NR Description: G-box binding factor bZIP transcription factor
  misc_feature (128)..(195): Homolog of NCBI NO: 7488675 NR Description: G-box binding factor - soybean
  misc_feature (1)..(91): Homolog of NCBI NO: 7488675 NR Description: G-box binding factor - soybean
  misc_feature (110)..(210): Homolog of NCBI NO: 1076447 NR Description: G-box binding factor 1B - rape (fragment)
  misc_feature (77)..(210): Homolog of NCBI NO: 7488787 NR Description: transcription repressor ROM1 - kidney bean
  misc_feature (123)..(210): Homolog of NCBI NO: 9650824 NR Description: common plant regulatory factor 5 [Petroselinum
  misc_feature (1)..(57): Homolog of NCBI NO: 7488453 NR Description: G-box binding factor 1A - rape
  misc_feature (110)..(210): Homolog of NCBI NO: 7488453 NR Description: G-box binding factor 1A - rape
MFDAPFKYMVPEDKEIPDRPLPSHWTPSMQAYNTSGSTPTPFLNQQAAGSHMPLYMWVNQVNNTLLQSDALHDPRMLSSKPTVAGDFPSTKKQHCNLMLENASSTKLNQDLETGLDASDANAQLVNLEKDEIRRERKRQSNRESARRSRMRKEKECEELHKQMEMLKDENSVLTQRLKSLSEECLEICNENDAIEEELIKMYGPESIADLLLFKPT

SEQ ID NO: 59232 - protein, 208 aa, Glycine max
  peptide (1)..(208): Ceres Seq. ID no. 13594231
  misc_feature (123)..(185): Pfam Name: bZIP transcription factor Pfam Description: bZIP transcription factor
  misc_feature (115)..(202): Homolog of NCBI NO: 1169084 NR Description: Light-inducible protein CPRF-3
  misc_feature (113)..(202): Homolog of NCBI NO: 629666 NR Description: G-box-binding protein - tomato
  misc_feature (113)..(202): Homolog of NCBI NO: 13236840 NR Description: G-box binding factor bZIP transcription factor
  misc_feature (120)..(187): Homolog of NCBI NO: 7488675 NR Description: G-box binding factor - soybean
  misc_feature (1)..(83): Homolog of NCBI NO: 7488675 NR Description: G-box binding factor - soybean
  misc_feature (102)..(202): Homolog of NCBI NO: 1076447 NR Description: G-box binding factor 1B - rape (fragment)
  misc_feature (69)..(202): Homolog of NCBI NO: 7488787 NR Description: transcription repressor ROM1 - kidney bean
  misc_feature (115)..(202): Homolog of NCBI NO: 9650824 NR Description: common plant regulatory factor 5 [Petroselinum
  misc_feature (1)..(49): Homolog of NCBI NO: 7488453 NR Description: G-box binding factor 1A - rape
  misc_feature (102)..(202): Homolog of NCBI NO: 7488453 NR Description: G-box binding factor 1A - rape
MVPEDKEIPDRPLPSHWTPSMQAYNTSGSTPTPFLNQQAAGSHMPLYMWVNQVNNTLLQSDALHDPRMLSSKPTVAGDFPSTKKQHCNLMLENASSTKLNQDLETGLDASDANAQLVNLEKDEIRRERKRQSNRESARRSRMRKEKECEELHKQMEMLKDENSVLTQRLKSLSEECLEICNENDAIEEELIKMYGPESIADLLLFKPT

SEQ ID NO: 59233 - DNA, 1070 bp, Glycine max
  misc_feature (1)..(1070): Ceres Seq. ID no. 14316444
attaaataacccatgtccctgcattagttaaatccttctgctctgcgtcttcttgttcctctcgcccagaatccgagatcaaccctgacccctaaggccaggggtttttctcggcttcttcagattcctgaaatggcgtctgtttcagctttagccaagtacaagctcgtcttcttgggtgaccaatccgtgggcaaaaccagcatcatcactcgcttcatgtacgataaattcgataacacctatcaggctacaattggtattgattttctatcaaaaactatgtatctcgaagatcgaactgttcgactgcagttgtgggatacagctggccaggaaagatttagaagtcttattccaagctacattagggactcatctgtagctgttattgtatatgatgttgcaagccggcagactttcctaaatactgcaaagtggattgaagaggtgcgaacagagagaggcagtgatgtcattattgttcttgttgggaacaaaactgatcttgtcgagaaaagacaagtctctatagaggaaggggaagcaaaagcacgtgagctcaatgtcatgttcattgaaactagtgctaaggctgggtttaatataaaggccctatttcgaaaaattgctgcagcactacctggaatggaaacactatcttctgcaaaacaagaagacatggttgatgtaaacttaaagtctacaaatggcagtgctcagtctcaacctcagtcaagtggatgtgcttgttaagtatactttatcatgtgcggtccacctttttgtgtcatgctttttgttttatgcgggtttttctatagtcttctacagcattatatgaaaagatgaaagaatatataagcggatcagggtaggggttgataaaagttctgtctagacaatttctgttgttagttggttttttgcctataatgtgtactaatgaatttttttttttgaacggcataatgtagtaaaggtacccaacccaaaattgaattgtgttcattgtaccctgtaaaacgtgtgatatgtttaaaatttaacttgttcatctggattgacgt

SEQ ID NO: 59234 - protein, 207 aa, Glycine max
  peptide (1)..(207): Ceres Seq. ID no. 14316445
  misc_feature (11)..(172): Pfam Name: Ras family Pfam Description: Ras family
  misc_feature (7)..(207): Homolog of NCBI NO: 17512290 NR Description: Rab6 protein [Mus musculus]
  misc_feature (7)..(207): Homolog of NCBI NO: 19923231 NR Description: RAB6A, member RAS oncogene family
  misc_feature (7)..(207): Homolog of NCBI NO: 13195674 NR Description: RAB6, member RAS oncogene family [Mus musculus]
  misc_feature (7)..(207): Homolog of NCBI NO: 38679888 NR Description: RAB6A, member RAS oncogene family isoform b
  misc_feature (1)..(207): Homolog of NCBI NO: 15236081 NR Description: Ras family GTP-binding protein [Arabidopsis
  misc_feature (1)..(207): Homolog of NCBI NO: 15227173 NR Description: GTP-binding protein, putative [Arabidopsis
  misc_feature (1)..(207): Homolog of NCBI NO: 15238112 NR Description: GTP binding protein, putative [Arabidopsis
  misc_feature (1)..(207): Homolog of NCBI NO: 34901804 NR Description: putative ras-related protein Rab-6A
  misc_feature (1)..(207): Homolog of NCBI NO: 15224916 NR Description: GTP-binding protein, putative [Arabidopsis
  misc_feature (1)..(207): Homolog of NCBI NO: 7438385 NR Description: GTP-binding protein Rab6 - common tobacco
MASVSALAKYKLVFLGDQSVGKTSIITRFMYDKFDNTYQATIGIDFLSKTMYLEDRTVRLQLWDTAGQERFRSLIPSYIRDSSVAVIVYDVASRQTFLNTAKWIEEVRTERGSDVIIVLVGNKTDLVEKRQVSIEEGEAKARELNVMFIETSAKAGFNIKALFRKIAAALPGMETLSSAKQEDMVDVNLKSTNGSAQSQPQSSGCAC

SEQ ID NO: 59235 - protein, 178 aa, Glycine max
  peptide (1)..(178): Ceres Seq. ID no. 14316446
  misc_feature (1)..(143): Pfam Name: Ras family Pfam Description: Ras family
  misc_feature (1)..(178): Homolog of NCBI NO: 17512290 NR Description: Rab6 protein [Mus musculus]
  misc_feature (1)..(178): Homolog of NCBI NO: 19923231 NR Description: RAB6A, member RAS oncogene family
  misc_feature (1)..(178): Homolog of NCBI NO: 13195674 NR Description: RAB6, member RAS oncogene family [Mus musculus]
  misc_feature (1)..(178): Homolog of NCBI NO: 38679888 NR Description: RAB6A, member RAS oncogene family isoform b
  misc_feature (1)..(178): Homolog of NCBI NO: 15236081 NR Description: Ras family GTP-binding protein [Arabidopsis
  misc_feature (1)..(178): Homolog of NCBI NO: 15227173 NR Description: GTP-binding protein, putative [Arabidopsis
  misc_feature (1)..(178): Homolog of NCBI NO: 15238112 NR Description: GTP binding protein, putative [Arabidopsis
  misc_feature (1)..(178): Homolog of NCBI NO: 34901804 NR Description: putative ras-related protein Rab-6A
  misc_feature (1)..(178): Homolog of NCBI NO: 15224916 NR Description: GTP-binding protein, putative [Arabidopsis
  misc_feature (1)..(178): Homolog of NCBI NO: 7438385 NR Description: GTP-binding protein Rab6 - common tobacco
MYDKFDNTYQATIGIDFLSKTMYLEDRTVRLQLWDTAGQERFRSLIPSYIRDSSVAVIVYDVASRQTFLNTAKWIEEVRTERGSDVIIVLVGNKTDLVEKRQVSIEEGEAKARELNVMFIETSAKAGFNIKALFRKIAAALPGMETLSSAKQEDMVDVNLKSTNGSAQSQPQSSGCAC

SEQ ID NO: 59236 - protein, 157 aa, Glycine max
  peptide (1)..(157): Ceres Seq. ID no. 14316447
  misc_feature (1)..(122): Pfam Name: Ras family Pfam Description: Ras family
  misc_feature (1)..(157): Homolog of NCBI NO: 17512290 NR Description: Rab6 protein [Mus musculus]
  misc_feature (1)..(157): Homolog of NCBI NO: 19923231 NR Description: RAB6A, member RAS oncogene family
  misc_feature (1)..(157): Homolog of NCBI NO: 13195674 NR Description: RAB6, member RAS oncogene family [Mus musculus]
  misc_feature (1)..(157): Homolog of NCBI NO: 38679888 NR Description: RAB6A, member RAS oncogene family isoform b
  misc_feature (1)..(157): Homolog of NCBI NO: 15236081 NR Description: Ras family GTP-binding protein [Arabidopsis
  misc_feature (1)..(157): Homolog of NCBI NO: 15227173 NR Description: GTP-binding protein, putative [Arabidopsis
  misc_feature (1)..(157): Homolog of NCBI NO: 15238112 NR Description: GTP binding protein, putative [Arabidopsis
  misc_feature (1)..(157): Homolog of NCBI NO: 34901804 NR Description: putative ras-related protein Rab-6A
  misc_feature (1)..(157): Homolog of NCBI NO: 15224916 NR Description: GTP-binding protein, putative [Arabidopsis
  misc_feature (1)..(157): Homolog of NCBI NO: 7438385 NR Description: GTP-binding protein Rab6 - common tobacco
MYLEDRTVRLQLWDTAGQERFRSLIPSYIRDSSVAVIVYDVASRQTFLNTAKWIEEVRTERGSDVIIVLVGNKTDLVEKRQVSIEEGEAKARELNVMFIETSAKAGFNIKALFRKIAAALPGMETLSSAKQEDMVDVNLKSTNGSAQSQPQSSGCAC

SEQ ID NO: 59237 - DNA, 1128 bp, Glycine max
  misc_feature (1)..(1128): Ceres Seq. ID no. 14312228
aaattgatacggataaggaagagtattcagtgtctcgtgtagaataatcaatggaagtaggaatgtctctgaacgcgctggttcgtcttcctctctcgaattcacgcttccacgacgatgctgctccgatgattattaggcactctctgttttcgagccgaaagcaacagcagcagcagcagagttataaggttccacagcgtcatcaagtgttcgtggttgaagccaagggcaaaaagggaatgatgtctcgtcaatttcagcgcaatgctcctcctcctttacccaagattgaagacgatggcaatcccaaattcgtcatcttcattcgcatggccaatgtatacctttggtaccctcttagtatcgtatcaggcggcaccactgctaaaataatggttgcagctaaagataattttctcggcaagtatatctacaaagacactcttgatagaaatctcgctgctgttatctacagagatgagaaggaggtacagaaatctgcattcaaacagtaccgtgtattgcgaacagctactgatttcagatacggctacaaacttgttgagaatggcaatataagagctgcactttctaccactgatgttattgagcttccaacacaagataaactaaaaaccgtgcttgacaaagtgaaagacttttttggagatgcaaaggaatcttttggaaagataacatcattgggcactactgaaacagaggagtcagaggaagacacaaaagaaaaagccaaggttaaaggatgaaactatagctggaaatgatttgcttgaattgttatgagtagcctgtggccctatgagatcagaaagctcaattatgtttatggattggttaatggggaaacttctgtgcacaacaatgctactccaggttttgttcttagatctgtaaccatcaaaattgttttatattctgcagagtgaacaccatctttacgatactgattgatcactcgtgtatgttgtaatccatgatgctttggaatggatagcatgtaggatgacatgtaatggcaccgttatcagttcaagagattcctggaattgttgtgtaaattacgggttgtaatatctatgcattttatttgacaggaatttactt

SEQ ID NO: 59238 - protein, 239 aa, Glycine max
  peptide (1)..(239): Ceres Seq. ID no. 14312229
  misc_feature (141)..(237): Homolog of NCBI NO: 11072026 NR Description: F12A21.16 [Arabidopsis thaliana]
  misc_feature (7)..(143): Homolog of NCBI NO: 11072026 NR Description: F12A21.16 [Arabidopsis thaliana]
  misc_feature (1)..(236): Homolog of NCBI NO: 30697556 NR Description: auxin-regulated protein [Arabidopsis thaliana]
  misc_feature (1)..(236): Homolog of NCBI NO: 30697554 NR Description: auxin-regulated protein [Arabidopsis thaliana]
MEVGMSLNALVRLPLSNSRFHDDAAPMIIRHSLFSSRKQQQQQQSYKVPQRHQVFVVEAKGKKGMMSRQFQRNAPPPLPKIEDDGNPKFVIFIRMANVYLWYPLSIVSGGTTAKIMVAAKDNFLGKYIYKDTLDRNLAAVIYRDEKEVQKSAFKQYRVLRTATDFRYGYKLVENGNIRAALSTTDVIELPTQDKLKTVLDKVKDFFGDAKESFGKITSLGTTETEESEEDTKEKAKVKG

SEQ ID NO: 59239 - protein, 235 aa, Glycine max
  peptide (1)..(235): Ceres Seq. ID no. 14312230
  misc_feature (137)..(233): Homolog of NCBI NO: 11072026 NR Description: F12A21.16 [Arabidopsis thaliana]
  misc_feature (3)..(139): Homolog of NCBI NO: 11072026 NR Description: F12A21.16 [Arabidopsis thaliana]
  misc_feature (1)..(232): Homolog of NCBI NO: 30697556 NR Description: auxin-regulated protein [Arabidopsis thaliana]
  misc_feature (1)..(232): Homolog of NCBI NO: 30697554 NR Description: auxin-regulated protein [Arabidopsis thaliana]
MSLNALVRLPLSNSRFHDDAAPMIIRHSLFSSRKQQQQQQSYKVPQRHQVFVVEAKGKKGMMSRQFQRNAPPPLPKIEDDGNPKFVIFIRMANVYLWYPLSIVSGGTTAKIMVAAKDNFLGKYIYKDTLDRNLAAVIYRDEKEVQKSAFKQYRVLRTATDFRYGYKLVENGNIRAALSTTDVIELPTQDKLKTVLDKVKDFFGDAKESFGKITSLGTTETEESEEDTKEKAKVKG

SEQ ID NO: 59240 - protein, 213 aa, Glycine max
  peptide (1)..(213): Ceres Seq. ID no. 14312231
  misc_feature (115)..(211): Homolog of NCBI NO: 11072026 NR Description: F12A21.16 [Arabidopsis thaliana]
  misc_feature (1)..(117): Homolog of NCBI NO: 11072026 NR Description: F12A21.16 [Arabidopsis thaliana]
  misc_feature (1)..(210): Homolog of NCBI NO: 30697556 NR Description: auxin-regulated protein [Arabidopsis thaliana]
  misc_feature (1)..(210): Homolog of NCBI NO: 30697554 NR Description: auxin-regulated protein [Arabidopsis thaliana]
MIIRHSLFSSRKQQQQQQSYKVPQRHQVFVVEAKGKKGMMSRQFQRNAPPPLPKIEDDGNPKFVIFIRMANVYLWYPLSIVSGGTTAKIMVAAKDNFLGKYIYKDTLDRNLAAVIYRDEKEVQKSAFKQYRVLRTATDFRYGYKLVENGNIRAALSTTDVIELPTQDKLKTVLDKVKDFFGDAKESFGKITSLGTTETEESEEDTKEKAKVKG

SEQ ID NO: 59241 - DNA, 1186 bp, Glycine max
  misc_feature (1)..(1186): Ceres Seq. ID no. 14311780
gtgaccagtagctattttctcttttttctaaaaaaaaaaaacggacggctcctggaaaataacggaccaacccatccgtggggttgtaagttttgtcttttatttgcagaaacggaccaacgcttagggtttggtgttttccgaattagggtttgtgattggatcttcatcttcaccaatcaatcaccataaccataacttgttcttctctctcgccatgacggacggctcctggaatcggcagcagcagccgtttctcccttcttccgccatacttaaacgacctcgtactgaatacgatatttcaccttctggtctgacttcagggggcaatgagatgcataattatattggtcgaaatgatgaccatactggtcaccgaattctaaaggacactaaaacacttggatctgcttttgaccgctaccttcaaagcgctgggcttacttcgtttaactcgggggaagccagcgcaattggcagtgttggtttggaaaggggtgttggtggattgccacgccattcactaactgatcctgctgtcatggggcatcctggtggtggtcatgatcttgcacgaggtggacggaatgtcaattatggtgaccagttaccagtagatgcagcttccatgcctggacctgagactgtacctctacccccagatgcttcaagtactttatatgttgaaggtcttccatctgacagtacgagacgggaagtggctcatatttttcgcccttttgttggatatagagaagtaagacttgtgagcaaagaatccaaacatcgtggtggagatcctctaatcctttgttttgtggattttgcaaatccggcctgtgcagcaactgctctgagtgcattgcaaggttataaagttgatgaactcaatcctgagtctagtcacttgcggcttcagttttctcggtttcctggtcccagatctggacctggacctcgtggcaagaggtgaagtcgttcacccaagacatttaggttttatgcttgtcacaatgacttgaattcctttatccataccattctgggatgagaatattcacgaatcaatgttctccacaagcaaatataagtcaatttattgtgttgtataaatattgatatttttttaatgatcctagttagcatttgttttttgttggccaaataaaggtataattattac

SEQ ID NO: 59242 - protein, 252 aa, Glycine max
  peptide (1)..(252): Ceres Seq. ID no. 14311781
  misc_feature (155)..(223): Pfam Name: RNA recognition motif. (a.k.a. RRM, RBD, or RNP domain) Pfam Description: RNA recognition motif. (a.k.a. RRM, RBD, or RNP
  misc_feature (1)..(140): Homolog of NCBI NO: 30699215 NR Description: expressed protein [Arabidopsis thaliana]
  misc_feature (1)..(252): Homolog of NCBI NO: 25513502 NR Description: F16F4.3 protein - Arabidopsis thaliana
  misc_feature (192)..(252): Homolog of NCBI NO: 15218968 NR Description: hypothetical protein [Arabidopsis thaliana]
  misc_feature (1)..(155): Homolog of NCBI NO: 15218968 NR Description: hypothetical protein [Arabidopsis thaliana]
  misc_feature (111)..(252): Homolog of NCBI NO: 26450151 NR Description: unknown protein [Arabidopsis thaliana]
  misc_feature (1)..(252): Homolog of NCBI NO: 25553563 NR Description: OSJNBa0038F22.13 [Oryza sativa (japonica
  misc_feature (59)..(252): Homolog of NCBI NO: 30699215 NR Description: expressed protein [Arabidopsis thaliana]
  misc_feature (1)..(249): Homolog of NCBI NO: 23304837 NR Description: RNA-binding protein [Medicago truncatula]
MTDGSWNRQQQPFLPSSAILKRPRTEYDISPSGLTSGGNEMHNYIGRNDDHTGHRILKDTKTLGSAFDRYLQSAGLTSFNSGEASAIGSVGLERGVGGLPRHSLTDPAVMGHPGGGHDLARGGRNVNYGDQLPVDAASMPGPETVPLPPDASSTLYVEGLPSDSTRREVAHIFRPFVGYREVRLVSKESKHRGGDPLILCFVDFANPACAATALSALQGYKVDELNPESSHLRLQFSRFPGPRSGPGPRGKR

SEQ ID NO: 59243 - protein, 212 aa, Glycine max
  peptide (1)..(212): Ceres Seq. ID no. 14311782
  misc_feature (115)..(183): Pfam Name: RNA recognition motif. (a.k.a. RRM, RBD, or RNP domain) Pfam Description: RNA recognition motif. (a.k.a. RRM, RBD, or RNP
  misc_feature (1)..(100): Homolog of NCBI NO: 30699215 NR Description: expressed protein [Arabidopsis thaliana]
  misc_feature (1)..(212): Homolog of NCBI NO: 25513502 NR Description: F16F4.3 protein - Arabidopsis thaliana
  misc_feature (152)..(212): Homolog of NCBI NO: 15218968 NR Description: hypothetical protein [Arabidopsis thaliana]
  misc_feature (1)..(115): Homolog of NCBI NO: 15218968 NR Description: hypothetical protein [Arabidopsis thaliana]
  misc_feature (71)..(212): Homolog of NCBI NO: 26450151 NR Description: unknown protein [Arabidopsis thaliana]
  misc_feature (1)..(212): Homolog of NCBI NO: 25553563 NR Description: OSJNBa0038F22.13 [Oryza sativa (japonica
  misc_feature (19)..(212): Homolog of NCBI NO: 30699215 NR Description: expressed protein [Arabidopsis thaliana]
  misc_feature (1)..(209): Homolog of NCBI NO: 23304837 NR Description: RNA-binding protein [Medicago truncatula]
MHNYIGRNDDHTGHRILKDTKTLGSAFDRYLQSAGLTSFNSGEASAIGSVGLERGVGGLPRHSLTDPAVMGHPGGGHDLARGGRNVNYGDQLPVDAASMPGPETVPLPPDASSTLYVEGLPSDSTRREVAHIFRPFVGYREVRLVSKESKHRGGDPLILCFVDFANPACAATALSALQGYKVDELNPESSHLRLQFSRFPGPRSGPGPRGKR

SEQ ID NO: 59244 - protein, 143 aa, Glycine max
  peptide (1)..(143): Ceres Seq. ID no. 14311783
  misc_feature (46)..(114): Pfam Name: RNA recognition motif. (a.k.a. RRM, RBD, or RNP domain) Pfam Description: RNA recognition motif. (a.k.a. RRM, RBD, or RNP
  misc_feature (1)..(31): Homolog of NCBI NO: 30699215 NR Description: expressed protein [Arabidopsis thaliana]
  misc_feature (1)..(143): Homolog of NCBI NO: 25513502 NR Description: F16F4.3 protein - Arabidopsis thaliana
  misc_feature (83)..(143): Homolog of NCBI NO: 15218968 NR Description: hypothetical protein [Arabidopsis thaliana]
  misc_feature (1)..(46): Homolog of NCBI NO: 15218968 NR Description: hypothetical protein [Arabidopsis thaliana]
  misc_feature (2)..(143): Homolog of NCBI NO: 26450151 NR Description: unknown protein [Arabidopsis thaliana]
  misc_feature (1)..(143): Homolog of NCBI NO: 25553563 NR Description: OSJNBa0038F22.13 [Oryza sativa (japonica
  misc_feature (1)..(143): Homolog of NCBI NO: 30699215 NR Description: expressed protein [Arabidopsis thaliana]
  misc_feature (1)..(140): Homolog of NCBI NO: 23304837 NR Description: RNA-binding protein [Medicago truncatula]
MGHPGGGHDLARGGRNVNYGDQLPVDAASMPGPETVPLPPDASSTLYVEGLPSDSTRREVAHIFRPFVGYREVRLVSKESKHRGGDPLILCFVDFANPACAATALSALQGYKVDELNPESSHLRLQFSRFPGPRSGPGPRGKR

SEQ ID NO: 59245 - DNA, 1311 bp, Glycine max
  misc_feature (1)..(1311): Ceres Seq. ID no. 14311773
ctaaaatcaaatgcaaaaagaagctagatggttttcaaatgagcatgacacgttccccttctaccactgatactttgccaagtgtaacgtttggccacgtagtctctcttcccacctccattaaaagttccagctcttcatcgagcgagctacacccaacttccattacaaaaccaaaacactcaagttaacttcaacacctttaattttctgaacgaaattcagccacagaatatcaaagggagcgaagatgagtcaggagcagccaaggcgcccccaaggccaagaccccatcaaatacggcgacgtttttgacgtctacggtgaccttgcacagatgcccattgcaccggaagatgctgccatgatgcaaagcgcggaagctcgagtactcggaaaaacccaacccggcggagcttcttccgtcatgcaatccgccgccacaaggaatgaacaggctggtcttgtcggtcaccaggacgtcaccgacatcaccggcgaccatggcgtcacagtcacagaaactacattccatggaagacgcataataaccgaggctgttggtggccaggtagtggaacagtatgtggagccaaatccagttgaggctggacgaaccagtgcaattaaggagagtgctataacaataggagaggcattggaggccacggcacagacggtgggtcacaagccggtggatcagagtgatgcctcagcgattcaggcggcggaggttagagcaacgggaagtaacgttataacgccgggaggacttgcggctatggctcaatcagctgctgcttataatgctgactgcaagcatgaccaggacaaggtcaagcttgccgacgttctgaccggagcaaccgccaaattgcccgcggacaaggccgcgacgctgcaagatgctgaaggggtggcgagtgctgaggccaggaacaaccccgatgccaccgccactcccggtggggtagccgcttctgttgcggctgctgctaggctcaatgaaaatgttaagtaaaaagtagtgttatgtatgttgataatcatacctgtgtttcatgatgtgtgaggagtggcctgttgatatatgtgttgtataactgtaagtggtgctgcaacatgttgtttctttcttttaagcttgtgagatatgttactacttttctggtatcttttaaggactctacttaaaggtgatgtatactatgctatggatgatgtctgtgccaccttatcagttagttgttaataatgtgtgttctagctaatcttgtaatttcttatttgcaatcattccagttagaaccc

SEQ ID NO: 59246 - protein, 256 aa, Glycine max
  peptide (1)..(256): Ceres Seq. ID no. 14311774
  misc_feature (194)..(256): Pfam Name: Seed maturation protein Pfam Description: Seed maturation protein
MSQEQPRRPQGQDPIKYGDVFDVYGDLAQMPIAPEDAAMMQSAEARVLGKTQPGGASSVMQSAATRNEQAGLVGHQDVTDITGDHGVTVTETTFHGRRIITEAVGGQVVEQYVEPNPVEAGRTSAIKESAITIGEALEATAQTVGHKPVDQSDASAIQAAEVRATGSNVITPGGLAAMAQSAAAYNADCKHDQDKVKLADVLTGATAKLPADKAATLQDAEGVASAEARNNPDATATPGGVAASVAAAARLNENVK

SEQ ID NO: 59247 - protein, 227 aa, Glycine max
  peptide (1)..(227): Ceres Seq. ID no. 14311775
  misc_feature (165)..(227): Pfam Name: Seed maturation protein Pfam Description: Seed maturation protein
MPIAPEDAAMMQSAEARVLGKTQPGGASSVMQSAATRNEQAGLVGHQDVTDITGDHGVTVTETTFHGRRIITEAVGGQVVEQYVEPNPVEAGRTSAIKESAITIGEALEATAQTVGHKPVDQSDASAIQAAEVRATGSNVITPGGLAAMAQSAAAYNADCKHDQDKVKLADVLTGATAKLPADKAATLQDAEGVASAEARNNPDATATPGGVAASVAAAARLNENVK

SEQ ID NO: 59248 - protein, 218 aa, Glycine max
  peptide (1)..(218): Ceres Seq. ID no. 14311776
  misc_feature (156)..(218): Pfam Name: Seed maturation protein Pfam Description: Seed maturation protein
MMQSAEARVLGKTQPGGASSVMQSAATRNEQAGLVGHQDVTDITGDHGVTVTETTFHGRRIITEAVGGQVVEQYVEPNPVEAGRTSAIKESAITIGEALEATAQTVGHKPVDQSDASAIQAAEVRATGSNVITPGGLAAMAQSAAAYNADCKHDQDKVKLADVLTGATAKLPADKAATLQDAEGVASAEARNNPDATATPGGVAASVAAAARLNENVK

SEQ ID NO: 59249 - DNA, 1353 bp, Glycine max
  misc_feature (1)..(1353): Ceres Seq. ID no. 14312192
aacataacccagtgagtctacccttatctctgaccatttctttctctgaagccaactccaaaactaacagacagaaagaaagagaaaaagaaacccaattcctgtttcaactgaaacacagcacacacaacaatcatcaatttctctacaaaaaataaccccacaaagaaaacaaactgaaacaacagcaaaaaagaaatcttcacctcagcttcctctgttccgtccttcctcgtcgccgcgccggagcatctcgccgccttcatccaccgcatcattcgcgagggaactcggaggtcatcgaattcgcgaagatgtcgcggttcccgttcttcaaccgttcgaacacgattcactcgacgaaatcggaatcctcgcagaaaccctacctcgtccaccaccatctccacaatcttgaccggtccggttcggtgaaccgcttctacggttcagtggactccatgaaatcctcaatccgcggaaaaatggtgaagaagctctgcaccttattcgaatcctccaaaaaacccttgccagaaccagaatccgaatctgaatcgttttcttcttcaaaatcacgttcaaaaacagattcagattcgtgcattactatattgtttcgattacccggcacagaggacagaatagttgtgtatttaacgagccttcgcgggattcggagaactttcgaggattgcaacgcggtccgcatgatcctgaaggggttcagggtttgggtggacgagagggatgtgtctatggacttgagctacagggaggagctgcagcatgtgctgggggagcaccatgtggcgctcccccaagtttttatacgagggaagtacattggtggtgctgatgtgatcaagcatttgtttgagagtggtgacttggcgaagatgattctggaagggctccccaagctgaaacccgggttcgtgtgtgacaattgtggggacgcgaggttcgtgccgtgcgagaattgcagtgggagcaggaaggtgtttgatgaggatgaaggggaattgaagaggtgcttggaatgcaatgagaatggactcctcaggtgtccgtattgctgttcttgattttgattaatgatgattttcatgggggttaattgggttgttgctcgttgaacatgtgttttgttttgttcaagactgggtgttttactttcttatcttggattgagatggaaaactggggtgagtgggggatgtgtatattatattctaatggagggtgtaaatatttagtggtgtacaagaatttgctaaatattggttgttgatggatgatagctttctaatgggaattatgggatgttttaatatatccctttattagtcc

SEQ ID NO: 59250 - protein, 257 aa, Glycine max
  peptide (1)..(257): Ceres Seq. ID no. 14312193
  misc_feature (110)..(197): Pfam Name: Glutaredoxin Pfam Description: Glutaredoxin
  misc_feature (105)..(255): Homolog of NCBI NO: 15237554 NR Description: expressed protein [Arabidopsis thaliana]
  misc_feature (105)..(255): Homolog of NCBI NO: 38346321 NR Description: OJ000126_13.3 [Oryza sativa (japonica
  misc_feature (90)..(253): Homolog of NCBI NO: 10241626 NR Description: Contains similarity to F1N 19.7
  misc_feature (90)..(256): Homolog of NCBI NO: 32490043 NR Description: OSJNBa0063C18.3 [Oryza sativa (japonica
  misc_feature (65)..(255): Homolog of NCBI NO: 15237686 NR Description: expressed protein [Arabidopsis thaliana]
  misc_feature (111)..(257): Homolog of NCBI NO: 34899098 NR Description: hypothetical protein~similar to Arabidopsis
  misc_feature (47)..(256): Homolog of NCBI NO: 15227326 NR Description: expressed protein [Arabidopsis thaliana]
  misc_feature (39)..(256): Homolog of NCBI NO: 30694571 NR Description: expressed protein [Arabidopsis thaliana]
  misc_feature (39)..(256): Homolog of NCBI NO: 15451042 NR Description: putative protein [Arabidopsis thaliana]
  misc_feature (6)..(257): Homolog of NCBI NO: 15240723 NR Description: expressed protein [Arabidopsis thaliana]
MSRFPFFNRSNTIHSTKSESSQKPYLVHHHLHNLDRSGSVNRFYGSVDSMKSSIRGKMVKKLCTLFESSKKPLPEPESESESFSSSKSRSKTDSDSCITILFRLPGTEDRIVVYLTSLRGIRRTFEDCNAVRMILKGFRVWVDERDVSMDLSYREELQHVLGEHHVALPQVFIRGKYIGGADVIKHLFESGDLAKMILEGLPKLKPGFVCDNCGDARFVPCENCSGSRKVFDEDEGELKRCLECNENGLLRCPYCCS

SEQ ID NO: 59251 - protein, 208 aa, Glycine max
  peptide (1)..(208): Ceres Seq. ID no. 14312194
  misc_feature (61)..(148): Pfam Name: Glutaredoxin Pfam Description: Glutaredoxin
  misc_feature (56)..(206): Homolog of NCBI NO: 15237554 NR Description: expressed protein [Arabidopsis thaliana]
  misc_feature (56)..(206): Homolog of NCBI NO: 38346321 NR Description: OJ000126_13.3 [Oryza sativa (japonica
  misc_feature (41)..(204): Homolog of NCBI NO: 10241626 NR Description: Contains similarity to F1N 19.7
  misc_feature (41)..(207): Homolog of NCBI NO: 32490043 NR Description: OSJNBa0063C18.3 [Oryza sativa (japonica
  misc_feature (16)..(206): Homolog of NCBI NO: 15237686 NR Description: expressed protein [Arabidopsis thaliana]
  misc_feature (62)..(208): Homolog of NCBI NO: 34899098 NR Description: hypothetical protein~similar to Arabidopsis
  misc_feature (1)..(207): Homolog of NCBI NO: 15227326 NR Description: expressed protein [Arabidopsis thaliana]
  misc_feature (1)..(207): Homolog of NCBI NO: 30694571 NR Description: expressed protein [Arabidopsis thaliana]
  misc_feature (1)..(207): Homolog of NCBI NO: 15451042 NR Description: putative protein [Arabidopsis thaliana]
  misc_feature (1)..(208): Homolog of NCBI NO: 15240723 NR Description: expressed protein [Arabidopsis thaliana]
MKSSIRGKMVKKLCTLFESSKKPLPEPESESESFSSSKSRSKTDSDSCITILFRLPGTEDRIVVYLTSLRGIRRTFEDCNAVRMILKGFRVWVDERDVSMDLSYREELQHVLGEHHVALPQVFIRGKYIGGADVIKHLFESGDLAKMILEGLPKLKPGFVCDNCGDARFVPCENCSGSRKVFDEDEGELKRCLECNENGLLRCPYCCS

SEQ ID NO: 59252 - protein, 200 aa, Glycine max
  peptide (1)..(200): Ceres Seq. ID no. 14312195
  misc_feature (53)..(140): Pfam Name: Glutaredoxin Pfam Description: Glutaredoxin
  misc_feature (48)..(198): Homolog of NCBI NO: 15237554 NR Description: expressed protein [Arabidopsis thaliana]
  misc_feature (48)..(198): Homolog of NCBI NO: 38346321 NR Description: OJ000126_13.3 [Oryza sativa (japonica
  misc_feature (33)..(196): Homolog of NCBI NO: 10241626 NR Description: Contains similarity to F1N 19.7
  misc_feature (33)..(199): Homolog of NCBI NO: 32490043 NR Description: OSJNBa0063C18.3 [Oryza sativa (japonica
  misc_feature (8)..(198): Homolog of NCBI NO: 15237686 NR Description: expressed protein [Arabidopsis thaliana]
  misc_feature (54)..(200): Homolog of NCBI NO: 34899098 NR Description: hypothetical protein~similar to Arabidopsis
  misc_feature (1)..(199): Homolog of NCBI NO: 15227326 NR Description: expressed protein [Arabidopsis thaliana]
  misc_feature (1)..(199): Homolog of NCBI NO: 30694571 NR Description: expressed protein [Arabidopsis thaliana]
  misc_feature (1)..(199): Homolog of NCBI NO: 15451042 NR Description: putative protein [Arabidopsis thaliana]
  misc_feature (1)..(200): Homolog of NCBI NO: 15240723 NR Description: expressed protein [Arabidopsis thaliana]
MVKKLCTLFESSKKPLPEPESESESFSSSKSRSKTDSDSCITILFRLPGTEDRIVVYLTSLRGIRRTFEDCNAVRMILKGFRVWVDERDVSMDLSYREELQHVLGEHHVALPQVFIRGKYIGGADVIKHLFESGDLAKMILEGLPKLKPGFVCDNCGDARFVPCENCSGSRKVFDEDEGELKRCLECNENGLLRCPYCCS

SEQ ID NO: 59253 - DNA, 1322 bp, Glycine max
  misc_feature (1)..(1322): Ceres Seq. ID no. 14312166
aaaaaagaaaagggaatgttttcttttgcacactgtgatctgcaattggtggccatttcgaaaaattgccaattttctgaaacgtgacgtcttctttgcagttttgcatttaccttacagccactcagaagcgcagagaagataggaacccacccttgaagatggctctgcctccacaaaacccacctgttcagcgacacagagtcataatacccaacaagcacggtgaaaagcttgtgggcacattgcatgaatctggaaccagggacattgtaatcttgtgccatggttttcgatgcacaaaggataccaatctcatattgaaccttgctgttgcattggaaaatgcaaaaattagttctttccgttttgacttttctggaaatggggaaagtgaaggtttgtttcagtttggtaactattggaccgaggttgatgatttacatgctgtagctcaacatttccatgaatctaaccgtgtaatcagtgcaattgttggtcatagtaaaggaggtggcgtagtgcttctatatgcttcaaaatatagtgacattaaaacagttgtcaacctctctgggcgttatgatatgaaggcaggcattgaagaacaccttggaaaagattatttggaaagaatcaggagggatggtttcattgatgtgaagaagaggaggtcaggaagttttgatttccgtgtaactgaagaaagtttgatggatcgcttgggtataaatatacatgaagcatgccttaagattgacaaagaatgcagggtctttacaattcatggttcttccgatgaaattattcctgttgaagatgcatttgagtttgccaagatcatacaaaaccataagttacatgtcattggaggagctaatcatatgttcagtaatcatcaaggagagttgtcctcagttagttgtgaactttatagaagaaaccttgcaccaggtcaagggtactgctagctaggtatctgttcttgcttgcatatgtgtcaaacacccgtgaactctttgttgtgtttttctaatgatatacttatggtatatctcgaagtttcaagccaattgaattttggaaccacaacaaaaatttaccctgaagggtccccaactgatcctgtcttgtgtatacaattacgataatgaaatttgaatttaagaccttgtgtaactactcaaacttactaggccaaccctaatagggttgatgttccatgccatttgagatcaccagctttgtgtttgtcaaagttgaaaatctggcttcattaggttgaatggaagaaaaataaatggtaaagaggactcatggac

SEQ ID NO: 59254 - protein, 269 aa, Glycine max
  peptide (1)..(269): Ceres Seq. ID no. 14312167
  misc_feature (69)..(247): Pfam Name: alpha/beta hydrolase fold Pfam Description: alpha/beta hydrolase fold
  misc_feature (1)..(261): Homolog of NCBI NO: 34913068 NR Description: P0013G02.26 [Oryza sativa (japonica
  misc_feature (8)..(251): Homolog of NCBI NO: 34913064 NR Description: P0013G02.24 [Oryza sativa (japonica
  misc_feature (10)..(259): Homolog of NCBI NO: 21595418 NR Description: putative esterase-like protein [Arabidopsis
  misc_feature (10)..(259): Homolog of NCBI NO: 18416707 NR Description: esterase/lipase/thioesterase family [Arabidopsis
  misc_feature (10)..(259): Homolog of NCBI NO: 11358640 NR Description: probable esterase-like protein - Arabidopsis
  misc_feature (12)..(250): Homolog of NCBI NO: 22135864 NR Description: putative protein [Arabidopsis thaliana]
  misc_feature (12)..(259): Homolog of NCBI NO: 21554728 NR Description: putative esterase [Arabidopsis thaliana]
  misc_feature (12)..(250): Homolog of NCBI NO: 15232826 NR Description: esterase/lipase/thioesterase family [Arabidopsis
  misc_feature (12)..(250): Homolog of NCBI NO: 15220578 NR Description: esterase/lipase/thioesterase family [Arabidopsis
  misc_feature (10)..(259): Homolog of NCBI NO: 15228202 NR Description: esterase/lipase/thioesterase family [Arabidopsis
MALPPQNPPVQRHRVIIPNKHGEKLVGTLHESGTRDIVILCHGFRCTKDTNLILNLAVALENAKISSFRFDFSGNGESEGLFQFGNYWTEVDDLHAVAQHFHESNRVISAIVGHSKGGGVVLLYASKYSDIKTVVNLSGRYDMKAGIEEHLGKDYLERIRRDGFIDVKKRRSGSFDFRVTEESLMDRLGINIHEACLKIDKECRVFTIHGSSDEIIPVEDAFEFAKIIQNHKLHVIGGANHMFSNHQGELSSVSCELYRRNLAPGQGYC

SEQ ID NO: 59255 - DNA, 1500 bp, Glycine max
  misc_feature (1)..(1500): Ceres Seq. ID no. 14315422
atcgaagccacatacagagtgagagagaaagagcttagcttaggaatggaagcagagaagcatgaagcagcattggcagtggcctcagtctccctctctctccccagagttttgcccttcttccaacccaccacccctcagccaaccaagctcaaagtcccaacccaggcctcatccctcacacacctttctctctccactccttccaaaacctccttcaaatccaccatctcctccaccccccttcacgcccctctctccctcggcccccaccgcccccgcgacccctccaacgccgccgccctccgccgcgccgcagtagtctggttccgcaacgacctccgcctcctcgacaacgagtgcctcaccgccgccaacaacgagtccctctccgtcctccccgtctactgcttcgaccccgccgactacggtaagtcggcctccggcttcgacaagaccggcccctaccgcgccgccttcctcatcgactctgtctccgacctccgccgtaacctccaggctcgcggctccgatctcgtcgttcgcgttgggaagcccgaggcggtgctggtggagctcgccaaggccgtcggggccgacgccgtgtacgcgcaccgagaggtctcgcacgacgaggcgaaggcggaggagagggtggaggcggccatgaaggaggagaatgtggaggtgaagtacttctggggaagcacgttgtatcacgtggacgatttgccttttcaattggaggacatgccttccaattacggagggtttagggatagggttcagaaattggaggtaaggaagacaattgaggcattagatcagcttaagggaatgccttctcgcggtgatgttgagcctggggagattccttctttaatggacctaggccttaatccatctgcaacaatgtcacagaatggaaagtgcgttgctaatgcttctatggtaggaggggagactgaggcactgcagaagcttaaaaaatttgcagctgagtgtgcagctcagccacacaaggggtttaaggatggaacacagagtatatatggtgccaacttctcctgcaagatttctccgtggttggcaatgggatgcctttcccctcgcacaatgtatgaagaactgaagaagactgccggcagagtcatttctgcttcgtccaaccggaatgatggtggtaatggctcgtccagaactggaacaaattggttgatgtttgagttgctatggagggacttctttaggtttataacaaaaaaatacagtactgcaaagaaacagctggaagctgctccagccactgcatgtgctggtgcatttgcttaaactagaagttctagtgggcataaggaagtttgtttcagggtatgggttggttccctacgcagtcatggcagtagggtgctggatgaacaagatttggttccccttctgaagttctgttgtaactgacagatacattatttcaatatggaagctttacattattttctc

SEQ ID NO: 59256 - protein, 443 aa, Glycine max
  peptide (1)..(443): Ceres Seq. ID no. 14315423
  misc_feature (104)..(281): Pfam Name: DNA photolyase Pfam Description: DNA photolyase
  misc_feature (135)..(389): Homolog of NCBI NO: 16330358 NR Description: DNA photolyase [Synechocystis sp. PCC 6803]
  misc_feature (106)..(379): Homolog of NCBI NO: 32477278 NR Description: DNA photolyase [Pirellula sp.]
  misc_feature (107)..(389): Homolog of NCBI NO: 28374085 NR Description: Chain A, Crystal Structure Analysis Of
  misc_feature (104)..(390): Homolog of NCBI NO: 23135973 NR Description: hypothetical protein [Cytophaga hutchinsonii]
  misc_feature (96)..(379): Homolog of NCBI NO: 28971609 NR Description: cryptochrome dash [Arabidopsis thaliana]
  misc_feature (96)..(379): Homolog of NCBI NO: 22327046 NR Description: DNA photolyase - like protein [Arabidopsis
  misc_feature (104)..(378): Homolog of NCBI NO: 37520404 NR Description: probable bacterial cryptochrome [Gloeobacter
  misc_feature (107)..(379): Homolog of NCBI NO: 23040111 NR Description: hypothetical protein [Trichodesmium erythraeum
  misc_feature (23)..(443): Homolog of NCBI NO: 21592984 NR Description: photolyase/blue-light receptor PHR2 [Arabidopsis
  misc_feature (23)..(443): Homolog of NCBI NO: 15226633 NR Description: photolyase/blue-light receptor (PHR2)
IEATYRVREKELSLGMEAEKHEAALAVASVSLSLPRVLPFFQPTTPQPTKLKVPTQASSLTHLSLSTPSKTSFKSTISSTPLHAPLSLGPHRPRDPSNAAALRRAAVVWFRNDLRLLDNECLTAANNESLSVLPVYCFDPADYGKSASGFDKTGPYRAAFLIDSVSDLRRNLQARGSDLVVRVGKPEAVLVELAKAVGADAVYAHREVSHDEAKAEERVEAAMKEENVEVKYFWGSTLYHVDDLPFQLEDMPSNYGGFRDRVQKLEVRKTIEALDQLKGMPSRGDVEPGEIPSLMDLGLNPSATMSQNGKCVANASMVGGETEALQKLKKFAAECAAQPHKGFKDGTQSIYGANFSCKISPWLAMGCLSPRTMYEELKKTAGRVISASSNRNDGGNGSSRTGTNWLMFELLWRDFFRFITKKYSTAKKQLEAAPATACAGAFA

SEQ ID NO: 59257 - protein, 428 aa, Glycine max
  peptide (1)..(428): Ceres Seq. ID no. 14315424
  misc_feature (89)..(266): Pfam Name: DNA photolyase Pfam Description: DNA photolyase
  misc_feature (120)..(374): Homolog of NCBI NO: 16330358 NR Description: DNA photolyase [Synechocystis sp. PCC 6803]
  misc_feature (91)..(364): Homolog of NCBI NO: 32477278 NR Description: DNA photolyase [Pirellula sp.]
  misc_feature (92)..(374): Homolog of NCBI NO: 28374085 NR Description: Chain A, Crystal Structure Analysis Of
  misc_feature (89)..(375): Homolog of NCBI NO: 23135973 NR Description: hypothetical protein [Cytophaga hutchinsonii]
  misc_feature (81)..(364): Homolog of NCBI NO: 28971609 NR Description: cryptochrome dash [Arabidopsis thaliana]
  misc_feature (81)..(364): Homolog of NCBI NO: 22327046 NR Description: DNA photolyase - like protein [Arabidopsis
  misc_feature (89)..(363): Homolog of NCBI NO: 37520404 NR Description: probable bacterial cryptochrome [Gloeobacter
  misc_feature (92)..(364): Homolog of NCBI NO: 23040111 NR Description: hypothetical protein [Trichodesmium erythraeum
  misc_feature (8)..(428): Homolog of NCBI NO: 21592984 NR Description: photolyase/blue-light receptor PHR2 [Arabidopsis
  misc_feature (8)..(428): Homolog of NCBI NO: 15226633 NR Description: photolyase/blue-light receptor (PHR2)
MEAEKHEAALAVASVSLSLPRVLPFFQPTTPQPTKLKVPTQASSLTHLSLSTPSKTSFKSTISSTPLHAPLSLGPHRPRDPSNAAALRRAAVVWFRNDLRLLDNECLTAANNESLSVLPVYCFDPADYGKSASGFDKTGPYRAAFLIDSVSDLRRNLQARGSDLVVRVGKPEAVLVELAKAVGADAVYAHREVSHDEAKAEERVEAAMKEENVEVKYFWGSTLYHVDDLPFQLEDMPSNYGGFRDRVQKLEVRKTIEALDQLKGMPSRGDVEPGEIPSLMDLGLNPSATMSQNGKCVANASMVGGETEALQKLKKFAAECAAQPHKGFKDGTQSIYGANFSCKISPWLAMGCLSPRTMYEELKKTAGRVISASSNRNDGGNGSSRTGTNWLMFELLWRDFFRFITKKYSTAKKQLEAAPATACAGAFA

SEQ ID NO: 59258 - protein, 221 aa, Glycine max
  peptide (1)..(221): Ceres Seq. ID no. 14315425
  misc_feature (1)..(59): Pfam Name: DNA photolyase Pfam Description: DNA photolyase
  misc_feature (1)..(167): Homolog of NCBI NO: 16330358 NR Description: DNA photolyase [Synechocystis sp. PCC 6803]
  misc_feature (1)..(157): Homolog of NCBI NO: 32477278 NR Description: DNA photolyase [Pirellula sp.]
  misc_feature (1)..(167): Homolog of NCBI NO: 28374085 NR Description: Chain A, Crystal Structure Analysis Of
  misc_feature (1)..(168): Homolog of NCBI NO: 23135973 NR Description: hypothetical protein [Cytophaga hutchinsonii]
  misc_feature (1)..(157): Homolog of NCBI NO: 28971609 NR Description: cryptochrome dash [Arabidopsis thaliana]
  misc_feature (1)..(157): Homolog of NCBI NO: 22327046 NR Description: DNA photolyase - like protein [Arabidopsis
  misc_feature (1)..(156): Homolog of NCBI NO: 37520404 NR Description: probable bacterial cryptochrome [Gloeobacter
  misc_feature (1)..(157): Homolog of NCBI NO: 23040111 NR Description: hypothetical protein [Trichodesmium erythraeum
  misc_feature (1)..(221): Homolog of NCBI NO: 21592984 NR Description: photolyase/blue-light receptor PHR2 [Arabidopsis
  misc_feature (1)..(221): Homolog of NCBI NO: 15226633 NR Description: photolyase/blue-light receptor (PHR2)
MKEENVEVKYFWGSTLYHVDDLPFQLEDMPSNYGGFRDRVQKLEVRKTIEALDQLKGMPSRGDVEPGEIPSLMDLGLNPSATMSQNGKCVANASMVGGETEALQKLKKFAAECAAQPHKGFKDGTQSIYGANFSCKISPWLAMGCLSPRTMYEELKKTAGRVISASSNRNDGGNGSSRTGTNWLMFELLWRDFFRFITKKYSTAKKQLEAAPATACAGAFA

SEQ ID NO: 59259 - DNA, 1507 bp, Glycine max
  misc_feature (1)..(1507): Ceres Seq. ID no. 14315403
acaacgtggcctccttcttccacagcaaaatcccattttccaaaacccctctctctctctctgacacacactaccatggcggcactgaagcttctcctctcccaagctcgccgccattccctccccaaatgcgctttctctatgacctctcacagatccctctgtgcttcttcggaatcaaactcaaaccctccccgaagacccttcgaacccatccccatccaacccgtctcctaccccgtcaagcccaaacccgcaccacccgaacctcaaccttcacccgaacctcaatcacaatccctccccccttcctcgccggactcgcaacgcgcttggacgcgcgaggacatccgctacgtgaaggacgtgccgtcgatcgcgccggtggcgtacgcctcgcgcggcggcgtggcgcctctccccgatgacagagctcccgtggaggacgcggcagagagcgagaggaggatgatcgaggcggagaatgaaatgaggttgcgaatggccaaggccgtcgaagaggaaagaatgaaggtgccgtttccgctgctgattaagcccaagaagaacgagaagcctcctccgcttgatttgaacgaagccattcgccaagttaaggccaatgccaaggcaaagtttgatgaaactgttgaagcacatataagattgggtgttgattcaaagcgaacagaaatggcagttcgtggtactgtgattctgcctcatggtgctccaaaggctgtcagtgtggctgtttttgcagaaggggctgaggcagaggaagcgaaagctgcaggagctgatatagttggtggtaaagagcttattgaggagattgctagcggtaaaaataagctcaaagttgacaaatgcttctcaactcctggaatggcacctaatcttggaaagatagcacaatatcttagaaagcgaagactgatgccagataagaaactaggtactcttactagtgatattgctgggcagttgaaagagctaagacaaggccgtgtagagtttaaaatggaaagtaaatcaattttgcatgtgggacttggaaaggtaagctacaaagaagaggctttacgggagaatattagtgcatttatgaatgctgtattgcttgcaaagcctgctggcttaaaaaagacttccaaatatgctgggtatgtgttgtctgtccatataagcagcacgatgggcccaggattacctgtatctatacaatcaatatccaaagcagcagataactacaagaaaatgcatatggtttgaatcatgtggacgtggccaatgtgggcatttttctacatgaatccaagtttagatgaacatatgttgtcgtaggtttttgttcattaccattgattatgtaaactttgtttagtcatatatgtggcaataagtgaaaattttgacaattttttgtgagcttgttgaattttctggtcacctaatggtgtatcatgttcctcattgcaacacagaaaattatgccttagtttac

SEQ ID NO: 59260 - protein, 424 aa, Glycine max
  peptide (1)..(424): Ceres Seq. ID no. 14315404
  misc_feature (192)..(403): Pfam Name: Ribosomal protein L1p/L10e family Pfam Description: Ribosomal protein L1p/L10e family
  misc_feature (198)..(412): Homolog of NCBI NO: 13470539 NR Description: 50S ribosomal protein L1 [Mesorhizobium loti]
  misc_feature (196)..(410): Homolog of NCBI NO: 22957081 NR Description: hypothetical protein [Rhodobacter sphaeroides]
  misc_feature (197)..(415): Homolog of NCBI NO: 22966133 NR Description: hypothetical protein [Rhodospirillum rubrum]
  misc_feature (198)..(412): Homolog of NCBI NO: 17935849 NR Description: 50S ribosomal protein L1
  misc_feature (198)..(412): Homolog of NCBI NO: 15889253 NR Description: AGR_C_3573p [Agrobacterium tumefaciens]
  misc_feature (195)..(412): Homolog of NCBI NO: 9957210 NR Description: L1 [EDTA-degrading bacterium BNC1]
  misc_feature (198)..(406): Homolog of NCBI NO: 27380525 NR Description: 50S ribosomal protein L1 [Bradyrhizobium
  misc_feature (186)..(414): Homolog of NCBI NO: 15965098 NR Description: PROBABLE 50S RIBOSOMAL PROTEIN L1 [Sinorhizobium
  misc_feature (41)..(283): Homolog of NCBI NO: 25408807 NR Description: hypothetical protein At2g42710 [imported] -
  misc_feature (26)..(423): Homolog of NCBI NO: 30689119 NR Description: ribosomal protein L1p family [Arabidopsis
TTWPPSSTAKSHFPKPLSLSLTHTTMAALKLLLSQARRHSLPKCAFSMTSHRSLCASSESNSNPPRRPFEPIPIQPVSYPVKPKPAPPEPQPSPEPQSQSLPPSSPDSQRAWTREDIRYVKDVPSIAPVAYASRGGVAPLPDDRAPVEDAAESERRMIEAENEMRLRMAKAVEEERMKVPFPLLIKPKKNEKPPPLDLNEAIRQVKANAKAKFDETVEAHIRLGVDSKRTEMAVRGTVILPHGAPKAVSVAVFAEGAEAEEAKAAGADIVGGKELIEEIASGKNKLKVDKCFSTPGMAPNLGKIAQYLRKRRLMPDKKLGTLTSDIAGQLKELRQGRVEFKMESKSILHVGLGKVSYKEEALRENISAFMNAVLLAKPAGLKKTSKYAGYVLSVHISSTMGPGLPVSIQSISKAADNYKKMHMV

SEQ ID NO: 59261 - protein, 399 aa, Glycine max
  peptide (1)..(399): Ceres Seq. ID no. 14315405
  misc_feature (167)..(378): Pfam Name: Ribosomal protein L1p/L10e family Pfam Description: Ribosomal protein L1p/L10e family
  misc_feature (173)..(387): Homolog of NCBI NO: 13470539 NR Description: 50S ribosomal protein L1 [Mesorhizobium loti]
  misc_feature (171)..(385): Homolog of NCBI NO: 22957081 NR Description: hypothetical protein [Rhodobacter sphaeroides]
  misc_feature (172)..(390): Homolog of NCBI NO: 22966133 NR Description: hypothetical protein [Rhodospirillum rubrum]
  misc_feature (173)..(387): Homolog of NCBI NO: 17935849 NR Description: 50S ribosomal protein L1
  misc_feature (173)..(387): Homolog of NCBI NO: 15889253 NR Description: AGR_C_3573p [Agrobacterium tumefaciens]
  misc_feature (170)..(387): Homolog of NCBI NO: 9957210 NR Description: L1 [EDTA-degrading bacterium BNC1]
  misc_feature (173)..(381): Homolog of NCBI NO: 27380525 NR Description: 50S ribosomal protein L1 [Bradyrhizobium
  misc_feature (161)..(389): Homolog of NCBI NO: 15965098 NR Description: PROBABLE 50S RIBOSOMAL PROTEIN L1 [Sinorhizobium
  misc_feature (16)..(258): Homolog of NCBI NO: 25408807 NR Description: hypothetical protein At2g42710 [imported] -
  misc_feature (1)..(398): Homolog of NCBI NO: 30689119 NR Description: ribosomal protein L1p family [Arabidopsis
MAALKLLLSQARRHSLPKCAFSMTSHRSLCASSESNSNPPRRPFEPIPIQPVSYPVKPKPAPPEPQPSPEPQSQSLPPSSPDSQRAWTREDIRYVKDVPSIAPVAYASRGGVAPLPDDRAPVEDAAESERRMIEAENEMRLRMAKAVEEERMKVPFPLLIKPKKNEKPPPLDLNEAIRQVKANAKAKFDETVEAHIRLGVDSKRTEMAVRGTVILPHGAPKAVSVAVFAEGAEAEEAKAAGADIVGGKELIEEIASGKNKLKVDKCFSTPGMAPNLGKIAQYLRKRRLMPDKKLGTLTSDIAGQLKELRQGRVEFKMESKSILHVGLGKVSYKEEALRENISAFMNAVLLAKPAGLKKTSKYAGYVLSVHISSTMGPGLPVSIQSISKAADNYKKMHMV

SEQ ID NO: 59262 - protein, 377 aa, Glycine max
  peptide (1)..(377): Ceres Seq. ID no. 14315406
  misc_feature (145)..(356): Pfam Name: Ribosomal protein L1p/L10e family Pfam Description: Ribosomal protein L1p/L10e family
  misc_feature (151)..(365): Homolog of NCBI NO: 13470539 NR Description: 50S ribosomal protein L1 [Mesorhizobium loti]
  misc_feature (149)..(363): Homolog of NCBI NO: 22957081 NR Description: hypothetical protein [Rhodobacter sphaeroides]
  misc_feature (150)..(368): Homolog of NCBI NO: 22966133 NR Description: hypothetical protein [Rhodospirillum rubrum]
  misc_feature (151)..(365): Homolog of NCBI NO: 17935849 NR Description: 50S ribosomal protein L1
  misc_feature (151)..(365): Homolog of NCBI NO: 15889253 NR Description: AGR_C_3573p [Agrobacterium tumefaciens]
  misc_feature (148)..(365): Homolog of NCBI NO: 9957210 NR Description: L1 [EDTA-degrading bacterium BNC1]
  misc_feature (151)..(359): Homolog of NCBI NO: 27380525 NR Description: 50S ribosomal protein L1 [Bradyrhizobium
  misc_feature (139)..(367): Homolog of NCBI NO: 15965098 NR Description: PROBABLE 50S RIBOSOMAL PROTEIN L1 [Sinorhizobium
  misc_feature (1)..(236): Homolog of NCBI NO: 25408807 NR Description: hypothetical protein At2g42710 [imported] -
  misc_feature (1)..(376): Homolog of NCBI NO: 30689119 NR Description: ribosomal protein L1p family [Arabidopsis
MTSHRSLCASSESNSNPPRRPFEPIPIQPVSYPVKPKPAPPEPQPSPEPQSQSLPPSSPDSQRAWTREDIRYVKDVPSIAPVAYASRGGVAPLPDDRAPVEDAAESERRMIEAENEMRLRMAKAVEEERMKVPFPLLIKPKKNEKPPPLDLNEAIRQVKANAKAKFDETVEAHIRLGVDSKRTEMAVRGTVILPHGAPKAVSVAVFAEGAEAEEAKAAGADIVGGKELIEEIASGKNKLKVDKCFSTPGMAPNLGKIAQYLRKRRLMPDKKLGTLTSDIAGQLKELRQGRVEFKMESKSILHVGLGKVSYKEEALRENISAFMNAVLLAKPAGLKKTSKYAGYVLSVHISSTMGPGLPVSIQSISKAADNYKKMHMV

SEQ ID NO: 59263 - DNA, 1691 bp, Glycine max
  misc_feature (1)..(1691): Ceres Seq. ID no. 12608060
accagaacatcctaatcgaaaaagtatagggtgaaagtcctttgggacttgggcgctgggatgatgtatgtaatatatagggtaacataaaaatagcgagcgcaaccctctctcccagtctcggaagaagaaatgaagcagctgccaacgctgctgacgaagtccctctcactctcagtgtgttctttgccagcagcagcttccacaaccacccttcaacaaattgctctccatcaacccaaagtttgtgtttggtaggtgttgcaaaggttgtacttaaaaaggggaagacacaactctttaaggatggcaacccaatggtgtacagtggagctgttgatagaataattgggaggccacctcccaagaccggggatgttgttctggtagcagatgggactgagaaaccaattggatggggcatgtacaactcagtttctatgttctgtgttcggctcatgcagcttgaagatgaagctactagcgattcatcttgtgcattgaatatggagaaactgattgaaacaagaattgatgcagctgttgaaatgcgtagaaggttgggtcttccatcagtccacaccaatgcataccgtctaatcaatagtgagggtgacagactatcaggattgataattgacgtctttggaggtgttgctgtagtagcgtcatctgctgcttgggttgagaaatacaaatcagagatagaggcatgcatcaagaaaatcaactatatcaatcatgtaaattggaggccatctgttgatattttaaaggaagatggagttaatgaatctgatttaaacaaaatgcattcatctacatgtcctgaaagaacaaagattgtggaaaatgaaattgtatacacaatttcattgaagggccagaagacgggattctatgcagatcagcgtgagaaccgccagtttatatcaagaatttcagatggtcaaaaggttcttgatatttgctgctatagtggcggttttgctctaaatgctgtgcgtggaggtgctctaaatgtcaccggtattgacacatcaccgctagctttggagcttgctaaagaaaatgttgtactcaacaacattgatcctggaagaatatcctttttgagggaagatgctactgaatttatgaagggtgctctcttgagaaatgaatcctgggatattgtcatcattgatcctcctaaactggcaccaacaaaaaaggttctacatagtgcttctggtatgtacaggaatttgaattcacttgctatgcaacttacaaaaagaggtggtcttctgatgacatgttcctgttctggagctgtgacccaaagtgggatattcatgcgcatccttcagggtgcagcatctatggcgggtaggagaatcactgtcctcagacaggctggagcagcttgtgatcaccctatcgatccatcatacccagaaggagcatatctaaccaacattctattgcgagtttcatgagtattgtatttgggggattttcattcatttaagttttttcccatgtaattatatattttaatggaactttggaaagtgccctttcaccgaattagtgaagaaaatgtcttacacatcagttgaaagaaaaaaatgggcataggtttgcttatttaattaataattattgtcaaactgaaaaaaaaaaaaaaaaaagcttatcgataccgt

SEQ ID NO: 59264 - protein, 387 aa, Glycine max
  peptide (1)..(387): Ceres Seq. ID no. 12608061
  misc_feature (1)..(386): Homolog of NCBI NO: 24112380 NR Description: orf, conserved hypothetical protein
  misc_feature (1)..(386): Homolog of NCBI NO: 21245076 NR Description: oxidoreductase [Xanthomonas axonopodis pv. citri
  misc_feature (1)..(386): Homolog of NCBI NO: 29349739 NR Description: conserved hypothetical protein
  misc_feature (1)..(386): Homolog of NCBI NO: 26246990 NR Description: Hypothetical protein yccW [Escherichia coli
  misc_feature (1)..(386): Homolog of NCBI NO: 38703907 NR Description: putative oxidoreductase [Escherichia coli O157:H7]
  misc_feature (1)..(386): Homolog of NCBI NO: 33347501 NR Description: putative oxidoreductase [Escherichia coli K12]
  misc_feature (1)..(386): Homolog of NCBI NO: 17544770 NR Description: CONSERVED HYPOTHETICAL PROTEIN [Ralstonia
  misc_feature (1)..(387): Homolog of NCBI NO: 22985051 NR Description: hypothetical protein [Burkholderia fungorum]
  misc_feature (1)..(176): Homolog of NCBI NO: 25405715 NR Description: hypothetical protein F20D21.13 [imported] -
  misc_feature (1)..(176): Homolog of NCBI NO: 18404875 NR Description: expressed protein
MVYSGAVDRIIGRPPPKTGDVVLVADGTEKPIGWGMYNSVSMFCVRLMQLEDEATSDSSCALNMEKLIETRIDAAVEMRRRLGLPSVHTNAYRLINSEGDRLSGLIIDVFGGVAVVASSAAWVEKYKSEIEACIKKINYINHVNWRPSVDILKEDGVNESDLNKMHSSTCPERTKIVENEIVYTISLKGQKTGFYADQRENRQFISRISDGQKVLDICCYSGGFALNAVRGGALNVTGIDTSPLALELAKENVVLNNIDPGRISFLREDATEFMKGALLRNESWDIVIIDPPKLAPTKKVLHSASGMYRNLNSLAMQLTKRGGLLMTCSCSGAVTQSGIFMRILQGAASMAGRRITVLRQAGAACDHPIDPSYPEGAYLTNILLRVS

SEQ ID NO: 59265 - protein, 352 aa, Glycine max
  peptide (1)..(352): Ceres Seq. ID no. 12608062
  misc_feature (1)..(351): Homolog of NCBI NO: 24112380 NR Description: orf, conserved hypothetical protein
  misc_feature (1)..(351): Homolog of NCBI NO: 21245076 NR Description: oxidoreductase [Xanthomonas axonopodis pv. citri
  misc_feature (1)..(351): Homolog of NCBI NO: 29349739 NR Description: conserved hypothetical protein
  misc_feature (1)..(351): Homolog of NCBI NO: 26246990 NR Description: Hypothetical protein yccW [Escherichia coli
  misc_feature (1)..(351): Homolog of NCBI NO: 38703907 NR Description: putative oxidoreductase [Escherichia coli O157:H7]
  misc_feature (1)..(351): Homolog of NCBI NO: 33347501 NR Description: putative oxidoreductase [Escherichia coli K12]
  misc_feature (1)..(351): Homolog of NCBI NO: 17544770 NR Description: CONSERVED HYPOTHETICAL PROTEIN [Ralstonia
  misc_feature (1)..(352): Homolog of NCBI NO: 22985051 NR Description: hypothetical protein [Burkholderia fungorum]
  misc_feature (1)..(141): Homolog of NCBI NO: 25405715 NR Description: hypothetical protein F20D21.13 [imported] -
  misc_feature (1)..(141): Homolog of NCBI NO: 18404875 NR Description: expressed protein
MYNSVSMFCVRLMQLEDEATSDSSCALNMEKLIETRIDAAVEMRRRLGLPSVHTNAYRLINSEGDRLSGLIIDVFGGVAVVASSAAWVEKYKSEIEACIKKINYINHVNWRPSVDILKEDGVNESDLNKMHSSTCPERTKIVENEIVYTISLKGQKTGFYADQRENRQFISRISDGQKVLDICCYSGGFALNAVRGGALNVTGIDTSPLALELAKENVVLNNIDPGRISFLREDATEFMKGALLRNESWDIVIIDPPKLAPTKKVLHSASGMYRNLNSLAMQLTKRGGLLMTCSCSGAVTQSGIFMRILQGAASMAGRRITVLRQAGAACDHPIDPSYPEGAYLTNILLRVS

SEQ ID NO: 59266 - protein, 346 aa, Glycine max
  peptide (1)..(346): Ceres Seq. ID no. 12608063
  misc_feature (1)..(345): Homolog of NCBI NO: 24112380 NR Description: orf, conserved hypothetical protein
  misc_feature (1)..(345): Homolog of NCBI NO: 21245076 NR Description: oxidoreductase [Xanthomonas axonopodis pv. citri
  misc_feature (1)..(345): Homolog of NCBI NO: 29349739 NR Description: conserved hypothetical protein
  misc_feature (1)..(345): Homolog of NCBI NO: 26246990 NR Description: Hypothetical protein yccW [Escherichia coli
  misc_feature (1)..(345): Homolog of NCBI NO: 38703907 NR Description: putative oxidoreductase [Escherichia coli O157:H7]
  misc_feature (1)..(345): Homolog of NCBI NO: 33347501 NR Description: putative oxidoreductase [Escherichia coli K12]
  misc_feature (1)..(345): Homolog of NCBI NO: 17544770 NR Description: CONSERVED HYPOTHETICAL PROTEIN [Ralstonia
  misc_feature (1)..(346): Homolog of NCBI NO: 22985051 NR Description: hypothetical protein [Burkholderia fungorum]
  misc_feature (1)..(135): Homolog of NCBI NO: 25405715 NR Description: hypothetical protein F20D21.13 [imported] -
  misc_feature (1)..(135): Homolog of NCBI NO: 18404875 NR Description: expressed protein
MFCVRLMQLEDEATSDSSCALNMEKLIETRIDAAVEMRRRLGLPSVHTNAYRLINSEGDRLSGLIIDVFGGVAVVASSAAWVEKYKSEIEACIKKINYINHVNWRPSVDILKEDGVNESDLNKMHSSTCPERTKIVENEIVYTISLKGQKTGFYADQRENRQFISRISDGQKVLDICCYSGGFALNAVRGGALNVTGIDTSPLALELAKENVVLNNIDPGRISFLREDATEFMKGALLRNESWDIVIIDPPKLAPTKKVLHSASGMYRNLNSLAMQLTKRGGLLMTCSCSGAVTQSGIFMRILQGAASMAGRRITVLRQAGAACDHPIDPSYPEGAYLTNILLRVS

SEQ ID NO: 59267 - DNA, 1127 bp, Glycine max
  misc_feature (1)..(1127): Ceres Seq. ID no. 14305682
acaacgcgcgctttacgagagcagggaaccagaggggaactcgtgcttagctttcctgtagcttcgtttgcaccatccatggccgatccagccgaggagaccgtcgccgcgcccccgccgaccccggcagctcccgccgagggcgccccgccgctgtcggcggagccgccggctagcaccgacgcctcgccggagaaggcggccccgcctgcgcctgcgccggacacgacggtgaggtcccgggggttcaggctgctcggcgaggacacctccgtgcacaaggtgctcggtggcggtaaaactgctgatgtactgttatggaaggacaagaaaacaactgctgtagtgatcggtggcacaactgtcatatgggttttatttgaagtgcttgattaccatctcttaactctgctatcccatgtgatgattggtgtcctggccatcttgttcgtgtggtcgaaagctatgaccttcatcaagaagagtccgccagatattcctgtagtcgagatacctgaagacctcgctgtgaatgtatcacgggcactacgcagcgatgtcaacagatcacttcacttgttgcgcgagattgcaatggggcatgatctgaagaaattccttggtgtgattgctggtctctgggttctgtcagaagttggaagctgctgtgatttcctcaccttgatatatattgctgtcctgatgatccacacggtgccgatcttgtacgacaagtaccaggacaaggtggatcacttcgccggaaaggcccataccgaggcgtgcaagcactacgaggtgctggaccagaaggttctgagcaagataccccgaggaccggcgaaaaccaagaagacctagaatgctgggtgtctcgtgagtgcatgctgggtcgcttgtggttccgtgatcatatgcgtaatgcgacgagacgtcactcgtcttacggtcttgccttctgctcagcattgtattagctatttgtatatgcaactctgaaaacttcgaactgctacctttctactatcgcagtcgcttgtagatacctgtcctgttacttgtgtgtacgtgcggcagatgtgttctcgtgtggatgttcttagtgaaaacctgaatggatgttcttg

SEQ ID NO: 59268 - protein, 286 aa, Glycine max
  peptide (1)..(286): Ceres Seq. ID no. 14305683
  misc_feature (24)..(277): Homolog of NCBI NO: 34610241 NR Description: reticulon 4 isoform B2 [Mus musculus]
  misc_feature (11)..(277): Homolog of NCBI NO: 5821140 NR Description: ASY [Homo sapiens]
  misc_feature (11)..(277): Homolog of NCBI NO: 24431933 NR Description: reticulon 4; neuroendocrine-specific protein C
  misc_feature (21)..(277): Homolog of NCBI NO: 16740576 NR Description: RTN4 protein [Homo sapiens]
  misc_feature (19)..(277): Homolog of NCBI NO: 4838513 NR Description: foocen-m2 [Rattus norvegicus]
  misc_feature (91)..(286): Homolog of NCBI NO: 38345298 NR Description: OSJNBa0043A12.26 [Oryza sativa (japonica
  misc_feature (75)..(286): Homolog of NCBI NO: 34899590 NR Description: hypothetical protein~similar to Oryza sativa
  misc_feature (84)..(286): Homolog of NCBI NO: 34897094 NR Description: unknown protein [Oryza sativa (japonica
  misc_feature (58)..(285): Homolog of NCBI NO: 34909318 NR Description: OSJNBb0021A09.5 [Oryza sativa (japonica
  misc_feature (47)..(285): Homolog of NCBI NO: 34904202 NR Description: P0492F05.25 [Oryza sativa (japonica
TTRALREQGTRGELVLSFPVASFAPSMADPAEETVAAPPPTPAAPAEGAPPLSAEPPASTDASPEKAAPPAPAPDTTVRSRGFRLLGEDTSVHKVLGGGKTADVLLWKDKKTTAVVIGGTTVIWVLFEVLDYHLLTLLSHVMIGVLAILFVWSKAMTFIKKSPPDIPVVEIPEDLAVNVSRALRSDVNRSLHLLREIAMGHDLKKFLGVIAGLWVLSEVGSCCDFLTLIYIAVLMIHTVPILYDKYQDKVDHFAGKAHTEACKHYEVLDQKVLSKIPRGPAKTKKT

SEQ ID NO: 59269 - protein, 260 aa, Glycine max
  peptide (1)..(260): Ceres Seq. ID no. 14305684
  misc_feature (1)..(251): Homolog of NCBI NO: 34610241 NR Description: reticulon 4 isoform B2 [Mus musculus]
  misc_feature (1)..(251): Homolog of NCBI NO: 5821140 NR Description: ASY [Homo sapiens]
  misc_feature (1)..(251): Homolog of NCBI NO: 24431933 NR Description: reticulon 4; neuroendocrine-specific protein C
  misc_feature (1)..(251): Homolog of NCBI NO: 16740576 NR Description: RTN4 protein [Homo sapiens]
  misc_feature (1)..(251): Homolog of NCBI NO: 4838513 NR Description: foocen-m2 [Rattus norvegicus]
  misc_feature (65)..(260): Homolog of NCBI NO: 38345298 NR Description: OSJNBa0043A12.26 [Oryza sativa (japonica
  misc_feature (49)..(260): Homolog of NCBI NO: 34899590 NR Description: hypothetical protein~similar to Oryza sativa
  misc_feature (58)..(260): Homolog of NCBI NO: 34897094 NR Description: unknown protein [Oryza sativa (japonica
  misc_feature (32)..(259): Homolog of NCBI NO: 34909318 NR Description: OSJNBb0021A09.5 [Oryza sativa (japonica
  misc_feature (21)..(259): Homolog of NCBI NO: 34904202 NR Description: P0492F05.25 [Oryza sativa (japonica
MADPAEETVAAPPPTPAAPAEGAPPLSAEPPASTDASPEKAAPPAPAPDTTVRSRGFRLLGEDTSVHKVLGGGKTADVLLWKDKKTTAVVIGGTTVIWVLFEVLDYHLLTLLSHVMIGVLAILFVWSKAMTFIKKSPPDIPVVEIPEDLAVNVSRALRSDVNRSLHLLREIAMGHDLKKFLGVIAGLWVLSEVGSCCDFLTLIYIAVLMIHTVPILYDKYQDKVDHFAGKAHTEACKHYEVLDQKVLSKIPRGPAKTKKT

SEQ ID NO: 59270 - protein, 145 aa, Glycine max
  peptide (1)..(145): Ceres Seq. ID no. 14305685
  misc_feature (1)..(136): Homolog of NCBI NO: 34610241 NR Description: reticulon 4 isoform B2 [Mus musculus]
  misc_feature (1)..(136): Homolog of NCBI NO: 5821140 NR Description: ASY [Homo sapiens]
  misc_feature (1)..(136): Homolog of NCBI NO: 24431933 NR Description: reticulon 4; neuroendocrine-specific protein C
  misc_feature (1)..(136): Homolog of NCBI NO: 16740576 NR Description: RTN4 protein [Homo sapiens]
  misc_feature (1)..(136): Homolog of NCBI NO: 4838513 NR Description: foocen-m2 [Rattus norvegicus]
  misc_feature (1)..(145): Homolog of NCBI NO: 38345298 NR Description: OSJNBa0043A12.26 [Oryza sativa (japonica
  misc_feature (1)..(145): Homolog of NCBI NO: 34899590 NR Description: hypothetical protein~similar to Oryza sativa
  misc_feature (1)..(145): Homolog of NCBI NO: 34897094 NR Description: unknown protein [Oryza sativa (japonica
  misc_feature (1)..(144): Homolog of NCBI NO: 34909318 NR Description: OSJNBb0021A09.5 [Oryza sativa (japonica
  misc_feature (1)..(144): Homolog of NCBI NO: 34904202 NR Description: P0492F05.25 [Oryza sativa (japonica
MIGVLAILFVWSKAMTFIKKSPPDIPVVEIPEDLAVNVSRALRSDVNRSLHLLREIAMGHDLKKFLGVIAGLWVLSEVGSCCDFLTLIYIAVLMIHTVPILYDKYQDKVDHFAGKAHTEACKHYEVLDQKVLSKIPRGPAKTKKT

SEQ ID NO: 59271 - DNA, 1655 bp, Glycine max
  misc_feature (1)..(1655): Ceres Seq. ID no. 13594232
atttcctgcttctctctcatctattgactcatccattacctgaacaaacacctagaattttgtcctgttcccttcatttcattttcattggatttatatagcattgcaacgatcggatagctatttgctacttgattgattctttgccagcgtgggatttgagaaagaaaaaaaaaacagtaacaggaaaggagggtagcattaagggaagaactcaggttgcgggaagaggtaaaaaaaatggagcatggggatggagaagcggtgataattgggggtatggtattggacattcatgctacaccttcaatgctagcaaatcctggaaccactacccctggcaaggtctattatgtccaaggaggtgtggcaaggaatgtagccgagtgcatgtcaaaactaggagcaaagccatacatgattagtgctcttgggtttgacatggcaggaaatctgctgttgaatcagtggaaatctgctggcctatctatagaaggtattttgaaggataaagatattgagactccagtagtatgcaatatatttgatgttaatggtgaggtagcagctggtgttgctagtgtggaagcttttgaaaaatatctgacacctgactggatctttcgcttcaaaaacactttactatctgctccagtgttaatggttgatgcaaatctgagtcatccttctcttgaagctgcttgtaaaatggcgattgacatggagtgtcctgtatggtttgagccagtatcagttactaaatcccgaagaatcagttctattgtcgagtatgtaacttttgcttctccaaatgaagatgaacttattgcgatggcgaatgctttatctggcagtgatgagtttcatccacttaaagaaagtcagaagaaaaatatttcagtattatctttgtttcaaatgctgaaaccagcaatatgggttttgctagaaaaaggcattaaagtggtcctagtgacctttggctctaatggagtgtttttatgcaataaaggatggcctagacaatttaaaatgcctgcagagaaaacaaatcagtgtggcttcagaggacaattattcaagactgttatgcaaaaatgtccacctagtcgttattctggtttttcagaacttgatagaagctctcatctctttgctgtgcattttccctctcttcctgcatcagttgtgaggcttactggcgctggtgattgcttagttggtggaacactcacatcaatttgtgcaggattagatattatgcaaagtgtgtctgttggcattgcagtggctaaagctgtagtggaggttgaggctaatgtcccatctactttcagtttatctgctatcacaggtgctaaagttctcttcccccaatcgatgttgtaaattttgaatgaggatgactggtagataaacagcttgagttgcgatacaaccaccacctttgcccagaaaaaatgataacatcttacaaaggcttgtggcattgaaatatgaattaataactatatttttttagtttttatttcatatttttctataagagtttaattgatacacttttttttaaacattgatatgcacttttgcactaacatgttatacttgatcatgtcatgatgtcggtctttgtagtgaatatttttccccct

SEQ ID NO: 59272 - protein, 382 aa, Glycine max
  peptide (1)..(382): Ceres Seq. ID no. 15221325
  misc_feature (7)..(362): Pfam Name: pfkB family carbohydrate kinase Pfam Description: pfkB family carbohydrate kinase
  misc_feature (9)..(207): Homolog of NCBI NO: 15802722 NR Description: putative kinase [Escherichia coli O157:H7 EDL933]
  misc_feature (9)..(204): Homolog of NCBI NO: 37528180 NR Description: hypothetical protein
  misc_feature (10)..(242): Homolog of NCBI NO: 20806843 NR Description: Sugar kinases, ribokinase family
  misc_feature (7)..(159): Homolog of NCBI NO: 25405294 NR Description: hypothetical protein F13F21.22 [imported] -
  misc_feature (310)..(370): Homolog of NCBI NO: 15807303 NR Description: carbohydrate kinase, PfkB family [Deinococcus
  misc_feature (7)..(198): Homolog of NCBI NO: 15807303 NR Description: carbohydrate kinase, PfkB family [Deinococcus
  misc_feature (178)..(372): Homolog of NCBI NO: 25405294 NR Description: hypothetical protein F13F21.22 [imported] -
  misc_feature (29)..(370): Homolog of NCBI NO: 13699076 NR Description: TMV response-related gene product [Nicotiana
  misc_feature (7)..(377): Homolog of NCBI NO: 18402606 NR Description: pfkB type carbohydrate kinase protein family
  misc_feature (7)..(377): Homolog of NCBI NO: 21536998 NR Description: unknown [Arabidopsis thaliana]
MEHGDGEAVIIGGMVLDIHATPSMLANPGTTTPGKVYYVQGGVARNVAECMSKLGAKPYMISALGFDMAGNLLLNQWKSAGLSIEGILKDKDIETPVVCNIFDVNGEVAAGVASVEAFEKYLTPDWIFRFKNTLLSAPVLMVDANLSHPSLEAACKMAIDMECPVWFEPVSVTKSRRISSIVEYVTFASPNEDELIAMANALSGSDEFHPLKESQKKNISVLSLFQMLKPAIWVLLEKGIKVVLVTFGSNGVFLCNKGWPRQFKMPAEKTNQCGFRGQLFKTVMQKCPPSRYSGFSELDRSSHLFAVHFPSLPASVVRLTGAGDCLVGGTLTSICAGLDIMQSVSVGIAVAKAVVEVEANVPSTFSLSAITGAKVLFPQSML

SEQ ID NO: 59273 - protein, 369 aa, Glycine max
  peptide (1)..(369): Ceres Seq. ID no. 15221326
  misc_feature (1)..(349): Pfam Name: pfkB family carbohydrate kinase Pfam Description: pfkB family carbohydrate kinase
  misc_feature (1)..(194): Homolog of NCBI NO: 15802722 NR Description: putative kinase [Escherichia coli O157:H7 EDL933]
  misc_feature (1)..(191): Homolog of NCBI NO: 37528180 NR Description: hypothetical protein
  misc_feature (1)..(229): Homolog of NCBI NO: 20806843 NR Description: Sugar kinases, ribokinase family
  misc_feature (1)..(146): Homolog of NCBI NO: 25405294 NR Description: hypothetical protein F13F21.22 [imported] -
  misc_feature (297)..(357): Homolog of NCBI NO: 15807303 NR Description: carbohydrate kinase, PfkB family [Deinococcus
  misc_feature (1)..(185): Homolog of NCBI NO: 15807303 NR Description: carbohydrate kinase, PfkB family [Deinococcus
  misc_feature (165)..(359): Homolog of NCBI NO: 25405294 NR Description: hypothetical protein F13F21.22 [imported] -
  misc_feature (16)..(357): Homolog of NCBI NO: 13699076 NR Description: TMV response-related gene product [Nicotiana
  misc_feature (1)..(364): Homolog of NCBI NO: 18402606 NR Description: pfkB type carbohydrate kinase protein family
  misc_feature (1)..(364): Homolog of NCBI NO: 21536998 NR Description: unknown [Arabidopsis thaliana]
MVLDIHATPSMLANPGTTTPGKVYYVQGGVARNVAECMSKLGAKPYMISALGFDMAGNLLLNQWKSAGLSIEGILKDKDIETPVVCNIFDVNGEVAAGVASVEAFEKYLTPDWIFRFKNTLLSAPVLMVDANLSHPSLEAACKMAIDMECPVWFEPVSVTKSRRISSIVEYVTFASPNEDELIAMANALSGSDEFHPLKESQKKNISVLSLFQMLKPAIWVLLEKGIKVVLVTFGSNGVFLCNKGWPRQFKMPAEKTNQCGFRGQLFKTVMQKCPPSRYSGFSELDRSSHLFAVHFPSLPASVVRLTGAGDCLVGGTLTSICAGLDIMQSVSVGIAVAKAVVEVEANVPSTFSLSAITGAKVLFPQSML

SEQ ID NO: 59274 - protein, 359 aa, Glycine max
  peptide (1)..(359): Ceres Seq. ID no. 15221327
  misc_feature (1)..(339): Pfam Name: pfkB family carbohydrate kinase Pfam Description: pfkB family carbohydrate kinase
  misc_feature (1)..(184): Homolog of NCBI NO: 15802722 NR Description: putative kinase [Escherichia coli O157:H7 EDL933]
  misc_feature (1)..(181): Homolog of NCBI NO: 37528180 NR Description: hypothetical protein
  misc_feature (1)..(219): Homolog of NCBI NO: 20806843 NR Description: Sugar kinases, ribokinase family
  misc_feature (1)..(136): Homolog of NCBI NO: 25405294 NR Description: hypothetical protein F13F21.22 [imported] -
  misc_feature (287)..(347): Homolog of NCBI NO: 15807303 NR Description: carbohydrate kinase, PfkB family [Deinococcus
  misc_feature (1)..(175): Homolog of NCBI NO: 15807303 NR Description: carbohydrate kinase, PfkB family [Deinococcus
  misc_feature (155)..(349): Homolog of NCBI NO: 25405294 NR Description: hypothetical protein F13F21.22 [imported] -
  misc_feature (6)..(347): Homolog of NCBI NO: 13699076 NR Description: TMV response-related gene product [Nicotiana
  misc_feature (1)..(354): Homolog of NCBI NO: 18402606 NR Description: pfkB type carbohydrate kinase protein family
  misc_feature (1)..(354): Homolog of NCBI NO: 21536998 NR Description: unknown [Arabidopsis thaliana]
MLANPGTTTPGKVYYVQGGVARNVAECMSKLGAKPYMISALGFDMAGNLLLNQWKSAGLSIEGILKDKDIETPVVCNIFDVNGEVAAGVASVEAFEKYLTPDWIFRFKNTLLSAPVLMVDANLSHPSLEAACKMAIDMECPVWFEPVSVTKSRRISSIVEYVTFASPNEDELIAMANALSGSDEFHPLKESQKKNISVLSLFQMLKPAIWVLLEKGIKVVLVTFGSNGVFLCNKGWPRQFKMPAEKTNQCGFRGQLFKTVMQKCPPSRYSGFSELDRSSHLFAVHFPSLPASVVRLTGAGDCLVGGTLTSICAGLDIMQSVSVGIAVAKAVVEVEANVPSTFSLSAITGAKVLFPQSML

SEQ ID NO: 59275 - DNA, 1245 bp, Glycine max
  misc_feature (1)..(1245): Ceres Seq. ID no. 14311777
tcccgagcaacgaaagctaggtcacgggttcgaaaccatttttcgtgaaaataggtgtttttttgagttcgtcgttttgctcttcgtgttgttgaagtgcaacgccatggacccagatcagggcacttcaaaagcctggaagcccaagttcaaacccaggaatctcaaagcagtccgagctcccaaaaccgaagcggatgataagcgaaacgaagatagcgaagtgcctcgagctctctcgcgtcgacgacatgaaaatcctgcaaaacgcgagcctaaagtcgaaagaaaatctagcgtggaagttgcatttagtcttggaagttcatcatcacattccctcaggacatatggcacaagcaaatctatagatagtggcacaagcagtggttcaccatctaaatattttgccaatgaacaaattcgttcaattgctactgaggatcaaaatgatgcttctaatgcatctgccaggaaaatcaaaagagagtacaaggaaccatgggattatgaaaactcttactatccgactactcttcctttgaggaagccaaattctggagatccagaaattcttgatgagaaagaatttggtgaagctgctactagtgtggagtatgatgagaatactgttaattctgctgcagaactcgagatcttggagagtgaggaacaaaggatgtttttctttcagattcctactcctctgcctatggacaagcagagtaataaggggaaggagaaaattggtacatcaacagtatcgggagaggccacaaagtcaaagaatgccttggaagagttgccgaggggatatatgggcaaaatgctggtgtacaagagtggagcaattttatcttagagtgtattcccctgcaaattcatggagagatgagtacccaattccaagcaatgctattcggtgtggcaaggctgtgggacactactaatgccaccaccaaaccaacattgggatttttatttgaacagtgtcattcatttccattcatggcttaactcaagcctcttctcttgttctcttgtaccattattcatgttatgatgccatagattattatagagttattgatttctcctgtcctcttcctcctctcatcttcgtgttatgtccaaattcagctatatataagatcatctgtgtttggattatgatattcttcttatttaaactatttatttatttaaataggttcaagggacctgatgttaatgtgccatggaaac

SEQ ID NO: 59276 - protein, 286 aa, Glycine max
  peptide (1)..(286): Ceres Seq. ID no. 14311778
  misc_feature (224)..(284): Pfam Name: RNA polymerase III RPC4 Pfam Description: RNA polymerase III RPC4
  misc_feature (87)..(284): Homolog of NCBI NO: 15242400 NR Description: hypothetical protein [Arabidopsis thaliana]
  misc_feature (90)..(284): Homolog of NCBI NO: 21740741 NR Description: OSJNBa0072K14.6 [Oryza sativa (japonica
  misc_feature (98)..(284): Homolog of NCBI NO: 7486060 NR Description: hypothetical protein F24A6.20 - Arabidopsis
  misc_feature (79)..(284): Homolog of NCBI NO: 15234965 NR Description: hypothetical protein [Arabidopsis thaliana]
PEQRKLGHGFETIFRENRCFFEFVVLLFVLLKCNAMDPDQGTSKAWKPKFKPRNLKAVRAPKTEADDKRNEDSEVPRALSRRRHENPAKREPKVERKSSVEVAFSLGSSSSHSLRTYGTSKSIDSGTSSGSPSKYFANEQIRSIATEDQNDASNASARKIKREYKEPWDYENSYYPTTLPLRKPNSGDPEILDEKEFGEAATSVEYDENTVNSAAELEILESEEQRMFFFQIPTPLPMDKQSNKGKEKIGTSTVSGEATKSKNALEELPRGYMGKMLVYKSGAILS

SEQ ID NO: 59277 - protein, 251 aa, Glycine max
  peptide (1)..(251): Ceres Seq. ID no. 14311779
  misc_feature (189)..(249): Pfam Name: RNA polymerase III RPC4 Pfam Description: RNA polymerase III RPC4
  misc_feature (52)..(249): Homolog of NCBI NO: 15242400 NR Description: hypothetical protein [Arabidopsis thaliana]
  misc_feature (55)..(249): Homolog of NCBI NO: 21740741 NR Description: OSJNBa0072K14.6 [Oryza sativa (japonica
  misc_feature (63)..(249): Homolog of NCBI NO: 7486060 NR Description: hypothetical protein F24A6.20 - Arabidopsis
  misc_feature (44)..(249): Homolog of NCBI NO: 15234965 NR Description: hypothetical protein [Arabidopsis thaliana]
MDPDQGTSKAWKPKFKPRNLKAVRAPKTEADDKRNEDSEVPRALSRRRHENPAKREPKVERKSSVEVAFSLGSSSSHSLRTYGTSKSIDSGTSSGSPSKYFANEQIRSIATEDQNDASNASARKIKREYKEPWDYENSYYPTTLPLRKPNSGDPEILDEKEFGEAATSVEYDENTVNSAAELEILESEEQRMFFFQIPTPLPMDKQSNKGKEKIGTSTVSGEATKSKNALEELPRGYMGKMLVYKSGAILS

SEQ ID NO: 59278 - DNA, 859 bp, Glycine max
  misc_feature (1)..(859): Ceres Seq. ID no. 15226220
aataacctaagaaaacctaaacccctcgttggtggtagcggctgtgacagactcagaggcggagcaaggagaatgggaaggtcgagaagaaagtacaagcaatcgagaaccaaggtccgtgtgggactccctaagaagaaccctaggcttttcaaaccctctttctccgttccacccaagctcttgcgaaccctcgccgaagagccccaatgggacgaccaaggcaccgttaacagcaactactcctccttcggcgttctctccgaccctaactccctcaccgagccttctcccgatcctcaaaccttcgattccggcagcgatctcgaagaagacgacttgaaatcagccctaggaaagaagcgaagggatgggagaagcgcgccgcctcagcctctgactgcaatgcaacggattcatattagtcgccttgtcgataaatacggaaatgattatcagagtatgttgatggatataaagctgaatccgatgcagcattcaattgcaactttgcagaagctatgcatgaggtatcatatataccaaaacaagaaccctctccttaaggccaaatgaagtgggagcttaattaattaatccattgacggaacagttgcacgtggaggcccaaatttttgtcacagtgaggatgtgtttctctaccatgtgtcatcgttgagaaattttgttaatgcttttgaatctatgaattatattatgtggatttttggttgtggtagatgaggcattctggacttctggtcttcctacacctgctgccaccaagattatgtagcatttttacatgcatgcacttttggaattctaaagtaattattataaaattgacaaatttatt

SEQ ID NO: 59279 - protein, 191 aa, Glycine max
  peptide (1)..(191): Ceres Seq. ID no. 15226221
  misc_feature (25)..(93): Homolog of NCBI NO: 25372996 NR Description: hypothetical protein F22D16.13 - Arabidopsis
  misc_feature (25)..(93): Homolog of NCBI NO: 18379024 NR Description: expressed protein [Arabidopsis thaliana]
  misc_feature (87)..(188): Homolog of NCBI NO: 18379024 NR Description: expressed protein [Arabidopsis thaliana]
NNLRKPKPLVGGSGCDRLRGGARRMGRSRRKYKQSRTKVRVGLPKKNPRLFKPSFSVPPKLLRTLAEEPQWDDQGTVNSNYSSFGVLSDPNSLTEPSPDPQTFDSGSDLEEDDLKSALGKKRRDGRSAPPQPLTAMQRIHISRLVDKYGNDYQSMLMDIKLNPMQHSIATLQKLCMRYHIYQNKNPLLKAK

SEQ ID NO: 59280 - protein, 167 aa, Glycine max
  peptide (1)..(167): Ceres Seq. ID no. 15226222
  misc_feature (1)..(69): Homolog of NCBI NO: 25372996 NR Description: hypothetical protein F22D16.13 - Arabidopsis
  misc_feature (1)..(69): Homolog of NCBI NO: 18379024 NR Description: expressed protein [Arabidopsis thaliana]
  misc_feature (63)..(164): Homolog of NCBI NO: 18379024 NR Description: expressed protein [Arabidopsis thaliana]
MGRSRRKYKQSRTKVRVGLPKKNPRLFKPSFSVPPKLLRTLAEEPQWDDQGTVNSNYSSFGVLSDPNSLTEPSPDPQTFDSGSDLEEDDLKSALGKKRRDGRSAPPQPLTAMQRIHISRLVDKYGNDYQSMLMDIKLNPMQHSIATLQKLCMRYHIYQNKNPLLKAK

SEQ ID NO: 59281 - DNA, 1224 bp, Glycine max
  misc_feature (1)..(1224): Ceres Seq. ID no. 15168413
aatgcccaagcctatgtgaagccaccaccatggcgatgaccaccacaacgacgtcgtctccaccatttctcttttcattcctttctccaaaaccctttcccccaaacccttcgctccctcttccccaattgcaaaaccgaacaccgctcagttccacccatcgcttcttctctgccatccccaaagcgaaacgcggcgtttcagggacccatttgtgcctcgcttctcgcgccaaagccaaacccaccccgtcttcggtggaacaagagagcgacgacaattttagaaaaagagtgcttcaaattgcgctgtgggttgcagaaggtgtctacattctatggctcttccttcttccttatgcccctggagatcctgtatgggccatcagttctgacacattgaactctcttgtgggtctttctctcaatttctttttaatattgcctttcatgaactttgttggaattcgtctgattgatgcgccagttcttcatcctatgtccgaaggactattcaattttgtgattggctggacgttcatgtttgcccctttgctgttcacagatcgcaacaatgatagatataaagggtctctagatgtactctggggcctgcaaatgttcctgacaaatacgtttctgatcccatacatggctatccgattgaatgatgctgatgatgagagtgttacaagaaaactttcacagtttggctcagtgatgacaaatggtgctccaattgttggagtgattggtgggagtgcatgcattgtatctctattgtgggctctttttggtcgaatggatgcaaattttgggggcatagcagatagatgggactacttggtgggttatcttggatcagaaaggctggcttatgctttcatatgggatatatgtctttacataattttccagccttggttgattggagacaacctccagaatgtccaggaaaacaaggttgttgtagtgaagtatcttagatatgtacccgtgattggcttaattgcgtatctattttgcttggaccctaaagaggtctgattattgtgtttggatgattagtttactttacacctttcagttaaaagttactatctcttgaacattttgaagttgaatttcacgttttgttggggggtaggggctcaaattacttgttggcctcaagtttaaacttttggtatgtaagtttgttaaatatttggagggatattttgtc

SEQ ID NO: 59282 - protein, 347 aa, Glycine max
  peptide (1)..(347): Ceres Seq. ID no. 15168414
  misc_feature (48)..(121): Homolog of NCBI NO: 7939568 NR Description: gene_id:K13N2.16~unknown protein [Arabidopsis
  misc_feature (10)..(159): Homolog of NCBI NO: 38567712 NR Description: B1358B12.10 [Oryza sativa (japonica
  misc_feature (158)..(339): Homolog of NCBI NO: 23043330 NR Description: hypothetical protein [Trichodesmium erythraeum
  misc_feature (177)..(346): Homolog of NCBI NO: 38567712 NR Description: B1358B12.10 [Oryza sativa (japonica
  misc_feature (208)..(340): Homolog of NCBI NO: 7939567 NR Description: gene_id:K13N2.15~unknown protein [Arabidopsis
  misc_feature (10)..(346): Homolog of NCBI NO: 38344973 NR Description: OSJNBa0072F16.18 [Oryza sativa (japonica
  misc_feature (48)..(340): Homolog of NCBI NO: 18404669 NR Description: expressed protein [Arabidopsis thaliana]
CPSLCEATTMAMTTTTTSSPPFLFSFLSPKPFPPNPSLPLPQLQNRTPLSSTHRFFSAIPKAKRGVSGTHLCLASRAKAKPTPSSVEQESDDNFRKRVLQIALWVAEGVYILWLFLLPYAPGDPVWAISSDTLNSLVGLSLNFFLILPFMNFVGIRLIDAPVLHPMSEGLFNFVIGWTFMFAPLLFTDRNNDRYKGSLDVLWGLQMFLTNTFLIPYMAIRLNDADDESVTRKLSQFGSVMTNGAPIVGVIGGSACIVSLLWALFGRMDANFGGIADRWDYLVGYLGSERLAYAFIWDICLYIIFQPWLIGDNLQNVQENKVVVVKYLRYVPVIGLIAYLFCLDPKEV

SEQ ID NO: 59283 - protein, 338 aa, Glycine max
  peptide (1)..(338): Ceres Seq. ID no. 15168415
  misc_feature (39)..(112): Homolog of NCBI NO: 7939568 NR Description: gene_id:K13N2.16~unknown protein [Arabidopsis
  misc_feature (1)..(150): Homolog of NCBI NO: 38567712 NR Description: B1358B12.10 [Oryza sativa (japonica
  misc_feature (149)..(330): Homolog of NCBI NO: 23043330 NR Description: hypothetical protein [Trichodesmium erythraeum
  misc_feature (168)..(337): Homolog of NCBI NO: 38567712 NR Description: B1358B12.10 [Oryza sativa (japonica
  misc_feature (199)..(331): Homolog of NCBI NO: 7939567 NR Description: gene_id:K13N2.15~unknown protein [Arabidopsis
  misc_feature (1)..(337): Homolog of NCBI NO: 38344973 NR Description: OSJNBa0072F16.18 [Oryza sativa (japonica
  misc_feature (39)..(331): Homolog of NCBI NO: 18404669 NR Description: expressed protein [Arabidopsis thaliana]
MAMTTTTTSSPPFLFSFLSPKPFPPNPSLPLPQLQNRTPLSSTHRFFSAIPKAKRGVSGTHLCLASRAKAKPTPSSVEQESDDNFRKRVLQIALWVAEGVYILWLFLLPYAPGDPVWAISSDTLNSLVGLSLNFFLILPFMNFVGIRLIDAPVLHPMSEGLFNFVIGWTFMFAPLLFTDRNNDRYKGSLDVLWGLQMFLTNTFLIPYMAIRLNDADDESVTRKLSQFGSVMTNGAPIVGVIGGSACIVSLLWALFGRMDANFGGIADRWDYLVGYLGSERLAYAFIWDICLYIIFQPWLIGDNLQNVQENKVVVVKYLRYVPVIGLIAYLFCLDPKEV

SEQ ID NO: 59284 - protein, 336 aa, Glycine max
  peptide (1)..(336): Ceres Seq. ID no. 15168416
  misc_feature (37)..(110): Homolog of NCBI NO: 7939568 NR Description: gene_id:K13N2.16~unknown protein [Arabidopsis
  misc_feature (1)..(148): Homolog of NCBI NO: 38567712 NR Description: B1358B12.10 [Oryza sativa (japonica
  misc_feature (147)..(328): Homolog of NCBI NO: 23043330 NR Description: hypothetical protein [Trichodesmium erythraeum
  misc_feature (166)..(335): Homolog of NCBI NO: 38567712 NR Description: B1358B12.10 [Oryza sativa (japonica
  misc_feature (197)..(329): Homolog of NCBI NO: 7939567 NR Description: gene_id:K13N2.15~unknown protein [Arabidopsis
  misc_feature (1)..(335): Homolog of NCBI NO: 38344973 NR Description: OSJNBa0072F16.18 [Oryza sativa (japonica
  misc_feature (37)..(329): Homolog of NCBI NO: 18404669 NR Description: expressed protein [Arabidopsis thaliana]
MTTTTTSSPPFLFSFLSPKPFPPNPSLPLPQLQNRTPLSSTHRFFSAIPKAKRGVSGTHLCLASRAKAKPTPSSVEQESDDNFRKRVLQIALWVAEGVYILWLFLLPYAPGDPVWAISSDTLNSLVGLSLNFFLILPFMNFVGIRLIDAPVLHPMSEGLFNFVIGWTFMFAPLLFTDRNNDRYKGSLDVLWGLQMFLTNTFLIPYMAIRLNDADDESVTRKLSQFGSVMTNGAPIVGVIGGSACIVSLLWALFGRMDANFGGIADRWDYLVGYLGSERLAYAFIWDICLYIIFQPWLIGDNLQNVQENKVVVVKYLRYVPVIGLIAYLFCLDPKEV

SEQ ID NO: 59285 - DNA, 2068 bp, Glycine max
  misc_feature (1)..(2068): Ceres Seq. ID no. 15225519
cgggccccccctcgagtcagctacgtaggcccccccccgagtagaatagaatggaaatggaaattactattcacgaaattaccactctcaaacaccaaaccaaatcaaaccttccctctccttctgttctaaaacattgtccctattctctctctgcaacattcattttccatcgccatcagtgccatgcaggaggctttggctatacaatgcatgtaggaggtttgaagaagtccaagtaacctggaagaagctttgacatacattcaggtaaaatgagagacagcacagtgcaaaattgtcaccaaaataatagcggagcagtagaagcaggtgcaccttcagtcgagaaagatcttgcttcttcagtaaaagcagctactgaagttcctccatcctcttttcagttctatgtctggtcagatgtgggaattaatcttcatgttgatttaaatctgtcctcatcagattggattaacaggtttagaaatgaggtttgcataagtgagaatatgcatcgaaacaaatcccgaagcctttggcaggatctgagcagcttaggagagaattatatgcaaggtaaatcttcctttttatggagtaaaaattcttgtcaaattgaggatcatgatggacaggccagatcttcctcaagctctaaacttacaaaagatggtgctacagagtcaggtcaacagaataaagatggcattcctttgagatgtgattcttttactccatgcaacatgactatagaagtgaaagataatatactggaaaatcattcaactgtctcagctgaactaaatgtaaatgtggtagacaatttaatgcaagagcaatcaactgtctcagctgaggttagttgtgctatagacacatctaagaaaattattgattcagatgctaccaatatgccattcatcaagtcactttgtgattctgttgtcaactcactgtcagatcctggcacactggaacttcaaaattcaaagcctgataatgaatgttctgagtattgtgctctgctaaatggttcttgctttgtgaaccctggtgtggtgtgtgctggagcttcattaagtagttctgtgggactacaaaattcagaagttataagttgtcataaatatgaatcagtttcactctgtgacaatgatggttccctggatttaagtgatccaaagagtacttctgacatggaacaggatagactagtcaaaactcggattatttttgaaactgacagtaacaatttcacatcagtaactgatgaatgggaggtggacaagattgttgatggaagggagagttcagaatgctcccagtttgatgatccacttaagaaatccagcctagactataataatcaggattctaaactggagctctgcaaaaagagaaaaaaccgagactctgagattcaatgttcaaatggtgaacctactactacaagagttttgcggagcatgaagaatactgctacaagagttttacgaagcatgaagaatgtgaagcttcctagataatccatgaggctaatctccaaggtgctttgacactttcttatggaattaaagtaaaactgtatacaatgaatataaaacctgaaaagtaaaagttattcaatttaattgcggcattcagtgtctcaaattggaagttacagtatttacctgatatttgaataggatgtacatttttwaaaaaaaaaaaaaaaaaaaaaaaaaaaaaaaaaaaaaaaaaaaaaaaaaaaaaaaaaaaaaaaaaaaaaaaaaaaaaaaaaaaaaaaaaaaaaaaaaaaaaaaaaattcccggccccccgggaaaccaaaaatttaaaaagggcccccccccggggggaacccccactttttttccccttaaagaagggaaaattccaagttggggaaaaaaagggaaaaaatttttcccggggaaaaattgtaaccccccaaaaatcccaaaaaaaaaaaaacccaaaaaaaaaaaggaaaaacccggggggcccaaaggagggaccaaaccccaataaatggggtggccccaacggcccctttccaagggg

SEQ ID NO: 59286 - protein, 417 aa, Glycine max
  peptide (1)..(417): Ceres Seq. ID no. 15225520
  misc_feature (41)..(272): Homolog of NCBI NO: 15231683 NR Description: expressed protein [Arabidopsis thaliana]
MRDSTVQNCHQNNSGAVEAGAPSVEKDLASSVKAATEVPPSSFQFYVWSDVGINLHVDLNLSSSDWINRFRNEVCISENMHRNKSRSLWQDLSSLGENYMQGKSSFLWSKNSCQIEDHDGQARSSSSSKLTKDGATESGQQNKDGIPLRCDSFTPCNMTIEVKDNILENHSTVSAELNVNVVDNLMQEQSTVSAEVSCAIDTSKKIIDSDATNMPFIKSLCDSVVNSLSDPGTLELQNSKPDNECSEYCALLNGSCFVNPGVVCAGASLSSSVGLQNSEVISCHKYESVSLCDNDGSLDLSDPKSTSDMEQDRLVKTRIIFETDSNNFTSVTDEWEVDKIVDGRESSECSQFDDPLKKSSLDYNNQDSKLELCKKRKNRDSEIQCSNGEPTTTRVLRSMKNTATRVLRSMKNVKLPR

SEQ ID NO: 59287 - protein, 338 aa, Glycine max
  peptide (1)..(338): Ceres Seq. ID no. 15225521
  misc_feature (1)..(193): Homolog of NCBI NO: 15231683 NR Description: expressed protein [Arabidopsis thaliana]
MHRNKSRSLWQDLSSLGENYMQGKSSFLWSKNSCQIEDHDGQARSSSSSKLTKDGATESGQQNKDGIPLRCDSFTPCNMTIEVKDNILENHSTVSAELNVNVVDNLMQEQSTVSAEVSCAIDTSKKIIDSDATNMPFIKSLCDSVVNSLSDPGTLELQNSKPDNECSEYCALLNGSCFVNPGVVCAGASLSSSVGLQNSEVISCHKYESVSLCDNDGSLDLSDPKSTSDMEQDRLVKTRIIFETDSNNFTSVTDEWEVDKIVDGRESSECSQFDDPLKKSSLDYNNQDSKLELCKKRKNRDSEIQCSNGEPTTTRVLRSMKNTATRVLRSMKNVKLPR

SEQ ID NO: 59288 - protein, 318 aa, Glycine max
  peptide (1)..(318): Ceres Seq. ID no. 15225522
  misc_feature (1)..(173): Homolog of NCBI NO: 15231683 NR Description: expressed protein [Arabidopsis thaliana]
MQGKSSFLWSKNSCQIEDHDGQARSSSSSKLTKDGATESGQQNKDGIPLRCDSFTPCNMTIEVKDNILENHSTVSAELNVNVVDNLMQEQSTVSAEVSCAIDTSKKIIDSDATNMPFIKSLCDSVVNSLSDPGTLELQNSKPDNECSEYCALLNGSCFVNPGVVCAGASLSSSVGLQNSEVISCHKYESVSLCDNDGSLDLSDPKSTSDMEQDRLVKTRIIFETDSNNFTSVTDEWEVDKIVDGRESSECSQFDDPLKKSSLDYNNQDSKLELCKKRKNRDSEIQCSNGEPTTTRVLRSMKNTATRVLRSMKNVKLPR

SEQ ID NO: 59289 - DNA, 1302 bp, Glycine max
  misc_feature (1)..(1302): Ceres Seq. ID no. 14315451
aagacagagactttggatgtttcttcgttgcagaagcagaggcacaccaatcccatttaatttatcgttcctcttctcctcttcactttccaaccacccattcattccttttcttcttgcactctgccctttgggtaagcatattctcattttgcttctctgctttcataacttgaggagtacccaatagttttattagacttctttgtttggttttaactttaatctttgtggtatgatttcattccttcttagttacactacggatcatcatcatcatttttaagatagttaccacaaaagtcgacaaatttagcatatagtatgatttgtgattaaataatgagtcctagtatagacatagactatttgctcatatatgaagagaggttaaataaaaaatgaaagtgtggagttgaagagtattttagttcaagaaaacatgtaaatcaaaatgaacatggacataaaactttggattgtctatttattgtcatagattttagataaaattatcttcttttttttttgtagttctaaactgatgagatgttatgatttgtgttctacaacctttaaagcagttaacttcttcaggcagttggtaatggggaagtccaaattatgcttggttgaattccattatttctcacaaagtataggtctatgtgggtgcaggaggagtttgtaacatggctgctctacctactgcggagcttagtgatgcaaatgcaacacatgtagcaagtggtgatgtgagggtgctgcatccagtgttcaaggtttatggccaggccacggcattctccggccccattgtcaccgtgaaggtgtttgaagacaacgtgttggtgagggagcttgttgagacgaaaggcgaaggaagagtattggttgttgatggaggaggaagcttgaggtgtgcattgatgggagggaatttggtacagattgcatataacatggggtgggctgggattgtggtgaatggttgcgttagagatgtggatgatatcaatgcgtgtaatattggcgtcagagccttggcttctcatccactcagatccaacaaaaagcgcactggtgaaaagaatgtccctgtttatgttggtggaacatttattcgtgaaggagaatggttgtatgcagataatgatggcatcctcgtatcaaaatttgagttgtcaaactaaaatagtttaccttcagttcaatattattgcaactttagacttttaagtcatgctttttctggtttagtttgtggggaagtgaataaaattttaagaatttcttgtgtgc

SEQ ID NO: 59290 - protein, 166 aa, Glycine max
  peptide (1)..(166): Ceres Seq. ID no. 14315452
  misc_feature (11)..(159): Pfam Name: Demethylmenaquinone methyltransferase Pfam Description: Demethylmenaquinone methyltransferase
  misc_feature (6)..(161): Homolog of NCBI NO: 37528580 NR Description: S-adenosylmethionine:2-demethylmenaquinone
  misc_feature (22)..(160): Homolog of NCBI NO: 23103535 NR Description: hypothetical protein [Azotobacter vinelandii]
  misc_feature (6)..(164): Homolog of NCBI NO: 22978085 NR Description: hypothetical protein [Ralstonia metallidurans]
  misc_feature (1)..(164): Homolog of NCBI NO: 22982141 NR Description: hypothetical protein [Burkholderia fungorum]
  misc_feature (4)..(164): Homolog of NCBI NO: 17546073 NR Description: PROBABLE
  misc_feature (1)..(165): Homolog of NCBI NO: 15232963 NR Description: dimethylmenaquinone methyltransferase family
  misc_feature (1)..(165): Homolog of NCBI NO: 21537415 NR Description: S-adenosylmethionine:2-demethylmenaquinone
  misc_feature (1)..(165): Homolog of NCBI NO: 15237348 NR Description: dimethylmenaquinone methyltransferase family
  misc_feature (1)..(165): Homolog of NCBI NO: 34910724 NR Description: S-adenosylmethionine:2-demethylmenaquinone
  misc_feature (1)..(165): Homolog of NCBI NO: 15241161 NR Description: dimethylmenaquinone methyltransferase family
MAALPTAELSDANATHVASGDVRVLHPVFKVYGQATAFSGPIVTVKVFEDNVLVRELVETKGEGRVLVVDGGGSLRCALMGGNLVQIAYNMGWAGIVVNGCVRDVDDINACNIGVRALASHPLRSNKKRTGEKNVPVYVGGTFIREGEWLYADNDGILVSKFELSN

SEQ ID NO: 59291 - protein, 87 aa, Glycine max
  peptide (1)..(87): Ceres Seq. ID no. 14315453
  misc_feature (1)..(80): Pfam Name: Demethylmenaquinone methyltransferase Pfam Description: Demethylmenaquinone methyltransferase
  misc_feature (1)..(82): Homolog of NCBI NO: 37528580 NR Description: S-adenosylmethionine:2-demethylmenaquinone
  misc_feature (1)..(81): Homolog of NCBI NO: 23103535 NR Description: hypothetical protein [Azotobacter vinelandii]
  misc_feature (1)..(85): Homolog of NCBI NO: 22978085 NR Description: hypothetical protein [Ralstonia metallidurans]
  misc_feature (1)..(85): Homolog of NCBI NO: 22982141 NR Description: hypothetical protein [Burkholderia fungorum]
  misc_feature (1)..(85): Homolog of NCBI NO: 17546073 NR Description: PROBABLE
  misc_feature (1)..(86): Homolog of NCBI NO: 15232963 NR Description: dimethylmenaquinone methyltransferase family
  misc_feature (1)..(86): Homolog of NCBI NO: 21537415 NR Description: S-adenosylmethionine:2-demethylmenaquinone
  misc_feature (1)..(86): Homolog of NCBI NO: 15237348 NR Description: dimethylmenaquinone methyltransferase family
  misc_feature (1)..(86): Homolog of NCBI NO: 34910724 NR Description: S-adenosylmethionine:2-demethylmenaquinone
  misc_feature (1)..(86): Homolog of NCBI NO: 15241161 NR Description: dimethylmenaquinone methyltransferase family
MGGNLVQIAYNMGWAGIVVNGCVRDVDDINACNIGVRALASHPLRSNKKRTGEKNVPVYVGGTFIREGEWLYADNDGILVSKFELSN

SEQ ID NO: 59292 - protein, 83 aa, Glycine max
  peptide (1)..(83): Ceres Seq. ID no. 14315454
MVALEMWMISMRVILASEPWLLIHSDPTKSALVKRMSLFMLVEHLFVKENGCMQIMMASSYQNLSCQTKIVYLQFNIIATLDF

SEQ ID NO: 59293 - DNA, 937 bp, Glycine max
  misc_feature (1)..(937): Ceres Seq. ID no. 15170313
caattctcacaagctattacatatatcagaatcattaaagataagattatattgctaagaagaaaaaatatgaaggttgtctacttgcttgttgccctcttggctttgacatcaactgttgtctctgcctatgaccctagtcctctgcaagatttttgtgtggcagccaaagaaaaagatggtgtatttgtgaacgggaaattctgcaaggaccccaagcttgtcaaagcagaagatttcttcagacatgtggaacctgggaaaactgacaacccactaggttcaaacgtgactcaggtgtttgttgatcaactaccgggactaaacacgctcggcataggtttggctcgcatagattttgctccaaagggtttgaacgctccccacactcaccctcgcggcactgagatccttatagtccttgagggtactctttatgttggatttgtgacttccaatcaagatggaaatcgtctcttcaccaaagtgctgaacaagggtgatgtgtttgtgttcccaattggtctcattcatttccaattgaatgtgggatatggcaatgctgttgccattgctggtcttagcagtcaaaatccaggagctatcactattgcaaatgctttgtttaaagctaatccacctatttcttctgaggttctcaccaaagctttccaggtggacaagagcataattgattatcttcaaaagcaatcttggtacgacaacaataactaatttgggagaatggacgatcatttcgcactagctagttattggatataattgaccactttatggtttcaatcaccccatacaatagacctaataaataaaatgtatgtgggttatttttatatttcatatttgttcttttggagtttgattaatttggtttaatacactgtttgagtttaataaaagaacctgttcttctttg

SEQ ID NO: 59294 - protein, 244 aa, Glycine max
  peptide (1)..(244): Ceres Seq. ID no. 15170314
  misc_feature (81)..(232): Pfam Name: Cupin Pfam Description: Cupin
  misc_feature (29)..(235): Homolog of NCBI NO: 15241638 NR Description: germin-like protein, putative [Arabidopsis
  misc_feature (29)..(235): Homolog of NCBI NO: 15241660 NR Description: germin-like protein, putative [Arabidopsis
  misc_feature (29)..(235): Homolog of NCBI NO: 15241653 NR Description: germin-like protein, putative [Arabidopsis
  misc_feature (24)..(235): Homolog of NCBI NO: 2129594 NR Description: germin type 2 - Arabidopsis thaliana
  misc_feature (24)..(235): Homolog of NCBI NO: 15241640 NR Description: germin-like protein (AtGER2) [Arabidopsis
  misc_feature (24)..(235): Homolog of NCBI NO: 22327459 NR Description: germin-like protein (GLP2a) (GLP5A) [Arabidopsis
  misc_feature (24)..(235): Homolog of NCBI NO: 15241662 NR Description: germin-like protein (AtGER2) [Arabidopsis
  misc_feature (33)..(243): Homolog of NCBI NO: 15230587 NR Description: germin-like protein, putative [Arabidopsis
  misc_feature (50)..(243): Homolog of NCBI NO: 6689038 NR Description: germin-like protein [Pisum sativum]
  misc_feature (50)..(243): Homolog of NCBI NO: 6689036 NR Description: germin-like protein [Pisum sativum]
QFSQAITYIRIIKDKIILLRRKNMKVVYLLVALLALTSTVVSAYDPSPLQDFCVAAKEKDGVFVNGKFCKDPKLVKAEDFFRHVEPGKTDNPLGSNVTQVFVDQLPGLNTLGIGLARIDFAPKGLNAPHTHPRGTEILIVLEGTLYVGFVTSNQDGNRLFTKVLNKGDVFVFPIGLIHFQLNVGYGNAVAIAGLSSQNPGAITIANALFKANPPISSEVLTKAFQVDKSIIDYLQKQSWYDNNN

SEQ ID NO: 59295 - protein, 221 aa, Glycine max
  peptide (1)..(221): Ceres Seq. ID no. 15170315
  misc_feature (58)..(209): Pfam Name: Cupin Pfam Description: Cupin
  misc_feature (6)..(212): Homolog of NCBI NO: 15241638 NR Description: germin-like protein, putative [Arabidopsis
  misc_feature (6)..(212): Homolog of NCBI NO: 15241660 NR Description: germin-like protein, putative [Arabidopsis
  misc_feature (6)..(212): Homolog of NCBI NO: 15241653 NR Description: germin-like protein, putative [Arabidopsis
  misc_feature (1)..(212): Homolog of NCBI NO: 2129594 NR Description: germin type 2 - Arabidopsis thaliana
  misc_feature (1)..(212): Homolog of NCBI NO: 15241640 NR Description: germin-like protein (AtGER2) [Arabidopsis
  misc_feature (1)..(212): Homolog of NCBI NO: 22327459 NR Description: germin-like protein (GLP2a) (GLP5A) [Arabidopsis
  misc_feature (1)..(212): Homolog of NCBI NO: 15241662 NR Description: germin-like protein (AtGER2) [Arabidopsis
  misc_feature (10)..(220): Homolog of NCBI NO: 15230587 NR Description: germin-like protein, putative [Arabidopsis
  misc_feature (27)..(220): Homolog of NCBI NO: 6689038 NR Description: germin-like protein [Pisum sativum]
  misc_feature (27)..(220): Homolog of NCBI NO: 6689036 NR Description: germin-like protein [Pisum sativum]
MKVVYLLVALLALTSTVVSAYDPSPLQDFCVAAKEKDGVFVNGKFCKDPKLVKAEDFFRHVEPGKTDNPLGSNVTQVFVDQLPGLNTLGIGLARIDFAPKGLNAPHTHPRGTEILIVLEGTLYVGFVTSNQDGNRLFTKVLNKGDVFVFPIGLIHFQLNVGYGNAVAIAGLSSQNPGAITIANALFKANPPISSEVLTKAFQVDKSIIDYLQKQSWYDNNN

SEQ ID NO: 59296 - DNA, 1276 bp, Glycine max
  misc_feature (1)..(1276): Ceres Seq. ID no. 13638746
aagccacggtcaagtcaagaaaagtggggcagaagcaccacttaacactctggtatagtattacactagtcgctagatcagtgatggcctctgcctcttgccttggcttagtagtgctcgtggcaatggcctccgcggcgtcggcgcagctgtcgtcgacgttctacgacacgtcgtgccccaacgcgctggccaccatcaaggccggcgtgacggccgccctgaacaccgaaacccgcatgggggcgtcgctggtccggctgcacttccacgactgcttcgttgatggatgtgacgggtctgttctgttggcggacacggggagcttcatcggcgagcagggcgcagccccgaacaacaattccattcgtggcatgaacgtcatcgacaacatcaagacccaggtggaggctgtgtgcaagcagaccgtctcctgctccgacatcctcgccgtcgccgcccgtgactccgtcgtcgcgctgggtgggccgacatggacagttcttctggggaggagggactccaccactgcaagcaagaccaacgcggaaaatgacctgccacctcctaccttcgacctccaaaacctcaccaccttgttcggcaacaagcagctcagcatggcagacatggttgccctctcaggcgcccacacgatcgggcaatcgcagtgccggtttttcagggacaggatctacaacgagaccaacatcaacaccaccttcgcgacatctctcagggccaactgcccccagtccggcggcgacagcagcctggcgccgctggacacagcgacgcccaatgcgttcgacaactcctactacaccaacctcatgtcccagaaggggctgcttcactcggaccaggtgctgttcaatggcggcggcgccgacaacacggtcatgagcttcgcgaccagcgcggccacgttcaacagcgccttcacgacggccatgataaacatgggaaacatcgcgccaaagacggggacgcaggggcagatcaggctcgtctgctccaaggtcaactcgtaatgtccgcgccgacgctctgctgctgcgcatgaatgaactgaataaggtctcggataccagtaccagaatctacggagtagcgtggcctgtggttacgtatgtgtgttggttgaaaattgtacctgtgtatgtatgtccacatgtgtaacgaatttctcctgcaaaggcatggaggattcctttcctttatatcagaatgtcatactgcgagatgataatatctgccactttaaccctctccg

SEQ ID NO: 59297 - protein, 343 aa, Glycine max
  peptide (1)..(343): Ceres Seq. ID no. 13638747
  misc_feature (66)..(306): Pfam Name: Peroxidase Pfam Description: Peroxidase
  misc_feature (28)..(343): Homolog of NCBI NO: 100694 NR Description: peroxidase (EC 1.11.1.7) precursor - rice
  misc_feature (28)..(343): Homolog of NCBI NO: 34393251 NR Description: peroxidase [Oryza sativa (japonica
  misc_feature (28)..(342): Homolog of NCBI NO: 2117619 NR Description: peroxidase (EC 1.11.1.7) 4 precursor - wheat
  misc_feature (28)..(343): Homolog of NCBI NO: 33146423 NR Description: peroxidase POC1 [Oryza sativa (japonica
  misc_feature (28)..(343): Homolog of NCBI NO: 8901180 NR Description: peroxidase POC1 [Oryza sativa]
  misc_feature (31)..(342): Homolog of NCBI NO: 2429288 NR Description: peroxidase [Oryza sativa]
  misc_feature (31)..(342): Homolog of NCBI NO: 34393250 NR Description: peroxidase [Oryza sativa (japonica
  misc_feature (28)..(342): Homolog of NCBI NO: 2429292 NR Description: peroxidase [Oryza sativa]
  misc_feature (28)..(342): Homolog of NCBI NO: 585662 NR Description: Peroxidase 2 precursor
  misc_feature (28)..(343): Homolog of NCBI NO: 2117618 NR Description: peroxidase (EC 1.11.1.7) 1 precursor - wheat
ATVKSRKVGQKHHLTLWYSITLVARSVMASASCLGLVVLVAMASAASAQLSSTFYDTSCPNALATIKAGVTAALNTETRMGASLVRLHFHDCFVDGCDGSVLLADTGSFIGEQGAAPNNNSIRGMNVIDNIKTQVEAVCKQTVSCSDILAVAARDSVVALGGPTWTVLLGRRDSTTASKTNAENDLPPPTFDLQNLTTLFGNKQLSMADMVALSGAHTIGQSQCRFFRDRIYNETNINTTFATSLRANCPQSGGDSSLAPLDTATPNAFDNSYYTNLMSQKGLLHSDQVLFNGGGADNTVMSFATSAATFNSAFTTAMINMGNIAPKTGTQGQIRLVCSKVNS

SEQ ID NO: 59298 - protein, 316 aa, Glycine max
  peptide (1)..(316): Ceres Seq. ID no. 13638748
  misc_feature (39)..(279): Pfam Name: Peroxidase Pfam Description: Peroxidase
  misc_feature (1)..(316): Homolog of NCBI NO: 100694 NR Description: peroxidase (EC 1.11.1.7) precursor - rice
  misc_feature (1)..(316): Homolog of NCBI NO: 34393251 NR Description: peroxidase [Oryza sativa (japonica
  misc_feature (1)..(315): Homolog of NCBI NO: 2117619 NR Description: peroxidase (EC 1.11.1.7) 4 precursor - wheat
  misc_feature (1)..(316): Homolog of NCBI NO: 33146423 NR Description: peroxidase POC1 [Oryza sativa (japonica
  misc_feature (1)..(316): Homolog of NCBI NO: 8901180 NR Description: peroxidase POC1 [Oryza sativa]
  misc_feature (4)..(315): Homolog of NCBI NO: 2429288 NR Description: peroxidase [Oryza sativa]
  misc_feature (4)..(315): Homolog of NCBI NO: 34393250 NR Description: peroxidase [Oryza sativa (japonica
  misc_feature (1)..(315): Homolog of NCBI NO: 2429292 NR Description: peroxidase [Oryza sativa]
  misc_feature (1)..(315): Homolog of NCBI NO: 585662 NR Description: Peroxidase 2 precursor
  misc_feature (1)..(316): Homolog of NCBI NO: 2117618 NR Description: peroxidase (EC 1.11.1.7) 1 precursor - wheat
MASASCLGLVVLVAMASAASAQLSSTFYDTSCPNALATIKAGVTAALNTETRMGASLVRLHFHDCFVDGCDGSVLLADTGSFIGEQGAAPNNNSIRGMNVIDNIKTQVEAVCKQTVSCSDILAVAARDSVVALGGPTWTVLLGRRDSTTASKTNAENDLPPPTFDLQNLTTLFGNKQLSMADMVALSGAHTIGQSQCRFFRDRIYNETNINTTFATSLRANCPQSGGDSSLAPLDTATPNAFDNSYYTNLMSQKGLLHSDQVLFNGGGADNTVMSFATSAATFNSAFTTAMINMGNIAPKTGTQGQIRLVCSKVNS

SEQ ID NO: 59299 - protein, 302 aa, Glycine max
  peptide (1)..(302): Ceres Seq. ID no. 13638749
  misc_feature (25)..(265): Pfam Name: Peroxidase Pfam Description: Peroxidase
  misc_feature (1)..(302): Homolog of NCBI NO: 100694 NR Description: peroxidase (EC 1.11.1.7) precursor - rice
  misc_feature (1)..(302): Homolog of NCBI NO: 34393251 NR Description: peroxidase [Oryza sativa (japonica
  misc_feature (1)..(301): Homolog of NCBI NO: 2117619 NR Description: peroxidase (EC 1.11.1.7) 4 precursor - wheat
  misc_feature (1)..(302): Homolog of NCBI NO: 33146423 NR Description: peroxidase POC1 [Oryza sativa (japonica
  misc_feature (1)..(302): Homolog of NCBI NO: 8901180 NR Description: peroxidase POC1 [Oryza sativa]
  misc_feature (1)..(301): Homolog of NCBI NO: 2429288 NR Description: peroxidase [Oryza sativa]
  misc_feature (1)..(301): Homolog of NCBI NO: 34393250 NR Description: peroxidase [Oryza sativa (japonica
  misc_feature (1)..(301): Homolog of NCBI NO: 2429292 NR Description: peroxidase [Oryza sativa]
  misc_feature (1)..(301): Homolog of NCBI NO: 585662 NR Description: Peroxidase 2 precursor
  misc_feature (1)..(302): Homolog of NCBI NO: 2117618 NR Description: peroxidase (EC 1.11.1.7) 1 precursor - wheat
MASAASAQLSSTFYDTSCPNALATIKAGVTAALNTETRMGASLVRLHFHDCFVDGCDGSVLLADTGSFIGEQGAAPNNNSIRGMNVIDNIKTQVEAVCKQTVSCSDILAVAARDSVVALGGPTWTVLLGRRDSTTASKTNAENDLPPPTFDLQNLTTLFGNKQLSMADMVALSGAHTIGQSQCRFFRDRIYNETNINTTFATSLRANCPQSGGDSSLAPLDTATPNAFDNSYYTNLMSQKGLLHSDQVLFNGGGADNTVMSFATSAATFNSAFTTAMINMGNIAPKTGTQGQIRLVCSKVNS

SEQ ID NO: 59300 - DNA, 675 bp, Glycine max
  misc_feature (1)..(675): Ceres Seq. ID no. 12609226
attttgaagtaaaactagttgaaaggttaagaagaaaaaaaaaaggacagagaaagaatggcagaaacggagcaaaaggaggtagaagaaaagggatcgttgatctcaggcttgttggataaagccaaaggtttctttgccgagaagcttgctaatattccgacgccggaagccaccgtggacgacgtagacttcaaaggtgtgactcgtcaaggagttgattatcacgccaaggtctccgtcaagaatccttaccctcaacacatccctatttgccagatctcttacatcctcaagagtgacacaaggatgatagcgtctggtacaataccggatccgggttcgttgatcgcgaacggttcgacggttctggacgtaccggtgaaggtgccttacagcatagcggtgagtttgatgaaggacatgtgtttggactgggacattgactatcaactcgacattggactgaccatcgacattcctattgttggtgacattaccattcctgtctctactcagggtgagatgaagctcccttcccttcgcgacttcttttaatcatctctataagttataatctgattttcaataagtacgatcttactcggatgtttcagttgtggactcttgttttgtcggctttgttgttggattaataaggtcttttatttggtt

SEQ ID NO: 59301 - protein, 166 aa, Glycine max
  peptide (1)..(166): Ceres Seq. ID no. 12609227
  misc_feature (17)..(166): Pfam Name: Late embryogenesis abundant protein Pfam Description: Late embryogenesis abundant protein
  misc_feature (19)..(166): Homolog of NCBI NO: 7489027 NR Description: late embryogenesis (Lea)-like protein - tomato
  misc_feature (16)..(166): Homolog of NCBI NO: 1170745 NR Description: Late embryogenesis abundant protein Lea14-A
  misc_feature (1)..(164): Homolog of NCBI NO: 34912834 NR Description: putative embryogenesis-abundant protein
  misc_feature (16)..(166): Homolog of NCBI NO: 1170746 NR Description: Desiccation protectant protein Lea14 homolog
  misc_feature (1)..(166): Homolog of NCBI NO: 3789986 NR Description: desiccation protein [Brassica napus]
  misc_feature (1)..(166): Homolog of NCBI NO: 21555248 NR Description: putative desiccation related protein [Arabidopsis
  misc_feature (1)..(166): Homolog of NCBI NO: 15225930 NR Description: putative desiccation related protein
MAETEQKEVEEKGSLISGLLDKAKGFFAEKLANIPTPEATVDDVDFKGVTRQGVDYHAKVSVKNPYPQHIPICQISYILKSDTRMIASGTIPDPGSLIANGSTVLDVPVKVPYSIAVSLMKDMCLDWDIDYQLDIGLTIDIPIVGDITIPVSTQGEMKLPSLRDFF

SEQ ID NO: 59302 - DNA, 1037 bp, Glycine max
  misc_feature (1)..(1037): Ceres Seq. ID no. 15172778
gtctatattcattttgccgagtgcgagagaaagagtcaggtgagtgagagaaaatggagaatgggctaagcgagatcggaagcacgaagatgttcgatggctacaacaaaagatacaaacacaacagtgagacacttggctgttccatgactttctccatctacttccctccttcctcccacagatcccctgttctttactggctttctgggctcacctgtacagacgagaacttcatcatcaagtccggagctcaacgtgctgcttctactcacggcattgctctcgttgttccagatacttctccaagaggacttaatattgaaggtgaagcagacagttacgacttcggtgtaggagctggattctacctcaatgctactcaggaaaagtggaagaactggcgtatgtatgactatgttgtcaaagagctgcctaaactcctgagtgagaattttcctcagcttgacacaacaagagcttctatctctggacattccatgggtggacatggtgctcttactatttacctcaagaacctcgacaagtataagtctgtctctgcgtttgcaccaatcgccaatcccataaattgcccatggggacagaaagcattcactaattatctaggtgacaacaaggctgcttgggaggaatacgatgccacttgtcttatttcaaagttcaacaatctctctgccacaattctaattgatcagggagaaaacgaccagttctaccctgatcagttactgcccaacaagtttgaagaggcgtgcaagaaagtgaatgcgccgctcttagtgcgtctgcagccaggatacgaccactcctactactttattgcaactttcatcgaagaccacatcagtcaccatgttcaagcccttgagttgtagctcagctaggcatcatccagctttgcctttgtccaaatattagtagcaagtgaacttgtaacgttttgtgttcaataactgctctgtgtggtgtgtttgtctacaataataaaataaattaaatctccaatttattgt

SEQ ID NO: 59303 - protein, 281 aa, Glycine max
  peptide (1)..(281): Ceres Seq. ID no. 15172779
  misc_feature (5)..(279): Homolog of NCBI NO: 33413400 NR Description: esterase D/formylglutathione hydrolase
  misc_feature (5)..(279): Homolog of NCBI NO: 9857260 NR Description: esterase D [Sus scrofa]
  misc_feature (5)..(279): Homolog of NCBI NO: 13937355 NR Description: esterase 10; esterase D [Mus musculus]
  misc_feature (5)..(279): Homolog of NCBI NO: 28436838 NR Description: Similar to esterase 10 [Mus musculus]
  misc_feature (5)..(279): Homolog of NCBI NO: 12846304 NR Description: unnamed protein product [Mus musculus]
  misc_feature (1)..(279): Homolog of NCBI NO: 34874491 NR Description: similar to esterase 10; esterase D [Rattus
  misc_feature (5)..(86): Homolog of NCBI NO: 20161330 NR Description: putative esterase D [Oryza sativa (japonica
  misc_feature (61)..(280): Homolog of NCBI NO: 20161330 NR Description: putative esterase D [Oryza sativa (japonica
  misc_feature (13)..(281): Homolog of NCBI NO: 21593226 NR Description: putative esterase D [Arabidopsis thaliana]
  misc_feature (1)..(281): Homolog of NCBI NO: 15227376 NR Description: esterase D -related [Arabidopsis thaliana]
MENGLSEIGSTKMFDGYNKRYKHNSETLGCSMTFSIYFPPSSHRSPVLYWLSGLTCTDENFIIKSGAQRAASTHGIALVVPDTSPRGLNIEGEADSYDFGVGAGFYLNATQEKWKNWRMYDYVVKELPKLLSENFPQLDTTRASISGHSMGGHGALTIYLKNLDKYKSVSAFAPIANPINCPWGQKAFTNYLGDNKAAWEEYDATCLISKFNNLSATILIDQGENDQFYPDQLLPNKFEEACKKVNAPLLVRLQPGYDHSYYFIATFIEDHISHHVQALEL

SEQ ID NO: 59304 - protein, 269 aa, Glycine max
  peptide (1)..(269): Ceres Seq. ID no. 15172780
  misc_feature (1)..(267): Homolog of NCBI NO: 33413400 NR Description: esterase D/formylglutathione hydrolase
  misc_feature (1)..(267): Homolog of NCBI NO: 9857260 NR Description: esterase D [Sus scrofa]
  misc_feature (1)..(267): Homolog of NCBI NO: 13937355 NR Description: esterase 10; esterase D [Mus musculus]
  misc_feature (1)..(267): Homolog of NCBI NO: 28436838 NR Description: Similar to esterase 10 [Mus musculus]
  misc_feature (1)..(267): Homolog of NCBI NO: 12846304 NR Description: unnamed protein product [Mus musculus]
  misc_feature (1)..(267): Homolog of NCBI NO: 34874491 NR Description: similar to esterase 10; esterase D [Rattus
  misc_feature (1)..(74): Homolog of NCBI NO: 20161330 NR Description: putative esterase D [Oryza sativa (japonica
  misc_feature (49)..(268): Homolog of NCBI NO: 20161330 NR Description: putative esterase D [Oryza sativa (japonica
  misc_feature (1)..(269): Homolog of NCBI NO: 21593226 NR Description: putative esterase D [Arabidopsis thaliana]
  misc_feature (1)..(269): Homolog of NCBI NO: 15227376 NR Description: esterase D -related [Arabidopsis thaliana]
MFDGYNKRYKHNSETLGCSMTFSIYFPPSSHRSPVLYWLSGLTCTDENFIIKSGAQRAASTHGIALVVPDTSPRGLNIEGEADSYDFGVGAGFYLNATQEKWKNWRMYDYVVKELPKLLSENFPQLDTTRASISGHSMGGHGALTIYLKNLDKYKSVSAFAPIANPINCPWGQKAFTNYLGDNKAAWEEYDATCLISKFNNLSATILIDQGENDQFYPDQLLPNKFEEACKKVNAPLLVRLQPGYDHSYYFIATFIEDHISHHVQALEL

SEQ ID NO: 59305 - protein, 250 aa, Glycine max
  peptide (1)..(250): Ceres Seq. ID no. 15172781
  misc_feature (1)..(248): Homolog of NCBI NO: 33413400 NR Description: esterase D/formylglutathione hydrolase
  misc_feature (1)..(248): Homolog of NCBI NO: 9857260 NR Description: esterase D [Sus scrofa]
  misc_feature (1)..(248): Homolog of NCBI NO: 28436838 NR Description: Similar to esterase 10 [Mus musculus]
  misc_feature (1)..(248): Homolog of NCBI NO: 13937355 NR Description: esterase 10; esterase D [Mus musculus]
  misc_feature (1)..(248): Homolog of NCBI NO: 12846304 NR Description: unnamed protein product [Mus musculus]
  misc_feature (1)..(248): Homolog of NCBI NO: 34874491 NR Description: similar to esterase 10; esterase D [Rattus
  misc_feature (1)..(55): Homolog of NCBI NO: 20161330 NR Description: putative esterase D [Oryza sativa (japonica
  misc_feature (30)..(249): Homolog of NCBI NO: 20161330 NR Description: putative esterase D [Oryza sativa (japonica
  misc_feature (1)..(250): Homolog of NCBI NO: 21593226 NR Description: putative esterase D [Arabidopsis thaliana]
  misc_feature (1)..(250): Homolog of NCBI NO: 15227376 NR Description: esterase D -related [Arabidopsis thaliana]
MTFSIYFPPSSHRSPVLYWLSGLTCTDENFIIKSGAQRAASTHGIALVVPDTSPRGLNIEGEADSYDFGVGAGFYLNATQEKWKNWRMYDYVVKELPKLLSENFPQLDTTRASISGHSMGGHGALTIYLKNLDKYKSVSAFAPIANPINCPWGQKAFTNYLGDNKAAWEEYDATCLISKFNNLSATILIDQGENDQFYPDQLLPNKFEEACKKVNAPLLVRLQPGYDHSYYFIATFIEDHISHHVQALEL

SEQ ID NO: 59306 - DNA, 745 bp, Glycine max
  misc_feature (1)..(745): Ceres Seq. ID no. 13595804
gagcccattggtcaggtcaggtcttcccacgcggaaggacgaggaaggttcacgaatcccctcctcacttcgcccctccccctctcctatttcttctctccgggccccgggccaaaattccatcctaagttccatcgaagagggcggcaaggggcgatccggatagcgcaagagcgaccatggcctacgtcgagagaggtgttgtgaaaggcaaacggacaatctggagactaagcataatccccgacttctttaaggctattgtgaacttcatcagaatgttcttcctcacaatgttttctatcgagaaaacagacagctataagaaaggatatggtagtggtaagaattgggatggtggacctggtgggggaggtcctggtgggggtccatatggtggtgggggcggcggtggaggtggccctcgcggtcctcgcacactatctgacctccgatcaaacgatcagagttccctccctgcttgtggatcctgctgcggatgacatcttaacaaaagaacaacatattataatgacagaaaaacttccgtatttcatttcagcagagcaaaatcattgtgatgccgtgaagagtctagcatgtccagtatatattctgtagcttgtttctgatgtgatttgcatactgtattcatcatcgctttgccatgctgaattgtcctggatggagtcaaaatcttatccttaatactggcttcctgttgtgcaatgtgaatttactatgt

SEQ ID NO: 59307 - protein, 107 aa, Glycine max
  peptide (1)..(107): Ceres Seq. ID no. 13595805
  misc_feature (43)..(81): Homolog of NCBI NO: 15222291 NR Description: glycine-rich protein [Arabidopsis thaliana]
  misc_feature (1)..(103): Homolog of NCBI NO: 28571165 NR Description: Selenoprotein G CG1844-PA [Drosophila
  misc_feature (1)..(103): Homolog of NCBI NO: 16767882 NR Description: GH03581p [Drosophila melanogaster]
  misc_feature (1)..(107): Homolog of NCBI NO: 24641445 NR Description: CG1840-PA [Drosophila melanogaster]
  misc_feature (42)..(101): Homolog of NCBI NO: 7486876 NR Description: hypothetical protein T12G13.70 - Arabidopsis
  misc_feature (1)..(107): Homolog of NCBI NO: 22328481 NR Description: glycine-rich protein [Arabidopsis thaliana]
  misc_feature (1)..(97): Homolog of NCBI NO: 34902142 NR Description: hypothetical protein [Oryza sativa (japonica
MAYVERGVVKGKRTIWRLSIIPDFFKAIVNFIRMFFLTMFSIEKTDSYKKGYGSGKNWDGGPGGGGPGGGPYGGGGGGGGGPRGPRTLSDLRSNDQSSLPACGSCCG

SEQ ID NO: 59308 - protein, 95 aa, Glycine max
  peptide (1)..(95): Ceres Seq. ID no. 13595806
MVVVRIGMVDLVGEVLVGVHMVVGAAVEVALAVLAHYLTSDQTIRVPSLLVDPAADDILTKEQHIIMTEKLPYFISAEQNHCDAVKSLACPVYIL

SEQ ID NO: 59309 - protein, 88 aa, Glycine max
  peptide (1)..(88): Ceres Seq. ID no. 13595807
MVDLVGEVLVGVHMVVGAAVEVALAVLAHYLTSDQTIRVPSLLVDPAADDILTKEQHIIMTEKLPYFISAEQNHCDAVKSLACPVYIL

SEQ ID NO: 59310 - DNA, 944 bp, Glycine max
  misc_feature (1)..(944): Ceres Seq. ID no. 13638654
acagattggcagattcccttttcgccttcccctgagcccgatcgagcaagccaatggagaagcaagccgacaaggccgcggcgccggtcgacgacggcatccacgaggagtcgccggcctccgcccagaacgggaggcccggatccgagccggcggccgcacccgaggtggaggtgcagctcttccggcggggccgggggccggtggccgtgttccggtcacccctgggcgggtacacgcaggaccagctggaggtgggggacatcctggagaagcacggcctcaagtgcgtcttcgccttcgacgccgcctcccgcgcacgcggcgtcgccatccgattcaacccccgcaacggccgctccctcctcccctacgccgccgactccaccatcttcctcgacggcgagcccaaggatcctttgctgaagcccatcaccaaggtgatgctcactgtctgcgccatgacagtggtagctgcggtgatactgaaggaggcgaagatgcccgagtggcttaagggaaccaagctaggcaacctgaaattcccaccgtgggtgctggcttgcatggtcattgtgttcatgaggctccggaagagaaccagggatgtcatgaagaagattggctggtcctcctgagaaggttactaatggcaagcacacttttggcccctccttccagtttgccgtcaatgttggagatgtactgggcagtgacatactacatgtaaatgttcagaacaaatgcatcttatagatcacttatatttgaccttatgtttagcatatacacgacgcggtttgccagtgtggcatttttgcttgtagcaagtgtgcatgaataaatgtagccgaacaaactggtgtgcactctgtttctgtgaagattttgttcactgacccttgatggtgctttaacgagaaatttaactgctaaattatttc

SEQ ID NO: 59311 - protein, 194 aa, Glycine max
  peptide (1)..(194): Ceres Seq. ID no. 13638655
  misc_feature (29)..(126): Homolog of NCBI NO: 34906292 NR Description: unnamed protein product [Oryza sativa (japonica
  misc_feature (2)..(192): Homolog of NCBI NO: 25373323 NR Description: hypothetical protein F14O23.16 [imported] -
  misc_feature (1)..(192): Homolog of NCBI NO: 18409911 NR Description: expressed protein [Arabidopsis thaliana]
  misc_feature (1)..(194): Homolog of NCBI NO: 34910596 NR Description: B1131B07.26 [Oryza sativa (japonica
MEKQADKAAAPVDDGIHEESPASAQNGRPGSEPAAAPEVEVQLFRRGRGPVAVFRSPLGGYTQDQLEVGDILEKHGLKCVFAFDAASRARGVAIRFNPRNGRSLLPYAADSTIFLDGEPKDPLLKPITKVMLTVCAMTVVAAVILKEAKMPEWLKGTKLGNLKFPPWVLACMVIVFMRLRKRTRDVMKKIGWSS

SEQ ID NO: 59312 - protein, 171 aa, Glycine max
  peptide (1)..(171): Ceres Seq. ID no. 13638656
QIGRFPFRLPLSPIEQANGEASRQGRGAGRRRHPRGVAGLRPEREARIRAGGRTRGGGAALPAGPGAGGRVPVTPGRVHAGPAGGGGHPGEARPQVRLRLRRRLPRTRRRHPIQPPQRPLPPPLRRRLHHLPRRRAQGSFAEAHHQGDAHCLRHDSGSCGDTEGGEDARVA

SEQ ID NO: 59313 - protein, 141 aa, Glycine max
  peptide (1)..(141): Ceres Seq. ID no. 13638657
  misc_feature (8)..(141): Homolog of NCBI NO: 2429362 NR Description: proline rich protein [Santalum album]
TDWQIPFSPSPEPDRASQWRSKPTRPRRRSTTASTRSRRPPPRTGGPDPSRRPHPRWRCSSSGGAGGRWPCSGHPWAGTRRTSWRWGTSWRSTASSASSPSTPPPAHAASPSDSTPATAAPSSPTPPTPPSSSTASPRILC

SEQ ID NO: 59314 - DNA, 991 bp, Glycine max
  misc_feature (1)..(991): Ceres Seq. ID no. 13594738
atcctctcgattgagtaaaccctaattttcccccaaaccgcagccatgaacctcccgtcctccacggcgacctcaacttcggagtcgcctgatacggcggcgggggcgatttccccggagacgtgcggcggttgcaaaagccaagactcctgggtcatacactcggctcgtctccgcggcatcctccgcttctactgcacgcactgcctcctccgcaaccacccggcgtcgttttgccccacctgcttcgccttctacgactcctccccgccgcaccagtcccgccgcgtctcctgcaacgattgcaactccgtcactcacatccactgcgcgggagacgccaagtcccctccttaccgctgtcctccgtgccgcgaccccgacggcttctccttcttccgccccatcgtcgacgaaaacggcgcccggtgcatggataaggccctctcggaggccttcctgtgcgccgcgaagatcgcggcctcgtcgatgagcaaggccgttactttcttcagaagcgaagctgagcggaaagggaaagatgccgccgtggcgaagaagagagcgcgggaggctctcgaggacgtgctcaagctcgacgagaaggctaagttggccgtttcgaagccctccgagaatagagatcagaaaccgaaacagagtcctgcttcgaatggtggtttgaaacagattgagagctctgcggccaccgcccaagtcaagaaacagagttcgtctgtagtgcaagttaagcaagagaagtgattgcttttgaatggttatcagtgaataacttgatgtatcttttgtcttgtttgtgaaaaaaaaggttcaagcttggcatattatgtttcgggttttagtgtagatttgtgtaagtggtctccttgttttttcagtttctttttgggtttgtttgctatgtgtaggagtatgtggaacagtgtgaaagtgttagatttctaattttaattgcttcatcttgtgtctc

SEQ ID NO: 59315 - protein, 239 aa, Glycine max
  peptide (1)..(239): Ceres Seq. ID no. 13594739
  misc_feature (15)..(217): Homolog of NCBI NO: 34904592 NR Description: B1008C01.29 [Oryza sativa (japonica
  misc_feature (27)..(198): Homolog of NCBI NO: 15229050 NR Description: hypothetical protein [Arabidopsis thaliana]
  misc_feature (1)..(222): Homolog of NCBI NO: 18391032 NR Description: expressed protein [Arabidopsis thaliana]
MNLPSSTATSTSESPDTAAGAISPETCGGCKSQDSWVIHSARLRGILRFYCTHCLLRNHPASFCPTCFAFYDSSPPHQSRRVSCNDCNSVTHIHCAGDAKSPPYRCPPCRDPDGFSFFRPIVDENGARCMDKALSEAFLCAAKIAASSMSKAVTFFRSEAERKGKDAAVAKKRAREALEDVLKLDEKAKLAVSKPSENRDQKPKQSPASNGGLKQIESSAATAQVKKQSSSVVQVKQEK

SEQ ID NO: 59316 - DNA, 1591 bp, Glycine max
  misc_feature (1)..(1591): Ceres Seq. ID no. 14314046
actactgttctgcaaaaaagctattttggccctgtgccaccaaagccatctcccccatttttgctcctctatctcttttttctaatcatcacaattgggtgagaaaaaaacacacacacaactcaacaatgggtgagaaagatgatggcttgggtttggggttgagtttgaagttaggatggggagaaaataatgataacaataataatcaacaacaacaccctttcaacgtgcacaagcctcctcaatcggttccaaaccaaagggtttccgtcaatagcttgttccattttcatgatcggagctccgagatgcggtcgttcttccgcggaatagacgtgaatttgccaccgcccccgccttcggcggctctggcggcgttcgatgacgagaacggggtgtcctcgccgaacagcacgatatcgagcatcagcgggaagcggagcgagagagagggaaacggagaggagaacgagagaacgtcgagttctcgcggcggcggcggaagcgacgacgatgaaggcggcgcgtgtggtggagacgccgacgccgatgcgtcgaggaagaagctgaggttgtctaaggaacaggccttggtgctggaagaaacattcaaggaacacaatactctgaacccgaagcaaaagcaagctttggcaaagcagttgaatttgatgcctaggcaggtggaggtgtggtttcaaaacagaagagcaaggaccaaattgaagcagactgaagtggattgtgaatatttgaagaggtgctgtgagaatctaactgaagagaataggaggcttcaaaaggaagtgcaagagctcagggcattgaagttatccccacagctttacatgcaaatgaaccctcccaccactctcacaatgtgcccttcatgtgagcgtgttgctgtctcatccgcatcctcttcctcatcggccaccatgccctctgccctgcctccagctaatctcaacccggtgggccctaccatccagcggccaatgcccgtcaacccttgggcagcaatgttgaatcagcaccgtggccggccataatcaaaccctccaggccgtaggtaatagggtaaagttcaggatggaagctaggacattttagttgtgctagacagaaatgaatcaaagaaataggaatcttatgtgttggttaactttactaggactttgagagctcatggtttgggaaattctatttgcatccttttttttttcattgcaccttccattctcttttacattgcagaaattagttttcggaatctacaatgcaattatagaaattaatttttgaaatgtaaaagaaaaggtagagattttgaagagttaaaaaaaaaggatgcaactagaatcatcctcatgcttttggttaactctttttgtctaggcttattttactttgagcatagatagaacatgtttttagtcaactttaggatgtgtaaagtttggacatgttaaagtagttagtgttttcatctgctgaacagtgtttgttatttgttaaccttggaaagttggaaaagggaattggaatctgtattttattttatattttatttgcttcttttcattgg

SEQ ID NO: 59317 - protein, 350 aa, Glycine max
  peptide (1)..(350): Ceres Seq. ID no. 14314047
  misc_feature (188)..(242): Pfam Name: Homeobox domain Pfam Description: Homeobox domain
  misc_feature (45)..(347): Homolog of NCBI NO: 25487873 NR Description: homeobox-leucine zipper protein
  misc_feature (66)..(349): Homolog of NCBI NO: 15225368 NR Description: homeobox-leucine zipper protein Athb-4
  misc_feature (43)..(342): Homolog of NCBI NO: 25453563 NR Description: homeobox protein HAT3 [imported] - Arabidopsis
  misc_feature (43)..(340): Homolog of NCBI NO: 15232311 NR Description: homeobox-leucine zipper protein HAT3 [Arabidopsis
YCSAKKLFWPCATKAISPIFAPLSLFSNHHNWVRKKHTHNSTMGEKDDGLGLGLSLKLGWGENNDNNNNQQQHPFNVHKPPQSVPNQRVSVNSLFHFHDRSSEMRSFFRGIDVNLPPPPPSAALAAFDDENGVSSPNSTISSISGKRSEREGNGEENERTSSSRGGGGSDDDEGGACGGDADADASRKKLRLSKEQALVLEETFKEHNTLNPKQKQALAKQLNLMPRQVEVWFQNRRARTKLKQTEVDCEYLKRCCENLTEENRRLQKEVQELRALKLSPQLYMQMNPPTTLTMCPSCERVAVSSASSSSSATMPSALPPANLNPVGPTIQRPMPVNPWAAMLNQHRGRP

SEQ ID NO: 59318 - protein, 308 aa, Glycine max
  peptide (1)..(308): Ceres Seq. ID no. 14314048
  misc_feature (146)..(200): Pfam Name: Homeobox domain Pfam Description: Homeobox domain
  misc_feature (3)..(305): Homolog of NCBI NO: 25487873 NR Description: homeobox-leucine zipper protein
  misc_feature (24)..(307): Homolog of NCBI NO: 15225368 NR Description: homeobox-leucine zipper protein Athb-4
  misc_feature (1)..(300): Homolog of NCBI NO: 25453563 NR Description: homeobox protein HAT3 [imported] - Arabidopsis
  misc_feature (1)..(298): Homolog of NCBI NO: 15232311 NR Description: homeobox-leucine zipper protein HAT3 [Arabidopsis
MGEKDDGLGLGLSLKLGWGENNDNNNNQQQHPFNVHKPPQSVPNQRVSVNSLFHFHDRSSEMRSFFRGIDVNLPPPPPSAALAAFDDENGVSSPNSTISSISGKRSEREGNGEENERTSSSRGGGGSDDDEGGACGGDADADASRKKLRLSKEQALVLEETFKEHNTLNPKQKQALAKQLNLMPRQVEVWFQNRRARTKLKQTEVDCEYLKRCCENLTEENRRLQKEVQELRALKLSPQLYMQMNPPTTLTMCPSCERVAVSSASSSSSATMPSALPPANLNPVGPTIQRPMPVNPWAAMLNQHRGRP

SEQ ID NO: 59319 - protein, 247 aa, Glycine max
  peptide (1)..(247): Ceres Seq. ID no. 14314049
  misc_feature (85)..(139): Pfam Name: Homeobox domain Pfam Description: Homeobox domain
  misc_feature (1)..(244): Homolog of NCBI NO: 25487873 NR Description: homeobox-leucine zipper protein
  misc_feature (1)..(246): Homolog of NCBI NO: 15225368 NR Description: homeobox-leucine zipper protein Athb-4
  misc_feature (1)..(239): Homolog of NCBI NO: 25453563 NR Description: homeobox protein HAT3 [imported] - Arabidopsis
  misc_feature (1)..(237): Homolog of NCBI NO: 15232311 NR Description: homeobox-leucine zipper protein HAT3 [Arabidopsis
MRSFFRGIDVNLPPPPPSAALAAFDDENGVSSPNSTISSISGKRSEREGNGEENERTSSSRGGGGSDDDEGGACGGDADADASRKKLRLSKEQALVLEETFKEHNTLNPKQKQALAKQLNLMPRQVEVWFQNRRARTKLKQTEVDCEYLKRCCENLTEENRRLQKEVQELRALKLSPQLYMQMNPPTTLTMCPSCERVAVSSASSSSSATMPSALPPANLNPVGPTIQRPMPVNPWAAMLNQHRGRP

SEQ ID NO: 59320 - DNA, 817 bp, Glycine max
  misc_feature (1)..(817): Ceres Seq. ID no. 14306349
attaacattcctccaagcaccatcaagattcaagcacatagttatcatcaattccccagctagttttggccacgcctgcatcttcttctgctttaagctatggcctctaacttcagcttgagaactttgatgatatttgcccttgcattttctctcgccctgcaaggcactcttggagggatagaatgcgagagtctgagccatgacacatgctcattcgccgtgacatctgctggcaaacgatgtgtgcttgagaagcaggtgaagaggactggtgaggaagcatacacatgcaggacatcagagattgaagctgataaactgaaggaccacattgaaactgaacaatgcatcaaggcttgtggtttggacagaaagtcccttggaatctcatcagactctcttcttcaatctagcttcacgcaaaagctctgctcccccatctgctaccagtgttgcccaaacgttgttgacttatacttcaatctggcagctggtgaaggtgtgtttcttcccaagttgtgtgaagcacaaggtctaaatgctcgtcgaggaatggctgaactgaaaagctctggtatcgtggcaccgggacctgtgcacggtgtgcagttcacagctactcctccgattaaccctgtggagctcacaattgaacctgccgttgccccatcaccaaactaaagtcaagtctagtttttttagaacacgcaaaagaaattgagaaaagcgtgtattaaacaacttagcatatactagtatacagatgagagtggcatatatactatattttgtttgtaataatgaagttgcacct

SEQ ID NO: 59321 - protein, 194 aa, Glycine max
  peptide (1)..(194): Ceres Seq. ID no. 14306350
  misc_feature (4)..(192): Homolog of NCBI NO: 15232407 NR Description: photoassimilate-responsive protein PAR-1b
  misc_feature (1)..(160): Homolog of NCBI NO: 10798750 NR Description: Elicitor inducible gene product Nt-SubE80
  misc_feature (6)..(193): Homolog of NCBI NO: 15237149 NR Description: photoassimilate-responsive protein PAR-related
  misc_feature (6)..(193): Homolog of NCBI NO: 21553901 NR Description: photoassimilate-responsive protein PAR-like
  misc_feature (1)..(180): Homolog of NCBI NO: 2129956 NR Description: photoassimilate-responsive protein PAR-1c
  misc_feature (1)..(192): Homolog of NCBI NO: 1362109 NR Description: PAR-1a protein - common tobacco
  misc_feature (1)..(192): Homolog of NCBI NO: 2129957 NR Description: photoassimilate-responsive protein precursor
  misc_feature (1)..(180): Homolog of NCBI NO: 2129955 NR Description: photoassimilate-responsive protein PAR-1b
MASNFSLRTLMIFALAFSLALQGTLGGIECESLSHDTCSFAVTSAGKRCVLEKQVKRTGEEAYTCRTSEIEADKLKDHIETEQCIKACGLDRKSLGISSDSLLQSSFTQKLCSPICYQCCPNVVDLYFNLAAGEGVFLPKLCEAQGLNARRGMAELKSSGIVAPGPVHGVQFTATPPINPVELTIEPAVAPSPN

SEQ ID NO: 59322 - protein, 184 aa, Glycine max
  peptide (1)..(184): Ceres Seq. ID no. 14306351
  misc_feature (1)..(182): Homolog of NCBI NO: 15232407 NR Description: photoassimilate-responsive protein PAR-1b
  misc_feature (1)..(150): Homolog of NCBI NO: 10798750 NR Description: Elicitor inducible gene product Nt-SubE80
  misc_feature (1)..(183): Homolog of NCBI NO: 15237149 NR Description: photoassimilate-responsive protein PAR-related
  misc_feature (1)..(183): Homolog of NCBI NO: 21553901 NR Description: photoassimilate-responsive protein PAR-like
  misc_feature (1)..(170): Homolog of NCBI NO: 2129956 NR Description: photoassimilate-responsive protein PAR-1c
  misc_feature (1)..(182): Homolog of NCBI NO: 1362109 NR Description: PAR-1a protein - common tobacco
  misc_feature (1)..(182): Homolog of NCBI NO: 2129957 NR Description: photoassimilate-responsive protein precursor
  misc_feature (1)..(170): Homolog of NCBI NO: 2129955 NR Description: photoassimilate-responsive protein PAR-1b
MIFALAFSLALQGTLGGIECESLSHDTCSFAVTSAGKRCVLEKQVKRTGEEAYTCRTSEIEADKLKDHIETEQCIKACGLDRKSLGISSDSLLQSSFTQKLCSPICYQCCPNVVDLYFNLAAGEGVFLPKLCEAQGLNARRGMAELKSSGIVAPGPVHGVQFTATPPINPVELTIEPAVAPSPN

SEQ ID NO: 59323 - DNA, 1354 bp, Glycine max
  misc_feature (1)..(1354): Ceres Seq. ID no. 14314814
aaaataagagaaggggtgagggggcggcaccacctttccttccctcccgattgccctaggtaaaaaatgtatatagttcttttcttttgcatcaattcagcggcgacgaaaccgcaatagatctccgtttctcgccaaacaaacacaaaatagctgccttcagcggcgacgaaaccgcacctttctttggcttcctcggagccaccgctaccctcgttttttcctgtaactaactcatcaaggaggatccatctctgaaacatattttggaggagatagagactggtggtcctgctgctatgatgaggtactggaatgatgaggaggttttgcggaagttgggacaaaccatgggagtttccttaataaacgtgtaaagggattaggaacccagaacataaactgtcctaaagctacttgagaaagatgcttttctgtaattgtaatgcatgatgccatgctgtcaccaacaatcaaaggggaaactgaggggaagaagatgtttccgtgatgaaaatttaagagctgatagacaacttgagttcacccaactagacatggaaatgacctttactccttacgaggatatgttaacacttaatgaagaattgattagaaagaagtagtaaagttgcaggaaaaatggtgtgaggataaagagaaaacaaaggaagaatatgaaggagacaagcgatggtaactcaaaaaattataaataggatgagggttgcgagtggatcgagtaccttttcggatggcaatgggccagtctgactaagagtgatgagagacaggtgaggaagcaggatccatggttggaggactagttggagaaggatgagaatcacgaggggaggcttcaggtactgtagaattagctggccgtgtcctgtgatgatatgtaagtagaggtagagagacaacttcaattgaatttggtagagaagatgagacttcattgacattttggtcggagttacctagaggacaaggaattggcagtacttcctggagagaagaagaatgatctacagaggatgagaagaaaggtgtgtcttcaaagaaggttacatctgcagacatataatatcgtcttgtgattggagagtagcatttgtaacccttttgaagacgagaataacccaaaaagacacattttactgacttagctgaaagtttgtctaaatcaagggaaagatcatgaacaaaacaagtacaaccaaacactctaggagagacatgaaacaatgggtcatgaggaaagataattgagtgaggaatttggttttcaagagaagaagaaggcatcctattaattaagaagcacgcagtaagcactgcgtctccccagtga

SEQ ID NO: 59324 - protein, 58 aa, Glycine max
  peptide (1)..(58): Ceres Seq. ID no. 14314815
  misc_feature (17)..(56): Homolog of NCBI NO: 34895910 NR Description: putative aspartate--tRNA ligase
  misc_feature (17)..(57): Homolog of NCBI NO: 30689804 NR Description: tRNA synthetase class II family [Arabidopsis
  misc_feature (17)..(57): Homolog of NCBI NO: 7437605 NR Description: probable aspartate-tRNA ligase (EC 6.1.1.12)
  misc_feature (17)..(57): Homolog of NCBI NO: 26452525 NR Description: putative aspartate--tRNA ligase [Arabidopsis
MMPCCHQQSKGKLRGRRCFRDENLRADRQLEFTQLDMEMTFTPYEDMLTLNEELIRKK

SEQ ID NO: 59325 - protein, 57 aa, Glycine max
  peptide (1)..(57): Ceres Seq. ID no. 14314816
  misc_feature (16)..(55): Homolog of NCBI NO: 34895910 NR Description: putative aspartate--tRNA ligase
  misc_feature (16)..(56): Homolog of NCBI NO: 30689804 NR Description: tRNA synthetase class II family [Arabidopsis
  misc_feature (16)..(56): Homolog of NCBI NO: 7437605 NR Description: probable aspartate-tRNA ligase (EC 6.1.1.12)
  misc_feature (16)..(56): Homolog of NCBI NO: 26452525 NR Description: putative aspartate--tRNA ligase [Arabidopsis
MPCCHQQSKGKLRGRRCFRDENLRADRQLEFTQLDMEMTFTPYEDMLTLNEELIRKK

SEQ ID NO: 59326 - DNA, 1390 bp, Glycine max
  misc_feature (1)..(1390): Ceres Seq. ID no. 15171261
agaaccctcttcttctacctctctctctctctctctctctctccagattcttccccttccatggatgctttgaacttcctcaaattctggagaaacgccaccatgagcacaacctccgaaccccaccttgttgttgaaaccgacaccgaatccgacgaagacgactcattcttcgacttggagctcacgccactcgatttcgacaacaaagaaaacaacaccaacaccaccacaaccaaaaacgacgacgacccaaaacaaacgacaacaagcgaactcaaaagtcttggctccaaagacaacttactcagcaaaacagacaatggcgttcagcgtaaaacaccacttcccctgtctcctccttccgaacctatctccaaacgtaaggtcctcccaatcgaacctatctccaaacctcagtcccccattgcgcttctcaggtccgccccgagcttcagaatcttcatgttccgaaagcgaaacagaacacctccacaacagaaaacagagcactctgttaacgaagcaaaagtctttgcggtgaagctcagcgtcgacgattttcgttcctctcccgcgctcagcagggacaacagcacgagaagctttgggagcaaggttcggggtttgagctacgaggaagaaccgaagccggagcggttttcgaaggaggtgttgcggaagtacctgaagctgataaagccgctatatgttaaagtttctaagaggtatagtgataaggtgaggttctccggtgagggttatgcggcgtcgccgtcgtcgtcgccgtcggtcgcctctgtttcttcgaggacggagaaacaggggaaggggatgagggtggtttcgaagcatttaggaaagagtaggtcggcgtcgtcgacggtggcgggtgttagttctccggcgaagaagagcgatgacacgatgcagcagcagcttgatgggatccaaagcgccatccttcactgcaaaaggtccttcaactccagagaaggatcaatgtattcggtgaggaaatcatttgatggtgaacatggggaaaaagtgtaatcttgaggattttgttgtgaaagaagaagctcaagctgatacaacagaagagaagagaaaaaaatgttatttttttgtattatctatctagtgcattgtaaagaaaagggaaagaggggagagggatagttgtgatgattagtgagtgtgtgggaggcaggctcccctcccctggtggtcagtgaatgtatgtaaattaatggttaatggggcattatgaaaagaatcaaagggatcttctactgtatctctgtctgctgtgtgtgggttttgcactttgcactctgcttgaggtttattttgatattgatttgatgcccatcaaatgattcaaggc

SEQ ID NO: 59327 - protein, 350 aa, Glycine max
  peptide (1)..(350): Ceres Seq. ID no. 15171262
  misc_feature (219)..(330): Homolog of NCBI NO: 26449981 NR Description: unknown protein [Arabidopsis thaliana]
  misc_feature (219)..(330): Homolog of NCBI NO: 15222614 NR Description: expressed protein [Arabidopsis thaliana]
  misc_feature (117)..(301): Homolog of NCBI NO: 26449981 NR Description: unknown protein [Arabidopsis thaliana]
  misc_feature (117)..(301): Homolog of NCBI NO: 15222614 NR Description: expressed protein [Arabidopsis thaliana]
  misc_feature (256)..(334): Homolog of NCBI NO: 34904200 NR Description: P0492F05.24 [Oryza sativa (japonica
  misc_feature (179)..(264): Homolog of NCBI NO: 34904200 NR Description: P0492F05.24 [Oryza sativa (japonica
  misc_feature (197)..(350): Homolog of NCBI NO: 15237292 NR Description: expressed protein [Arabidopsis thaliana]
RTLFFYLSLSLSLSPDSSPSMDALNFLKFWRNATMSTTSEPHLVVETDTESDEDDSFFDLELTPLDFDNKENNTNTTTTKNDDDPKQTTTSELKSLGSKDNLLSKTDNGVQRKTPLPLSPPSEPISKRKVLPIEPISKPQSPIALLRSAPSFRIFMFRKRNRTPPQQKTEHSVNEAKVFAVKLSVDDFRSSPALSRDNSTRSFGSKVRGLSYEEEPKPERFSKEVLRKYLKLIKPLYVKVSKRYSDKVRFSGEGYAASPSSSPSVASVSSRTEKQGKGMRVVSKHLGKSRSASSTVAGVSSPAKKSDDTMQQQLDGIQSAILHCKRSFNSREGSMYSVRKSFDGEHGEKV

SEQ ID NO: 59328 - protein, 330 aa, Glycine max
  peptide (1)..(330): Ceres Seq. ID no. 15171263
  misc_feature (199)..(310): Homolog of NCBI NO: 26449981 NR Description: unknown protein [Arabidopsis thaliana]
  misc_feature (199)..(310): Homolog of NCBI NO: 15222614 NR Description: expressed protein [Arabidopsis thaliana]
  misc_feature (97)..(281): Homolog of NCBI NO: 26449981 NR Description: unknown protein [Arabidopsis thaliana]
  misc_feature (97)..(281): Homolog of NCBI NO: 15222614 NR Description: expressed protein [Arabidopsis thaliana]
  misc_feature (236)..(314): Homolog of NCBI NO: 34904200 NR Description: P0492F05.24 [Oryza sativa (japonica
  misc_feature (159)..(244): Homolog of NCBI NO: 34904200 NR Description: P0492F05.24 [Oryza sativa (japonica
  misc_feature (177)..(330): Homolog of NCBI NO: 15237292 NR Description: expressed protein [Arabidopsis thaliana]
MDALNFLKFWRNATMSTTSEPHLVVETDTESDEDDSFFDLELTPLDFDNKENNTNTTTTKNDDDPKQTTTSELKSLGSKDNLLSKTDNGVQRKTPLPLSPPSEPISKRKVLPIEPISKPQSPIALLRSAPSFRIFMFRKRNRTPPQQKTEHSVNEAKVFAVKLSVDDFRSSPALSRDNSTRSFGSKVRGLSYEEEPKPERFSKEVLRKYLKLIKPLYVKVSKRYSDKVRFSGEGYAASPSSSPSVASVSSRTEKQGKGMRVVSKHLGKSRSASSTVAGVSSPAKKSDDTMQQQLDGIQSAILHCKRSFNSREGSMYSVRKSFDGEHGEKV

SEQ ID NO: 59329 - protein, 316 aa, Glycine max
  peptide (1)..(316): Ceres Seq. ID no. 15171264
  misc_feature (185)..(296): Homolog of NCBI NO: 26449981 NR Description: unknown protein [Arabidopsis thaliana]
  misc_feature (185)..(296): Homolog of NCBI NO: 15222614 NR Description: expressed protein [Arabidopsis thaliana]
  misc_feature (83)..(267): Homolog of NCBI NO: 26449981 NR Description: unknown protein [Arabidopsis thaliana]
  misc_feature (83)..(267): Homolog of NCBI NO: 15222614 NR Description: expressed protein [Arabidopsis thaliana]
  misc_feature (222)..(300): Homolog of NCBI NO: 34904200 NR Description: P0492F05.24 [Oryza sativa (japonica
  misc_feature (145)..(230): Homolog of NCBI NO: 34904200 NR Description: P0492F05.24 [Oryza sativa (japonica
  misc_feature (163)..(316): Homolog of NCBI NO: 15237292 NR Description: expressed protein [Arabidopsis thaliana]
MSTTSEPHLVVETDTESDEDDSFFDLELTPLDFDNKENNTNTTTTKNDDDPKQTTTSELKSLGSKDNLLSKTDNGVQRKTPLPLSPPSEPISKRKVLPIEPISKPQSPIALLRSAPSFRIFMFRKRNRTPPQQKTEHSVNEAKVFAVKLSVDDFRSSPALSRDNSTRSFGSKVRGLSYEEEPKPERFSKEVLRKYLKLIKPLYVKVSKRYSDKVRFSGEGYAASPSSSPSVASVSSRTEKQGKGMRVVSKHLGKSRSASSTVAGVSSPAKKSDDTMQQQLDGIQSAILHCKRSFNSREGSMYSVRKSFDGEHGEKV

SEQ ID NO: 59330 - DNA, 847 bp, Glycine max
  misc_feature (1)..(847): Ceres Seq. ID no. 14306010
ctctttccgttcccttgatgtaatggctttatgccgattcgcttactcttattctcctgcttctgcttccaccatttttcgtttcccgaaatacccttcgaaacacactaaattctccttgctaccactctcattctcaacgatggaagctcctccagaaggttatcgtaggaacgttggtatctgtctcatgaacaatcacaaaaagattttcgcggcttcgaggctcgacattcccaatgcttggcaaatgcctcagggtggtattgatgaaggtgaggatccaagaaatgcagctatcagggagttacgagaagagacaggagttaattcagtagaagtgatcgctgaggtaccatattggttaacttatgacttcccaccaaaagtgagggagaaattaaatattcagtggggatctgattggaagggtcaggcgcagaaatggtttctttttaagttcactgggcaagatcaagaaattaatcttttgggtgatggtactgagaaagctgagtttggggaatggtcatggatatcacctgaacaagtaattgagcttgcagtggatttcaagaaacctgtctacaaggaagtcttagcagtgtttgctccacatttccaataaatcttatctttggctgaaattgttactgatgccttgggtgattatgagggctgctttaaaaagaatgtattccaattaactaacgagaccattattctcttttttctcctcttggccataataacccatagggcgggagaagagggctgtttattttgtctgaatgaaatatgtattgtcatgaaaattgttgtgcaatgtattgcatttgcatctgcc

SEQ ID NO: 59331 - protein, 208 aa, Glycine max
  peptide (1)..(208): Ceres Seq. ID no. 14306011
  misc_feature (55)..(202): Pfam Name: NUDIX domain Pfam Description: NUDIX domain
  misc_feature (52)..(208): Homolog of NCBI NO: 21229955 NR Description: (di)nucleoside polyphosphate hydrolase
  misc_feature (55)..(206): Homolog of NCBI NO: 22959957 NR Description: hypothetical protein [Rhodobacter sphaeroides]
  misc_feature (48)..(203): Homolog of NCBI NO: 15220667 NR Description: diadenosine 5',5'''-P1,P4-tetraphosphate
  misc_feature (47)..(207): Homolog of NCBI NO: 15240003 NR Description: diadenosine 5',5'''-P1,P4-tetraphosphate
  misc_feature (39)..(208): Homolog of NCBI NO: 32488719 NR Description: OSJNBa0088H09.20 [Oryza sativa (japonica
  misc_feature (16)..(208): Homolog of NCBI NO: 7489414 NR Description: probable bis(5'-nucleosyl)-tetraphosphatase
  misc_feature (8)..(208): Homolog of NCBI NO: 8567796 NR Description: diadenosine 5',5'''-P1,P4-tetraphosphate
  misc_feature (8)..(208): Homolog of NCBI NO: 15228345 NR Description: diadenosine 5',5'''-P1,P4-tetraphosphate
  misc_feature (47)..(206): Homolog of NCBI NO: 14488439 NR Description: Chain A, Solution Structure Of The Nudix Enzyme
  misc_feature (8)..(206): Homolog of NCBI NO: 1888557 NR Description: diadenosine 5',5'''-P1,P4-tetraphosphate
SFRSLDVMALCRFAYSYSPASASTIFRFPKYPSKHTKFSLLPLSFSTMEAPPEGYRRNVGICLMNNHKKIFAASRLDIPNAWQMPQGGIDEGEDPRNAAIRELREETGVNSVEVIAEVPYWLTYDFPPKVREKLNIQWGSDWKGQAQKWFLFKFTGQDQEINLLGDGTEKAEFGEWSWISPEQVIELAVDFKKPVYKEVLAVFAPHFQ

SEQ ID NO: 59332 - protein, 201 aa, Glycine max
  peptide (1)..(201): Ceres Seq. ID no. 14306012
  misc_feature (48)..(195): Pfam Name: NUDIX domain Pfam Description: NUDIX domain
  misc_feature (45)..(201): Homolog of NCBI NO: 21229955 NR Description: (di)nucleoside polyphosphate hydrolase
  misc_feature (48)..(199): Homolog of NCBI NO: 22959957 NR Description: hypothetical protein [Rhodobacter sphaeroides]
  misc_feature (41)..(196): Homolog of NCBI NO: 15220667 NR Description: diadenosine 5',5'''-P1,P4-tetraphosphate
  misc_feature (40)..(200): Homolog of NCBI NO: 15240003 NR Description: diadenosine 5',5'''-P1,P4-tetraphosphate
  misc_feature (32)..(201): Homolog of NCBI NO: 32488719 NR Description: OSJNBa0088H09.20 [Oryza sativa (japonica
  misc_feature (9)..(201): Homolog of NCBI NO: 7489414 NR Description: probable bis(5'-nucleosyl)-tetraphosphatase
  misc_feature (1)..(201): Homolog of NCBI NO: 8567796 NR Description: diadenosine 5',5'''-P1,P4-tetraphosphate
  misc_feature (1)..(201): Homolog of NCBI NO: 15228345 NR Description: diadenosine 5',5'''-P1,P4-tetraphosphate
  misc_feature (40)..(199): Homolog of NCBI NO: 14488439 NR Description: Chain A, Solution Structure Of The Nudix Enzyme
  misc_feature (1)..(199): Homolog of NCBI NO: 1888557 NR Description: diadenosine 5',5'''-P1,P4-tetraphosphate
MALCRFAYSYSPASASTIFRFPKYPSKHTKFSLLPLSFSTMEAPPEGYRRNVGICLMNNHKKIFAASRLDIPNAWQMPQGGIDEGEDPRNAAIRELREETGVNSVEVIAEVPYWLTYDFPPKVREKLNIQWGSDWKGQAQKWFLFKFTGQDQEINLLGDGTEKAEFGEWSWISPEQVIELAVDFKKPVYKEVLAVFAPHFQ

SEQ ID NO: 59333 - protein, 161 aa, Glycine max
  peptide (1)..(161): Ceres Seq. ID no. 14306013
  misc_feature (8)..(155): Pfam Name: NUDIX domain Pfam Description: NUDIX domain
  misc_feature (5)..(161): Homolog of NCBI NO: 21229955 NR Description: (di)nucleoside polyphosphate hydrolase
  misc_feature (8)..(159): Homolog of NCBI NO: 22959957 NR Description: hypothetical protein [Rhodobacter sphaeroides]
  misc_feature (1)..(156): Homolog of NCBI NO: 15220667 NR Description: diadenosine 5',5'''-P1,P4-tetraphosphate
  misc_feature (1)..(160): Homolog of NCBI NO: 15240003 NR Description: diadenosine 5',5'''-P1,P4-tetraphosphate
  misc_feature (1)..(161): Homolog of NCBI NO: 32488719 NR Description: OSJNBa0088H09.20 [Oryza sativa (japonica
  misc_feature (1)..(161): Homolog of NCBI NO: 7489414 NR Description: probable bis(5'-nucleosyl)-tetraphosphatase
  misc_feature (1)..(161): Homolog of NCBI NO: 8567796 NR Description: diadenosine 5',5'''-P1,P4-tetraphosphate
  misc_feature (1)..(161): Homolog of NCBI NO: 15228345 NR Description: diadenosine 5',5'''-P1,P4-tetraphosphate
  misc_feature (1)..(159): Homolog of NCBI NO: 14488439 NR Description: Chain A, Solution Structure Of The Nudix Enzyme
  misc_feature (1)..(159): Homolog of NCBI NO: 1888557 NR Description: diadenosine 5',5'''-P1,P4-tetraphosphate
MEAPPEGYRRNVGICLMNNHKKIFAASRLDIPNAWQMPQGGIDEGEDPRNAAIRELREETGVNSVEVIAEVPYWLTYDFPPKVREKLNIQWGSDWKGQAQKWFLFKFTGQDQEINLLGDGTEKAEFGEWSWISPEQVIELAVDFKKPVYKEVLAVFAPHFQ

SEQ ID NO: 59334 - DNA, 1305 bp, Glycine max
  misc_feature (1)..(1305): Ceres Seq. ID no. 14314408
attacttattagtatacctctcactctaaagttgtcttagtctctctattcttcacattcatcagcaggtcaggttggctggcaagttattgaaatgaagaataagaatggaaaacttaaattgacgtttgagaagttcacatggacgattagtaacttctctaaattggactccaagaaactgtactctgagaagttttagctcgatcaccatacatggaagattcttgcctatccaaaggggactgatgtgggctacttgtcaatttatttagatgctggtgttgttaatttgccttttggctggagcaaatttgcaaatttcaagttcgctttaattaatcaggccaatgacaaaatgactaaaataaaagaaactacaaaacagttcaatgcaacagaaattgcttggggttttccaaaattcatacacttagatgaacttaatgattctagcagtgggtttatggtgaatgatacttgtataattgaagttcagattttggtcagcaagtcagaacaggagaatcaagtagatcaacaagttaacaagattgatgataatcatgatattgataagcctattaaacacacagatatcttcttacccaaggaaacgttcccaacctcatttggtgagctagttgatttccaaggcttagggaaaatagaacaagcttttgttccattgttagaagaagtattttctcgacatccctcactcattgattgtcagcaaaaaagaagtggcaggtttgttgaatgggcattcacagctttgggtcgagttttacattttctcaagactaaaaaggtgaaagatatggatggtgatgcttgcaataatcttcaaattttttgggaggaattgaagatgtttagatttgatttgacttggctggaacctcatgttcaatctgccttggctatgaaaacttgtattgagagagctgttcgggtgaaaaggacgagggaggatgtgactgctttagagatggaaacaaagaggttgaaggcaaagatgattcaagcagaggtagatcttgaaatagcaagaagagacttcgtgaaagcaaaagaaggctttgaagagtgcgatttggatgctgaactaggctatggagaaccataatttgatattatgtcacttgttgaagaatatttcagtagagctagcctacatgttttggatgagcattcctaaacacctgagtgttcttctagacatcaaatcatcaatgaacttgaaagtactcaaactcaaagcagaaattgattattctgttaactgaaatgttgtttctg

SEQ ID NO: 59335 - protein, 257 aa, Glycine max
  peptide (1)..(257): Ceres Seq. ID no. 14314409
  misc_feature (1)..(240): Homolog of NCBI NO: 15230992 NR Description: expressed protein [Arabidopsis thaliana]
  misc_feature (1)..(52): Homolog of NCBI NO: 6671947 NR Description: putative ubiquitin carboxyl-terminal hydrolase
  misc_feature (1)..(52): Homolog of NCBI NO: 30681938 NR Description: ubiquitin carboxyl-terminal hydrolase -related
  misc_feature (1)..(52): Homolog of NCBI NO: 10178116 NR Description: ubiquitin carboxyl-terminal hydrolase
  misc_feature (1)..(52): Homolog of NCBI NO: 18415260 NR Description: ubiquitin-specific protease 12 (UBP12)
  misc_feature (1)..(52): Homolog of NCBI NO: 30681531 NR Description: ubiquitin-specific protease 12 (UBP12)
  misc_feature (1)..(52): Homolog of NCBI NO: 11993471 NR Description: ubiquitin-specific protease 12 [Arabidopsis
  misc_feature (1)..(52): Homolog of NCBI NO: 34899950 NR Description: putative ubiquitin carboxyl-terminal hydrolase
  misc_feature (1)..(52): Homolog of NCBI NO: 34395211 NR Description: putative ubiquitin-specific protease
  misc_feature (1)..(52): Homolog of NCBI NO: 10998129 NR Description: ubiquitin carboxyl-terminal hydrolase-like
MTKIKETTKQFNATEIAWGFPKFIHLDELNDSSSGFMVNDTCIIEVQILVSKSEQENQVDQQVNKIDDNHDIDKPIKHTDIFLPKETFPTSFGELVDFQGLGKIEQAFVPLLEEVFSRHPSLIDCQQKRSGRFVEWAFTALGRVLHFLKTKKVKDMDGDACNNLQIFWEELKMFRFDLTWLEPHVQSALAMKTCIERAVRVKRTREDVTALEMETKRLKAKMIQAEVDLEIARRDFVKAKEGFEECDLDAELGYGEP

SEQ ID NO: 59336 - protein, 221 aa, Glycine max
  peptide (1)..(221): Ceres Seq. ID no. 14314410
  misc_feature (1)..(204): Homolog of NCBI NO: 15230992 NR Description: expressed protein [Arabidopsis thaliana]
  misc_feature (1)..(16): Homolog of NCBI NO: 6671947 NR Description: putative ubiquitin carboxyl-terminal hydrolase
  misc_feature (1)..(16): Homolog of NCBI NO: 30681938 NR Description: ubiquitin carboxyl-terminal hydrolase -related
  misc_feature (1)..(16): Homolog of NCBI NO: 10178116 NR Description: ubiquitin carboxyl-terminal hydrolase
  misc_feature (1)..(16): Homolog of NCBI NO: 18415260 NR Description: ubiquitin-specific protease 12 (UBP12)
  misc_feature (1)..(16): Homolog of NCBI NO: 30681531 NR Description: ubiquitin-specific protease 12 (UBP12)
  misc_feature (1)..(16): Homolog of NCBI NO: 11993471 NR Description: ubiquitin-specific protease 12 [Arabidopsis
  misc_feature (1)..(16): Homolog of NCBI NO: 34899950 NR Description: putative ubiquitin carboxyl-terminal hydrolase
  misc_feature (1)..(16): Homolog of NCBI NO: 34395211 NR Description: putative ubiquitin-specific protease
  misc_feature (1)..(16): Homolog of NCBI NO: 10998129 NR Description: ubiquitin carboxyl-terminal hydrolase-like
MVNDTCIIEVQILVSKSEQENQVDQQVNKIDDNHDIDKPIKHTDIFLPKETFPTSFGELVDFQGLGKIEQAFVPLLEEVFSRHPSLIDCQQKRSGRFVEWAFTALGRVLHFLKTKKVKDMDGDACNNLQIFWEELKMFRFDLTWLEPHVQSALAMKTCIERAVRVKRTREDVTALEMETKRLKAKMIQAEVDLEIARRDFVKAKEGFEECDLDAELGYGEP

SEQ ID NO: 59337 - DNA, 1292 bp, Glycine max
  misc_feature (1)..(1292): Ceres Seq. ID no. 14314507
acacatagctgagagagaaaggaaaggttaactaagaagcaatacttcaatggccacccttgttgttcataaccaaacttcttctgctcaagatgctgaggctctccaacaggctttcaaaggatggggggctgatgacaaggccattatagcaatactgggtcacagaaatgttcatcagaggcaagaaatcagaaaagcttatgaggagatttaccaagaggatctcatcaaacgccttgagtccgagatctctggtgactttgagagagctatgtaccggtggatgttgcagcctgcggatcgtgatgctgttttggtgaatgtggcaatcaagaatggcaccaaagactaccatgtgattgcagagattgcttgtgtcctatcagctgaagagctcttggcagtgaggcgggcctaccaccgccgctacaagtgttccttggaggaagatgtggcagctaacaccaccggcaatcttcgccagcttttggttggattggtgacctcatataggtatgagggtgatgagatcaatgtaaaattttcacaaactgaagctaatgttcttcatgaatctgtcaaggagaagaaaggcaacagtgaagaagtcatcaggatccttactacaagaagcaaaactcaacttgtggcaactttcaaccgctacagagatgaacatggaatttccatcagtaagaaattgttggatcaaacatctgatgacttccacaaggtgttgcacactgctattcgctgcatcaatgaccataagaagtactatgagaaggttttgcgcaatgcagtcaagaagtttggaactgacgaggatggactaagccgtgtgattgttacaagggctgagaaggatctgaaggacatcaaagagctctactacaagagaaacagtgttcaccttgaggatgaagtgtccaaggaaacttctggggactacaagaagttcctcctcactctcttggggaaataagactaagttaagaacttgctctaagggcatcttagtaatgggtttttgttaattatgtcattggtttctggtttgtgcgatttcattatgttagttttccagtaagagtttgttatatctggttaagtttttgagacaacaagaactcgtgtcttgtttgagggcatgcgtgccatttcttagggttgtgttggtacttggcatgctcttattagaggacctctatgctgcgtgtttcctttggattatgctattacctcacctggtttgcttttaatgaaaggttgataacaaatttatatgt

SEQ ID NO: 59338 - protein, 312 aa, Glycine max; identical to SEQ ID NO: 54950
  peptide (1)..(312): Ceres Seq. ID no. 14314508
  misc_feature (242)..(309): Pfam Name: Annexin Pfam Description: Annexin
  misc_feature (1)..(311): Homolog of NCBI NO: 7484723 NR Description: fiber annexin - upland cotton
  misc_feature (25)..(311): Homolog of NCBI NO: 34905372 NR Description: putative annexin [Oryza sativa (japonica
  misc_feature (1)..(312): Homolog of NCBI NO: 4580920 NR Description: vacuole-associated annexin VCaB42 [Nicotiana
  misc_feature (1)..(312): Homolog of NCBI NO: 3928134 NR Description: annexin P38 [Capsicum annuum]
  misc_feature (1)..(312): Homolog of NCBI NO: 1621539 NR Description: annexin-like protein
  misc_feature (1)..(312): Homolog of NCBI NO: 15220216 NR Description: Ca2+-dependent membrane-binding protein annexin
  misc_feature (1)..(311): Homolog of NCBI NO: 22326753 NR Description: annexin-related protein [Arabidopsis thaliana]
  misc_feature (44)..(312): Homolog of NCBI NO: 1362037 NR Description: annexin homolog RJ4 (clone RJ4) - garden
  misc_feature (1)..(312): Homolog of NCBI NO: 21264397 NR Description: Annexin-like protein RJ4
  misc_feature (1)..(312): Homolog of NCBI NO: 3176098 NR Description: annexin [Medicago truncatula]

SEQ ID NO: 59339 - protein, 237 aa, Glycine max; identical to SEQ ID NO: 53326
  peptide (1)..(237): Ceres Seq. ID no. 14314509
  misc_feature (167)..(234): Pfam Name: Annexin Pfam Description: Annexin
  misc_feature (1)..(236): Homolog of NCBI NO: 7484723 NR Description: fiber annexin - upland cotton
  misc_feature (1)..(236): Homolog of NCBI NO: 34905372 NR Description: putative annexin [Oryza sativa (japonica
  misc_feature (1)..(237): Homolog of NCBI NO: 4580920 NR Description: vacuole-associated annexin VCaB42 [Nicotiana
  misc_feature (1)..(237): Homolog of NCBI NO: 3928134 NR Description: annexin P38 [Capsicum annuum]
  misc_feature (1)..(237): Homolog of NCBI NO: 1621539 NR Description: annexin-like protein
  misc_feature (1)..(237): Homolog of NCBI NO: 15220216 NR Description: Ca2+-dependent membrane-binding protein annexin
  misc_feature (1)..(236): Homolog of NCBI NO: 22326753 NR Description: annexin-related protein [Arabidopsis thaliana]
  misc_feature (1)..(237): Homolog of NCBI NO: 1362037 NR Description: annexin homolog RJ4 (clone RJ4) - garden
  misc_feature (1)..(237): Homolog of NCBI NO: 21264397 NR Description: Annexin-like protein RJ4
  misc_feature (1)..(237): Homolog of NCBI NO: 3176098 NR Description: annexin [Medicago truncatula]

SEQ ID NO: 59340 - protein, 233 aa, Glycine max; identical to SEQ ID NO: 53327
  peptide (1)..(233): Ceres Seq. ID no. 14314510
  misc_feature (163)..(230): Pfam Name: Annexin Pfam Description: Annexin
  misc_feature (1)..(232): Homolog of NCBI NO: 7484723 NR Description: fiber annexin - upland cotton
  misc_feature (1)..(232): Homolog of NCBI NO: 34905372 NR Description: putative annexin [Oryza sativa (japonica
  misc_feature (1)..(233): Homolog of NCBI NO: 4580920 NR Description: vacuole-associated annexin VCaB42 [Nicotiana
  misc_feature (1)..(233): Homolog of NCBI NO: 3928134 NR Description: annexin P38 [Capsicum annuum]
  misc_feature (1)..(233): Homolog of NCBI NO: 1621539 NR Description: annexin-like protein
  misc_feature (1)..(233): Homolog of NCBI NO: 15220216 NR Description: Ca2+-dependent membrane-binding protein annexin
  misc_feature (1)..(232): Homolog of NCBI NO: 22326753 NR Description: annexin-related protein [Arabidopsis thaliana]
  misc_feature (1)..(233): Homolog of NCBI NO: 1362037 NR Description: annexin homolog RJ4 (clone RJ4) - garden
  misc_feature (1)..(233): Homolog of NCBI NO: 21264397 NR Description: Annexin-like protein RJ4
  misc_feature (1)..(233): Homolog of NCBI NO: 3176098 NR Description: annexin [Medicago truncatula]

SEQ ID NO: 59341 - DNA, 659 bp, Glycine max
  misc_feature (1)..(659): Ceres Seq. ID no. 14305921
acggagccaaacacgccaaccagacttgttccgacaccaacagaagagcaaatctaacaccctctccggctaaatgctcccttcccgggagcctaacggcaacaacgatggcgcaaaacgtgaatcgtgatcgtcatcactcttttttgctacactctcattttttaatcactcagaatggcggtgtggcgacgaacgctggtgcggcggtggtgaagagggtgctgaagcgctttgaagagcttctgatggtttgaaacaaagcgatagagggaaaagacgcatggtactgaacgcatctagaacctttgttggttcacaacatcgaaatgggactccccgaagcagtaaaggaatttcttggcgatttggtctacgagccttgtgtcgctgcttctttcttgagtttggagcatccaaagcttcgaacttttctcgcacaggtttgtttgccggcgatcttttcgacggagattatggggacgaggttcgaggagtttccgaaggagttctggctttttttttgcaatattagaagttacaatgttttccataacttttacaaattcttgaaagcagtgtgaaattaattattataaatcttgttggcgggttgggttgatttagaaatatatgaagggtatggtattgctattggc

SEQ ID NO: 59342 - protein, 84 aa, Glycine max
  peptide (1)..(84): Ceres Seq. ID no. 14305922
  misc_feature (57)..(84): Homolog of NCBI NO: 15221612 NR Description: expressed protein [Arabidopsis thaliana]
  misc_feature (57)..(84): Homolog of NCBI NO: 25372940 NR Description: hypothetical protein F16P17.2 [imported] -
  misc_feature (61)..(84): Homolog of NCBI NO: 25372941 NR Description: protein F5O11.10 [imported] - Arabidopsis
  misc_feature (61)..(84): Homolog of NCBI NO: 15221319 NR Description: expressed protein [Arabidopsis thaliana]
GAKHANQTCSDTNRRANLTPSPAKCSLPGSLTATTMAQNVNRDRHHSFLLHSHFLITQNGGVATNAGAAVVKRVLKRFEELLMV

SEQ ID NO: 59343 - protein, 84 aa, Glycine max
  peptide (1)..(84): Ceres Seq. ID no. 14305923
  misc_feature (1)..(47): Homolog of NCBI NO: 15221612 NR Description: expressed protein [Arabidopsis thaliana]
  misc_feature (1)..(47): Homolog of NCBI NO: 25372940 NR Description: hypothetical protein F16P17.2 [imported] -
  misc_feature (5)..(55): Homolog of NCBI NO: 25372941 NR Description: protein F5O11.10 [imported] - Arabidopsis
  misc_feature (5)..(55): Homolog of NCBI NO: 15221319 NR Description: expressed protein [Arabidopsis thaliana]
MGLPEAVKEFLGDLVYEPCVAASFLSLEHPKLRTFLAQVCLPAIFSTEIMGTRFEEFPKEFWLFFCNIRSYNVFHNFYKFLKAV

SEQ ID NO: 59344 - protein, 83 aa, Glycine max
  peptide (1)..(83): Ceres Seq. ID no. 14305924
MVLNASRTFVGSQHRNGTPRSSKGISWRFGLRALCRCFFLEFGASKASNFSRTGLFAGDLFDGDYGDEVRGVSEGVLAFFLQY

SEQ ID NO: 59345 - DNA, 1984 bp, Glycine max
  misc_feature (1)..(1984): Ceres Seq. ID no. 14314585
tctctcgagtcttgtccctggtcactactcacaaatgtgaattgtccccagtctctcgagaacttagaatagaatactcgtcccacacccaattttcttctctctctcctctcatcacttcatatattcgcaatttctcttccaccgtgaaaccctagacccaactgcgagcgcggagccaagccatgtccctcaaccgcctcctctccgtggcccgccgctccgatcggcgggcctccgccctctcctccctccgatccctctctgcctccgccgccgctgtggctccctccgcctcctcccctcccgcccctcttccccccaccgccatgatctacgaccgcgccgccgaggccgtgaagtccaagctccggcagctcgagaaccccgacccccgcttcctgaagcatgggtccccccggcccaccctctctgaccacacgcgcatcctgtcctcccccgagacgcgcgtgaccacgcttcccaacggcctccgcatcgccaccgagtccaccctcagcgcccgcaccgccaccgtcggcgtctggatcgacgccggttcgcggttcgagaccgaggagaccaacggcaccgcacacttcctcgagcacatgatctttaagggcaccgagaggcgcaacgcgcgtgagctcgaggaagagattgagaacatgggaggacacctcaacgcctacacctcaagggagcaaaccacctactacgccaaggtcaccgacaaggacgtcccccaggccctcgacatcctcgccgacatcctccagaactcccgattcgaggaaactcgcatcaaccgcgagcgcgatgtcattctccgggagatggaggaggttgagggtcaaactgaggaagtgatttttgaccacctacacgctactgcattccagtacactcctcttggaagaaccattcttggacctgctcagaacattaagacgatcaccaaagctcatctgcagagttacattcagacacattacacagctcctaggatggtgatagctgcatctggagctgtcaagcatgaagacattgttgagcaagtgaaaaagttgtttactaagttgtcaacagatcccactaccacatctcaattagttgctagagagccggctatttttactggttctgaggttagaatgcttgatgatgatattcccctagctcaatttgctgtggcttttgaaggggcatcttggaaggatccggattcaattcctctcatggtcatgcaagctatgttgggttcttggaataaggcagcaggaggtggaaaacacatgggttctgagttagcacagcgaattggcattaatgaagttgccgagagcattatggctttcaacaccaattacaaggacacaggtctttttggtgtttatgccgttgccaagcctgattgcttggatgatttgtcctatgcaataatgtatgagacaaccaagttggcttatcgtgtttcagaagatgatgttacacgtgctcgtaatcagttgaaatcttcactgctactacacatagatggaacaagcccagtggctgaagatattggtcgtcagctactcacatatggtcgaagaatcccatttgctgaattgtttgctagaattgatgctgttgatgccagtacaattaaacgtgttgcgaaccgatttatctatgacaaggatgttgttattgctgccacgggtcctattcagcgtttgcctgattacaactggttccgacgcagaacctactggaaccgctattagttcattatagtttttttgcctcatttaaacttcattggaggtctggcaaatgttttattcaaatttacaagatttatgcctctggatggctgctttggcagccatttttcatttatttgtcatggacctctattttgtaacatttttgcagtaataagtatgctgttgtcagtgatgtaattggcatccttcgcaattactcattcctgtcg

SEQ ID NO: 59346 - protein, 528 aa, Glycine max
  peptide (1)..(528): Ceres Seq. ID no. 14314586
  misc_feature (257)..(443): Pfam Name: Peptidase M16 inactive domain Pfam Description: Peptidase M16 inactive domain
  misc_feature (88)..(527): Homolog of NCBI NO: 21357875 NR Description: CG3731-PB [Drosophila melanogaster]
  misc_feature (68)..(524): Homolog of NCBI NO: 34910490 NR Description: putative mitochondrial processing peptidase beta
  misc_feature (1)..(528): Homolog of NCBI NO: 477280 NR Description: ubiquinol-cytochrome-c reductase (EC 1.10.2.2)
  misc_feature (1)..(528): Homolog of NCBI NO: 587566 NR Description: mitochondrial processing peptidase [Solanum
  misc_feature (1)..(528): Homolog of NCBI NO: 477819 NR Description: ubiquinol-cytochrome-c reductase (EC 1.10.2.2)
  misc_feature (1)..(528): Homolog of NCBI NO: 587564 NR Description: mitochondrial processing peptidase [Solanum
  misc_feature (1)..(500): Homolog of NCBI NO: 30678485 NR Description: mitochondrial processing peptidase -related
  misc_feature (1)..(528): Homolog of NCBI NO: 15232845 NR Description: mitochondrial processing peptidase -related
  misc_feature (1)..(528): Homolog of NCBI NO: 13959067 NR Description: mitochondrial processing peptidase [Avicennia
  misc_feature (1)..(528): Homolog of NCBI NO: 12802327 NR Description: mitochondrial processing peptidase beta subunit
MSLNRLLSVARRSDRRASALSSLRSLSASAAAVAPSASSPPAPLPPTAMIYDRAAEAVKSKLRQLENPDPRFLKHGSPRPTLSDHTRILSSPETRVTTLPNGLRIATESTLSARTATVGVWIDAGSRFETEETNGTAHFLEHMIFKGTERRNARELEEEIENMGGHLNAYTSREQTTYYAKVTDKDVPQALDILADILQNSRFEETRINRERDVILREMEEVEGQTEEVIFDHLHATAFQYTPLGRTILGPAQNIKTITKAHLQSYIQTHYTAPRMVIAASGAVKHEDIVEQVKKLFTKLSTDPTTTSQLVAREPAIFTGSEVRMLDDDIPLAQFAVAFEGASWKDPDSIPLMVMQAMLGSWNKAAGGGKHMGSELAQRIGINEVAESIMAFNTNYKDTGLFGVYAVAKPDCLDDLSYAIMYETTKLAYRVSEDDVTRARNQLKSSLLLHIDGTSPVAEDIGRQLLTYGRRIPFAELFARIDAVDASTIKRVANRFIYDKDVVIAATGPIQRLPDYNWFRRRTYWNRY

SEQ ID NO: 59347 - protein, 480 aa, Glycine max
  peptide (1)..(480): Ceres Seq. ID no. 14314587
  misc_feature (209)..(395): Pfam Name: Peptidase M16 inactive domain Pfam Description: Peptidase M16 inactive domain
  misc_feature (40)..(479): Homolog of NCBI NO: 21357875 NR Description: CG3731-PB [Drosophila melanogaster]
  misc_feature (20)..(476): Homolog of NCBI NO: 34910490 NR Description: putative mitochondrial processing peptidase beta
  misc_feature (1)..(480): Homolog of NCBI NO: 477280 NR Description: ubiquinol-cytochrome-c reductase (EC 1.10.2.2)
  misc_feature (1)..(480): Homolog of NCBI NO: 587566 NR Description: mitochondrial processing peptidase [Solanum
  misc_feature (1)..(480): Homolog of NCBI NO: 477819 NR Description: ubiquinol-cytochrome-c reductase (EC 1.10.2.2)
  misc_feature (1)..(480): Homolog of NCBI NO: 587564 NR Description: mitochondrial processing peptidase [Solanum
  misc_feature (1)..(452): Homolog of NCBI NO: 30678485 NR Description: mitochondrial processing peptidase -related
  misc_feature (1)..(480): Homolog of NCBI NO: 15232845 NR Description: mitochondrial processing peptidase -related
  misc_feature (1)..(480): Homolog of NCBI NO: 13959067 NR Description: mitochondrial processing peptidase [Avicennia
  misc_feature (1)..(480): Homolog of NCBI NO: 12802327 NR Description: mitochondrial processing peptidase beta subunit
MIYDRAAEAVKSKLRQLENPDPRFLKHGSPRPTLSDHTRILSSPETRVTTLPNGLRIATESTLSARTATVGVWIDAGSRFETEETNGTAHFLEHMIFKGTERRNARELEEEIENMGGHLNAYTSREQTTYYAKVTDKDVPQALDILADILQNSRFEETRINRERDVILREMEEVEGQTEEVIFDHLHATAFQYTPLGRTILGPAQNIKTITKAHLQSYIQTHYTAPRMVIAASGAVKHEDIVEQVKKLFTKLSTDPTTTSQLVAREPAIFTGSEVRMLDDDIPLAQFAVAFEGASWKDPDSIPLMVMQAMLGSWNKAAGGGKHMGSELAQRIGINEVAESIMAFNTNYKDTGLFGVYAVAKPDCLDDLSYAIMYETTKLAYRVSEDDVTRARNQLKSSLLLHIDGTSPVAEDIGRQLLTYGRRIPFAELFARIDAVDASTIKRVANRFIYDKDVVIAATGPIQRLPDYNWFRRRTYWNRY

SEQ ID NO: 59348 - protein, 386 aa, Glycine max
  peptide (1)..(386): Ceres Seq. ID no. 14314588
  misc_feature (115)..(301): Pfam Name: Peptidase M16 inactive domain Pfam Description: Peptidase M16 inactive domain
  misc_feature (1)..(385): Homolog of NCBI NO: 21357875 NR Description: CG3731-PB [Drosophila melanogaster]
  misc_feature (1)..(382): Homolog of NCBI NO: 34910490 NR Description: putative mitochondrial processing peptidase beta
  misc_feature (1)..(386): Homolog of NCBI NO: 477280 NR Description: ubiquinol-cytochrome-c reductase (EC 1.10.2.2)
  misc_feature (1)..(386): Homolog of NCBI NO: 587566 NR Description: mitochondrial processing peptidase [Solanum
  misc_feature (1)..(386): Homolog of NCBI NO: 477819 NR Description: ubiquinol-cytochrome-c reductase (EC 1.10.2.2)
  misc_feature (1)..(386): Homolog of NCBI NO: 587564 NR Description: mitochondrial processing peptidase [Solanum
  misc_feature (1)..(358): Homolog of NCBI NO: 30678485 NR Description: mitochondrial processing peptidase -related
  misc_feature (1)..(386): Homolog of NCBI NO: 15232845 NR Description: mitochondrial processing peptidase -related
  misc_feature (1)..(386): Homolog of NCBI NO: 13959067 NR Description: mitochondrial processing peptidase [Avicennia
  misc_feature (1)..(386): Homolog of NCBI NO: 12802327 NR Description: mitochondrial processing peptidase beta subunit
MIFKGTERRNARELEEEIENMGGHLNAYTSREQTTYYAKVTDKDVPQALDILADILQNSRFEETRINRERDVILREMEEVEGQTEEVIFDHLHATAFQYTPLGRTILGPAQNIKTITKAHLQSYIQTHYTAPRMVIAASGAVKHEDIVEQVKKLFTKLSTDPTTTSQLVAREPAIFTGSEVRMLDDDIPLAQFAVAFEGASWKDPDSIPLMVMQAMLGSWNKAAGGGKHMGSELAQRIGINEVAESIMAFNTNYKDTGLFGVYAVAKPDCLDDLSYAIMYETTKLAYRVSEDDVTRARNQLKSSLLLHIDGTSPVAEDIGRQLLTYGRRIPFAELFARIDAVDASTIKRVANRFIYDKDVVIAATGPIQRLPDYNWFRRRTYWNRY

SEQ ID NO: 59349 - DNA, 1257 bp, Glycine max
  misc_feature (1)..(1257): Ceres Seq. ID no. 14314563
attaggggaagcgtggctagcagagactagagagatagaattagaattaaaaagcgtgaaggacagtgataggtttggtttggaaggaagaagaaaatgaaggccatagtgataacgaggccaggaggtcccgaagtgctccaacttgaggaagtggaagatccccaagtcggagacgacgagcttctcatcggagtccacgccacttcccttaacagagccgatacctttcagaggaaaggctcctaccctccccctaagggcgccagcccttacctcggtctcgaatgttccggaactgtcctttccctgggtaaaaacgtttccagctggaaaatcggtgatcaggtgtgtgctcttctcgccggaggcggatatgccgagaaagttgcagttccggtaggacaagttcttccggttccagccggtgtttctctcacggatgcagctagttttcctgaggttgcttgcactgtctggtcaactgttttcatgatgagtcgcttatctcaaggggaaaccttgttggttcatggaggttccagtgggattggtacatttgcaattcagatagccaagtatcgagggtcacgagtgtttgttactgcaggaagtgaggagaagctagctttttgcaagagtatcggagctgatgtgggcatcaattataaaacagaagactttgttgcgcgggtaaaggaagaaactggtggccaaggtgttgatgttattcttgattgtatgggagcatcctactatcaaagaaatcttgatagcttgaattttgatggaaggctttttattattggctttcaaggtggggttagtacacaagcagatctacgccctttacttgctaagcgtctcacagtacaaggagctggtttacgcaatagaagtctggaaaataaagctgtgattgttagtgaagtggagaagaatgtttggcctgcaattgccgaaggaaaggttaagcctgtggtctacaaatctttcccgctttctgaggcagcggaggctcaccagcttatggaaagcagccagcatattgggaagatattgcttttgccatgaaaattgtcgtaaatactgaagttcgtgacatacttctggatcctttgtgtttggacttgtttctttgttaagatctcaggattctaatatggttgcggattaaaataacagctaaaggaattgatatggcaagttcatttaaacaatcacaccgtatttatcaattgatatgattattgaaac

SEQ ID NO: 59350 - protein, 325 aa, Glycine max; identical to SEQ ID NO: 53559
  peptide (1)..(325): Ceres Seq. ID no. 14314564
  misc_feature (1)..(323): Homolog of NCBI NO: 13473234 NR Description: NADPH quinone oxidoreductase [Mesorhizobium loti]
  misc_feature (1)..(323): Homolog of NCBI NO: 15610913 NR Description: hypothetical protein Rv3777 [Mycobacterium
  misc_feature (1)..(323): Homolog of NCBI NO: 15843400 NR Description: quinone oxidoreductase [Mycobacterium
  misc_feature (1)..(323): Homolog of NCBI NO: 17934733 NR Description: quinone oxidoreductase
  misc_feature (1)..(323): Homolog of NCBI NO: 15888165 NR Description: AGR_C_1508p [Agrobacterium tumefaciens]
  misc_feature (1)..(324): Homolog of NCBI NO: 29830911 NR Description: putative quinone oxidoreductase
  misc_feature (1)..(324): Homolog of NCBI NO: 21222233 NR Description: putative quinone oxidoreductase [Streptomyces
  misc_feature (1)..(324): Homolog of NCBI NO: 23017076 NR Description: hypothetical protein [Thermobifida fusca]
  misc_feature (1)..(325): Homolog of NCBI NO: 15451578 NR Description: Putative quinone oxidoreductase [Oryza sativa]
  misc_feature (1)..(323): Homolog of NCBI NO: 15234529 NR Description: oxidoreductase, zinc-binding dehydrogenase family

SEQ ID NO: 59351 - protein, 193 aa, Glycine max; identical to SEQ ID NO: 53560
  peptide (1)..(193): Ceres Seq. ID no. 14314565
  misc_feature (1)..(191): Homolog of NCBI NO: 13473234 NR Description: NADPH quinone oxidoreductase [Mesorhizobium loti]
  misc_feature (1)..(191): Homolog of NCBI NO: 15610913 NR Description: hypothetical protein Rv3777 [Mycobacterium
  misc_feature (1)..(191): Homolog of NCBI NO: 15843400 NR Description: quinone oxidoreductase [Mycobacterium
  misc_feature (1)..(191): Homolog of NCBI NO: 17934733 NR Description: quinone oxidoreductase
  misc_feature (1)..(191): Homolog of NCBI NO: 15888165 NR Description: AGR_C_1508p [Agrobacterium tumefaciens]
  misc_feature (1)..(192): Homolog of NCBI NO: 29830911 NR Description: putative quinone oxidoreductase
  misc_feature (1)..(192): Homolog of NCBI NO: 21222233 NR Description: putative quinone oxidoreductase [Streptomyces
  misc_feature (1)..(192): Homolog of NCBI NO: 23017076 NR Description: hypothetical protein [Thermobifida fusca]
  misc_feature (1)..(193): Homolog of NCBI NO: 15451578 NR Description: Putative quinone oxidoreductase [Oryza sativa]
  misc_feature (1)..(191): Homolog of NCBI NO: 15234529 NR Description: oxidoreductase, zinc-binding dehydrogenase family

SEQ ID NO: 59352 - protein, 192 aa, Glycine max; identical to SEQ ID NO: 53561
  peptide (1)..(192): Ceres Seq. ID no. 14314566
  misc_feature (1)..(190): Homolog of NCBI NO: 13473234 NR Description: NADPH quinone oxidoreductase [Mesorhizobium loti]
  misc_feature (1)..(190): Homolog of NCBI NO: 15610913 NR Description: hypothetical protein Rv3777 [Mycobacterium
  misc_feature (1)..(190): Homolog of NCBI NO: 15843400 NR Description: quinone oxidoreductase [Mycobacterium
  misc_feature (1)..(190): Homolog of NCBI NO: 17934733 NR Description: quinone oxidoreductase
  misc_feature (1)..(190): Homolog of NCBI NO: 15888165 NR Description: AGR_C_1508p [Agrobacterium tumefaciens]
  misc_feature (1)..(191): Homolog of NCBI NO: 29830911 NR Description: putative quinone oxidoreductase
  misc_feature (1)..(191): Homolog of NCBI NO: 21222233 NR Description: putative quinone oxidoreductase [Streptomyces
  misc_feature (1)..(191): Homolog of NCBI NO: 23017076 NR Description: hypothetical protein [Thermobifida fusca]
  misc_feature (1)..(192): Homolog of NCBI NO: 15451578 NR Description: Putative quinone oxidoreductase [Oryza sativa]
  misc_feature (1)..(190): Homolog of NCBI NO: 15234529 NR Description: oxidoreductase, zinc-binding dehydrogenase family

SEQ ID NO: 59353 - DNA, 843 bp, Glycine max
  misc_feature (1)..(843): Ceres Seq. ID no. 14305863
aattggatttgaaattgaagttgaccaagccacttgaggatagctttgcatacttttggtgtttgaagagctcttccatctgccaaaatgaagggacgtgtaagatggaatgaagataatattggagaaattgaagcaaacaagcccatgaggcaaaaaatcactgaacctaagactccatatcatcctatgcttgatgatgacagttctccatcccccgtgctaggagattttgacggatataatggtgataaaaatctctcaccaaatgctgaacaaactggttataataatggggcatattgtagcagcaaaggaactagacaatctgacggctggacatcatctgaggatgaggcagaagaaactgaagaggatgaggaagatagaagtttgagtttcagagagcacagaaaggcccactataatgaattccgcaaagtcaaagagctgcaacaaaaggcttctctggaggatggaagtgatgaggataatcatgctgaggttgccaacggggagaagaaaaatgactcatcttctccaacgaatggtacgtgaaggagaccaacactgagaagaaaaaatgtctcttccaatcaatgcttcctacacgatcaacaaataaaacccactccagtttcatcaacctttgtgtatggcggggatagaaacaacagaaggatttactgtatttattgtgtcttttgtgtgtaaaatatcttttctttttccacctggtatgtacatctgaacttgcatgattcgtgaagtctcttgtaatatgccaaattagattttttttggcaagcaacaaacattccggttataagagtgatgatttcg

SEQ ID NO: 59354 - protein, 156 aa, Glycine max
  peptide (1)..(156): Ceres Seq. ID no. 14305864
  misc_feature (6)..(135): Pfam Name: Protein phosphatase inhibitor 2 (IPP-2) Pfam Description: Protein phosphatase inhibitor 2 (IPP-2)
  misc_feature (2)..(155): Homolog of NCBI NO: 18423364 NR Description: expressed protein [Arabidopsis thaliana]
MKGRVRWNEDNIGEIEANKPMRQKITEPKTPYHPMLDDDSSPSPVLGDFDGYNGDKNLSPNAEQTGYNNGAYCSSKGTRQSDGWTSSEDEAEETEEDEEDRSLSFREHRKAHYNEFRKVKELQQKASLEDGSDEDNHAEVANGEKKNDSSSPTNGT

SEQ ID NO: 59355 - protein, 136 aa, Glycine max
  peptide (1)..(136): Ceres Seq. ID no. 14305865
  misc_feature (1)..(115): Pfam Name: Protein phosphatase inhibitor 2 (IPP-2) Pfam Description: Protein phosphatase inhibitor 2 (IPP-2)
  misc_feature (1)..(135): Homolog of NCBI NO: 18423364 NR Description: expressed protein [Arabidopsis thaliana]
MRQKITEPKTPYHPMLDDDSSPSPVLGDFDGYNGDKNLSPNAEQTGYNNGAYCSSKGTRQSDGWTSSEDEAEETEEDEEDRSLSFREHRKAHYNEFRKVKELQQKASLEDGSDEDNHAEVANGEKKNDSSSPTNGT

SEQ ID NO: 59356 - protein, 122 aa, Glycine max
  peptide (1)..(122): Ceres Seq. ID no. 14305866
  misc_feature (1)..(101): Pfam Name: Protein phosphatase inhibitor 2 (IPP-2) Pfam Description: Protein phosphatase inhibitor 2 (IPP-2)
  misc_feature (1)..(121): Homolog of NCBI NO: 18423364 NR Description: expressed protein [Arabidopsis thaliana]
MLDDDSSPSPVLGDFDGYNGDKNLSPNAEQTGYNNGAYCSSKGTRQSDGWTSSEDEAEETEEDEEDRSLSFREHRKAHYNEFRKVKELQQKASLEDGSDEDNHAEVANGEKKNDSSSPTNGT

SEQ ID NO: 59357 - DNA, 894 bp, Glycine max
  misc_feature (1)..(894): Ceres Seq. ID no. 14305843
aaaaaacacacttctataatggatcggaaaagcctcctctccctcgcaatcatcgccattgtcgtcgccgccgtcggaggacagtctccagcggcgtcgcccaccacttctcctccggctgccaccaccactccctttgcatccccagccacagccccttctaagccaaaatcaccggcgccagttgcttctcccacgtcatcatctccaccagcttcgtcccccaatgctgcaaccgcaaccccacccgcttcatctcccacagtagcatctcctccgtctaaagctgccgctccagctccggtggctacacctcccgcagccactcctcctgcggctacaccaccggcagccacacctcctgccgtgactccagtgagttcgccgccagcgccagttccggtgagttctccacctgctcctgttccggtgagctctccacctgcactcgcaccgacaactcccgcacccgtggtagcacccagcgctgaggttccggcacccgctcccaagtcaaagaagaagacaaagaagagtaagaagcacactgcaccagcaccgtcgccgtcattgcttggccctcccgctcctccggtaggagctccgggatcaagccaggattccatgtctcctggtccagctgtatctgaggacgagagtggagctgaaaccatcaggtgcttgaagaaggtcattggatgcttagccttgagctgggctacccttgttttgttcttctagagaagaggctgaggcttcattgctgctgttacatagtattattgtatcatttattgtcttttttggaccctgtcggggggctaaaattaaatttattaccattgttttcttcaatctcttattactttataattgatgatgtttgttgacact

SEQ ID NO: 59358 - protein, 246 aa, Glycine max
  peptide (1)..(246): Ceres Seq. ID no. 14305844
  misc_feature (10)..(224): Pfam Name: Glycoprotein GG/GX Pfam Description: Glycoprotein GG/GX
  misc_feature (31)..(214): Homolog of NCBI NO: 25404769 NR Description: hypothetical protein F14K14.17 [imported] -
  misc_feature (31)..(246): Homolog of NCBI NO: 22330504 NR Description: arabinogalactan-protein, putative (AGP19)
  misc_feature (45)..(244): Homolog of NCBI NO: 7441829 NR Description: proline-rich cell wall protein - upland cotton
  misc_feature (15)..(217): Homolog of NCBI NO: 7486500 NR Description: hypothetical protein F6G17.100 - Arabidopsis
  misc_feature (17)..(239): Homolog of NCBI NO: 1362097 NR Description: probable arabinogalactan protein precursor -
  misc_feature (9)..(216): Homolog of NCBI NO: 34894166 NR Description: P0439B06.4 [Oryza sativa (japonica
  misc_feature (10)..(244): Homolog of NCBI NO: 7441828 NR Description: extensin-like cell wall protein - sea-island
  misc_feature (15)..(246): Homolog of NCBI NO: 18420042 NR Description: arabinogalactan-protein (AGP18) [Arabidopsis
  misc_feature (7)..(239): Homolog of NCBI NO: 10945615 NR Description: arabinogalactan protein [Nicotiana alata]
  misc_feature (7)..(244): Homolog of NCBI NO: 5139695 NR Description: expressed in cucumber hypocotyls [Cucumis
KKHTSIMDRKSLLSLAIIAIVVAAVGGQSPAASPTTSPPAATTTPFASPATAPSKPKSPAPVASPTSSSPPASSPNAATATPPASSPTVASPPSKAAAPAPVATPPAATPPAATPPAATPPAVTPVSSPPAPVPVSSPPAPVPVSSPPALAPTTPAPVVAPSAEVPAPAPKSKKKTKKSKKHTAPAPSPSLLGPPAPPVGAPGSSQDSMSPGPAVSEDESGAETIRCLKKVIGCLALSWATLVLFF

SEQ ID NO: 59359 - protein, 240 aa, Glycine max
  peptide (1)..(240): Ceres Seq. ID no. 14305845
  misc_feature (4)..(218): Pfam Name: Glycoprotein GG/GX Pfam Description: Glycoprotein GG/GX
  misc_feature (25)..(208): Homolog of NCBI NO: 25404769 NR Description: hypothetical protein F14K14.17 [imported] -
  misc_feature (25)..(240): Homolog of NCBI NO: 22330504 NR Description: arabinogalactan-protein, putative (AGP19)
  misc_feature (39)..(238): Homolog of NCBI NO: 7441829 NR Description: proline-rich cell wall protein - upland cotton
  misc_feature (9)..(211): Homolog of NCBI NO: 7486500 NR Description: hypothetical protein F6G17.100 - Arabidopsis
  misc_feature (11)..(233): Homolog of NCBI NO: 1362097 NR Description: probable arabinogalactan protein precursor -
  misc_feature (3)..(210): Homolog of NCBI NO: 34894166 NR Description: P0439B06.4 [Oryza sativa (japonica
  misc_feature (4)..(238): Homolog of NCBI NO: 7441828 NR Description: extensin-like cell wall protein - sea-island
  misc_feature (9)..(240): Homolog of NCBI NO: 18420042 NR Description: arabinogalactan-protein (AGP18) [Arabidopsis
  misc_feature (1)..(233): Homolog of NCBI NO: 10945615 NR Description: arabinogalactan protein [Nicotiana alata]
  misc_feature (1)..(238): Homolog of NCBI NO: 5139695 NR Description: expressed in cucumber hypocotyls [Cucumis
MDRKSLLSLAIIAIVVAAVGGQSPAASPTTSPPAATTTPFASPATAPSKPKSPAPVASPTSSSPPASSPNAATATPPASSPTVASPPSKAAAPAPVATPPAATPPAATPPAATPPAVTPVSSPPAPVPVSSPPAPVPVSSPPALAPTTPAPVVAPSAEVPAPAPKSKKKTKKSKKHTAPAPSPSLLGPPAPPVGAPGSSQDSMSPGPAVSEDESGAETIRCLKKVIGCLALSWATLVLFF

SEQ ID NO: 59360 - DNA, 1360 bp, Glycine max
  misc_feature (1)..(1360): Ceres Seq. ID no. 14314571
agtgatatgatcatacccaaaattaaaccttgtttattgttattccttgatgctatacctctctctaattgcgtttctttttctttcttttcaagccaattaatccttaaaaaacaccgatcgatctgaagcagctagctagccccatcccatcttatatttcatatttgtcaatttggtcatggagaccaacactagtgcattcacaaatgtgaacagcacttggaatcttgaaaagatggaaacaaatgaacaacaaaatgatgaacataatattattctccaagtccaagaccctatgggttctgggatttggcccagcaacaactaccacaaccttcttcaaatgcatcaaacacccaacacaacaaccttatccatcatagcaccaccaccctcctcatcagggttccttggagacatactgggtgttcacaacctagaagaagatgaagagccagaagaagagctaggtgccatgaaggagatgatgtacaagatcgctgctatgcaacccgtggacatcgaccccgccacgattcgaaaaccaaagagaagaaatgttcgcatcagtgatgaccctcagagtgtggctgcacgccacaggagagagaggatcagcgagaaaatccgcatcctccagagactcgttcccgggggaaccaaaatggacaccgcttcaatgcttgatgaagccattcgctatgttaagttcttgaagagacaaataaggttgcttcaatctattcctcaatcttcaaatccaccacaatgcattggtgttgctactacttctcatcatgctagtaccttgttgttagccccttcctgtgattggccttttgcaccaaatgttcttcccagttccaccgccgccaccgcctcaatggacatgtcggccggactgggattcgacgtcggccatgctcatgcttgtgatggctcctccagctttaaccatcatgaggtaatcagtgaataattagtggttataggttataattaattgtattgctttgtatgtgtatgtatatggaattgaggagtgcttggttagtattagtgtatgtgtatgtgtatgttgatgactgttttgagcttggggaaaatcaaggaaaaaagaatagagtaataatttaggggaggggagaaaggtttgttaggatattgttgactaaaggcttctgtagaataatcataacggttggcttggttacgtacacagccatatagaataatgtgtatgccagtttcggtgttggccggaaagtttgtttggtcgagtctcttcctggaataacttccactgtgacgttataacctagtattgaataatgaacaatattattgatttgtggcc

SEQ ID NO: 59361 - protein, 266 aa, Glycine max
  peptide (1)..(266): Ceres Seq. ID no. 14314572
  misc_feature (133)..(180): Pfam Name: Helix-loop-helix DNA-binding domain Pfam Description: Helix-loop-helix DNA-binding domain
  misc_feature (92)..(189): Homolog of NCBI NO: 34910410 NR Description: P0692C11.28 [Oryza sativa (japonica
  misc_feature (92)..(216): Homolog of NCBI NO: 15289790 NR Description: P0002B05.9 [Oryza sativa (japonica
  misc_feature (92)..(216): Homolog of NCBI NO: 34914234 NR Description: P0697C12.24 [Oryza sativa (japonica
  misc_feature (87)..(205): Homolog of NCBI NO: 28393737 NR Description: unknown protein [Arabidopsis thaliana]
  misc_feature (87)..(205): Homolog of NCBI NO: 15232534 NR Description: bHLH protein family [Arabidopsis thaliana]
  misc_feature (87)..(205): Homolog of NCBI NO: 9294680 NR Description: emb|CAB62312.1~gene_id:MHC9.1~similar to unknown
  misc_feature (22)..(187): Homolog of NCBI NO: 15229725 NR Description: bHLH protein family [Arabidopsis thaliana]
  misc_feature (44)..(187): Homolog of NCBI NO: 15240189 NR Description: (bHLH088) putative bHLH transcription factor
  misc_feature (84)..(195): Homolog of NCBI NO: 15236714 NR Description: bHLH protein family [Arabidopsis thaliana]
  misc_feature (4)..(205): Homolog of NCBI NO: 15242494 NR Description: bHLH protein family [Arabidopsis thaliana]
METNTSAFTNVNSTWNLEKMETNEQQNDEHNIILQVQDPMGSGIWPSNNYHNLLQMHQTPNTTTLSIIAPPPSSSGFLGDILGVHNLEEDEEPEEELGAMKEMMYKIAAMQPVDIDPATIRKPKRRNVRISDDPQSVAARHRRERISEKIRILQRLVPGGTKMDTASMLDEAIRYVKFLKRQIRLLQSIPQSSNPPQCIGVATTSHHASTLLLAPSCDWPFAPNVLPSSTAATASMDMSAGLGFDVGHAHACDGSSSFNHHEVISE

SEQ ID NO: 59362 - protein, 247 aa, Glycine max
  peptide (1)..(247): Ceres Seq. ID no. 14314573
  misc_feature (114)..(161): Pfam Name: Helix-loop-helix DNA-binding domain Pfam Description: Helix-loop-helix DNA-binding domain
  misc_feature (73)..(170): Homolog of NCBI NO: 34910410 NR Description: P0692C11.28 [Oryza sativa (japonica
  misc_feature (73)..(197): Homolog of NCBI NO: 15289790 NR Description: P0002B05.9 [Oryza sativa (japonica
  misc_feature (73)..(197): Homolog of NCBI NO: 34914234 NR Description: P0697C12.24 [Oryza sativa (japonica
  misc_feature (68)..(186): Homolog of NCBI NO: 28393737 NR Description: unknown protein [Arabidopsis thaliana]
  misc_feature (68)..(186): Homolog of NCBI NO: 15232534 NR Description: bHLH protein family [Arabidopsis thaliana]
  misc_feature (68)..(186): Homolog of NCBI NO: 9294680 NR Description: emb|CAB62312.1~gene_id:MHC9.1~similar to unknown
  misc_feature (3)..(168): Homolog of NCBI NO: 15229725 NR Description: bHLH protein family [Arabidopsis thaliana]
  misc_feature (25)..(168): Homolog of NCBI NO: 15240189 NR Description: (bHLH088) putative bHLH transcription factor
  misc_feature (65)..(176): Homolog of NCBI NO: 15236714 NR Description: bHLH protein family [Arabidopsis thaliana]
  misc_feature (1)..(186): Homolog of NCBI NO: 15242494 NR Description: bHLH protein family [Arabidopsis thaliana]
METNEQQNDEHNIILQVQDPMGSGIWPSNNYHNLLQMHQTPNTTTLSIIAPPPSSSGFLGDILGVHNLEEDEEPEEELGAMKEMMYKIAAMQPVDIDPATIRKPKRRNVRISDDPQSVAARHRRERISEKIRILQRLVPGGTKMDTASMLDEAIRYVKFLKRQIRLLQSIPQSSNPPQCIGVATTSHHASTLLLAPSCDWPFAPNVLPSSTAATASMDMSAGLGFDVGHAHACDGSSSFNHHEVISE

SEQ ID NO: 59363 - protein, 227 aa, Glycine max
  peptide (1)..(227): Ceres Seq. ID no. 14314574
  misc_feature (94)..(141): Pfam Name: Helix-loop-helix DNA-binding domain Pfam Description: Helix-loop-helix DNA-binding domain
  misc_feature (53)..(150): Homolog of NCBI NO: 34910410 NR Description: P0692C11.28 [Oryza sativa (japonica
  misc_feature (53)..(177): Homolog of NCBI NO: 15289790 NR Description: P0002B05.9 [Oryza sativa (japonica
  misc_feature (53)..(177): Homolog of NCBI NO: 34914234 NR Description: P0697C12.24 [Oryza sativa (japonica
  misc_feature (48)..(166): Homolog of NCBI NO: 28393737 NR Description: unknown protein [Arabidopsis thaliana]
  misc_feature (48)..(166): Homolog of NCBI NO: 15232534 NR Description: bHLH protein family [Arabidopsis thaliana]
  misc_feature (48)..(166): Homolog of NCBI NO: 9294680 NR Description: emb|CAB62312.1~gene_id:MHC9.1~similar to unknown
  misc_feature (1)..(148): Homolog of NCBI NO: 15229725 NR Description: bHLH protein family [Arabidopsis thaliana]
  misc_feature (5)..(148): Homolog of NCBI NO: 15240189 NR Description: (bHLH088) putative bHLH transcription factor
  misc_feature (45)..(156): Homolog of NCBI NO: 15236714 NR Description: bHLH protein family [Arabidopsis thaliana]
  misc_feature (1)..(166): Homolog of NCBI NO: 15242494 NR Description: bHLH protein family [Arabidopsis thaliana]
MGSGIWPSNNYHNLLQMHQTPNTTTLSIIAPPPSSSGFLGDILGVHNLEEDEEPEEELGAMKEMMYKIAAMQPVDIDPATIRKPKRRNVRISDDPQSVAARHRRERISEKIRILQRLVPGGTKMDTASMLDEAIRYVKFLKRQIRLLQSIPQSSNPPQCIGVATTSHHASTLLLAPSCDWPFAPNVLPSSTAATASMDMSAGLGFDVGHAHACDGSSSFNHHEVISE

SEQ ID NO: 59364 - DNA, 985 bp, Glycine max
  misc_feature (1)..(985): Ceres Seq. ID no. 15177289
attattcctcttccatctctattctccataacacccaccacaccacttgtgaaaaacctcattaatatcacacactgacatgtatctctgagctccaatccaatacaagaccacaccttgtcgtgtcggacgaaccttggtgtctgtttttttttttttttcattattttctccgaagagatgaggaagggcagaggtggaggcgcctcggcggcggcggtggatgtgaacggatccattttaaaggagcctcggtaccggggcgtgaggaagagaccgtgggggagattcgccgcggagatcagagacccgttgaagaaagccagggtttggttgggaaccttcgattctgccgaggatgctgctcgtgcctacgacgccgccgctcggactctccgaggtcccaaggccaaaacaaatttcccccctctctcacctttttgctatccacaccccaccaccgatcctttcttctacactggtttccacgatcaacaccaccaccacaacaacaacaaccttaacaaccctcaaagacccacttcaagtggcatgagtagcaccgttgagtccttcagtgggccccgccctcccaccaccaccactaccaccacaaccacaactgcgacgccgtttttgactgctacgcggagatacccgcgcactccccctcttgtccctgaagactgccacagtgactgcgactcttcctcctccgtcgttgacgacggcgacgacaacatcgtttcgtcgtcgtttcgacctcccttgccgtttgatctcaacgcgctgccgtttgatgatgctgccgcggatgatgatctacgccgcaccgcgctttgtctctgatgatgattatcgtgcgatgatgatttttaatttctcatttttttacttgatttttttgttattgctatgcagaagaaatatatatttaaaatgatgatcagatgtaagattatggtaatatgatcttaattctgtg

SEQ ID NO: 59365 - protein, 222 aa, Glycine max
  peptide (1)..(222): Ceres Seq. ID no. 15177290
  misc_feature (23)..(82): Pfam Name: AP2 domain Pfam Description: AP2 domain
  misc_feature (12)..(84): Homolog of NCBI NO: 30526297 NR Description: ethylene response factor 2 [Lycopersicon
  misc_feature (3)..(107): Homolog of NCBI NO: 8809573 NR Description: ethylene-responsive element binding factor
  misc_feature (6)..(84): Homolog of NCBI NO: 28274832 NR Description: ethylene response factor 3 [Lycopersicon
  misc_feature (9)..(96): Homolog of NCBI NO: 38345793 NR Description: OSJNBa0085I10.10 [Oryza sativa (japonica
  misc_feature (13)..(82): Homolog of NCBI NO: 4099914 NR Description: ethylene-responsive element binding protein
  misc_feature (13)..(82): Homolog of NCBI NO: 4099921 NR Description: EREBP-3 homolog [Stylosanthes hamata]
  misc_feature (16)..(191): Homolog of NCBI NO: 32488388 NR Description: OSJNBa0043A12.18 [Oryza sativa (japonica
  misc_feature (1)..(202): Homolog of NCBI NO: 15231110 NR Description: ethylene responsive element binding factor 7
  misc_feature (1)..(222): Homolog of NCBI NO: 15223609 NR Description: ethylene responsive element binding factor 3
  misc_feature (1)..(222): Homolog of NCBI NO: 4587373 NR Description: ethylene responsive element binding factor
MRKGRGGGASAAAVDVNGSILKEPRYRGVRKRPWGRFAAEIRDPLKKARVWLGTFDSAEDAARAYDAAARTLRGPKAKTNFPPLSPFCYPHPTTDPFFYTGFHDQHHHHNNNNLNNPQRPTSSGMSSTVESFSGPRPPTTTTTTTTTTATPFLTATRRYPRTPPLVPEDCHSDCDSSSSVVDDGDDNIVSSSFRPPLPFDLNALPFDDAAADDDLRRTALCL

SEQ ID NO: 59366 - DNA, 1037 bp, Glycine max
  misc_feature (1)..(1037): Ceres Seq. ID no. 15171216
atataaaatttggtgcctcgccttacctcactttccgaccacaaccatgtcagcgttcatttcccacaaccttaaacccggcggcatcatggtgtccccttctctgcaccaccgttcctcattccctttgcaactttctttgaaagcacccttctctgcttcccatcctttagtcctcacccgaagactcttccttccttcggtttccggcatctgggacgctctcaccggcggcaacaacaacaatgcccgcgaagccgttctcgcaattcgacgcggaatgcttcttttccgccagggtgatgtttcggggtctcttgcggagtttgacaaggcaattcagttggaccctcgtcaaaaggcgtatctttggcaaaggggcttatcactttactaccttaatcgatttgaagaggcagctgagcagtttcggttagatgttgcccaaaatccaaatgacactgaagagtccatatggtgctttctgtgtgaagctcaactgtttggagtggatgaagcaaggaagcgatatcttgaggttggcagagacccaaggccagtcatgcgggaagcatataacatgtttaaagatggtggggatccagaaaagcttgtagctgcattctctggtagcagagaaggtgaatatttttatgcttcattatatgctgggctttattacgaatctcagaacggaacagatgctgctaaagttcatatagttgctgcatgccagtctccttatgggcaaaggtctgatgattatatggcctctcttgccaaggttcactgtcgctgtcgaaattgggtcttcaactaaaacttttttcagtgtgtccattgtgcacgacgaagctcattcataagtttctctatacactactcacagcttcttgtgagttactgtgctactggaacggttaaaagaatttatcatattccttttttccttaaccttttcactttgattttgtggtctatatgaatattagtagactggtagaaagtttttaaacatgagatttcttttaacagtg

SEQ ID NO: 59367 - protein, 272 aa, Glycine max
  peptide (1)..(272): Ceres Seq. ID no. 15171217
  misc_feature (76)..(266): Homolog of NCBI NO: 32477509 NR Description: conserved hypothetical protein [Pirellula sp.]
  misc_feature (90)..(270): Homolog of NCBI NO: 23124977 NR Description: hypothetical protein [Nostoc punctiforme]
  misc_feature (42)..(205): Homolog of NCBI NO: 34895050 NR Description: B1045F02.20 [Oryza sativa (japonica
  misc_feature (46)..(269): Homolog of NCBI NO: 30679555 NR Description: expressed protein [Arabidopsis thaliana]
YKIWCLALPHFPTTTMSAFISHNLKPGGIMVSPSLHHRSSFPLQLSLKAPFSASHPLVLTRRLFLPSVSGIWDALTGGNNNNAREAVLAIRRGMLLFRQGDVSGSLAEFDKAIQLDPRQKAYLWQRGLSLYYLNRFEEAAEQFRLDVAQNPNDTEESIWCFLCEAQLFGVDEARKRYLEVGRDPRPVMREAYNMFKDGGDPEKLVAAFSGSREGEYFYASLYAGLYYESQNGTDAAKVHIVAACQSPYGQRSDDYMASLAKVHCRCRNWVFN

SEQ ID NO: 59368 - protein, 257 aa, Glycine max
  peptide (1)..(257): Ceres Seq. ID no. 15171218
  misc_feature (61)..(251): Homolog of NCBI NO: 32477509 NR Description: conserved hypothetical protein [Pirellula sp.]
  misc_feature (75)..(255): Homolog of NCBI NO: 23124977 NR Description: hypothetical protein [Nostoc punctiforme]
  misc_feature (27)..(190): Homolog of NCBI NO: 34895050 NR Description: B1045F02.20 [Oryza sativa (japonica
  misc_feature (31)..(254): Homolog of NCBI NO: 30679555 NR Description: expressed protein [Arabidopsis thaliana]
MSAFISHNLKPGGIMVSPSLHHRSSFPLQLSLKAPFSASHPLVLTRRLFLPSVSGIWDALTGGNNNNAREAVLAIRRGMLLFRQGDVSGSLAEFDKAIQLDPRQKAYLWQRGLSLYYLNRFEEAAEQFRLDVAQNPNDTEESIWCFLCEAQLFGVDEARKRYLEVGRDPRPVMREAYNMFKDGGDPEKLVAAFSGSREGEYFYASLYAGLYYESQNGTDAAKVHIVAACQSPYGQRSDDYMASLAKVHCRCRNWVFN

SEQ ID NO: 59369 - protein, 243 aa, Glycine max
  peptide (1)..(243): Ceres Seq. ID no. 15171219
  misc_feature (47)..(237): Homolog of NCBI NO: 32477509 NR Description: conserved hypothetical protein [Pirellula sp.]
  misc_feature (61)..(241): Homolog of NCBI NO: 23124977 NR Description: hypothetical protein [Nostoc punctiforme]
  misc_feature (13)..(176): Homolog of NCBI NO: 34895050 NR Description: B1045F02.20 [Oryza sativa (japonica
  misc_feature (17)..(240): Homolog of NCBI NO: 30679555 NR Description: expressed protein [Arabidopsis thaliana]
MVSPSLHHRSSFPLQLSLKAPFSASHPLVLTRRLFLPSVSGIWDALTGGNNNNAREAVLAIRRGMLLFRQGDVSGSLAEFDKAIQLDPRQKAYLWQRGLSLYYLNRFEEAAEQFRLDVAQNPNDTEESIWCFLCEAQLFGVDEARKRYLEVGRDPRPVMREAYNMFKDGGDPEKLVAAFSGSREGEYFYASLYAGLYYESQNGTDAAKVHIVAACQSPYGQRSDDYMASLAKVHCRCRNWVFN

SEQ ID NO: 59370 - DNA, 1627 bp, Glycine max
  misc_feature (1)..(1627): Ceres Seq. ID no. 15171193
tccttccattcttcctttcttctttctgcgcaacccaaaaccctagattcgtaactgtaccacgtcctcgtcccaatcaagtgaaagctcgatggctgaaatggaccagaacacgggcggtgagcatgaggcggaggaaacgattgagattgaggcggaagtgcacggtggtgaagaggcggttgttgcggagaagaagtggccggggtggcccggggagagtgtgtttcggatgttagttcctgcgcagaaggttgggggtatcattggacgcaaaggagagttcatcaagaaaattgtcgaggagacacgagctcgagttaaaattcttgatggtcctccgggaactgtgcaaagggctgtaatgatatcagctaaagaggaacctggttcctctgttcctcctgctgtggatggcttattaaggattcataaacggattattgatggtttagagagtgattttacccatgctccttcaggtgtggccgggaaggtttctacaaaacttctagtgccagcctcacaagcaggaagtttgattgggaagcaaggaggaactgtaaaatctatccaagaagcatccaattgtattgttagagttcttggagcagaagacctccctatttttgcccttcaagatgacagggtggttgaagtagttggggatcccgctggagtgcataaggcattagagttaattgcctcccacctaaggaagtttttagttgatcgcggtgtaattccaatttttgaaatgaatatgcaaacagccaatccccaccatgcagagcacatgccaccccaccaatcttggggaccacctcagggtcttcctccaaatgttggtggaggtcctggttttggacctccttctcaatacatgccacctccacgacaacttgatagttattatccatcagctgaaatgcctcctccagtggacagacagccccatcaaggtatatctgcttatggaagagatgcttcaataggtgttcatgcatcttcaaatactcaatctgcaccttccatagtcacacagatcacgcagcaaatgcaaattcctctatcttatgctgatgctgttattggaacagctggagcaagtataagctacatcagacgagctagtggggctactgttaccatacaagaagcaagaggtgttcctggggagatgacagttgaaatcagtggaactgcttctcaagtccaaacagcacagcaactaatacagaattttatggctgaagctgcagctgcagctgcagcaccagcacagccgcaaacaactgtgcctgctgcagaccaaggatacaattcttaccctgcccatggttctgtctatgcctctcctccttccaatcctggacatgctggaggctatggctcagtttatggtgcaaactatgggtactaagctgggcagagcaactaatgctgctattattgaaatttataatgctgggaacagaattaatgtaataatttaagaaattttagattattgtccgacttttgtgttctgttatactcctagtcatttggaaaggtaaaacatactattcgtggccttctgatgtatcatgtacttgttctatgattctatctaattggtgcacct

SEQ ID NO: 59371 - protein, 443 aa, Glycine max
  peptide (1)..(443): Ceres Seq. ID no. 15171194
  misc_feature (139)..(192): Pfam Name: KH domain Pfam Description: KH domain
  misc_feature (322)..(396): Homolog of NCBI NO: 37535668 NR Description: putative RNA-binding protein
  misc_feature (41)..(117): Homolog of NCBI NO: 37535668 NR Description: putative RNA-binding protein
  misc_feature (106)..(239): Homolog of NCBI NO: 37535668 NR Description: putative RNA-binding protein
  misc_feature (176)..(301): Homolog of NCBI NO: 37534332 NR Description: unknown protein [Oryza sativa (japonica
  misc_feature (261)..(393): Homolog of NCBI NO: 37534332 NR Description: unknown protein [Oryza sativa (japonica
  misc_feature (26)..(173): Homolog of NCBI NO: 37534332 NR Description: unknown protein [Oryza sativa (japonica
  misc_feature (1)..(425): Homolog of NCBI NO: 15236094 NR Description: KH domain protein [Arabidopsis thaliana]
  misc_feature (19)..(443): Homolog of NCBI NO: 37536904 NR Description: putative nucleic acid binding protein
  misc_feature (1)..(443): Homolog of NCBI NO: 16924113 NR Description: putative RNA binding protein [Oryza sativa]
  misc_feature (3)..(443): Homolog of NCBI NO: 15229321 NR Description: KH domain protein [Arabidopsis thaliana]
MAEMDQNTGGEHEAEETIEIEAEVHGGEEAVVAEKKWPGWPGESVFRMLVPAQKVGGIIGRKGEFIKKIVEETRARVKILDGPPGTVQRAVMISAKEEPGSSVPPAVDGLLRIHKRIIDGLESDFTHAPSGVAGKVSTKLLVPASQAGSLIGKQGGTVKSIQEASNCIVRVLGAEDLPIFALQDDRVVEVVGDPAGVHKALELIASHLRKFLVDRGVIPIFEMNMQTANPHHAEHMPPHQSWGPPQGLPPNVGGGPGFGPPSQYMPPPRQLDSYYPSAEMPPPVDRQPHQGISAYGRDASIGVHASSNTQSAPSIVTQITQQMQIPLSYADAVIGTAGASISYIRRASGATVTIQEARGVPGEMTVEISGTASQVQTAQQLIQNFMAEAAAAAAAPAQPQTTVPAADQGYNSYPAHGSVYASPPSNPGHAGGYGSVYGANYGY

SEQ ID NO: 59372 - protein, 440 aa, Glycine max
  peptide (1)..(440): Ceres Seq. ID no. 15171195
  misc_feature (136)..(189): Pfam Name: KH domain Pfam Description: KH domain
  misc_feature (319)..(393): Homolog of NCBI NO: 37535668 NR Description: putative RNA-binding protein
  misc_feature (38)..(114): Homolog of NCBI NO: 37535668 NR Description: putative RNA-binding protein
  misc_feature (103)..(236): Homolog of NCBI NO: 37535668 NR Description: putative RNA-binding protein
  misc_feature (173)..(298): Homolog of NCBI NO: 37534332 NR Description: unknown protein [Oryza sativa (japonica
  misc_feature (258)..(390): Homolog of NCBI NO: 37534332 NR Description: unknown protein [Oryza sativa (japonica
  misc_feature (23)..(170): Homolog of NCBI NO: 37534332 NR Description: unknown protein [Oryza sativa (japonica
  misc_feature (1)..(422): Homolog of NCBI NO: 15236094 NR Description: KH domain protein [Arabidopsis thaliana]
  misc_feature (16)..(440): Homolog of NCBI NO: 37536904 NR Description: putative nucleic acid binding protein
  misc_feature (1)..(440): Homolog of NCBI NO: 16924113 NR Description: putative RNA binding protein [Oryza sativa]
  misc_feature (1)..(440): Homolog of NCBI NO: 15229321 NR Description: KH domain protein [Arabidopsis thaliana]
MDQNTGGEHEAEETIEIEAEVHGGEEAVVAEKKWPGWPGESVFRMLVPAQKVGGIIGRKGEFIKKIVEETRARVKILDGPPGTVQRAVMISAKEEPGSSVPPAVDGLLRIHKRIIDGLESDFTHAPSGVAGKVSTKLLVPASQAGSLIGKQGGTVKSIQEASNCIVRVLGAEDLPIFALQDDRVVEVVGDPAGVHKALELIASHLRKFLVDRGVIPIFEMNMQTANPHHAEHMPPHQSWGPPQGLPPNVGGGPGFGPPSQYMPPPRQLDSYYPSAEMPPPVDRQPHQGISAYGRDASIGVHASSNTQSAPSIVTQITQQMQIPLSYADAVIGTAGASISYIRRASGATVTIQEARGVPGEMTVEISGTASQVQTAQQLIQNFMAEAAAAAAAPAQPQTTVPAADQGYNSYPAHGSVYASPPSNPGHAGGYGSVYGANYGY

SEQ ID NO: 59373 - protein, 396 aa, Glycine max
  peptide (1)..(396): Ceres Seq. ID no. 15171196
  misc_feature (92)..(145): Pfam Name: KH domain Pfam Description: KH domain
  misc_feature (275)..(349): Homolog of NCBI NO: 37535668 NR Description: putative RNA-binding protein
  misc_feature (1)..(70): Homolog of NCBI NO: 37535668 NR Description: putative RNA-binding protein
  misc_feature (59)..(192): Homolog of NCBI NO: 37535668 NR Description: putative RNA-binding protein
  misc_feature (129)..(254): Homolog of NCBI NO: 37534332 NR Description: unknown protein [Oryza sativa (japonica
  misc_feature (214)..(346): Homolog of NCBI NO: 37534332 NR Description: unknown protein [Oryza sativa (japonica
  misc_feature (1)..(126): Homolog of NCBI NO: 37534332 NR Description: unknown protein [Oryza sativa (japonica
  misc_feature (1)..(378): Homolog of NCBI NO: 15236094 NR Description: KH domain protein [Arabidopsis thaliana]
  misc_feature (1)..(396): Homolog of NCBI NO: 37536904 NR Description: putative nucleic acid binding protein
  misc_feature (1)..(396): Homolog of NCBI NO: 16924113 NR Description: putative RNA binding protein [Oryza sativa]
  misc_feature (1)..(396): Homolog of NCBI NO: 15229321 NR Description: KH domain protein [Arabidopsis thaliana]
MLVPAQKVGGIIGRKGEFIKKIVEETRARVKILDGPPGTVQRAVMISAKEEPGSSVPPAVDGLLRIHKRIIDGLESDFTHAPSGVAGKVSTKLLVPASQAGSLIGKQGGTVKSIQEASNCIVRVLGAEDLPIFALQDDRVVEVVGDPAGVHKALELIASHLRKFLVDRGVIPIFEMNMQTANPHHAEHMPPHQSWGPPQGLPPNVGGGPGFGPPSQYMPPPRQLDSYYPSAEMPPPVDRQPHQGISAYGRDASIGVHASSNTQSAPSIVTQITQQMQIPLSYADAVIGTAGASISYIRRASGATVTIQEARGVPGEMTVEISGTASQVQTAQQLIQNFMAEAAAAAAAPAQPQTTVPAADQGYNSYPAHGSVYASPPSNPGHAGGYGSVYGANYGY

SEQ ID NO: 59374 - DNA, 1159 bp, Glycine max
  misc_feature (1)..(1159): Ceres Seq. ID no. 14314430
gagagtcacctctcaaattgaattcctagctagtacttaacataatgcagtgagattcacactcccaacgcttcctctttctcccttaaatatcttcattcatctcaacaccaccaccacttccccacttttgttactcagtatgcttggagcccttctcctcaacgccaacttcaagattcatttctcactcatatcatgccaagcccgtgtccccttacccgtcaagcccgcaccgctcagaatgccctctccccactacccccactgggcctccttgcaggccgacattgaagcccacctcaaacaaaccattcccctcaaagaacccctcgaggtcttcgagcccatgctccacctcgccttctccgccccccggaccaccgtcccggccctatgcctcgccgcctgcgagcttgtcggcggtcaccgccaacaagccatggccgcggcatcggccttgttactcaacctcgccaatgcacacgcccatgaacacctaaccgacgggcccatgtacggccccaacatagaactcctcaccggggacgggattgttccgttcgggtttgagttgctggcgaggcccgacgggccagcaagtgcgagcccggagcgagtcctacgtgtgatgattgagatatcacgtgcggtgggttcggtggggttgcaagacgcgcagtacgtgaagaaaacgttgtgggacggtggtgaggaggtgcaaaacgtggaaagcatgcagcgctttgtattggagaaaagggacggtgggttgcatgcatgtggggctgcgtctggtgccatcttgggaggtgggagtgaggaccaaattgaaaggttgagaaattttggatttcatgtggggatgatgaggggaatgctacaaatggggttcatggaaaaacatgtgcaagaggagagacatcttgcactcaaggaactgcaatttttcatggacagagatgttcatgttatttctagttttatttattaatttctagccacttttaagttttctatatatctggaatctcaagtgggttgttgtccatcttcatatgtacggaacatgatcaactgtgcggttcatagacaataattgcacgatcatgtgtttcaaattaaatctgatggtatatatagcagaagtttttaactt

SEQ ID NO: 59375 - protein, 283 aa, Glycine max
  peptide (1)..(283): Ceres Seq. ID no. 14314431
  misc_feature (66)..(243): Pfam Name: Polyprenyl synthetase Pfam Description: Polyprenyl synthetase
  misc_feature (30)..(243): Homolog of NCBI NO: 6449052 NR Description: geranyl diphosphate synthase large subunit
  misc_feature (54)..(243): Homolog of NCBI NO: 21593158 NR Description: geranylgeranyl pyrophosphate synthase
  misc_feature (54)..(243): Homolog of NCBI NO: 413730 NR Description: geranylgeranyl pyrophosphate synthase
  misc_feature (47)..(243): Homolog of NCBI NO: 13431547 NR Description: Geranylgeranyl pyrophosphate synthetase,
  misc_feature (48)..(243): Homolog of NCBI NO: 6277256 NR Description: geranylgeranyl pyrophosphate synthase [Scoparia
  misc_feature (54)..(243): Homolog of NCBI NO: 15234534 NR Description: geranylgeranyl pyrophosphate synthase
  misc_feature (24)..(243): Homolog of NCBI NO: 15233848 NR Description: geranylgeranyl pyrophosphate synthase
  misc_feature (24)..(243): Homolog of NCBI NO: 11692820 NR Description: AT4g38460 [Arabidopsis thaliana]
  misc_feature (24)..(243): Homolog of NCBI NO: 735880 NR Description: geranylgeranyl pyrophosphate synthase-related
  misc_feature (41)..(282): Homolog of NCBI NO: 6449050 NR Description: geranyl diphosphate synthase small subunit
MLGALLLNANFKIHFSLISCQARVPLPVKPAPLRMPSPHYPHWASLQADIEAHLKQTIPLKEPLEVFEPMLHLAFSAPRTTVPALCLAACELVGGHRQQAMAAASALLLNLANAHAHEHLTDGPMYGPNIELLTGDGIVPFGFELLARPDGPASASPERVLRVMIEISRAVGSVGLQDAQYVKKTLWDGGEEVQNVESMQRFVLEKRDGGLHACGAASGAILGGGSEDQIERLRNFGFHVGMMRGMLQMGFMEKHVQEERHLALKELQFFMDRDVHVISSFIY

SEQ ID NO: 59376 - protein, 249 aa, Glycine max
  peptide (1)..(249): Ceres Seq. ID no. 14314432
  misc_feature (32)..(209): Pfam Name: Polyprenyl synthetase Pfam Description: Polyprenyl synthetase
  misc_feature (1)..(209): Homolog of NCBI NO: 6449052 NR Description: geranyl diphosphate synthase large subunit
  misc_feature (20)..(209): Homolog of NCBI NO: 21593158 NR Description: geranylgeranyl pyrophosphate synthase
  misc_feature (20)..(209): Homolog of NCBI NO: 413730 NR Description: geranylgeranyl pyrophosphate synthase
  misc_feature (13)..(209): Homolog of NCBI NO: 13431547 NR Description: Geranylgeranyl pyrophosphate synthetase,
  misc_feature (14)..(209): Homolog of NCBI NO: 6277256 NR Description: geranylgeranyl pyrophosphate synthase [Scoparia
  misc_feature (20)..(209): Homolog of NCBI NO: 15234534 NR Description: geranylgeranyl pyrophosphate synthase
  misc_feature (1)..(209): Homolog of NCBI NO: 15233848 NR Description: geranylgeranyl pyrophosphate synthase
  misc_feature (1)..(209): Homolog of NCBI NO: 11692820 NR Description: AT4g38460 [Arabidopsis thaliana]
  misc_feature (1)..(209): Homolog of NCBI NO: 735880 NR Description: geranylgeranyl pyrophosphate synthase-related
  misc_feature (7)..(248): Homolog of NCBI NO: 6449050 NR Description: geranyl diphosphate synthase small subunit
MPSPHYPHWASLQADIEAHLKQTIPLKEPLEVFEPMLHLAFSAPRTTVPALCLAACELVGGHRQQAMAAASALLLNLANAHAHEHLTDGPMYGPNIELLTGDGIVPFGFELLARPDGPASASPERVLRVMIEISRAVGSVGLQDAQYVKKTLWDGGEEVQNVESMQRFVLEKRDGGLHACGAASGAILGGGSEDQIERLRNFGFHVGMMRGMLQMGFMEKHVQEERHLALKELQFFMDRDVHVISSFIY

SEQ ID NO: 59377 - protein, 214 aa, Glycine max
  peptide (1)..(214): Ceres Seq. ID no. 14314433
  misc_feature (1)..(174): Pfam Name: Polyprenyl synthetase Pfam Description: Polyprenyl synthetase
  misc_feature (1)..(174): Homolog of NCBI NO: 6449052 NR Description: geranyl diphosphate synthase large subunit
  misc_feature (1)..(174): Homolog of NCBI NO: 21593158 NR Description: geranylgeranyl pyrophosphate synthase
  misc_feature (1)..(174): Homolog of NCBI NO: 413730 NR Description: geranylgeranyl pyrophosphate synthase
  misc_feature (1)..(174): Homolog of NCBI NO: 13431547 NR Description: Geranylgeranyl pyrophosphate synthetase,
  misc_feature (1)..(174): Homolog of NCBI NO: 6277256 NR Description: geranylgeranyl pyrophosphate synthase [Scoparia
  misc_feature (1)..(174): Homolog of NCBI NO: 15234534 NR Description: geranylgeranyl pyrophosphate synthase
  misc_feature (1)..(174): Homolog of NCBI NO: 15233848 NR Description: geranylgeranyl pyrophosphate synthase
  misc_feature (1)..(174): Homolog of NCBI NO: 11692820 NR Description: AT4g38460 [Arabidopsis thaliana]
  misc_feature (1)..(174): Homolog of NCBI NO: 735880 NR Description: geranylgeranyl pyrophosphate synthase-related
  misc_feature (1)..(213): Homolog of NCBI NO: 6449050 NR Description: geranyl diphosphate synthase small subunit
MLHLAFSAPRTTVPALCLAACELVGGHRQQAMAAASALLLNLANAHAHEHLTDGPMYGPNIELLTGDGIVPFGFELLARPDGPASASPERVLRVMIEISRAVGSVGLQDAQYVKKTLWDGGEEVQNVESMQRFVLEKRDGGLHACGAASGAILGGGSEDQIERLRNFGFHVGMMRGMLQMGFMEKHVQEERHLALKELQFFMDRDVHVISSFIY

SEQ ID NO: 59378 - DNA, 1431 bp, Glycine max
  misc_feature (1)..(1431): Ceres Seq. ID no. 14303446
gcgcagtgaagaagaagaagaagaagaagaagaagaagaagaagagatgagcgtggaagatcttcctgggaaagaggtaaacgtgctgaagggtcacgagggtggcgtgttagccgcgaggttcaacggcgatggcaattatgttctgagttgcggcaaagaccgtaccatacgcctttggaatcctcaccgtggcatccatatcaagacctataaatcccacgctcgcgaagtccgcgatgtccacgtcacacaggacaactccaagctatgttcctgtggtggagatcgacaaatattttattgggacgttgcaactggacgtgtaattaggaaatttcgtggccatgatggtgaggtaaatggtgtcaaattcaatgagtattcatctgttgtagtctctgctggctatgatcaatcattgcgtgcttgggactgcagatcccacagcacagagccaattcagattattgacacatttgcggatagtgtgatgtctgtttgtttaacaaaaactgaaattattggaggaagtgttgatggaactgttcgaacatttgacattcgtattggcagagaaacatctgataatttagggcaacctgtcaactgtgtatcaatgtcaaatgatggtaactgcattctagccggttgcttagactctacattgcgtcttttggacaggtcgacaggtgaactgttacaagaatataaaggacacactaataagtcttacaaattggattgctgccttaccaatacggatgctcatgtaactggtgtctctgaggatggcttcatttatttctgggatcttgtagatgcatctgttgtttcaagattcaaggctcatacctcagtggtaacaagtgttagttatcatccaaaggaaaactgcatggtaacttcttctgtggatggcaccattagagtatggaagacataagaacgaaatgcaaacactaagcttctatggtgtgtccacgcggtccatagcaataccaattaggataatgatgattacatgtccgattgcgtttggagttcacggacacgatgttacttccaagttatttataattcttcggcagattttgacctataatatgtgcttttcatgtggaagatggtaaacgcaaggtgagttagttggttgcagcatctatacggtcaaatctcacacattttttgactttttgtctccaaaagggatagggtattgtattattcacttgtgtccataaaaggaaaatgatttgtatactatccgttattttgtgaaaatgaggttgtattgtatccgttttggagtttttgatcttgggttttttttactggtatagttggaaaactagtggctgcgatgctcttatgtagttacaaatctatgctgtgattcaatccatggctggtgtttttccagtgatctag

SEQ ID NO: 59379 - protein, 314 aa, Glycine max
  peptide (1)..(314): Ceres Seq. ID no. 14303447
  misc_feature (66)..(103): Pfam Name: WD domain, G-beta repeat Pfam Description: WD domain, G-beta repeat
  misc_feature (33)..(301): Homolog of NCBI NO: 24584567 NR Description: CG4935-PA [Drosophila melanogaster]
  misc_feature (33)..(312): Homolog of NCBI NO: 17533647 NR Description: g-protein beta WD-40 repeat (2F320)
  misc_feature (22)..(312): Homolog of NCBI NO: 39596796 NR Description: Hypothetical protein CBG02300 [Caenorhabditis
  misc_feature (13)..(313): Homolog of NCBI NO: 13385884 NR Description: RIKEN cDNA 1500041N16 [Mus musculus]
  misc_feature (20)..(313): Homolog of NCBI NO: 14150114 NR Description: hypothetical protein MGC4238 [Homo sapiens]
  misc_feature (13)..(313): Homolog of NCBI NO: 18044039 NR Description: RIKEN cDNA 1500041N16 [Mus musculus]
  misc_feature (13)..(313): Homolog of NCBI NO: 12838548 NR Description: unnamed protein product [Mus musculus]
  misc_feature (13)..(313): Homolog of NCBI NO: 34851410 NR Description: similar to RIKEN cDNA 1500041N16 [Rattus
  misc_feature (16)..(291): Homolog of NCBI NO: 10177204 NR Description: contains similarity to unknown
  misc_feature (16)..(313): Homolog of NCBI NO: 18424859 NR Description: transducin / WD-40 repeat protein family
RSEEEEEEEEEEEEEMSVEDLPGKEVNVLKGHEGGVLAARFNGDGNYVLSCGKDRTIRLWNPHRGIHIKTYKSHAREVRDVHVTQDNSKLCSCGGDRQIFYWDVATGRVIRKFRGHDGEVNGVKFNEYSSVVVSAGYDQSLRAWDCRSHSTEPIQIIDTFADSVMSVCLTKTEIIGGSVDGTVRTFDIRIGRETSDNLGQPVNCVSMSNDGNCILAGCLDSTLRLLDRSTGELLQEYKGHTNKSYKLDCCLTNTDAHVTGVSEDGFIYFWDLVDASVVSRFKAHTSVVTSVSYHPKENCMVTSSVDGTIRVWKT

SEQ ID NO: 59380 - protein, 299 aa, Glycine max
  peptide (1)..(299): Ceres Seq. ID no. 14303448
  misc_feature (51)..(88): Pfam Name: WD domain, G-beta repeat Pfam Description: WD domain, G-beta repeat
  misc_feature (18)..(286): Homolog of NCBI NO: 24584567 NR Description: CG4935-PA [Drosophila melanogaster]
  misc_feature (18)..(297): Homolog of NCBI NO: 17533647 NR Description: g-protein beta WD-40 repeat (2F320)
  misc_feature (7)..(297): Homolog of NCBI NO: 39596796 NR Description: Hypothetical protein CBG02300 [Caenorhabditis
  misc_feature (1)..(298): Homolog of NCBI NO: 13385884 NR Description: RIKEN cDNA 1500041N16 [Mus musculus]
  misc_feature (5)..(298): Homolog of NCBI NO: 14150114 NR Description: hypothetical protein MGC4238 [Homo sapiens]
  misc_feature (1)..(298): Homolog of NCBI NO: 18044039 NR Description: RIKEN cDNA 1500041N16 [Mus musculus]
  misc_feature (1)..(298): Homolog of NCBI NO: 12838548 NR Description: unnamed protein product [Mus musculus]
  misc_feature (1)..(298): Homolog of NCBI NO: 34851410 NR Description: similar to RIKEN cDNA 1500041N16 [Rattus
  misc_feature (1)..(276): Homolog of NCBI NO: 10177204 NR Description: contains similarity to unknown
  misc_feature (1)..(298): Homolog of NCBI NO: 18424859 NR Description: transducin / WD-40 repeat protein family
MSVEDLPGKEVNVLKGHEGGVLAARFNGDGNYVLSCGKDRTIRLWNPHRGIHIKTYKSHAREVRDVHVTQDNSKLCSCGGDRQIFYWDVATGRVIRKFRGHDGEVNGVKFNEYSSVVVSAGYDQSLRAWDCRSHSTEPIQIIDTFADSVMSVCLTKTEIIGGSVDGTVRTFDIRIGRETSDNLGQPVNCVSMSNDGNCILAGCLDSTLRLLDRSTGELLQEYKGHTNKSYKLDCCLTNTDAHVTGVSEDGFIYFWDLVDASVVSRFKAHTSVVTSVSYHPKENCMVTSSVDGTIRVWKT

SEQ ID NO: 59381 - DNA, 1346 bp, Glycine max
  misc_feature (1)..(1346): Ceres Seq. ID no. 15175861
gaaaagctaagagtctaagcagatgagtctcaatgtggatgaagatttagtgactgaaatggaggaagcacccactttagctccatctataccattagaaaatgttcaagaaatggtaaggaatgatccttttcatgtgcctataggatatgtgacgagtcaagaagaattggagaaagccaattatatgcctcacctttcatctgagatccctgtcattgatttagcattgctctcaaatggaaacaaggaggagttgttaaaatttgacgtagcatgcaaggagtggggtttctttcaggtaatgctagaaatataatataaaactttttcatgtatctttacaaaaaaacttgagctttggggctacgtaattagtccatggcattgacatatatccatgcaaaaacgagatatttgcttggttttcatcaaatattaatattgcttgaaattgcaattaacatttgcttgtagatagtaaatcatggtgttcaaacagagcttatgcagaaaatgaaggatgcagcatctgagtttttcaatcttccaatagaagagaagaacaagtatgcaatggtttcaagtgagacacaaggttatgggaagggttgtgtagtttctggagagcagacacttgactggtcagattcactaatattaatcacataccccacccagtacagaaagcttcaattttggcctaaaactccagagggattcatggagataatagaggcttatgcaagtgaagttagacgagttggggaggaactgcttagttcaatgtcagtgattatgggaatgcggaagcatgttctttttggactacataaagaatcgtatcaagttttacgactgaactattatcctccttgcagcacacctgaacaagtgcagggtttgagtccacattctgacacaagcagcatcaccttgcttatgcaagacgatgatgtaactggcttagaaattcgacaccaaggaggatgggtgccagtgaacccaataccagatgctctagttgtcaatgttggagatgtaactgagatatggagtaatggcaaatacaagagtgtagaacacagagcaatgacaaataagaacaaggaaaggatttcttatggattatttttgtgcccacagcatgacgtggaagttgagccacttgatcatatgatagattctcataaccccaagttgtttcagaaagtaaggtatggagattatttgagacaatctctgaaaaggaagttggagggaaaaacacacctaaatgaggcaaagttaaaggagtctgatctaaggaatcaagatgattaagaaaagcaaaggcccagtaagag

SEQ ID NO: 59382 - protein, 271 aa, Glycine max
  peptide (1)..(271): Ceres Seq. ID no. 15175862
  misc_feature (112)..(209): Pfam Name: 2OG-Fe(II) oxygenase superfamily Pfam Description: 2OG-Fe(II) oxygenase superfamily
  misc_feature (1)..(263): Homolog of NCBI NO: 37536802 NR Description: putative ethylene-forming enzyme
  misc_feature (1)..(261): Homolog of NCBI NO: 37536820 NR Description: putative ethylene-forming enzyme
  misc_feature (1)..(262): Homolog of NCBI NO: 37536804 NR Description: putative ethylene-forming enzyme
  misc_feature (1)..(261): Homolog of NCBI NO: 15219988 NR Description: oxidoreductase, 2OG-Fe(II) oxygenase family
  misc_feature (1)..(257): Homolog of NCBI NO: 15218400 NR Description: oxidoreductase, 2OG-Fe(II) oxygenase family
  misc_feature (1)..(256): Homolog of NCBI NO: 15229694 NR Description: oxidoreductase, 2OG-Fe(II) oxygenase family
  misc_feature (1)..(260): Homolog of NCBI NO: 34895204 NR Description: P0463A02.24 [Oryza sativa (japonica
  misc_feature (1)..(261): Homolog of NCBI NO: 18402992 NR Description: oxidoreductase, 2OG-Fe(II) oxygenase family
  misc_feature (1)..(258): Homolog of NCBI NO: 7433229 NR Description: ethylene-forming enzyme - white spruce
  misc_feature (1)..(261): Homolog of NCBI NO: 34907194 NR Description: putative ethylene-forming enzyme
MQKMKDAASEFFNLPIEEKNKYAMVSSETQGYGKGCVVSGEQTLDWSDSLILITYPTQYRKLQFWPKTPEGFMEIIEAYASEVRRVGEELLSSMSVIMGMRKHVLFGLHKESYQVLRLNYYPPCSTPEQVQGLSPHSDTSSITLLMQDDDVTGLEIRHQGGWVPVNPIPDALVVNVGDVTEIWSNGKYKSVEHRAMTNKNKERISYGLFLCPQHDVEVEPLDHMIDSHNPKLFQKVRYGDYLRQSLKRKLEGKTHLNEAKLKESDLRNQDD

SEQ ID NO: 59383 - protein, 268 aa, Glycine max
  peptide (1)..(268): Ceres Seq. ID no. 15175863
  misc_feature (109)..(206): Pfam Name: 2OG-Fe(II) oxygenase superfamily Pfam Description: 2OG-Fe(II) oxygenase superfamily
  misc_feature (1)..(260): Homolog of NCBI NO: 37536802 NR Description: putative ethylene-forming enzyme
  misc_feature (1)..(258): Homolog of NCBI NO: 37536820 NR Description: putative ethylene-forming enzyme
  misc_feature (1)..(259): Homolog of NCBI NO: 37536804 NR Description: putative ethylene-forming enzyme
  misc_feature (1)..(258): Homolog of NCBI NO: 15219988 NR Description: oxidoreductase, 2OG-Fe(II) oxygenase family
  misc_feature (1)..(254): Homolog of NCBI NO: 15218400 NR Description: oxidoreductase, 2OG-Fe(II) oxygenase family
  misc_feature (1)..(253): Homolog of NCBI NO: 15229694 NR Description: oxidoreductase, 2OG-Fe(II) oxygenase family
  misc_feature (1)..(257): Homolog of NCBI NO: 34895204 NR Description: P0463A02.24 [Oryza sativa (japonica
  misc_feature (1)..(258): Homolog of NCBI NO: 18402992 NR Description: oxidoreductase, 2OG-Fe(II) oxygenase family
  misc_feature (1)..(255): Homolog of NCBI NO: 7433229 NR Description: ethylene-forming enzyme - white spruce
  misc_feature (1)..(258): Homolog of NCBI NO: 34907194 NR Description: putative ethylene-forming enzyme
MKDAASEFFNLPIEEKNKYAMVSSETQGYGKGCVVSGEQTLDWSDSLILITYPTQYRKLQFWPKTPEGFMEIIEAYASEVRRVGEELLSSMSVIMGMRKHVLFGLHKESYQVLRLNYYPPCSTPEQVQGLSPHSDTSSITLLMQDDDVTGLEIRHQGGWVPVNPIPDALVVNVGDVTEIWSNGKYKSVEHRAMTNKNKERISYGLFLCPQHDVEVEPLDHMIDSHNPKLFQKVRYGDYLRQSLKRKLEGKTHLNEAKLKESDLRNQDD

SEQ ID NO: 59384 - protein, 248 aa, Glycine max
  peptide (1)..(248): Ceres Seq. ID no. 15175864
  misc_feature (89)..(186): Pfam Name: 2OG-Fe(II) oxygenase superfamily Pfam Description: 2OG-Fe(II) oxygenase superfamily
  misc_feature (1)..(240): Homolog of NCBI NO: 37536802 NR Description: putative ethylene-forming enzyme
  misc_feature (1)..(238): Homolog of NCBI NO: 37536820 NR Description: putative ethylene-forming enzyme
  misc_feature (1)..(239): Homolog of NCBI NO: 37536804 NR Description: putative ethylene-forming enzyme
  misc_feature (1)..(238): Homolog of NCBI NO: 15219988 NR Description: oxidoreductase, 2OG-Fe(II) oxygenase family
  misc_feature (1)..(234): Homolog of NCBI NO: 15218400 NR Description: oxidoreductase, 2OG-Fe(II) oxygenase family
  misc_feature (1)..(233): Homolog of NCBI NO: 15229694 NR Description: oxidoreductase, 2OG-Fe(II) oxygenase family
  misc_feature (1)..(237): Homolog of NCBI NO: 34895204 NR Description: P0463A02.24 [Oryza sativa (japonica
  misc_feature (1)..(238): Homolog of NCBI NO: 18402992 NR Description: oxidoreductase, 2OG-Fe(II) oxygenase family
  misc_feature (1)..(235): Homolog of NCBI NO: 7433229 NR Description: ethylene-forming enzyme - white spruce
  misc_feature (1)..(238): Homolog of NCBI NO: 34907194 NR Description: putative ethylene-forming enzyme
MVSSETQGYGKGCVVSGEQTLDWSDSLILITYPTQYRKLQFWPKTPEGFMEIIEAYASEVRRVGEELLSSMSVIMGMRKHVLFGLHKESYQVLRLNYYPPCSTPEQVQGLSPHSDTSSITLLMQDDDVTGLEIRHQGGWVPVNPIPDALVVNVGDVTEIWSNGKYKSVEHRAMTNKNKERISYGLFLCPQHDVEVEPLDHMIDSHNPKLFQKVRYGDYLRQSLKRKLEGKTHLNEAKLKESDLRNQDD

SEQ ID NO: 59385 - DNA, 1469 bp, Glycine max
  misc_feature (1)..(1469): Ceres Seq. ID no. 14312320
ggccgaaggtttatttaagtttcgttttcggttgttcttcttcgcagtctctcaagcagccagcatttattctctcaccacttcaccatccagatccagatcaaatggcagccatggctatgttgcgtttatcaccactctctggtcaaaaccatgcactttctttcccatcatcaccatcaccaccacctaagcttcagaaccgtcctctgtatctcaccaatttgcctcatttgccccaaaggttgaaactttccttcgccggcggcgacggcggagatggggtgggacgtggtggcggtggcggtggcggaggtgaaagctggggtgatgaaggaaaacccaaagattcatcttttggaattttgggtctttttctgaacggttggagatcaagggttgccgctgatccacaattccctttcaaggttttgatggaggagttggtgggtgtgagtgcttgtgtattaggtgacatggcttcaaggcctaattttgggttgaatgaacttgactttgtcttttcaactttggtggttggggcaatcctcaatttcactctcatgtatctattggcacctaccatgacatcatcagcagcatcaaatctacccgccctatttgcttcatgccccaagagtcacatgtttgagcctggtgccttttctcttttggataggttaggaaccttggtgtacaaagggaccattttttctgttgttggctttggtgctggattagttggaaccacactttcaaatgggctgatcaagatgaggaagaagatggatccaacctttgagaccccaaacaagcctccaccaacctttttgaatgctctaacttgggctggtcacatgggggttagcagcaatttgaggtaccagactctgaatggagttgagttcatgttggagagggtgcttaaccccttggctttcaagtcctcagtgttggtgctgaggtgtgtgaacaatgttattgggggcatgtcttttgtggtgctggcaaggttgactggggcacagagtgttggaggggagcagaagaaggagaatgaggttgctttgattgctgagaaggagaagttggagtcagagagggaagaagggttgcagaataatcagtcgacagcaccatcaaagtgatggcatcactcactttggcttgtttcagagaggtttgtcttttactttgaccagggttgttgttggggttggagaagctaaggtttttttttttatgaaaatgtgtcctaaggtcatatgatatgagtctctggcagcaccaaataagtgaaaagggtagattgagatttgagacctagtttgtgacatttgctgcttgtatgtatgttgctgaaacctgttacctgaaacaacaataacacgccaaattagtccggccatgtattggcccccccctcccccttttataaacaaaaaatatttaggccatgcggatttttt

SEQ ID NO: 59386 - protein, 381 aa, Glycine max
  peptide (1)..(381): Ceres Seq. ID no. 14312321
  misc_feature (130)..(342): Homolog of NCBI NO: 34900644 NR Description: hypothetical protein~similar to Arabidopsis
  misc_feature (88)..(120): Homolog of NCBI NO: 15242979 NR Description: expressed protein [Arabidopsis thaliana]
  misc_feature (130)..(342): Homolog of NCBI NO: 15242979 NR Description: expressed protein [Arabidopsis thaliana]
  misc_feature (83)..(120): Homolog of NCBI NO: 34395170 NR Description: chloroplast lumen common protein family-like
  misc_feature (130)..(342): Homolog of NCBI NO: 34395170 NR Description: chloroplast lumen common protein family-like
  misc_feature (88)..(120): Homolog of NCBI NO: 30687286 NR Description: expressed protein [Arabidopsis thaliana]
  misc_feature (117)..(342): Homolog of NCBI NO: 30687286 NR Description: expressed protein [Arabidopsis thaliana]
  misc_feature (10)..(356): Homolog of NCBI NO: 34909204 NR Description: P0425G02.25 [Oryza sativa (japonica
  misc_feature (35)..(362): Homolog of NCBI NO: 15231951 NR Description: glycine-rich protein [Arabidopsis thaliana]
  misc_feature (87)..(362): Homolog of NCBI NO: 15231950 NR Description: expressed protein [Arabidopsis thaliana]
PKVYLSFVFGCSSSQSLKQPAFILSPLHHPDPDQMAAMAMLRLSPLSGQNHALSFPSSPSPPPKLQNRPLYLTNLPHLPQRLKLSFAGGDGGDGVGRGGGGGGGGESWGDEGKPKDSSFGILGLFLNGWRSRVAADPQFPFKVLMEELVGVSACVLGDMASRPNFGLNELDFVFSTLVVGAILNFTLMYLLAPTMTSSAASNLPALFASCPKSHMFEPGAFSLLDRLGTLVYKGTIFSVVGFGAGLVGTTLSNGLIKMRKKMDPTFETPNKPPPTFLNALTWAGHMGVSSNLRYQTLNGVEFMLERVLNPLAFKSSVLVLRCVNNVIGGMSFVVLARLTGAQSVGGEQKKENEVALIAEKEKLESEREEGLQNNQSTAPSK

SEQ ID NO: 59387 - protein, 347 aa, Glycine max
  peptide (1)..(347): Ceres Seq. ID no. 14312322
  misc_feature (96)..(308): Homolog of NCBI NO: 34900644 NR Description: hypothetical protein~similar to Arabidopsis
  misc_feature (54)..(86): Homolog of NCBI NO: 15242979 NR Description: expressed protein [Arabidopsis thaliana]
  misc_feature (96)..(308): Homolog of NCBI NO: 15242979 NR Description: expressed protein [Arabidopsis thaliana]
  misc_feature (49)..(86): Homolog of NCBI NO: 34395170 NR Description: chloroplast lumen common protein family-like
  misc_feature (96)..(308): Homolog of NCBI NO: 34395170 NR Description: chloroplast lumen common protein family-like
  misc_feature (54)..(86): Homolog of NCBI NO: 30687286 NR Description: expressed protein [Arabidopsis thaliana]
  misc_feature (83)..(308): Homolog of NCBI NO: 30687286 NR Description: expressed protein [Arabidopsis thaliana]
  misc_feature (1)..(322): Homolog of NCBI NO: 34909204 NR Description: P0425G02.25 [Oryza sativa (japonica
  misc_feature (1)..(328): Homolog of NCBI NO: 15231951 NR Description: glycine-rich protein [Arabidopsis thaliana]
  misc_feature (53)..(328): Homolog of NCBI NO: 15231950 NR Description: expressed protein [Arabidopsis thaliana]
MAAMAMLRLSPLSGQNHALSFPSSPSPPPKLQNRPLYLTNLPHLPQRLKLSFAGGDGGDGVGRGGGGGGGGESWGDEGKPKDSSFGILGLFLNGWRSRVAADPQFPFKVLMEELVGVSACVLGDMASRPNFGLNELDFVFSTLVVGAILNFTLMYLLAPTMTSSAASNLPALFASCPKSHMFEPGAFSLLDRLGTLVYKGTIFSVVGFGAGLVGTTLSNGLIKMRKKMDPTFETPNKPPPTFLNALTWAGHMGVSSNLRYQTLNGVEFMLERVLNPLAFKSSVLVLRCVNNVIGGMSFVVLARLTGAQSVGGEQKKENEVALIAEKEKLESEREEGLQNNQSTAPSK

SEQ ID NO: 59388 - protein, 344 aa, Glycine max
  peptide (1)..(344): Ceres Seq. ID no. 14312323
  misc_feature (93)..(305): Homolog of NCBI NO: 34900644 NR Description: hypothetical protein~similar to Arabidopsis
  misc_feature (51)..(83): Homolog of NCBI NO: 15242979 NR Description: expressed protein [Arabidopsis thaliana]
  misc_feature (93)..(305): Homolog of NCBI NO: 15242979 NR Description: expressed protein [Arabidopsis thaliana]
  misc_feature (46)..(83): Homolog of NCBI NO: 34395170 NR Description: chloroplast lumen common protein family-like
  misc_feature (93)..(305): Homolog of NCBI NO: 34395170 NR Description: chloroplast lumen common protein family-like
  misc_feature (51)..(83): Homolog of NCBI NO: 30687286 NR Description: expressed protein [Arabidopsis thaliana]
  misc_feature (80)..(305): Homolog of NCBI NO: 30687286 NR Description: expressed protein [Arabidopsis thaliana]
  misc_feature (1)..(319): Homolog of NCBI NO: 34909204 NR Description: P0425G02.25 [Oryza sativa (japonica
  misc_feature (1)..(325): Homolog of NCBI NO: 15231951 NR Description: glycine-rich protein [Arabidopsis thaliana]
  misc_feature (50)..(325): Homolog of NCBI NO: 15231950 NR Description: expressed protein [Arabidopsis thaliana]
MAMLRLSPLSGQNHALSFPSSPSPPPKLQNRPLYLTNLPHLPQRLKLSFAGGDGGDGVGRGGGGGGGGESWGDEGKPKDSSFGILGLFLNGWRSRVAADPQFPFKVLMEELVGVSACVLGDMASRPNFGLNELDFVFSTLVVGAILNFTLMYLLAPTMTSSAASNLPALFASCPKSHMFEPGAFSLLDRLGTLVYKGTIFSVVGFGAGLVGTTLSNGLIKMRKKMDPTFETPNKPPPTFLNALTWAGHMGVSSNLRYQTLNGVEFMLERVLNPLAFKSSVLVLRCVNNVIGGMSFVVLARLTGAQSVGGEQKKENEVALIAEKEKLESEREEGLQNNQSTAPSK

SEQ ID NO: 59389 - DNA, 1293 bp, Glycine max
  misc_feature (1)..(1293): Ceres Seq. ID no. 15177126
ttcttgccctcggaacattcaagagacaacaaggatcatcatgccaaaatgtgtttatatcatcacatgccaacatatccctctttgtcctcttcttgttcccctctgtgttcttcttcgtcttcttcttcttctccagctgcaccctacttcgccgctgctgccgcggcgtatagggctgccacggccacaaggtttaatggaatttccggggaggctttcaaatctcatcatccattgcaccaccatcactcatcatcaccacactatggggttggacttggaccctctcatgagacctctgcagggttgatgagatcaaggtttttgccaaagttgccagcaaagaggagcatgagagcaccgagaatgcggtggacaagcacactccacgctcgatttgtccatgctgtggagcttcttggtggccatgaaagagctacaccaaagtcagttcttgagctcatggatgtgaaggatctcacattagctcatgtcaaaagccatttgcagatgtatcgaactgttaagaccactgacaagcctgctgcttcttcaggcctttcagatggatcaggagaagatgacatgtctccaatgggaagcagtggtggaatgcgtcaattttcagaccaaagaagcctttctgatcgaccactgcaacaagatatggactactcttcaggcaacaacactctatggagtaactcttcaagtagagaaacatggcaacaaaataactctaatgacgtagatggtttcagacccccaatcttccagtcacaacaaatatcaggagggcatcaaattcaggagtgtgattcaacccaactcaagaacagtttgtcaggatcaaatttagagtgcaagaacccaagtttggagttcacattagggagaccagattggaatggcaaaggacaagcctaattttcattggttcccttattgtctctagctagtttgcttaattagtttaattacaacccacggtaacatgtgacaaacttcgtaatctttcctgaaatagagaggtgttgtactatatatatatatatatatatatatatatatatatatatatatatatatgtattcaatcagaaaaataaaattaaaagccctatatagttctataaagttgattcttttttggaagttttacgagttcgtgaacaaatttgtttagcctttttcttgtatttaatattttatttattggtgagaggaggcacagggaaagaaactgatgtagcagctgcaaattactgcagaagaacaatgaagagaaat

SEQ ID NO: 59390 - protein, 309 aa, Glycine max
  peptide (1)..(309): Ceres Seq. ID no. 15177127
  misc_feature (123)..(174): Pfam Name: Myb-like DNA-binding domain Pfam Description: Myb-like DNA-binding domain
  misc_feature (114)..(302): Homolog of NCBI NO: 26450454 NR Description: unknown protein [Arabidopsis thaliana]
  misc_feature (116)..(205): Homolog of NCBI NO: 40737024 NR Description: putative transfactor [Oryza sativa (japonica
  misc_feature (81)..(194): Homolog of NCBI NO: 31415919 NR Description: hypothetical protein [Oryza sativa (japonica
  misc_feature (116)..(243): Homolog of NCBI NO: 15239014 NR Description: myb family transcription factor [Arabidopsis
  misc_feature (111)..(256): Homolog of NCBI NO: 18414945 NR Description: myb family transcription factor [Arabidopsis
  misc_feature (79)..(252): Homolog of NCBI NO: 34905232 NR Description: P0672D01.18 [Oryza sativa (japonica
  misc_feature (79)..(172): Homolog of NCBI NO: 9759140 NR Description: gb|AAD20098.1~gene_id:MQK4.31~similar to unknown
  misc_feature (12)..(218): Homolog of NCBI NO: 29837235 NR Description: OSJNBb0032E15.1 [Oryza sativa (japonica
  misc_feature (46)..(300): Homolog of NCBI NO: 18398337 NR Description: myb family transcription factor [Arabidopsis
  misc_feature (79)..(306): Homolog of NCBI NO: 18418011 NR Description: myb family transcription factor [Arabidopsis
FLPSEHSRDNKDHHAKMCLYHHMPTYPSLSSSCSPLCSSSSSSSSPAAPYFAAAAAAYRAATATRFNGISGEAFKSHHPLHHHHSSSPHYGVGLGPSHETSAGLMRSRFLPKLPAKRSMRAPRMRWTSTLHARFVHAVELLGGHERATPKSVLELMDVKDLTLAHVKSHLQMYRTVKTTDKPAASSGLSDGSGEDDMSPMGSSGGMRQFSDQRSLSDRPLQQDMDYSSGNNTLWSNSSSRETWQQNNSNDVDGFRPPIFQSQQISGGHQIQECDSTQLKNSLSGSNLECKNPSLEFTLGRPDWNGKGQA

SEQ ID NO: 59391 - protein, 293 aa, Glycine max
  peptide (1)..(293): Ceres Seq. ID no. 15177128
  misc_feature (107)..(158): Pfam Name: Myb-like DNA-binding domain Pfam Description: Myb-like DNA-binding domain
  misc_feature (98)..(286): Homolog of NCBI NO: 26450454 NR Description: unknown protein [Arabidopsis thaliana]
  misc_feature (100)..(189): Homolog of NCBI NO: 40737024 NR Description: putative transfactor [Oryza sativa (japonica
  misc_feature (65)..(178): Homolog of NCBI NO: 31415919 NR Description: hypothetical protein [Oryza sativa (japonica
  misc_feature (100)..(227): Homolog of NCBI NO: 15239014 NR Description: myb family transcription factor [Arabidopsis
  misc_feature (95)..(240): Homolog of NCBI NO: 18414945 NR Description: myb family transcription factor [Arabidopsis
  misc_feature (63)..(236): Homolog of NCBI NO: 34905232 NR Description: P0672D01.18 [Oryza sativa (japonica
  misc_feature (63)..(156): Homolog of NCBI NO: 9759140 NR Description: gb|AAD20098.1~gene_id:MQK4.31~similar to unknown
  misc_feature (1)..(202): Homolog of NCBI NO: 29837235 NR Description: OSJNBb0032E15.1 [Oryza sativa (japonica
  misc_feature (30)..(284): Homolog of NCBI NO: 18398337 NR Description: myb family transcription factor [Arabidopsis
  misc_feature (63)..(290): Homolog of NCBI NO: 18418011 NR Description: myb family transcription factor [Arabidopsis
MCLYHHMPTYPSLSSSCSPLCSSSSSSSSPAAPYFAAAAAAYRAATATRFNGISGEAFKSHHPLHHHHSSSPHYGVGLGPSHETSAGLMRSRFLPKLPAKRSMRAPRMRWTSTLHARFVHAVELLGGHERATPKSVLELMDVKDLTLAHVKSHLQMYRTVKTTDKPAASSGLSDGSGEDDMSPMGSSGGMRQFSDQRSLSDRPLQQDMDYSSGNNTLWSNSSSRETWQQNNSNDVDGFRPPIFQSQQISGGHQIQECDSTQLKNSLSGSNLECKNPSLEFTLGRPDWNGKGQA

SEQ ID NO: 59392 - protein, 287 aa, Glycine max
  peptide (1)..(287): Ceres Seq. ID no. 15177129
  misc_feature (101)..(152): Pfam Name: Myb-like DNA-binding domain Pfam Description: Myb-like DNA-binding domain
  misc_feature (92)..(280): Homolog of NCBI NO: 26450454 NR Description: unknown protein [Arabidopsis thaliana]
  misc_feature (94)..(183): Homolog of NCBI NO: 40737024 NR Description: putative transfactor [Oryza sativa (japonica
  misc_feature (59)..(172): Homolog of NCBI NO: 31415919 NR Description: hypothetical protein [Oryza sativa (japonica
  misc_feature (94)..(221): Homolog of NCBI NO: 15239014 NR Description: myb family transcription factor [Arabidopsis
  misc_feature (89)..(234): Homolog of NCBI NO: 18414945 NR Description: myb family transcription factor [Arabidopsis
  misc_feature (57)..(230): Homolog of NCBI NO: 34905232 NR Description: P0672D01.18 [Oryza sativa (japonica
  misc_feature (57)..(150): Homolog of NCBI NO: 9759140 NR Description: gb|AAD20098.1~gene_id:MQK4.31~similar to unknown
  misc_feature (1)..(196): Homolog of NCBI NO: 29837235 NR Description: OSJNBb0032E15.1 [Oryza sativa (japonica
  misc_feature (24)..(278): Homolog of NCBI NO: 18398337 NR Description: myb family transcription factor [Arabidopsis
  misc_feature (57)..(284): Homolog of NCBI NO: 18418011 NR Description: myb family transcription factor [Arabidopsis
MPTYPSLSSSCSPLCSSSSSSSSPAAPYFAAAAAAYRAATATRFNGISGEAFKSHHPLHHHHSSSPHYGVGLGPSHETSAGLMRSRFLPKLPAKRSMRAPRMRWTSTLHARFVHAVELLGGHERATPKSVLELMDVKDLTLAHVKSHLQMYRTVKTTDKPAASSGLSDGSGEDDMSPMGSSGGMRQFSDQRSLSDRPLQQDMDYSSGNNTLWSNSSSRETWQQNNSNDVDGFRPPIFQSQQISGGHQIQECDSTQLKNSLSGSNLECKNPSLEFTLGRPDWNGKGQA

SEQ ID NO: 59393 - DNA, 2091 bp, Glycine max
  misc_feature (1)..(2091): Ceres Seq. ID no. 15174626
gcgaacaaacgaagagtgcaagtgtccgcaaagccgttactcttactcatcacatgaacccctaaatcctaattgctttgttttcccccaattcccaatggcgaacgactcgtcgtttttgttcgccggcattcgtttcgatagaaagaagttcggcgccgatattgccaggttccagaaaaaagacagtgatactgattcggcgatgattttgagcgccgccgaagacgaaggcgagaaaacaatagaacctctggaagaagagaaagtcgcggcgtcaacgacgaagaagaggaagcgcaagggaacctcttccgaaacggtcgaaggattcaatgtgttcagaagttcgacgtctgtggcgcagtcgaatgatgaagtccgagtcattgaggagtccgttgagctgtataataataataagaaggaacaaaataagcaactcgagcgggacgcaatattcagaaagcaacacaacattcatgtctctggttataacgtgccgtctccgcttcaaagctttgatgagttgaaatcaagatataactgtccttcatatttgttgcgcaatctgaaggaacttggatttagagaaccaacacctatccaaaggcaggctataccagtacttttacaaggtcgtgaatgctttgcttgtgcaccaactggctctgggaaaacccttgcgtttgtgtggccaatgcttatgaagcttaaggatccggaaaaaggcagcattcgagctgtgatcctttgtcatactcgtgaattatctgttcaaacatatcgagagtgcaaaaagcttgctaaaagaaaaaaatttcgcattaagttgatgactaagaatcttttaagaaatgctgatttttcaaaatttccatgtgatgtactaatatccacaccacttcgattacgtttggctatcaagaggaagaagattgatctcagcagagttgagtatcttgtcctggatgaatcggataagctatttgagcctgaattattcaagcagattgattctgttatcaaggcatgctcaaatccctcaataatacgctcactgttcagtgctactttacctgattttgttgaagatcgagctcgagaacttatgcatgatgctgttcgtgtaattgttggcagaaagaatatggcttctgaaacaataaagcaaaaattggtttttactggaagtgaagaaggaaaacttctagcaattcgtcaaagctttgccgagagtctaaatcctccggtattggttttcctccaaagcaaggagcgtgccaaggagctgtgcagtgaacttgcatttgacagcattagagttgatgttatccattctgatttgtctcaagcagagcgagaaaatgctgttgataacttcagagctggaaaaacatgggttttgattgctactgatgtagttgcccggggcatggatttcaaaggtgtgaactgtgtgatcaattatgatttccctgattctgctgctgcatatttccacagaattggtcgttctggcagagcagggaggactggagaagcgattactttttacacggaagatgacattccattccttcggaatgttgctaatcttatggcagcatcaggctgtgaggttccttcctatctcatgaagttgcgcaaaaagaagtggaagaagcaccgacccaaaagagattcaatctccacaaaaccagacctatagccctgtaatagcatagaatgacaacatgcttttaaccttgaaatttccagtggtgtttagtatttcttaaataggccgggcagcctagtgtcatgattgcccattcccaaaaatgcaacacgatggaaagggaagggtgaggctaggcaattgcgaccaagagagaatcacgttttatagctaatgcaaggcagtgttgcctaaatttaaaccatgattgtcgtcatatactcctcagccctcactgtaagccccctaaagtgtaatctcatgtgaaatgggaatttttgtgcctctagaaactagaatgtttatttgaacaacatttagaaatttttgtgcccccaaaaccattatttttatatgcttattcagccctt

SEQ ID NO: 59394 - protein, 569 aa, Glycine max
  peptide (1)..(569): Ceres Seq. ID no. 15174627
  misc_feature (189)..(392): Pfam Name: DEAD/DEAH box helicase Pfam Description: DEAD/DEAH box helicase
  misc_feature (78)..(567): Homolog of NCBI NO: 4689114 NR Description: putative ATP-dependent RNA helicase ROK1 [Homo
  misc_feature (123)..(567): Homolog of NCBI NO: 38569503 NR Description: ATP-dependent RNA helicase ROK1 isoform b
  misc_feature (52)..(567): Homolog of NCBI NO: 26348749 NR Description: unnamed protein product [Mus musculus]
  misc_feature (48)..(567): Homolog of NCBI NO: 16758984 NR Description: ATP-dependent, RNA helicase [Rattus norvegicus]
  misc_feature (78)..(567): Homolog of NCBI NO: 38569505 NR Description: ATP-dependent RNA helicase ROK1 isoform a
  misc_feature (78)..(567): Homolog of NCBI NO: 34582345 NR Description: DEAD-box protein 52 (Putative ATP-dependent RNA
  misc_feature (75)..(567): Homolog of NCBI NO: 28829300 NR Description: similar to Rattus norvegicus (Rat). ROK1-like
  misc_feature (37)..(568): Homolog of NCBI NO: 34898932 NR Description: putative ATP-dependent RNA helicase
  misc_feature (33)..(567): Homolog of NCBI NO: 6682259 NR Description: putative RNA helicase [Arabidopsis thaliana]
  misc_feature (33)..(567): Homolog of NCBI NO: 22330935 NR Description: DEAD/DEAH box helicase, putative [Arabidopsis
RTNEECKCPQSRYSYSSHEPLNPNCFVFPQFPMANDSSFLFAGIRFDRKKFGADIARFQKKDSDTDSAMILSAAEDEGEKTIEPLEEEKVAASTTKKRKRKGTSSETVEGFNVFRSSTSVAQSNDEVRVIEESVELYNNNKKEQNKQLERDAIFRKQHNIHVSGYNVPSPLQSFDELKSRYNCPSYLLRNLKELGFREPTPIQRQAIPVLLQGRECFACAPTGSGKTLAFVWPMLMKLKDPEKGSIRAVILCHTRELSVQTYRECKKLAKRKKFRIKLMTKNLLRNADFSKFPCDVLISTPLRLRLAIKRKKIDLSRVEYLVLDESDKLFEPELFKQIDSVIKACSNPSIIRSLFSATLPDFVEDRARELMHDAVRVIVGRKNMASETIKQKLVFTGSEEGKLLAIRQSFAESLNPPVLVFLQSKERAKELCSELAFDSIRVDVIHSDLSQAERENAVDNFRAGKTWVLIATDVVARGMDFKGVNCVINYDFPDSAAAYFHRIGRSGRAGRTGEAITFYTEDDIPFLRNVANLMAASGCEVPSYLMKLRKKKWKKHRPKRDSISTKPDL

SEQ ID NO: 59395 - protein, 537 aa, Glycine max
  peptide (1)..(537): Ceres Seq. ID no. 15174628
  misc_feature (157)..(360): Pfam Name: DEAD/DEAH box helicase Pfam Description: DEAD/DEAH box helicase
  misc_feature (46)..(535): Homolog of NCBI NO: 4689114 NR Description: putative ATP-dependent RNA helicase ROK1 [Homo
  misc_feature (91)..(535): Homolog of NCBI NO: 38569503 NR Description: ATP-dependent RNA helicase ROK1 isoform b
  misc_feature (20)..(535): Homolog of NCBI NO: 26348749 NR Description: unnamed protein product [Mus musculus]
  misc_feature (16)..(535): Homolog of NCBI NO: 16758984 NR Description: ATP-dependent, RNA helicase [Rattus norvegicus]
  misc_feature (46)..(535): Homolog of NCBI NO: 38569505 NR Description: ATP-dependent RNA helicase ROK1 isoform a
  misc_feature (46)..(535): Homolog of NCBI NO: 34582345 NR Description: DEAD-box protein 52 (Putative ATP-dependent RNA
  misc_feature (43)..(535): Homolog of NCBI NO: 28829300 NR Description: similar to Rattus norvegicus (Rat). ROK1-like
  misc_feature (5)..(536): Homolog of NCBI NO: 34898932 NR Description: putative ATP-dependent RNA helicase
  misc_feature (1)..(535): Homolog of NCBI NO: 6682259 NR Description: putative RNA helicase [Arabidopsis thaliana]
  misc_feature (1)..(535): Homolog of NCBI NO: 22330935 NR Description: DEAD/DEAH box helicase, putative [Arabidopsis
MANDSSFLFAGIRFDRKKFGADIARFQKKDSDTDSAMILSAAEDEGEKTIEPLEEEKVAASTTKKRKRKGTSSETVEGFNVFRSSTSVAQSNDEVRVIEESVELYNNNKKEQNKQLERDAIFRKQHNIHVSGYNVPSPLQSFDELKSRYNCPSYLLRNLKELGFREPTPIQRQAIPVLLQGRECFACAPTGSGKTLAFVWPMLMKLKDPEKGSIRAVILCHTRELSVQTYRECKKLAKRKKFRIKLMTKNLLRNADFSKFPCDVLISTPLRLRLAIKRKKIDLSRVEYLVLDESDKLFEPELFKQIDSVIKACSNPSIIRSLFSATLPDFVEDRARELMHDAVRVIVGRKNMASETIKQKLVFTGSEEGKLLAIRQSFAESLNPPVLVFLQSKERAKELCSELAFDSIRVDVIHSDLSQAERENAVDNFRAGKTWVLIATDVVARGMDFKGVNCVINYDFPDSAAAYFHRIGRSGRAGRTGEAITFYTEDDIPFLRNVANLMAASGCEVPSYLMKLRKKKWKKHRPKRDSISTKPDL

SEQ ID NO: 59396 - protein, 501 aa, Glycine max
  peptide (1)..(501): Ceres Seq. ID no. 15174629
  misc_feature (121)..(324): Pfam Name: DEAD/DEAH box helicase Pfam Description: DEAD/DEAH box helicase
  misc_feature (10)..(499): Homolog of NCBI NO: 4689114 NR Description: putative ATP-dependent RNA helicase ROK1 [Homo
  misc_feature (55)..(499): Homolog of NCBI NO: 38569503 NR Description: ATP-dependent RNA helicase ROK1 isoform b
  misc_feature (1)..(499): Homolog of NCBI NO: 26348749 NR Description: unnamed protein product [Mus musculus]
  misc_feature (1)..(499): Homolog of NCBI NO: 16758984 NR Description: ATP-dependent, RNA helicase [Rattus norvegicus]
  misc_feature (10)..(499): Homolog of NCBI NO: 38569505 NR Description: ATP-dependent RNA helicase ROK1 isoform a
  misc_feature (10)..(499): Homolog of NCBI NO: 34582345 NR Description: DEAD-box protein 52 (Putative ATP-dependent RNA
  misc_feature (7)..(499): Homolog of NCBI NO: 28829300 NR Description: similar to Rattus norvegicus (Rat). ROK1-like
  misc_feature (1)..(500): Homolog of NCBI NO: 34898932 NR Description: putative ATP-dependent RNA helicase
  misc_feature (1)..(499): Homolog of NCBI NO: 6682259 NR Description: putative RNA helicase [Arabidopsis thaliana]
  misc_feature (1)..(499): Homolog of NCBI NO: 22330935 NR Description: DEAD/DEAH box helicase, putative [Arabidopsis
MILSAAEDEGEKTIEPLEEEKVAASTTKKRKRKGTSSETVEGFNVFRSSTSVAQSNDEVRVIEESVELYNNNKKEQNKQLERDAIFRKQHNIHVSGYNVPSPLQSFDELKSRYNCPSYLLRNLKELGFREPTPIQRQAIPVLLQGRECFACAPTGSGKTLAFVWPMLMKLKDPEKGSIRAVILCHTRELSVQTYRECKKLAKRKKFRIKLMTKNLLRNADFSKFPCDVLISTPLRLRLAIKRKKIDLSRVEYLVLDESDKLFEPELFKQIDSVIKACSNPSIIRSLFSATLPDFVEDRARELMHDAVRVIVGRKNMASETIKQKLVFTGSEEGKLLAIRQSFAESLNPPVLVFLQSKERAKELCSELAFDSIRVDVIHSDLSQAERENAVDNFRAGKTWVLIATDVVARGMDFKGVNCVINYDFPDSAAAYFHRIGRSGRAGRTGEAITFYTEDDIPFLRNVANLMAASGCEVPSYLMKLRKKKWKKHRPKRDSISTKPDL

SEQ ID NO: 59397 - DNA, 1584 bp, Glycine max
  misc_feature (1)..(1584): Ceres Seq. ID no. 14307776
aactcaagatagaatggcacaggcacaacatgaagagaggatccatgaaaaccaaaaagaaaaggaaacccaagaaacaggaaactctagcttcaaattcaatgcccaagcacctgaatttgttccaagatcacatacccagatgccagtttcaggttattactacccttgcttccaaatttttggtgggtctagtgagtcagctgattggttctttgttggggaccaagatccttcttgtttgatccctactcccaatgttgcacaacccaattcctccaagaatattcttacccctgatcttcaacaaaagatcgttaaacaggtggagtatcagttcagtgacatgagtttgttagcaaatgaatcctttcataaacagatgaataaagatcctgaaggttatgttccaataaccgtaattgcttctaccaaaaaggttaaatctcttgttagtaacattaatatgcttactcaagctatacgttcatcttcaaaacttgttttgagtgttgatggaaaaaaggttaagcgtaaacatccttacactgaaaaggaaaaagaggacttgctggctcgcactgttgtggcagagaatttacctgacgatcattcccatcagaatcttcaaaaaatctttggtatagttgggagcgtgaaaacgatcagaatatgccatccccaagagcctaattcttctcgcccaaaatctgatttcatcgtcagtaataagctccatgcactagtggagtatgagacatcagatatagccgagaaagctgctgagaagttaaatgatgaaagaaattggaggaaagggatgcgtgtaaggttgttccttagatgctcgccaaaatctgttctgaagagtagaaagtcagaatttgatggatatctagatgatgacgagattataaattttgaatctgttgaggattcttctccttctcactcaaacaatgctgaattgtttgagacaaatgttgatgaaaattgggtaggatgtaagaaaggatgggctggtagaggacgtggaaagggtagagggcgcactcaaggacgtggcctacttgccccaccctctcaatcaagcagtactatcctttgtgatgcacacacaaaacacaacactaagggcccaagaatgccagatggaacaagaggcttcaccatgggacgtggcaagccaattagtccttcttctcatgtcacttcacctaaagagtgatggatatttcttaagtttttcctttggctacatatagtgaacttaggagaattctttgcatttcttcaccacagttatttaaaatcagcaaaagtgttttagaagaccctattatgtgggctactagacgggtagtcccaattttttagatttgaccagtttagtaataattcatgatgtatagtgtgatatggtatggcaatccttatgataatggccacgaagattttaaatcttacttagctttcaatttagtgaggggtattgtttttaatgtcggaaataagtgcttattgttattgtacactaaattgtttttgggattgaataagagacttaggagtcaaattctcccc

SEQ ID NO: 59398 - protein, 408 aa, Glycine max
  peptide (1)..(408): Ceres Seq. ID no. 14307777
  misc_feature (195)..(265): Pfam Name: RNA recognition motif. (a.k.a. RRM, RBD, or RNP domain) Pfam Description: RNA recognition motif. (a.k.a. RRM, RBD, or RNP
  misc_feature (130)..(379): Homolog of NCBI NO: 15724224 NR Description: At2g43970/F6E13.10 [Arabidopsis thaliana]
  misc_feature (374)..(397): Homolog of NCBI NO: 18406414 NR Description: VirF-interacting protein FIP1 [Arabidopsis
  misc_feature (93)..(379): Homolog of NCBI NO: 18406414 NR Description: VirF-interacting protein FIP1 [Arabidopsis
  misc_feature (25)..(313): Homolog of NCBI NO: 34896588 NR Description: putative RNA-binding protein [Oryza sativa]
  misc_feature (379)..(397): Homolog of NCBI NO: 34394175 NR Description: putative RNA-binding protein homolog
  misc_feature (22)..(407): Homolog of NCBI NO: 34394175 NR Description: putative RNA-binding protein homolog
  misc_feature (29)..(58): Homolog of NCBI NO: 6449448 NR Description: RNA-binding protein homolog [Brassica napus]
  misc_feature (71)..(321): Homolog of NCBI NO: 6449448 NR Description: RNA-binding protein homolog [Brassica napus]
  misc_feature (5)..(63): Homolog of NCBI NO: 15230287 NR Description: RNA-binding protein, putative [Arabidopsis
  misc_feature (62)..(401): Homolog of NCBI NO: 15230287 NR Description: RNA-binding protein, putative [Arabidopsis
TQDRMAQAQHEERIHENQKEKETQETGNSSFKFNAQAPEFVPRSHTQMPVSGYYYPCFQIFGGSSESADWFFVGDQDPSCLIPTPNVAQPNSSKNILTPDLQQKIVKQVEYQFSDMSLLANESFHKQMNKDPEGYVPITVIASTKKVKSLVSNINMLTQAIRSSSKLVLSVDGKKVKRKHPYTEKEKEDLLARTVVAENLPDDHSHQNLQKIFGIVGSVKTIRICHPQEPNSSRPKSDFIVSNKLHALVEYETSDIAEKAAEKLNDERNWRKGMRVRLFLRCSPKSVLKSRKSEFDGYLDDDEIINFESVEDSSPSHSNNAELFETNVDENWVGCKKGWAGRGRGKGRGRTQGRGLLAPPSQSSSTILCDAHTKHNTKGPRMPDGTRGFTMGRGKPISPSSHVTSPKE

SEQ ID NO: 59399 - protein, 404 aa, Glycine max
  peptide (1)..(404): Ceres Seq. ID no. 14307778
  misc_feature (191)..(261): Pfam Name: RNA recognition motif. (a.k.a. RRM, RBD, or RNP domain) Pfam Description: RNA recognition motif. (a.k.a. RRM, RBD, or RNP
  misc_feature (126)..(375): Homolog of NCBI NO: 15724224 NR Description: At2g43970/F6E13.10 [Arabidopsis thaliana]
  misc_feature (370)..(393): Homolog of NCBI NO: 18406414 NR Description: VirF-interacting protein FIP1 [Arabidopsis
  misc_feature (89)..(375): Homolog of NCBI NO: 18406414 NR Description: VirF-interacting protein FIP1 [Arabidopsis
  misc_feature (21)..(309): Homolog of NCBI NO: 34896588 NR Description: putative RNA-binding protein [Oryza sativa]
  misc_feature (375)..(393): Homolog of NCBI NO: 34394175 NR Description: putative RNA-binding protein homolog
  misc_feature (18)..(403): Homolog of NCBI NO: 34394175 NR Description: putative RNA-binding protein homolog
  misc_feature (25)..(54): Homolog of NCBI NO: 6449448 NR Description: RNA-binding protein homolog [Brassica napus]
  misc_feature (67)..(317): Homolog of NCBI NO: 6449448 NR Description: RNA-binding protein homolog [Brassica napus]
  misc_feature (1)..(59): Homolog of NCBI NO: 15230287 NR Description: RNA-binding protein, putative [Arabidopsis
  misc_feature (58)..(397): Homolog of NCBI NO: 15230287 NR Description: RNA-binding protein, putative [Arabidopsis
MAQAQHEERIHENQKEKETQETGNSSFKFNAQAPEFVPRSHTQMPVSGYYYPCFQIFGGSSESADWFFVGDQDPSCLIPTPNVAQPNSSKNILTPDLQQKIVKQVEYQFSDMSLLANESFHKQMNKDPEGYVPITVIASTKKVKSLVSNINMLTQAIRSSSKLVLSVDGKKVKRKHPYTEKEKEDLLARTVVAENLPDDHSHQNLQKIFGIVGSVKTIRICHPQEPNSSRPKSDFIVSNKLHALVEYETSDIAEKAAEKLNDERNWRKGMRVRLFLRCSPKSVLKSRKSEFDGYLDDDEIINFESVEDSSPSHSNNAELFETNVDENWVGCKKGWAGRGRGKGRGRTQGRGLLAPPSQSSSTILCDAHTKHNTKGPRMPDGTRGFTMGRGKPISPSSHVTSPKE

SEQ ID NO: 59400 - protein, 361 aa, Glycine max
  peptide (1)..(361): Ceres Seq. ID no. 14307779
  misc_feature (148)..(218): Pfam Name: RNA recognition motif. (a.k.a. RRM, RBD, or RNP domain) Pfam Description: RNA recognition motif. (a.k.a. RRM, RBD, or RNP
  misc_feature (83)..(332): Homolog of NCBI NO: 15724224 NR Description: At2g43970/F6E13.10 [Arabidopsis thaliana]
  misc_feature (327)..(350): Homolog of NCBI NO: 18406414 NR Description: VirF-interacting protein FIP1 [Arabidopsis
  misc_feature (46)..(332): Homolog of NCBI NO: 18406414 NR Description: VirF-interacting protein FIP1 [Arabidopsis
  misc_feature (1)..(266): Homolog of NCBI NO: 34896588 NR Description: putative RNA-binding protein [Oryza sativa]
  misc_feature (332)..(350): Homolog of NCBI NO: 34394175 NR Description: putative RNA-binding protein homolog
  misc_feature (1)..(360): Homolog of NCBI NO: 34394175 NR Description: putative RNA-binding protein homolog
  misc_feature (1)..(11): Homolog of NCBI NO: 6449448 NR Description: RNA-binding protein homolog [Brassica napus]
  misc_feature (24)..(274): Homolog of NCBI NO: 6449448 NR Description: RNA-binding protein homolog [Brassica napus]
  misc_feature (1)..(16): Homolog of NCBI NO: 15230287 NR Description: RNA-binding protein, putative [Arabidopsis
  misc_feature (15)..(354): Homolog of NCBI NO: 15230287 NR Description: RNA-binding protein, putative [Arabidopsis
MPVSGYYYPCFQIFGGSSESADWFFVGDQDPSCLIPTPNVAQPNSSKNILTPDLQQKIVKQVEYQFSDMSLLANESFHKQMNKDPEGYVPITVIASTKKVKSLVSNINMLTQAIRSSSKLVLSVDGKKVKRKHPYTEKEKEDLLARTVVAENLPDDHSHQNLQKIFGIVGSVKTIRICHPQEPNSSRPKSDFIVSNKLHALVEYETSDIAEKAAEKLNDERNWRKGMRVRLFLRCSPKSVLKSRKSEFDGYLDDDEIINFESVEDSSPSHSNNAELFETNVDENWVGCKKGWAGRGRGKGRGRTQGRGLLAPPSQSSSTILCDAHTKHNTKGPRMPDGTRGFTMGRGKPISPSSHVTSPKE

SEQ ID NO: 59401 - DNA, 1298 bp, Glycine max
  misc_feature (1)..(1298): Ceres Seq. ID no. 14315362
gaaatctaaagaagagaagggattggaacagattgaagagcaacgtgttatagaggcaaaaattaggatgcggcagcaggaacttcaggatgaagaggaaagaatgcacaaaagactggaaatgagctcctcgaatgtgaatgtggcagttgcagatgttgaatacagttcaaatgcagtgtcttcatcttcagtttctgttgttgaaaatgatgaaattgtttcttctcaagactcatgtgccacatcagtggttagagcaaatgcaaccactaggaccaatagagatgatgaatttgacgttgaccttgaggacatcatggtcatggaagcaatttggctttccattcaggagaatggcaggcggagaaatttatcttttgtcgatgctacttctggacactatgtagctgacggccgctatgtttcatccgtctcatctgtctcatccgtcatgggtccaccaacgggatcatcctcgtctccatctgggggtctcgcttgtgccattgcagctcttgctgagcgccagcaaatggctggagaatcatctatgagcctcaccaatgaaaatatgccatcattcaacaccctaccgggttccagaagattttataacagacttggtagggatatggctaattatccgcctggtgacaacctcaatgaggagccactggatgaagctgtgacaatgactaggagtcatggtgaatgggacatggaccatgggacacagttgactgaaacagcaaccagctatacaaactctgtcgcagcagaagatcgtggtgaactatcatctttgccacggtctgatgacaatgatggaagccttcaaagtgccacagaacccattgttcccgagagttttgaggagcagatgatgctcgccatggctgtctctttggctgaagctcgagccatgtcaagtggacagagtgcttcttggcagtagtttttggttgaggtgctggtttaatctttcttaaattggtgatgcttgccttggctatttgacaagccaagtccaaggttgagaatttgagggaagttcactcgtatgcaatttgttcaaggatcaggtagtgatctcttctcacaaatttatatatataagtatcaaaagaaaactaatgattctagttggtgaaaggttgctgcttaatgccattttttttacttgtgctcgatgtcctctcctgccccctcattggttttctgtaaatagtttgtctttgatagatgtactctcattcttacagtaatatatggcacattttagacacgtactgaag

SEQ ID NO: 59402 - protein, 318 aa, Glycine max
  peptide (1)..(318): Ceres Seq. ID no. 14315363
  misc_feature (22)..(222): Homolog of NCBI NO: 18394446 NR Description: expressed protein [Arabidopsis thaliana]
  misc_feature (1)..(126): Homolog of NCBI NO: 18394446 NR Description: expressed protein [Arabidopsis thaliana]
  misc_feature (1)..(222): Homolog of NCBI NO: 25373045 NR Description: F20D23.17 protein - Arabidopsis thaliana
  misc_feature (286)..(318): Homolog of NCBI NO: 8052547 NR Description: F3F9.7 [Arabidopsis thaliana]
  misc_feature (1)..(201): Homolog of NCBI NO: 8052547 NR Description: F3F9.7 [Arabidopsis thaliana]
  misc_feature (286)..(318): Homolog of NCBI NO: 18411948 NR Description: expressed protein [Arabidopsis thaliana]
  misc_feature (1)..(201): Homolog of NCBI NO: 18411948 NR Description: expressed protein [Arabidopsis thaliana]
KSKEEKGLEQIEEQRVIEAKIRMRQQELQDEEERMHKRLEMSSSNVNVAVADVEYSSNAVSSSSVSVVENDEIVSSQDSCATSVVRANATTRTNRDDEFDVDLEDIMVMEAIWLSIQENGRRRNLSFVDATSGHYVADGRYVSSVSSVSSVMGPPTGSSSSPSGGLACAIAALAERQQMAGESSMSLTNENMPSFNTLPGSRRFYNRLGRDMANYPPGDNLNEEPLDEAVTMTRSHGEWDMDHGTQLTETATSYTNSVAAEDRGELSSLPRSDDNDGSLQSATEPIVPESFEEQMMLAMAVSLAEARAMSSGQSASWQ

SEQ ID NO: 59403 - protein, 296 aa, Glycine max
  peptide (1)..(296): Ceres Seq. ID no. 14315364
  misc_feature (1)..(200): Homolog of NCBI NO: 18394446 NR Description: expressed protein [Arabidopsis thaliana]
  misc_feature (1)..(104): Homolog of NCBI NO: 18394446 NR Description: expressed protein [Arabidopsis thaliana]
  misc_feature (1)..(200): Homolog of NCBI NO: 25373045 NR Description: F20D23.17 protein - Arabidopsis thaliana
  misc_feature (264)..(296): Homolog of NCBI NO: 8052547 NR Description: F3F9.7 [Arabidopsis thaliana]
  misc_feature (1)..(179): Homolog of NCBI NO: 8052547 NR Description: F3F9.7 [Arabidopsis thaliana]
  misc_feature (264)..(296): Homolog of NCBI NO: 18411948 NR Description: expressed protein [Arabidopsis thaliana]
  misc_feature (1)..(179): Homolog of NCBI NO: 18411948 NR Description: expressed protein [Arabidopsis thaliana]
MRQQELQDEEERMHKRLEMSSSNVNVAVADVEYSSNAVSSSSVSVVENDEIVSSQDSCATSVVRANATTRTNRDDEFDVDLEDIMVMEAIWLSIQENGRRRNLSFVDATSGHYVADGRYVSSVSSVSSVMGPPTGSSSSPSGGLACAIAALAERQQMAGESSMSLTNENMPSFNTLPGSRRFYNRLGRDMANYPPGDNLNEEPLDEAVTMTRSHGEWDMDHGTQLTETATSYTNSVAAEDRGELSSLPRSDDNDGSLQSATEPIVPESFEEQMMLAMAVSLAEARAMSSGQSASWQ

SEQ ID NO: 59404 - protein, 284 aa, Glycine max
  peptide (1)..(284): Ceres Seq. ID no. 14315365
  misc_feature (1)..(188): Homolog of NCBI NO: 18394446 NR Description: expressed protein [Arabidopsis thaliana]
  misc_feature (1)..(92): Homolog of NCBI NO: 18394446 NR Description: expressed protein [Arabidopsis thaliana]
  misc_feature (1)..(188): Homolog of NCBI NO: 25373045 NR Description: F20D23.17 protein - Arabidopsis thaliana
  misc_feature (252)..(284): Homolog of NCBI NO: 8052547 NR Description: F3F9.7 [Arabidopsis thaliana]
  misc_feature (1)..(167): Homolog of NCBI NO: 8052547 NR Description: F3F9.7 [Arabidopsis thaliana]
  misc_feature (252)..(284): Homolog of NCBI NO: 18411948 NR Description: expressed protein [Arabidopsis thaliana]
  misc_feature (1)..(167): Homolog of NCBI NO: 18411948 NR Description: expressed protein [Arabidopsis thaliana]
MHKRLEMSSSNVNVAVADVEYSSNAVSSSSVSVVENDEIVSSQDSCATSVVRANATTRTNRDDEFDVDLEDIMVMEAIWLSIQENGRRRNLSFVDATSGHYVADGRYVSSVSSVSSVMGPPTGSSSSPSGGLACAIAALAERQQMAGESSMSLTNENMPSFNTLPGSRRFYNRLGRDMANYPPGDNLNEEPLDEAVTMTRSHGEWDMDHGTQLTETATSYTNSVAAEDRGELSSLPRSDDNDGSLQSATEPIVPESFEEQMMLAMAVSLAEARAMSSGQSASWQ

SEQ ID NO: 59405 - DNA, 1307 bp, Glycine max
  misc_feature (1)..(1307): Ceres Seq. ID no. 14307427
attgttttggcctttggttaaagaatccttcatcacattaatcagtccagacagagaactgagagaagaccctcacttcctgtttggctcgacgaagacctcacttcgcccaacctccgtctccggcggcgtctcttatcctaacggctccttccctcaccgtcactgaaacggcgtccctgaactcgcaacactgccctccctctgactctgatttcgttcgaacttcgaactcattcccacttcgcagtcctcgccatgcttcgttgtcggcgactcctcgcagtggcaaacctcaaacgacatagctagagatctacaaactctccctcattgtctggtcctcttcctgctccaaactgaaccgcaaaatttttgtttttttcactgaatacagggtgcgatttgtttccattttccagtcaatcctatactccttaggctattgtaatcttctgctaataaggaggaattattattgggttctgaaaacatgttgaaacaagcaattggcagaatcttcagaaccggtgtttatgcttgtgaaggaaatagagttttgccttggatttatgtgccttcgagctttttccaccatggacaagcgcacatggcacctagaagcttttttggggtagaggatttccttgatgatgacaatagccgaccttacacataccaaaaagggaagaagtcaaagaatccaaataagcacatatcattcaaacaaagaacaattgcctacatggaaccttttacacttgatgtgtttatctcaaagcgctttgtatcggcttcactcactcatagggtaacaagcaaacaggttgcagttgccgggaccaactccaaggacataaaagctgttcttaggtctcgttcagacataccagcatgcatagcaattggtaggattttagctgaaagagcaaaagaagctgatgtttacactggttcttatactccaagggacagggacaagtttgaagggaaaatcagagctgtagttcaatcacttattgacaatgggattgatatcaaggtttatcttgattgagtttagtcactcaagtttgtgggactatcagttaaggtgttgatattttggttgaagcagtaggccccttgtgtgtttgaacatgtccatttagtttggttttgatgataatgggaatatcattattcgaattacagatttggtaatttagttttatgaatgagttatgttgtcgtaattgtagttggttattcgttttaattaatgttaaataacctgtcacaaataatacaatcatatgatattgtac

SEQ ID NO: 59406 - protein, 187 aa, Glycine max; identical to SEQ ID NO: 54850
  peptide (1)..(187): Ceres Seq. ID no. 14307428
  misc_feature (80)..(181): Pfam Name: Ribosomal L18p/L5e family Pfam Description: Ribosomal L18p/L5e family
  misc_feature (80)..(182): Homolog of NCBI NO: 15241056 NR Description: ribosomal protein L18p family [Arabidopsis
  misc_feature (76)..(186): Homolog of NCBI NO: 22094358 NR Description: hypothetical protein [Oryza sativa (japonica
  misc_feature (64)..(180): Homolog of NCBI NO: 18402538 NR Description: expressed protein [Arabidopsis thaliana]
  misc_feature (69)..(186): Homolog of NCBI NO: 15229493 NR Description: hypothetical protein [Arabidopsis thaliana]
  misc_feature (1)..(187): Homolog of NCBI NO: 37536826 NR Description: hypothetical protein [Oryza sativa (japonica
  misc_feature (1)..(187): Homolog of NCBI NO: 30680844 NR Description: expressed protein [Arabidopsis thaliana]

SEQ ID NO: 59407 - protein, 148 aa, Glycine max; identical to SEQ ID NO: 54851
  peptide (1)..(148): Ceres Seq. ID no. 14307429
  misc_feature (41)..(142): Pfam Name: Ribosomal L18p/L5e family Pfam Description: Ribosomal L18p/L5e family
  misc_feature (41)..(143): Homolog of NCBI NO: 15241056 NR Description: ribosomal protein L18p family [Arabidopsis
  misc_feature (37)..(147): Homolog of NCBI NO: 22094358 NR Description: hypothetical protein [Oryza sativa (japonica
  misc_feature (25)..(141): Homolog of NCBI NO: 18402538 NR Description: expressed protein [Arabidopsis thaliana]
  misc_feature (30)..(147): Homolog of NCBI NO: 15229493 NR Description: hypothetical protein [Arabidopsis thaliana]
  misc_feature (1)..(148): Homolog of NCBI NO: 37536826 NR Description: hypothetical protein [Oryza sativa (japonica
  misc_feature (1)..(148): Homolog of NCBI NO: 30680844 NR Description: expressed protein [Arabidopsis thaliana]

SEQ ID NO: 59408 - protein, 103 aa, Glycine max; identical to SEQ ID NO: 54852
  peptide (1)..(103): Ceres Seq. ID no. 14307430
  misc_feature (1)..(97): Pfam Name: Ribosomal L18p/L5e family Pfam Description: Ribosomal L18p/L5e family
  misc_feature (1)..(98): Homolog of NCBI NO: 15241056 NR Description: ribosomal protein L18p family [Arabidopsis
  misc_feature (1)..(102): Homolog of NCBI NO: 22094358 NR Description: hypothetical protein [Oryza sativa (japonica
  misc_feature (1)..(96): Homolog of NCBI NO: 18402538 NR Description: expressed protein [Arabidopsis thaliana]
  misc_feature (1)..(102): Homolog of NCBI NO: 15229493 NR Description: hypothetical protein [Arabidopsis thaliana]
  misc_feature (1)..(103): Homolog of NCBI NO: 37536826 NR Description: hypothetical protein [Oryza sativa (japonica
  misc_feature (1)..(103): Homolog of NCBI NO: 30680844 NR Description: expressed protein [Arabidopsis thaliana]

SEQ ID NO: 59409 - DNA, 1399 bp, Glycine max
  misc_feature (1)..(1399): Ceres Seq. ID no. 14307446
aaccaaatatatggatttatatttggagtaaggatgaggctgtccaggaagggatcccataagaaagaagttaaattaaattaaaagctatggaccaaaggcagtttatacgttgcatttgatcataccaagttacaagaatttccaaaattcatgaataatccatggcctctggaaaaggaacagattaacacttaacaggcaacaacataaatggcttcttcaagcataacctgcaacttccatccttcaatatcctttccaatctcagccactcgtttttccatatctttttcgcaccctctactttgcacctacaatggcctttcccttcacccttcaagctccagcttcagagtttttgccaagtttgagaaattccaaagccaaccttcccaattccaagagcctgacccctcactctcaccagtagaaaatacagaaacttctgttgaggatggggaggaggatgacagttgcttgccttcagacttggagggtgcagtgcggcaatcaagtgaggccgcggccatatttgtatcttcaggagggataagagccatagttgaacttttaatcccccaactgcaatttttggatgacgaaggcgcgcaggtggaactctgggaattgtcaaggatttttttggatacactcattgaaaaaactaaattccagagagttaaagccatatttccagatgctggtgcagcagcccttctgaaatatcggtggaaagatgctctatttagatttgcaagcttaagtgaccggaagcctgtagaaagtgacgatgaggttgtggttatgattgttcctgattatcagatgttagagtatgtagagagaattgcatccaatctctctaatattccagaacctacgcccctcatcatgtggaatccacgcctgattagtgaggatgttggagttggatttaatgtccgaaagttaagacgtgtctttctaagcacttttacaactgtctatttcatgcgacctatgccatttggagcaatctttaggtgttatcctggattgtggaaagtgttcagtgacgacaaggaaaggccagatagatatttgcttgccaaggaattcgaaatccgtcctgatgctgaagacatcgagcttctatttgccgatgaagaacagaagtctgagcaagggcaaggtttgcttgacaaagcagcaggcatattctcttcaattagccggatgatgaagtctatataattattgatgatgatctttcatatttgttctcatcgttagtgcatcatgctcccattcatgtcaattatatgtttgctccttcaaaattaattttagaaacctttcagttacggcttttatcatatactacaattcaagtatacatattatgatgtgtttgaac

SEQ ID NO: 59410 - protein, 340 aa, Glycine max
  peptide (1)..(340): Ceres Seq. ID no. 14307447
  misc_feature (158)..(320): Homolog of NCBI NO: 33865786 NR Description: conserved hypothetical protein [Synechococcus sp.
  misc_feature (159)..(324): Homolog of NCBI NO: 37522361 NR Description: hypothetical protein glr2792 [Gloeobacter
  misc_feature (90)..(305): Homolog of NCBI NO: 33861443 NR Description: conserved hypothetical protein
  misc_feature (90)..(340): Homolog of NCBI NO: 16329818 NR Description: unknown protein [Synechocystis sp. PCC 6803]
  misc_feature (90)..(340): Homolog of NCBI NO: 17230608 NR Description: hypothetical protein [Nostoc sp. PCC 7120]
  misc_feature (90)..(310): Homolog of NCBI NO: 23040759 NR Description: hypothetical protein [Trichodesmium erythraeum
  misc_feature (1)..(340): Homolog of NCBI NO: 18421131 NR Description: expressed protein [Arabidopsis thaliana]
MASSSITCNFHPSISFPISATRFSISFSHPLLCTYNGLSLHPSSSSFRVFAKFEKFQSQPSQFQEPDPSLSPVENTETSVEDGEEDDSCLPSDLEGAVRQSSEAAAIFVSSGGIRAIVELLIPQLQFLDDEGAQVELWELSRIFLDTLIEKTKFQRVKAIFPDAGAAALLKYRWKDALFRFASLSDRKPVESDDEVVVMIVPDYQMLEYVERIASNLSNIPEPTPLIMWNPRLISEDVGVGFNVRKLRRVFLSTFTTVYFMRPMPFGAIFRCYPGLWKVFSDDKERPDRYLLAKEFEIRPDAEDIELLFADEEQKSEQGQGLLDKAAGIFSSISRMMKSI

SEQ ID NO: 59411 - DNA, 1510 bp, Glycine max
  misc_feature (1)..(1510): Ceres Seq. ID no. 15171096
gatattgaagtatgagtacttttcttttactacactgccatggccgctgccagcctggtgtccctttgggtcctcttctccggcgttgctttgtttcctggaagttgctcgccgcagcatcataacattcttaaacttaaaatgatctcccccttcactcataacctttcaacctccaaaatcattgactcccatctccatatctgggcttctcctcaagaggcttcggaattcccttatgctcccggacaagagccccctgtaccaggaaatcttcattttttgctccagaatatggaggaggcaggagtagatggcgttctcattgtgcagccaatatttcataaatttgatcatagttatgtcacaagtgctttgaagaaatacccgaccaaatttgttggttgttgccttgctaatccaactgatgatggaagtggactgaagcagtttgaagatcttgtcttaaaggatggttatcgtgctgttcgattcaacccagaattgtggccagctggggaaaagatgacaaataaagttgggaaggcaattttccaaagggctggagaactgaatgtaccagtgggattcttgtgcatgaaggtatttttttttatttgcttgtatatataaaagaactatcttgtaaagtttcttctcctcccaatagaaccttaggttgtcaaaatatttctatgtgccgcctatggtattgctacccttctacacagtaaggggcatatttttttatgcatgaagttaatgaaaaaaagaattactgagtcgagtgatttcaggggattggtctatatatgtctgagattgagcagttgtgcacagaatttccatcaacagttgtattgattgatcacttgggcttcatcaaaccaccattgtaagctatattatatcattgtttcaaaggtaaagaaatgcacctttatatgagcattgtattgcaggaatgaagaagaaggtcttgtcttttctcagcttttgaatctatctagattcccaaaagtatatgtgaaatttagttctctttttcaagtgtcaagagagaagtttccttatctggatttggctcctcttttgtcccaagttgtcgctagctttggtgctaaccgtgttatgtggggcagtgattttccatatgctgctgctgaatgtggctacaaagaagccaaagaagcagtgcttcttattgccaaccagatctctttgcctccgtctgatttagagtggatcatggggagaactgttgcacaactcttcccaaaccaatggactgatgctaagcaaggttttcatagagagcgggagtgatgtctctcagattgagtcttataaagcactttcacatgttgtattcttaaattatatgttgaatgtaacatgtaaaattgtctctgcactgatgacatttgttcttgtctttggtaaattcgtacaccaatatttttgttggttgccctgctgttctaggtgaataaccagcattgaataagcg

SEQ ID NO: 59412 - protein, 197 aa, Glycine max
  peptide (1)..(197): Ceres Seq. ID no. 15171097
  misc_feature (48)..(131): Pfam Name: Amidohydrolase Pfam Description: Amidohydrolase
  misc_feature (44)..(110): Homolog of NCBI NO: 25370786 NR Description: hypothetical protein At2g35450 [imported] -
  misc_feature (163)..(188): Homolog of NCBI NO: 25370785 NR Description: hypothetical protein At2g35440 [imported] -
  misc_feature (44)..(188): Homolog of NCBI NO: 34146876 NR Description: At2g35450 [Arabidopsis thaliana]
  misc_feature (44)..(188): Homolog of NCBI NO: 30686415 NR Description: expressed protein [Arabidopsis thaliana]
MAAASLVSLWVLFSGVALFPGSCSPQHHNILKLKMISPFTHNLSTSKIIDSHLHIWASPQEASEFPYAPGQEPPVPGNLHFLLQNMEEAGVDGVLIVQPIFHKFDHSYVTSALKKYPTKFVGCCLANPTDDGSGLKQFEDLVLKDGYRAVRFNPELWPAGEKMTNKVGKAIFQRAGELNVPVGFLCMKVFFFICLYI

SEQ ID NO: 59413 - protein, 163 aa, Glycine max
  peptide (1)..(163): Ceres Seq. ID no. 15171098
  misc_feature (14)..(97): Pfam Name: Amidohydrolase Pfam Description: Amidohydrolase
  misc_feature (10)..(76): Homolog of NCBI NO: 25370786 NR Description: hypothetical protein At2g35450 [imported] -
  misc_feature (129)..(154): Homolog of NCBI NO: 25370785 NR Description: hypothetical protein At2g35440 [imported] -
  misc_feature (10)..(154): Homolog of NCBI NO: 34146876 NR Description: At2g35450 [Arabidopsis thaliana]
  misc_feature (10)..(154): Homolog of NCBI NO: 30686415 NR Description: expressed protein [Arabidopsis thaliana]
MISPFTHNLSTSKIIDSHLHIWASPQEASEFPYAPGQEPPVPGNLHFLLQNMEEAGVDGVLIVQPIFHKFDHSYVTSALKKYPTKFVGCCLANPTDDGSGLKQFEDLVLKDGYRAVRFNPELWPAGEKMTNKVGKAIFQRAGELNVPVGFLCMKVFFFICLYI

SEQ ID NO: 59414 - protein, 112 aa, Glycine max
  peptide (1)..(112): Ceres Seq. ID no. 15171099
  misc_feature (1)..(25): Homolog of NCBI NO: 25370786 NR Description: hypothetical protein At2g35450 [imported] -
  misc_feature (78)..(103): Homolog of NCBI NO: 25370785 NR Description: hypothetical protein At2g35440 [imported] -
  misc_feature (1)..(103): Homolog of NCBI NO: 34146876 NR Description: At2g35450 [Arabidopsis thaliana]
  misc_feature (1)..(103): Homolog of NCBI NO: 30686415 NR Description: expressed protein [Arabidopsis thaliana]
MEEAGVDGVLIVQPIFHKFDHSYVTSALKKYPTKFVGCCLANPTDDGSGLKQFEDLVLKDGYRAVRFNPELWPAGEKMTNKVGKAIFQRAGELNVPVGFLCMKVFFFICLYI

SEQ ID NO: 59415 - DNA, 1067 bp, Glycine max
  misc_feature (1)..(1067): Ceres Seq. ID no. 12597180
ggagtcacaaattttccactcttcctcaccgattgctagaatggaatttcgatgctcagtcatctcttttaccattctcttctctcttgctcttgcaggagagagccatgtccatgcatcgctacctgaggaagattattgggaagctgtttggccaaacactcccattcccactgcactgcgagacgttctaaagcctctccctgcaggtgttgaaatcgatcaactccctaagcaaattgatgatacacagtacccaaaaacattcttctataaagaagaccttcatccaggcaaaacaatgaaagtacaattcaccaagcgtccctatgcacaaccttatggtgtatatacatggttaacggatattaaagacacctctaaagaagggtatagttttgaagagatatgcatcaagaaagaagcgtttgagggagaagagaagttttgtgcaaaatccttgggaacagtaattggttttgccatttcaaagctgggaaagaacattcaagtactttcaagttcctttgtcaataagcaagagcaatacactgtggaaggagtgcagaatcttggagacaaagcagtgatgtgtcatgggctaaatttcagaactgcagtattttactgccataaagtccgtgaaacaacagctttcgtggttccattggtggctggtgatggaaccaaaactcaggcacttgctgtttgccactcagatacttctggaatgaatcatcacattcttcatgaactcatgggagttgatcctggaactaaccctgtttgccatttccttggaagcaaggccattttatgggtacccaatatatctatggacactgcctatcagactaacgttgttgtttaattagtccatgcatctgcatcttgggcaccataagattgtatataaaataaattatggtgtgttgtgtatgttgtgcaagacctggaacttcacctttctacgtacgtgtgctgttaggatgcagtgtgctttgatgatgctttgatgaatatgcagtgtgcttttttaagtctattattttcttttattctctttt

SEQ ID NO: 59416 - protein, 289 aa, Glycine max
  peptide (1)..(289): Ceres Seq. ID no. 12597181
ESQIFHSSSPIARMEFRCSVISFTILFSLALAGESHVHASLPEEDYWEAVWPNTPIPTALRDVLKPLPAGVEIDQLPKQIDDTQYPKTFFYKEDLHPGKTMKVQFTKRPYAQPYGVYTWLTDIKDTSKEGYSFEEICIKKEAFEGEEKFCAKSLGTVIGFAISKLGKNIQVLSSSFVNKQEQYTVEGVQNLGDKAVMCHGLNFRTAVFYCHKVRETTAFVVPLVAGDGTKTQALAVCHSDTSGMNHHILHELMGVDPGTNPVCHFLGSKAILWVPNISMDTAYQTNVVV

SEQ ID NO: 59417 - protein, 276 aa, Glycine max
  peptide (1)..(276): Ceres Seq. ID no. 12597182
MEFRCSVISFTILFSLALAGESHVHASLPEEDYWEAVWPNTPIPTALRDVLKPLPAGVEIDQLPKQIDDTQYPKTFFYKEDLHPGKTMKVQFTKRPYAQPYGVYTWLTDIKDTSKEGYSFEEICIKKEAFEGEEKFCAKSLGTVIGFAISKLGKNIQVLSSSFVNKQEQYTVEGVQNLGDKAVMCHGLNFRTAVFYCHKVRETTAFVVPLVAGDGTKTQALAVCHSDTSGMNHHILHELMGVDPGTNPVCHFLGSKAILWVPNISMDTAYQTNVVV

SEQ ID NO: 59418 - protein, 189 aa, Glycine max
  peptide (1)..(189): Ceres Seq. ID no. 12597183
MKVQFTKRPYAQPYGVYTWLTDIKDTSKEGYSFEEICIKKEAFEGEEKFCAKSLGTVIGFAISKLGKNIQVLSSSFVNKQEQYTVEGVQNLGDKAVMCHGLNFRTAVFYCHKVRETTAFVVPLVAGDGTKTQALAVCHSDTSGMNHHILHELMGVDPGTNPVCHFLGSKAILWVPNISMDTAYQTNVVV

SEQ ID NO: 59419 - DNA, 1314 bp, Glycine max
  misc_feature (1)..(1314): Ceres Seq. ID no. 14307408
aagaaaaacaaaaccctccttcttgagagagaaagaagaaagatggctccgaatcttgaatgtcgcatgtacgaagcgaagtacccggaggtggacatggcggtgatgatacaggtgaagaacatagcggacatgggggcctacgtgtcgctgctggagtacaacaacatcgagggaatgatcttgttctccgagctctcccgccgtcggattcggagcgtgagcagcctcatcaaggttggacgaatcgagccggtgatggtgctccgtgtcgacaaggaaaagggttacatcgatctcagcaagcgcagggtctccgaagaagacatccaggcctgcgaggagaggtacaacaagagcaagctcgtccactccatcatgcgccacgtcgccgaaaccctcaacatcgatttggaggaactttatattcacattggatggcctttgtatcgcaaatatggtcatgcttttgaggctttcaaaataattgtgactgatcctgatactgttttaagtactctcactcgtgaagttaaggaagttggccctgacgggcaagaggtgactaaggtggtgccagctgtatcagaagaagtgaaggattctcttgtgaagaatattagaagacgaatgaccccccaacccttgaaaattagggcagatattgaaatgaaatgttttcaatttgatggagttcttcacattaaggaggcaatgcataaggctgaagctgcaggaaatgatgactgccccgtcaaaattaaacttgttgctcccccactttatgttcttaccacccagacactggacaaggagcaaggaatattggttctcaacaatgccatagcttcttgcactgaagcaatagaacaacacaagggtaaacttgtggttaaggaggcagctagagcagtgagtgaacgtgatgataaattgcttgctgagcacatggctaagctacgccaagataatgaagaggtcagtggtgatgaagacagtgaggaggaagaagatacaggaatgggcgaggttgatgtggataatggtgccgggataacggactgacaaaaaacttgtaggtatagtaaggcatagatagcagagtacggctttactaattttgtcttttttattattattctttacaaaactgtctttaaatgcggttgtataatacaagcttgaattactttatgttgagatgtcttgtattttattttttgatgtcaagtgatgtcttgtaacttgcgaagcgattttggagtttcttgacgagggtgttcaacccaaactaatgagatttacagttacttc

SEQ ID NO: 59420 - protein, 354 aa, Glycine max
  peptide (1)..(354): Ceres Seq. ID no. 14307409
  misc_feature (28)..(103): Pfam Name: S1 RNA binding domain Pfam Description: S1 RNA binding domain
  misc_feature (193)..(335): Homolog of NCBI NO: 19114993 NR Description: eukaryotic translation initiation factor 2 alpha
  misc_feature (21)..(174): Homolog of NCBI NO: 19114993 NR Description: eukaryotic translation initiation factor 2 alpha
  misc_feature (196)..(343): Homolog of NCBI NO: 40744551 NR Description: hypothetical protein AN3156.2 [Aspergillus
  misc_feature (21)..(168): Homolog of NCBI NO: 40744551 NR Description: hypothetical protein AN3156.2 [Aspergillus
  misc_feature (17)..(326): Homolog of NCBI NO: 4588003 NR Description: hypothetical EIF-2-Alpha [Arabidopsis thaliana]
  misc_feature (17)..(351): Homolog of NCBI NO: 34898218 NR Description: putative eukaryotic translation initiation factor
  misc_feature (16)..(354): Homolog of NCBI NO: 13549160 NR Description: protein synthesis initiation factor eIF2 alpha
  misc_feature (16)..(354): Homolog of NCBI NO: 15239135 NR Description: eukaryotic translation initiation factor 2 alpha
  misc_feature (17)..(354): Homolog of NCBI NO: 21537411 NR Description: putative eukaryotic translation initiation factor
  misc_feature (17)..(354): Homolog of NCBI NO: 18405334 NR Description: eukaryotic translation initiation factor 2 alpha
KKNKTLLLERERRKMAPNLECRMYEAKYPEVDMAVMIQVKNIADMGAYVSLLEYNNIEGMILFSELSRRRIRSVSSLIKVGRIEPVMVLRVDKEKGYIDLSKRRVSEEDIQACEERYNKSKLVHSIMRHVAETLNIDLEELYIHIGWPLYRKYGHAFEAFKIIVTDPDTVLSTLTREVKEVGPDGQEVTKVVPAVSEEVKDSLVKNIRRRMTPQPLKIRADIEMKCFQFDGVLHIKEAMHKAEAAGNDDCPVKIKLVAPPLYVLTTQTLDKEQGILVLNNAIASCTEAIEQHKGKLVVKEAARAVSERDDKLLAEHMAKLRQDNEEVSGDEDSEEEEDTGMGEVDVDNGAGITD

SEQ ID NO: 59421 - protein, 340 aa, Glycine max
  peptide (1)..(340): Ceres Seq. ID no. 14307410
  misc_feature (14)..(89): Pfam Name: S1 RNA binding domain Pfam Description: S1 RNA binding domain
  misc_feature (179)..(321): Homolog of NCBI NO: 19114993 NR Description: eukaryotic translation initiation factor 2 alpha
  misc_feature (7)..(160): Homolog of NCBI NO: 19114993 NR Description: eukaryotic translation initiation factor 2 alpha
  misc_feature (182)..(329): Homolog of NCBI NO: 40744551 NR Description: hypothetical protein AN3156.2 [Aspergillus
  misc_feature (7)..(154): Homolog of NCBI NO: 40744551 NR Description: hypothetical protein AN3156.2 [Aspergillus
  misc_feature (3)..(312): Homolog of NCBI NO: 4588003 NR Description: hypothetical EIF-2-Alpha [Arabidopsis thaliana]
  misc_feature (3)..(337): Homolog of NCBI NO: 34898218 NR Description: putative eukaryotic translation initiation factor
  misc_feature (2)..(340): Homolog of NCBI NO: 13549160 NR Description: protein synthesis initiation factor eIF2 alpha
  misc_feature (2)..(340): Homolog of NCBI NO: 15239135 NR Description: eukaryotic translation initiation factor 2 alpha
  misc_feature (3)..(340): Homolog of NCBI NO: 21537411 NR Description: putative eukaryotic translation initiation factor
  misc_feature (3)..(340): Homolog of NCBI NO: 18405334 NR Description: eukaryotic translation initiation factor 2 alpha
MAPNLECRMYEAKYPEVDMAVMIQVKNIADMGAYVSLLEYNNIEGMILFSELSRRRIRSVSSLIKVGRIEPVMVLRVDKEKGYIDLSKRRVSEEDIQACEERYNKSKLVHSIMRHVAETLNIDLEELYIHIGWPLYRKYGHAFEAFKIIVTDPDTVLSTLTREVKEVGPDGQEVTKVVPAVSEEVKDSLVKNIRRRMTPQPLKIRADIEMKCFQFDGVLHIKEAMHKAEAAGNDDCPVKIKLVAPPLYVLTTQTLDKEQGILVLNNAIASCTEAIEQHKGKLVVKEAARAVSERDDKLLAEHMAKLRQDNEEVSGDEDSEEEEDTGMGEVDVDNGAGITD

SEQ ID NO: 59422 - protein, 332 aa, Glycine max
  peptide (1)..(332): Ceres Seq. ID no. 14307411
  misc_feature (6)..(81): Pfam Name: S1 RNA binding domain Pfam Description: S1 RNA binding domain
  misc_feature (171)..(313): Homolog of NCBI NO: 19114993 NR Description: eukaryotic translation initiation factor 2 alpha
  misc_feature (1)..(152): Homolog of NCBI NO: 19114993 NR Description: eukaryotic translation initiation factor 2 alpha
  misc_feature (174)..(321): Homolog of NCBI NO: 40744551 NR Description: hypothetical protein AN3156.2 [Aspergillus
  misc_feature (1)..(146): Homolog of NCBI NO: 40744551 NR Description: hypothetical protein AN3156.2 [Aspergillus
  misc_feature (1)..(304): Homolog of NCBI NO: 4588003 NR Description: hypothetical EIF-2-Alpha [Arabidopsis thaliana]
  misc_feature (1)..(329): Homolog of NCBI NO: 34898218 NR Description: putative eukaryotic translation initiation factor
  misc_feature (1)..(332): Homolog of NCBI NO: 13549160 NR Description: protein synthesis initiation factor eIF2 alpha
  misc_feature (1)..(332): Homolog of NCBI NO: 15239135 NR Description: eukaryotic translation initiation factor 2 alpha
  misc_feature (1)..(332): Homolog of NCBI NO: 21537411 NR Description: putative eukaryotic translation initiation factor
  misc_feature (1)..(332): Homolog of NCBI NO: 18405334 NR Description: eukaryotic translation initiation factor 2 alpha
MYEAKYPEVDMAVMIQVKNIADMGAYVSLLEYNNIEGMILFSELSRRRIRSVSSLIKVGRIEPVMVLRVDKEKGYIDLSKRRVSEEDIQACEERYNKSKLVHSIMRHVAETLNIDLEELYIHIGWPLYRKYGHAFEAFKIIVTDPDTVLSTLTREVKEVGPDGQEVTKVVPAVSEEVKDSLVKNIRRRMTPQPLKIRADIEMKCFQFDGVLHIKEAMHKAEAAGNDDCPVKIKLVAPPLYVLTTQTLDKEQGILVLNNAIASCTEAIEQHKGKLVVKEAARAVSERDDKLLAEHMAKLRQDNEEVSGDEDSEEEEDTGMGEVDVDNGAGITD

SEQ ID NO: 59423 - DNA, 1461 bp, Glycine max
  misc_feature (1)..(1461): Ceres Seq. ID no. 14303471
tatggtaaaacaagggaaaatatggagcagtgctttgaggaacttgctctaaaggtttaacttagactcttaaagtctcataaccgaacagttcaatgcagaaaagttctggaaatattataggccatttccttggaggtttatattgttatctaagaagatgcatgtttgccattttatccgtgggtcctgtgccaagtcatattgctttcatcatggatgggaatcgaaggtatgcaaagaagagaaacatggaagaaggtgatggccataaggctggatttactgctctcatgtccatccttagatactgttatgaattgggagtgaagtatgtcactgtctatgcattcagcattgataacttcaaaaggaagcctaatgaggttcagtccttgatggaattgatgcgggaaaagattgaagagttgcttcaacaagaaagtcttatcaatgaatatggtgttagattacatttcattggagacttgcaactattgactgagcctgtcatagcttctgtggaaaaggcaatgagagttactgctcacaacaaccagagagttcttttggtttgcatagcctatacttctcgtcacgagatggtgcatgctgttcaagaatgctgcaaggaaaaatggaatgaagttcaagcatcaaaagaagcaaaacttacaaatggtgcatttgcaagaattgatcagggcctgaaaggaaatggttttgatttgctttttcaagatttatgtaaagactatcaaaatgcaaccaaagcttgtaatagtgtacctaaacgagtggaacctgctgtagagaaagatggcatgttggagcatactgttgaaaaaggtaacgatagtgaagctgaaatcacatcatgcaatgagctggttgaaatgactgaagagagaaagtataaccagggtgatgttcctttaataaaactggtggatattgagaagcacatgtacatggcagtggcacctgatccagacatcttgatccgaacttctggagaggctcgactcagcaattttcttctttggcagactagtacctgccctttgtatgcaccaactgcactttggcctgaaataggcctaagacacttggtctgggcagtattgaactttcagagacaccatttttatttggaaaagaaaaggaagcagttttaactgtatccttattgtcaaaaattcatagtgtagttcatgtgatggcagtttcctttttataaagactagtttttgttttttttattttattttatttataagaattgttgaaattataagagtttaagtagcccaaggggataagaaagagaaaaaactttggatagtagaatgtaatattgatatgtgctgtgcaatgatgtcttatcaaatacaatgaacaagaacttatttatttcaagaattactataaatatgaaaattatggttgatcatttaaaat

SEQ ID NO: 59424 - protein, 360 aa, Glycine max
  peptide (1)..(360): Ceres Seq. ID no. 14303472
  misc_feature (40)..(186): Pfam Name: Putative undecaprenyl diphosphate synthase Pfam Description: Putative undecaprenyl diphosphate synthase
  misc_feature (247)..(358): Homolog of NCBI NO: 18148934 NR Description: cis-prenyltransferase [Hevea brasiliensis]
  misc_feature (19)..(181): Homolog of NCBI NO: 18148934 NR Description: cis-prenyltransferase [Hevea brasiliensis]
  misc_feature (247)..(358): Homolog of NCBI NO: 16751461 NR Description: cis-prenyltransferase [Hevea brasiliensis]
  misc_feature (19)..(185): Homolog of NCBI NO: 16751461 NR Description: cis-prenyltransferase [Hevea brasiliensis]
  misc_feature (281)..(359): Homolog of NCBI NO: 23491567 NR Description: cis-prenyltransferase [Periploca sepium]
  misc_feature (15)..(186): Homolog of NCBI NO: 23491567 NR Description: cis-prenyltransferase [Periploca sepium]
  misc_feature (217)..(359): Homolog of NCBI NO: 20336659 NR Description: hypothetical protein [Arabidopsis thaliana]
  misc_feature (6)..(188): Homolog of NCBI NO: 20336659 NR Description: hypothetical protein [Arabidopsis thaliana]
  misc_feature (217)..(359): Homolog of NCBI NO: 18398467 NR Description: undecaprenyl pyrophosphate synthetase (UPP
  misc_feature (6)..(188): Homolog of NCBI NO: 18398467 NR Description: undecaprenyl pyrophosphate synthetase (UPP
MQKSSGNIIGHFLGGLYCYLRRCMFAILSVGPVPSHIAFIMDGNRRYAKKRNMEEGDGHKAGFTALMSILRYCYELGVKYVTVYAFSIDNFKRKPNEVQSLMELMREKIEELLQQESLINEYGVRLHFIGDLQLLTEPVIASVEKAMRVTAHNNQRVLLVCIAYTSRHEMVHAVQECCKEKWNEVQASKEAKLTNGAFARIDQGLKGNGFDLLFQDLCKDYQNATKACNSVPKRVEPAVEKDGMLEHTVEKGNDSEAEITSCNELVEMTEERKYNQGDVPLIKLVDIEKHMYMAVAPDPDILIRTSGEARLSNFLLWQTSTCPLYAPTALWPEIGLRHLVWAVLNFQRHHFYLEKKRKQF

SEQ ID NO: 59425 - protein, 337 aa, Glycine max
  peptide (1)..(337): Ceres Seq. ID no. 14303473
  misc_feature (17)..(163): Pfam Name: Putative undecaprenyl diphosphate synthase Pfam Description: Putative undecaprenyl diphosphate synthase
  misc_feature (224)..(335): Homolog of NCBI NO: 18148934 NR Description: cis-prenyltransferase [Hevea brasiliensis]
  misc_feature (1)..(158): Homolog of NCBI NO: 18148934 NR Description: cis-prenyltransferase [Hevea brasiliensis]
  misc_feature (224)..(335): Homolog of NCBI NO: 16751461 NR Description: cis-prenyltransferase [Hevea brasiliensis]
  misc_feature (1)..(162): Homolog of NCBI NO: 16751461 NR Description: cis-prenyltransferase [Hevea brasiliensis]
  misc_feature (258)..(336): Homolog of NCBI NO: 23491567 NR Description: cis-prenyltransferase [Periploca sepium]
  misc_feature (1)..(163): Homolog of NCBI NO: 23491567 NR Description: cis-prenyltransferase [Periploca sepium]
  misc_feature (194)..(336): Homolog of NCBI NO: 20336659 NR Description: hypothetical protein [Arabidopsis thaliana]
  misc_feature (1)..(165): Homolog of NCBI NO: 20336659 NR Description: hypothetical protein [Arabidopsis thaliana]
  misc_feature (194)..(336): Homolog of NCBI NO: 18398467 NR Description: undecaprenyl pyrophosphate synthetase (UPP
  misc_feature (1)..(165): Homolog of NCBI NO: 18398467 NR Description: undecaprenyl pyrophosphate synthetase (UPP
MFAILSVGPVPSHIAFIMDGNRRYAKKRNMEEGDGHKAGFTALMSILRYCYELGVKYVTVYAFSIDNFKRKPNEVQSLMELMREKIEELLQQESLINEYGVRLHFIGDLQLLTEPVIASVEKAMRVTAHNNQRVLLVCIAYTSRHEMVHAVQECCKEKWNEVQASKEAKLTNGAFARIDQGLKGNGFDLLFQDLCKDYQNATKACNSVPKRVEPAVEKDGMLEHTVEKGNDSEAEITSCNELVEMTEERKYNQGDVPLIKLVDIEKHMYMAVAPDPDILIRTSGEARLSNFLLWQTSTCPLYAPTALWPEIGLRHLVWAVLNFQRHHFYLEKKRKQF

SEQ ID NO: 59426 - protein, 320 aa, Glycine max
  peptide (1)..(320): Ceres Seq. ID no. 14303474
  misc_feature (1)..(146): Pfam Name: Putative undecaprenyl diphosphate synthase Pfam Description: Putative undecaprenyl diphosphate synthase
  misc_feature (207)..(318): Homolog of NCBI NO: 18148934 NR Description: cis-prenyltransferase [Hevea brasiliensis]
  misc_feature (1)..(141): Homolog of NCBI NO: 18148934 NR Description: cis-prenyltransferase [Hevea brasiliensis]
  misc_feature (207)..(318): Homolog of NCBI NO: 16751461 NR Description: cis-prenyltransferase [Hevea brasiliensis]
  misc_feature (1)..(145): Homolog of NCBI NO: 16751461 NR Description: cis-prenyltransferase [Hevea brasiliensis]
  misc_feature (241)..(319): Homolog of NCBI NO: 23491567 NR Description: cis-prenyltransferase [Periploca sepium]
  misc_feature (1)..(146): Homolog of NCBI NO: 23491567 NR Description: cis-prenyltransferase [Periploca sepium]
  misc_feature (177)..(319): Homolog of NCBI NO: 20336659 NR Description: hypothetical protein [Arabidopsis thaliana]
  misc_feature (1)..(148): Homolog of NCBI NO: 20336659 NR Description: hypothetical protein [Arabidopsis thaliana]
  misc_feature (177)..(319): Homolog of NCBI NO: 18398467 NR Description: undecaprenyl pyrophosphate synthetase (UPP
  misc_feature (1)..(148): Homolog of NCBI NO: 18398467 NR Description: undecaprenyl pyrophosphate synthetase (UPP
MDGNRRYAKKRNMEEGDGHKAGFTALMSILRYCYELGVKYVTVYAFSIDNFKRKPNEVQSLMELMREKIEELLQQESLINEYGVRLHFIGDLQLLTEPVIASVEKAMRVTAHNNQRVLLVCIAYTSRHEMVHAVQECCKEKWNEVQASKEAKLTNGAFARIDQGLKGNGFDLLFQDLCKDYQNATKACNSVPKRVEPAVEKDGMLEHTVEKGNDSEAEITSCNELVEMTEERKYNQGDVPLIKLVDIEKHMYMAVAPDPDILIRTSGEARLSNFLLWQTSTCPLYAPTALWPEIGLRHLVWAVLNFQRHHFYLEKKRKQF

SEQ ID NO: 59427 - DNA, 1513 bp, Glycine max
  misc_feature (1)..(1513): Ceres Seq. ID no. 14307484
aagcactttcgttcccgatactcatactcggaacaccaactcccatcttcgccttcgggttagggttagggttagggaattagggcttcgaacttcgacgcaatgtcgtccattaacccctcacgagctaccgctccctccgccttcgccacgcgccggccgtgggaggagttcttcgcgctccactcgttcacgcgcccctacaccctcggcgagaccacgctccgcgtgaagcgcaacctcggccacttccgcgtgaactacgccatggtcgtgctcctcttcgtgttccttagcctcctctggttccctatctccctcgtcgtcttcctcgccgtcttcgccgcgtggttcttcctctactttttccgcgatggccccatcgtcgtgctccgccgcgagcttgacgaccgcctcgtcctcgcggcgctctccgccgtcaccgtcgccgggcttgtccttaccggcgtctggctcaacgttgtggtggcgttgctcttcgcggcggcggcggtggcgctgcatgcggcgcttcggaacaccgaggatttgtacgtggatgaattggaagtttctgatggaggtttggtttcggttgttggtggtagccctacgaaacgaacagggtacgctagaatatagtaatagttagttatgagatataactgattttcgttttcgtttaatcgttttttgtgttactcgcattgcatatatttgaagaaaatagaggttcgagttttaggttttggtttcgcggaaatatgaattgtgtccatatgatagatttacataccgtgttgttagcttggaattggaatagatttcttgcttgttgcttggccccttcttcttatgtttttagaatctcttgtaaattctaagataggttgaagcattcaatttgtgtatttagagttccaattcaatgtattgtctggcttgatatgctttggtatttgtaataggtttagcaatggtgggtaagatttgttttattttatatcaagtgtaaatgaagaggtaaccattttggttattcatttgtggtttcatatgcatttcagtttgctatcctactaccctctttttttttttagtagattaatatcatgatcaaattaagaacgttatataatataatgttgtgctttttggagtggcttgggttgctgttgtctgaatatctgattttgttgaattagacttgcttgtgttatgctactaagtgttgcagatccttttgtagcctgctgtgaatcaattactgagacttgtaactgtacaacatttgagagaattgaatagagaaccatggaatgccaattcatcattctcttatgtttagctgcaattagctgacacctaagttagttaatgttagctacctctttttagttagtcagttggccatttgggttgattgggatctgatctctcaaaacatgtgtataagaacagattgtaaaccacatgcaatcagactctgactattgaaactcttccctctttt

SEQ ID NO: 59428 - protein, 179 aa, Glycine max
  peptide (1)..(179): Ceres Seq. ID no. 14307485
  misc_feature (8)..(168): Homolog of NCBI NO: 21555645 NR Description: unknown [Arabidopsis thaliana]
  misc_feature (8)..(168): Homolog of NCBI NO: 18379300 NR Description: expressed protein [Arabidopsis thaliana]
  misc_feature (1)..(169): Homolog of NCBI NO: 18390939 NR Description: expressed protein [Arabidopsis thaliana]
  misc_feature (8)..(179): Homolog of NCBI NO: 40539036 NR Description: putative prenylated rab acceptor protein
  misc_feature (7)..(169): Homolog of NCBI NO: 34897194 NR Description: putative prenylated Rab receptor
  misc_feature (13)..(158): Homolog of NCBI NO: 15220814 NR Description: expressed protein [Arabidopsis thaliana]
  misc_feature (3)..(154): Homolog of NCBI NO: 15231332 NR Description: expressed protein [Arabidopsis thaliana]
  misc_feature (1)..(154): Homolog of NCBI NO: 18400140 NR Description: expressed protein [Arabidopsis thaliana]
  misc_feature (1)..(155): Homolog of NCBI NO: 34903576 NR Description: P0419B01.1 [Oryza sativa (japonica
  misc_feature (1)..(154): Homolog of NCBI NO: 21617895 NR Description: unknown [Arabidopsis thaliana]
MSSINPSRATAPSAFATRRPWEEFFALHSFTRPYTLGETTLRVKRNLGHFRVNYAMVVLLFVFLSLLWFPISLVVFLAVFAAWFFLYFFRDGPIVVLRRELDDRLVLAALSAVTVAGLVLTGVWLNVVVALLFAAAAVALHAALRNTEDLYVDELEVSDGGLVSVVGGSPTKRTGYARI

SEQ ID NO: 59429 - protein, 124 aa, Glycine max
  peptide (1)..(124): Ceres Seq. ID no. 14307486
  misc_feature (1)..(113): Homolog of NCBI NO: 21555645 NR Description: unknown [Arabidopsis thaliana]
  misc_feature (1)..(113): Homolog of NCBI NO: 18379300 NR Description: expressed protein [Arabidopsis thaliana]
  misc_feature (1)..(114): Homolog of NCBI NO: 18390939 NR Description: expressed protein [Arabidopsis thaliana]
  misc_feature (1)..(124): Homolog of NCBI NO: 40539036 NR Description: putative prenylated rab acceptor protein
  misc_feature (1)..(114): Homolog of NCBI NO: 34897194 NR Description: putative prenylated Rab receptor
  misc_feature (1)..(103): Homolog of NCBI NO: 15220814 NR Description: expressed protein [Arabidopsis thaliana]
  misc_feature (1)..(99): Homolog of NCBI NO: 15231332 NR Description: expressed protein [Arabidopsis thaliana]
  misc_feature (1)..(99): Homolog of NCBI NO: 18400140 NR Description: expressed protein [Arabidopsis thaliana]
  misc_feature (1)..(100): Homolog of NCBI NO: 34903576 NR Description: P0419B01.1 [Oryza sativa (japonica
  misc_feature (1)..(99): Homolog of NCBI NO: 21617895 NR Description: unknown [Arabidopsis thaliana]
MVVLLFVFLSLLWFPISLVVFLAVFAAWFFLYFFRDGPIVVLRRELDDRLVLAALSAVTVAGLVLTGVWLNVVVALLFAAAAVALHAALRNTEDLYVDELEVSDGGLVSVVGGSPTKRTGYARI

SEQ ID NO: 59430 - protein, 92 aa, Glycine max
  peptide (1)..(92): Ceres Seq. ID no. 14307487
  misc_feature (1)..(36): Homolog of NCBI NO: 11359723 NR Description: proteophosphoglycan, membrane-associated
  misc_feature (1)..(36): Homolog of NCBI NO: 13592175 NR Description: ppg3 [Leishmania major]
  misc_feature (1)..(36): Homolog of NCBI NO: 34809533 NR Description: Epa5p [Candida glabrata]
  misc_feature (1)..(33): Homolog of NCBI NO: 34809534 NR Description: Epa4p [Candida glabrata]
  misc_feature (1)..(43): Homolog of NCBI NO: 6473880 NR Description: Hypothetical protein [Schizosaccharomyces pombe]
  misc_feature (1)..(36): Homolog of NCBI NO: 6473880 NR Description: Hypothetical protein [Schizosaccharomyces pombe]
  misc_feature (1)..(36): Homolog of NCBI NO: 34809534 NR Description: Epa4p [Candida glabrata]
  misc_feature (1)..(36): Homolog of NCBI NO: 34809534 NR Description: Epa4p [Candida glabrata]
  misc_feature (1)..(36): Homolog of NCBI NO: 34809533 NR Description: Epa5p [Candida glabrata]
  misc_feature (1)..(36): Homolog of NCBI NO: 34809533 NR Description: Epa5p [Candida glabrata]
MAPSSCSAASLTTASSSRRSPPSPSPGLSLPASGSTLWWRCSSRRRRWRCMRRFGTPRICTWMNWKFLMEVWFRLLVVALRNEQGTLEYSNS

SEQ ID NO: 59431 - DNA, 1299 bp, Glycine max
  misc_feature (1)..(1299): Ceres Seq. ID no. 15177787
ttttttagttgtaccatgcaatcattaattactttaaaagagagaaccaattgttaaaaggccatagccacatctaattggcacttcataaaggtggtttagttattgggaagcagagaaagaaaaggaggaaatggaggaagcactttttaagacggtgaagaagagcaaaggtgaaattatgggttcttctccggcaacatattgtgttaccggagcaacagggtatattggttcatggcttgtggaggctcttcttgaaagagggtacactgttcatgctactgttagagatcctgaaaagtcactacacctgttgtcattgtggacaagaggtgaccgattgagaattttcaaggcggatttgaatgaagaaagaagtttcgatgaggctgtgaaaggctgtgatggcgtttttcatgttgcagcttcaatggaattcaatgtggttcagaaagaaaacatcgaggcctgtgttcaagcaaatataattgatccagcaataaaaggaaccataaaccttctaaagtcctgcttgaattccaattctgtgaaaagggttgttttcacatcttcaataagtaccatcactgctaaagatagcagtgggaagtggaaacctcttgttgatgaatcttgccaaatccaaagtgaacttgtgttgaaaacacaagcaagtgggtgggtttatgcactttcaaagcttctaacagaagaggcagcatttaagtttgcaaaagagaatggcattgatcttgtgtcagtcataacagccactgttgctggtccattcttcactgctagtgtaccatcaagtgttaaagtcctactgtcaccaataacaggtgaacctgagttcttcaagatattatcttctgtaaatgcacgaatggggtcaattgctttagttcacattgaagatatatgcagtgcacacatattcctaatggagcattctaaagcagaaggtcgatacatatgcagcagccaaagttgtccattagacatgttggctaatcttcttgccaaagagtattcctactcaagcaagaaaaggattgcggagaagaattatgataatgttccttctgagatttcctctaagaagttaaaagagttgggttttagttacaagcatgggcttgaagacataatccatcagacaattatttgttgcctagattatggttatttacctcccattagacaatagtctttcaacactactgtacatgattttaaaacttttgtaattttttttttttgtgatctcaaaataaatgaagtcatattctaaag

SEQ ID NO: 59432 - protein, 359 aa, Glycine max
  peptide (1)..(359): Ceres Seq. ID no. 15177788
  misc_feature (26)..(152): Pfam Name: NAD dependent epimerase/dehydratase family Pfam Description: NAD dependent epimerase/dehydratase family
  misc_feature (17)..(355): Homolog of NCBI NO: 2599562 NR Description: dihydroflavonol 4-reductase [Fragaria x ananassa]
  misc_feature (17)..(356): Homolog of NCBI NO: 1888485 NR Description: dihydroflavonol 4-reductase [Vitis vinifera]
  misc_feature (15)..(54): Homolog of NCBI NO: 7486807 NR Description: hypothetical protein M4I22.60 - Arabidopsis
  misc_feature (57)..(345): Homolog of NCBI NO: 7486807 NR Description: hypothetical protein M4I22.60 - Arabidopsis
  misc_feature (15)..(345): Homolog of NCBI NO: 30687527 NR Description: dihydroflavonol 4-reductase (dihydrokaempferol
MEEALFKTVKKSKGEIMGSSPATYCVTGATGYIGSWLVEALLERGYTVHATVRDPEKSLHLLSLWTRGDRLRIFKADLNEERSFDEAVKGCDGVFHVAASMEFNVVQKENIEACVQANIIDPAIKGTINLLKSCLNSNSVKRVVFTSSISTITAKDSSGKWKPLVDESCQIQSELVLKTQASGWVYALSKLLTEEAAFKFAKENGIDLVSVITATVAGPFFTASVPSSVKVLLSPITGEPEFFKILSSVNARMGSIALVHIEDICSAHIFLMEHSKAEGRYICSSQSCPLDMLANLLAKEYSYSSKKRIAEKNYDNVPSEISSKKLKELGFSYKHGLEDIIHQTIICCLDYGYLPPIRQ

SEQ ID NO: 59433 - protein, 343 aa, Glycine max
  peptide (1)..(343): Ceres Seq. ID no. 15177789
  misc_feature (10)..(136): Pfam Name: NAD dependent epimerase/dehydratase family Pfam Description: NAD dependent epimerase/dehydratase family
  misc_feature (1)..(339): Homolog of NCBI NO: 2599562 NR Description: dihydroflavonol 4-reductase [Fragaria x ananassa]
  misc_feature (1)..(340): Homolog of NCBI NO: 1888485 NR Description: dihydroflavonol 4-reductase [Vitis vinifera]
  misc_feature (1)..(38): Homolog of NCBI NO: 7486807 NR Description: hypothetical protein M4I22.60 - Arabidopsis
  misc_feature (41)..(329): Homolog of NCBI NO: 7486807 NR Description: hypothetical protein M4I22.60 - Arabidopsis
  misc_feature (1)..(329): Homolog of NCBI NO: 30687527 NR Description: dihydroflavonol 4-reductase (dihydrokaempferol
MGSSPATYCVTGATGYIGSWLVEALLERGYTVHATVRDPEKSLHLLSLWTRGDRLRIFKADLNEERSFDEAVKGCDGVFHVAASMEFNVVQKENIEACVQANIIDPAIKGTINLLKSCLNSNSVKRVVFTSSISTITAKDSSGKWKPLVDESCQIQSELVLKTQASGWVYALSKLLTEEAAFKFAKENGIDLVSVITATVAGPFFTASVPSSVKVLLSPITGEPEFFKILSSVNARMGSIALVHIEDICSAHIFLMEHSKAEGRYICSSQSCPLDMLANLLAKEYSYSSKKRIAEKNYDNVPSEISSKKLKELGFSYKHGLEDIIHQTIICCLDYGYLPPIRQ

SEQ ID NO: 59434 - protein, 259 aa, Glycine max
  peptide (1)..(259): Ceres Seq. ID no. 15177790
  misc_feature (1)..(52): Pfam Name: NAD dependent epimerase/dehydratase family Pfam Description: NAD dependent epimerase/dehydratase family
  misc_feature (1)..(255): Homolog of NCBI NO: 2599562 NR Description: dihydroflavonol 4-reductase [Fragaria x ananassa]
  misc_feature (1)..(256): Homolog of NCBI NO: 1888485 NR Description: dihydroflavonol 4-reductase [Vitis vinifera]
  misc_feature (1)..(245): Homolog of NCBI NO: 7486807 NR Description: hypothetical protein M4I22.60 - Arabidopsis
  misc_feature (1)..(245): Homolog of NCBI NO: 30687527 NR Description: dihydroflavonol 4-reductase (dihydrokaempferol
MEFNVVQKENIEACVQANIIDPAIKGTINLLKSCLNSNSVKRVVFTSSISTITAKDSSGKWKPLVDESCQIQSELVLKTQASGWVYALSKLLTEEAAFKFAKENGIDLVSVITATVAGPFFTASVPSSVKVLLSPITGEPEFFKILSSVNARMGSIALVHIEDICSAHIFLMEHSKAEGRYICSSQSCPLDMLANLLAKEYSYSSKKRIAEKNYDNVPSEISSKKLKELGFSYKHGLEDIIHQTIICCLDYGYLPPIRQ

SEQ ID NO: 59435 - DNA, 1157 bp, Glycine max
  misc_feature (1)..(1157): Ceres Seq. ID no. 14307396
tctctctctcattgctcctctgattcattcacccaatttttttctgtcctcttttcctctcagaggagcctctgagtctgctcaggtgttccttgtcaagagatccttttgtttttgaggtgtgaagggaaagagaaaaaagatgaatcagtgtggttatcagcagaagaaggccttgacaagctgtgaggagatgaggatggaatctgtggtgtgccctaaacctcgaagattgggcctgttgaaccactcaacctttgataaccacatcagacccttgaggccaccctttatcaactaccaatcagaaattgaagattcaggagttggggctgagcttatggacattattctccccaagagatctggggggcaagtggcttcatcaccgccatttttctgtggatctccacctagcagggcttcaaaccctgtgatccaagatgagcaatttggtagtaatggtaatgagagttttggttcattttccttggcacccccttcaccatcttcctcagcaagaggctgtgttaggatgaagtttggtcacaccccagcagcagtgaggattgaaggttttgattgcctcagcagggataggcgcaactgcagcatttctgctgttgcttaattcaattttaaacaaagaaaaagaaaagaaaagaggattaaagaatcaccaaagttctaagagcagaggagatttttggaactgaggagctaatcttaatttcaatcttattgtattatatctatatgtatataccgttgttcatgagttaattaaggtgtcatgtataattgagagaaggtgggaattttatattcttagttttatcctttttgaagaataataaaaaaagggggacacatcaaggagaaaagaaaaacgcaagcaaaaagtcttgttcttctctcttgttaggttttatatgatggggtcttttagattgaaactttcatgtgagtttcatggagagtctgtaacttatatgtaatttgaaactcagctcctccttttgtaattggaatggtggaggaatttgaggatttatctttggaatcttgtaaaatatattttttgtgggtgcccctatttgcaggtgtcgcctattggattatatgaaaagaaatattgttcatactttatacatggc

SEQ ID NO: 59436 - protein, 162 aa, Glycine max
  peptide (1)..(162): Ceres Seq. ID no. 14307397
  misc_feature (1)..(162): Homolog of NCBI NO: 15222278 NR Description: expressed protein [Arabidopsis thaliana]
  misc_feature (1)..(162): Homolog of NCBI NO: 11762168 NR Description: AT5g16110 [Arabidopsis thaliana]
  misc_feature (5)..(162): Homolog of NCBI NO: 18409044 NR Description: expressed protein [Arabidopsis thaliana]
  misc_feature (1)..(162): Homolog of NCBI NO: 30685676 NR Description: expressed protein [Arabidopsis thaliana]
  misc_feature (1)..(162): Homolog of NCBI NO: 18396232 NR Description: expressed protein [Arabidopsis thaliana]
MNQCGYQQKKALTSCEEMRMESVVCPKPRRLGLLNHSTFDNHIRPLRPPFINYQSEIEDSGVGAELMDIILPKRSGGQVASSPPFFCGSPPSRASNPVIQDEQFGSNGNESFGSFSLAPPSPSSSARGCVRMKFGHTPAAVRIEGFDCLSRDRRNCSISAVA

SEQ ID NO: 59437 - protein, 145 aa, Glycine max
  peptide (1)..(145): Ceres Seq. ID no. 14307398
  misc_feature (1)..(145): Homolog of NCBI NO: 15222278 NR Description: expressed protein [Arabidopsis thaliana]
  misc_feature (1)..(145): Homolog of NCBI NO: 11762168 NR Description: AT5g16110 [Arabidopsis thaliana]
  misc_feature (1)..(145): Homolog of NCBI NO: 18409044 NR Description: expressed protein [Arabidopsis thaliana]
  misc_feature (1)..(145): Homolog of NCBI NO: 30685676 NR Description: expressed protein [Arabidopsis thaliana]
  misc_feature (1)..(145): Homolog of NCBI NO: 18396232 NR Description: expressed protein [Arabidopsis thaliana]
MRMESVVCPKPRRLGLLNHSTFDNHIRPLRPPFINYQSEIEDSGVGAELMDIILPKRSGGQVASSPPFFCGSPPSRASNPVIQDEQFGSNGNESFGSFSLAPPSPSSSARGCVRMKFGHTPAAVRIEGFDCLSRDRRNCSISAVA

SEQ ID NO: 59438 - protein, 143 aa, Glycine max
  peptide (1)..(143): Ceres Seq. ID no. 14307399
  misc_feature (1)..(143): Homolog of NCBI NO: 15222278 NR Description: expressed protein [Arabidopsis thaliana]
  misc_feature (1)..(143): Homolog of NCBI NO: 11762168 NR Description: AT5g16110 [Arabidopsis thaliana]
  misc_feature (1)..(143): Homolog of NCBI NO: 18409044 NR Description: expressed protein [Arabidopsis thaliana]
  misc_feature (1)..(143): Homolog of NCBI NO: 30685676 NR Description: expressed protein [Arabidopsis thaliana]
  misc_feature (1)..(143): Homolog of NCBI NO: 18396232 NR Description: expressed protein [Arabidopsis thaliana]
MESVVCPKPRRLGLLNHSTFDNHIRPLRPPFINYQSEIEDSGVGAELMDIILPKRSGGQVASSPPFFCGSPPSRASNPVIQDEQFGSNGNESFGSFSLAPPSPSSSARGCVRMKFGHTPAAVRIEGFDCLSRDRRNCSISAVA

SEQ ID NO: 59439 - DNA, 2209 bp, Glycine max
  misc_feature (1)..(2209): Ceres Seq. ID no. 14314168
gagggtttaagcgtttcttctcctatggcattcagcgataagcaaaagcaagaagaagaagaagaaccgcacagaatggaagaagacgacgacgaaagcgaagaagaagaagaagaagaagaagaagaagaagaagaagaagaagaagaagaagtgtgggacgattgggaaggagaagacgaaggagagagagaatctgaattcgtgtgtctattctgtgactcccggtacagttcgtgcggttccttgttcgaccactgcgcctcccttcaccgctttgatttccacacgatcagaacaactctcagcttggatttctatgcctccttcaagctcattaacttcatccgctctcgggtggcagagaacatatgttggagttgtggattaacatgccagtccaactgtgaccttcagaatcatttgcatgatgtagttgactttaatgagataaagactttgtggaatgatgataggtatctgatacctttcatgcaagatgattcactgttgtacagttttggtgattgtgacgaagacggggaagatgaacatattactcgaattgatgaagatcttataaaggatctaatgaacattgaagagagtatccatgacgatcaagatcttgtgaaaaaagtggtagttgatgatgacaaacatgagattgattctgtctctaataatcatttgaacaaggctagttcttcaaagaaacttattaatggtaaggactcaaaaggacatgttttgtgcagtgataaggatccagaaggacatttgatggttaattctcaaaatcacattgcaaagcatattaagaagatcaatgaaagttattttgggtcttacagttcatttggtatccatcgagagatgttaagtgataaggtgagaatggatgcttatggccaagcgattttgaagaatccctctctactaaatagtgctgtggttatggatgtaggttgtggaactggaattctcagcctattttcagcaaaagctggcgcttcaagggttattgcagttgaggctagtgccaagatggcagcagtagcatctcaggttgcaaaagataatggtcttttgctgagtaaaagccaaaatggagttgatggcctccaaaagggagtcatagaagtggttcatggtatggttgaagagattgataaaacagttgaacttcaacctcgcagtgttgatgtattgctaagtgaatggatgggatattgcctgctgtatgaatccatgcttggttcagtgctttatgcacgagaccggtggttgaagcctggtggtgccattcttcctgatacagcaactatttttgttgcaggatttggaaaaggagccacaagtcttcctttttgggaaaatgtgtgtgatttcgacatgtcttgcattgggaatgagcttgtcatagatgctgcccgaattcctatagttgatgttgtggactctcaagatttagttacctgttctgctattcttcagtcctttgacttggcaaccatgaagcctaatgaagtggatttcactgcaactgctactttggaattgaaaccaagtacttctggaacatgctgctggtgttatggtgttgtcctatggtttgatactggattttcaagcagattctgccgagaaacaccagccgtgttatccacattcccttacatgccaagaacacattggtcacaaacaatcttaacctttcaagaacctattgcgatgggatttggaaaagaaaacaggggtaaaccagaagcaattggcactgaggtgtatcctgctgtgaagattgatttacgtgtcagcattgtccgttctactgagcatcgcagcattgatatatccttagaagctgctggtgttggtcctgacagtcacaaacgcagttggcctgctcagcttttaatctgcagtaggatgcatgacgccacaacagcaaagatcattgtgcagcagtttttcttgttggctgccagttaaaatcagttttggaatgctacagctgtaattgctaacatttaggttcctttttttgttcactggaaatagctactgcttgttgaatgctagactctacgctgcccaattacatagaaaatgtaatgtttctccaattcatatttatgtatgacaaaacttacgtgcagtactgttttcttatactgttttccaattaaaattggttattcatttc

SEQ ID NO: 59440 - protein, 664 aa, Glycine max
  peptide (1)..(664): Ceres Seq. ID no. 14314169
  misc_feature (9)..(67): Pfam Name: Chromadorea ALT protein Pfam Description: Chromadorea ALT protein
  misc_feature (280)..(361): Homolog of NCBI NO: 28207757 NR Description: CR061 protein [Chlamydomonas reinhardtii]
  misc_feature (394)..(613): Homolog of NCBI NO: 28207757 NR Description: CR061 protein [Chlamydomonas reinhardtii]
  misc_feature (271)..(363): Homolog of NCBI NO: 32414531 NR Description: hypothetical protein [Neurospora crassa]
  misc_feature (348)..(584): Homolog of NCBI NO: 32414531 NR Description: hypothetical protein [Neurospora crassa]
  misc_feature (27)..(119): Homolog of NCBI NO: 21357573 NR Description: CG6563-PA [Drosophila melanogaster]
  misc_feature (253)..(361): Homolog of NCBI NO: 21357573 NR Description: CG6563-PA [Drosophila melanogaster]
  misc_feature (348)..(588): Homolog of NCBI NO: 21357573 NR Description: CG6563-PA [Drosophila melanogaster]
  misc_feature (190)..(639): Homolog of NCBI NO: 15230446 NR Description: protein arginine N-methyltransferase family
  misc_feature (147)..(639): Homolog of NCBI NO: 15795148 NR Description: protein arginine N-methyltransferase 3-like
  misc_feature (24)..(639): Homolog of NCBI NO: 27261101 NR Description: putative arginine N-methyltransferase 3
EGLSVSSPMAFSDKQKQEEEEEPHRMEEDDDESEEEEEEEEEEEEEEEEEEVWDDWEGEDEGERESEFVCLFCDSRYSSCGSLFDHCASLHRFDFHTIRTTLSLDFYASFKLINFIRSRVAENICWSCGLTCQSNCDLQNHLHDVVDFNEIKTLWNDDRYLIPFMQDDSLLYSFGDCDEDGEDEHITRIDEDLIKDLMNIEESIHDDQDLVKKVVVDDDKHEIDSVSNNHLNKASSSKKLINGKDSKGHVLCSDKDPEGHLMVNSQNHIAKHIKKINESYFGSYSSFGIHREMLSDKVRMDAYGQAILKNPSLLNSAVVMDVGCGTGILSLFSAKAGASRVIAVEASAKMAAVASQVAKDNGLLLSKSQNGVDGLQKGVIEVVHGMVEEIDKTVELQPRSVDVLLSEWMGYCLLYESMLGSVLYARDRWLKPGGAILPDTATIFVAGFGKGATSLPFWENVCDFDMSCIGNELVIDAARIPIVDVVDSQDLVTCSAILQSFDLATMKPNEVDFTATATLELKPSTSGTCCWCYGVVLWFDTGFSSRFCRETPAVLSTFPYMPRTHWSQTILTFQEPIAMGFGKENRGKPEAIGTEVYPAVKIDLRVSIVRSTEHRSIDISLEAAGVGPDSHKRSWPAQLLICSRMHDATTAKIIVQQFFLLAAS

SEQ ID NO: 59441 - protein, 656 aa, Glycine max
  peptide (1)..(656): Ceres Seq. ID no. 14314170
  misc_feature (1)..(59): Pfam Name: Chromadorea ALT protein Pfam Description: Chromadorea ALT protein
  misc_feature (272)..(353): Homolog of NCBI NO: 28207757 NR Description: CR061 protein [Chlamydomonas reinhardtii]
  misc_feature (386)..(605): Homolog of NCBI NO: 28207757 NR Description: CR061 protein [Chlamydomonas reinhardtii]
  misc_feature (263)..(355): Homolog of NCBI NO: 32414531 NR Description: hypothetical protein [Neurospora crassa]
  misc_feature (340)..(576): Homolog of NCBI NO: 32414531 NR Description: hypothetical protein [Neurospora crassa]
  misc_feature (19)..(111): Homolog of NCBI NO: 21357573 NR Description: CG6563-PA [Drosophila melanogaster]
  misc_feature (245)..(353): Homolog of NCBI NO: 21357573 NR Description: CG6563-PA [Drosophila melanogaster]
  misc_feature (340)..(580): Homolog of NCBI NO: 21357573 NR Description: CG6563-PA [Drosophila melanogaster]
  misc_feature (182)..(631): Homolog of NCBI NO: 15230446 NR Description: protein arginine N-methyltransferase family
  misc_feature (139)..(631): Homolog of NCBI NO: 15795148 NR Description: protein arginine N-methyltransferase 3-like
  misc_feature (16)..(631): Homolog of NCBI NO: 27261101 NR Description: putative arginine N-methyltransferase 3
MAFSDKQKQEEEEEPHRMEEDDDESEEEEEEEEEEEEEEEEEEVWDDWEGEDEGERESEFVCLFCDSRYSSCGSLFDHCASLHRFDFHTIRTTLSLDFYASFKLINFIRSRVAENICWSCGLTCQSNCDLQNHLHDVVDFNEIKTLWNDDRYLIPFMQDDSLLYSFGDCDEDGEDEHITRIDEDLIKDLMNIEESIHDDQDLVKKVVVDDDKHEIDSVSNNHLNKASSSKKLINGKDSKGHVLCSDKDPEGHLMVNSQNHIAKHIKKINESYFGSYSSFGIHREMLSDKVRMDAYGQAILKNPSLLNSAVVMDVGCGTGILSLFSAKAGASRVIAVEASAKMAAVASQVAKDNGLLLSKSQNGVDGLQKGVIEVVHGMVEEIDKTVELQPRSVDVLLSEWMGYCLLYESMLGSVLYARDRWLKPGGAILPDTATIFVAGFGKGATSLPFWENVCDFDMSCIGNELVIDAARIPIVDVVDSQDLVTCSAILQSFDLATMKPNEVDFTATATLELKPSTSGTCCWCYGVVLWFDTGFSSRFCRETPAVLSTFPYMPRTHWSQTILTFQEPIAMGFGKENRGKPEAIGTEVYPAVKIDLRVSIVRSTEHRSIDISLEAAGVGPDSHKRSWPAQLLICSRMHDATTAKIIVQQFFLLAAS

SEQ ID NO: 59442 - protein, 639 aa, Glycine max
  peptide (1)..(639): Ceres Seq. ID no. 14314171
  misc_feature (122)..(233): Pfam Name: Chromadorea ALT protein Pfam Description: Chromadorea ALT protein
  misc_feature (255)..(336): Homolog of NCBI NO: 28207757 NR Description: CR061 protein [Chlamydomonas reinhardtii]
  misc_feature (369)..(588): Homolog of NCBI NO: 28207757 NR Description: CR061 protein [Chlamydomonas reinhardtii]
  misc_feature (246)..(338): Homolog of NCBI NO: 32414531 NR Description: hypothetical protein [Neurospora crassa]
  misc_feature (323)..(559): Homolog of NCBI NO: 32414531 NR Description: hypothetical protein [Neurospora crassa]
  misc_feature (2)..(94): Homolog of NCBI NO: 21357573 NR Description: CG6563-PA [Drosophila melanogaster]
  misc_feature (228)..(336): Homolog of NCBI NO: 21357573 NR Description: CG6563-PA [Drosophila melanogaster]
  misc_feature (323)..(563): Homolog of NCBI NO: 21357573 NR Description: CG6563-PA [Drosophila melanogaster]
  misc_feature (165)..(614): Homolog of NCBI NO: 15230446 NR Description: protein arginine N-methyltransferase family
  misc_feature (122)..(614): Homolog of NCBI NO: 15795148 NR Description: protein arginine N-methyltransferase 3-like
  misc_feature (1)..(614): Homolog of NCBI NO: 27261101 NR Description: putative arginine N-methyltransferase 3
MEEDDDESEEEEEEEEEEEEEEEEEEVWDDWEGEDEGERESEFVCLFCDSRYSSCGSLFDHCASLHRFDFHTIRTTLSLDFYASFKLINFIRSRVAENICWSCGLTCQSNCDLQNHLHDVVDFNEIKTLWNDDRYLIPFMQDDSLLYSFGDCDEDGEDEHITRIDEDLIKDLMNIEESIHDDQDLVKKVVVDDDKHEIDSVSNNHLNKASSSKKLINGKDSKGHVLCSDKDPEGHLMVNSQNHIAKHIKKINESYFGSYSSFGIHREMLSDKVRMDAYGQAILKNPSLLNSAVVMDVGCGTGILSLFSAKAGASRVIAVEASAKMAAVASQVAKDNGLLLSKSQNGVDGLQKGVIEVVHGMVEEIDKTVELQPRSVDVLLSEWMGYCLLYESMLGSVLYARDRWLKPGGAILPDTATIFVAGFGKGATSLPFWENVCDFDMSCIGNELVIDAARIPIVDVVDSQDLVTCSAILQSFDLATMKPNEVDFTATATLELKPSTSGTCCWCYGVVLWFDTGFSSRFCRETPAVLSTFPYMPRTHWSQTILTFQEPIAMGFGKENRGKPEAIGTEVYPAVKIDLRVSIVRSTEHRSIDISLEAAGVGPDSHKRSWPAQLLICSRMHDATTAKIIVQQFFLLAAS

SEQ ID NO: 59443 - DNA, 1300 bp, Glycine max
  misc_feature (1)..(1300): Ceres Seq. ID no. 14307280
agtgaccagagacagatgatgatggagatggcgaagcgaaacgctgtcgttgcggcactcgcggcgttggtgctactcgcggcgagtgtggcggtggatgctcaggagaactcggacgtgaagacgctggtgaagtacaagcacgggaagaagtactgcgacaaaggatgggaatgtaagggctggtcaatttactgttgtaacctcaccattaccgattatttccagacctaccagttcgagaatctgttctccaagcggaactcgccggtggcgcacgcggtcggattttgggactaccactccttcatcgccgcggccgcgctttttgagccggaagggttcggcaccaccgggaacaagacgatgcagatgatggagatcgccgccttcttcggacacgtcggcagcaagacctcttgtggttatggagtggccactggaggacctttggcctggggtctttgttacaatcatgaaatgagtcctatgcagtcatactgtgatgactacttcaaactcacatacccctgtactcctggtgctgactactatggacgtggagccattcccattttttggaactacaactatggtgctgtcggagaagctttgaagattgacctactaagccatccagaatacatagagcagaatgccacccttgctttccaggctgcaatttggagatggatgacaccaatgaaaaagtcacagccctctgctcatgatgcttttgtcggcagctggaagcctaccaagaatgacactatggagaatcgggttcctggatttggcactacaatgaacattctctatggggatggtgtttgtggacaaggagatgtggactcaatgaacaatattgtttcccattacctgtattatcttgaccttcttggtgttggtcgagaacaggctgggccccatgacatccttacatgcgctgagcaggttcctttcaacccatcttccaaacctgcttcatcatcttaagattattatatttattagcatataatattgttgtgccaatccctttgaaagtgtaagttaataagggttcttgaaattattggtatgcaataactttgaactgtgtggcagtgtgggaattcattatagcattttgttcgttcttgtgtagaagtttaagtcatttgcaatatcatacgtcttgaaaaatttgtatctggtgtatatgtacgttatgggcgattttgttatttttattatatatacattccttggttgcaatgtaaatttgaatatggtcatgtcaaacaaatccactccgagt

SEQ ID NO: 59444 - protein, 331 aa, Glycine max
  peptide (1)..(331): Ceres Seq. ID no. 14307281
  misc_feature (79)..(321): Homolog of NCBI NO: 7798678 NR Description: class I chitinase [Arabis parishii]
  misc_feature (71)..(321): Homolog of NCBI NO: 7798662 NR Description: class I chitinase [Arabis lignifera]
  misc_feature (59)..(321): Homolog of NCBI NO: 7798640 NR Description: class I chitinase [Arabis blepharophylla]
  misc_feature (79)..(321): Homolog of NCBI NO: 7798632 NR Description: class I chitinase [Arabis holboellii]
  misc_feature (79)..(321): Homolog of NCBI NO: 7798664 NR Description: class I chitinase [Arabis lignifera]
  misc_feature (71)..(321): Homolog of NCBI NO: 7798670 NR Description: class I chitinase [Arabis microphylla]
  misc_feature (8)..(330): Homolog of NCBI NO: 27817867 NR Description: OJ1081_B12.16 [Oryza sativa (japonica
  misc_feature (7)..(331): Homolog of NCBI NO: 32401253 NR Description: class VII chitinase precursor [Gossypium
  misc_feature (22)..(330): Homolog of NCBI NO: 15228911 NR Description: glycosyl hydrolase family 19 (chitinase)
  misc_feature (19)..(331): Homolog of NCBI NO: 15221283 NR Description: glycosyl hydrolase family 19 (chitinase)
SDQRQMMMEMAKRNAVVAALAALVLLAASVAVDAQENSDVKTLVKYKHGKKYCDKGWECKGWSIYCCNLTITDYFQTYQFENLFSKRNSPVAHAVGFWDYHSFIAAAALFEPEGFGTTGNKTMQMMEIAAFFGHVGSKTSCGYGVATGGPLAWGLCYNHEMSPMQSYCDDYFKLTYPCTPGADYYGRGAIPIFWNYNYGAVGEALKIDLLSHPEYIEQNATLAFQAAIWRWMTPMKKSQPSAHDAFVGSWKPTKNDTMENRVPGFGTTMNILYGDGVCGQGDVDSMNNIVSHYLYYLDLLGVGREQAGPHDILTCAEQVPFNPSSKPASSS

SEQ ID NO: 59445 - protein, 326 aa, Glycine max
  peptide (1)..(326): Ceres Seq. ID no. 14307282
  misc_feature (74)..(316): Homolog of NCBI NO: 7798678 NR Description: class I chitinase [Arabis parishii]
  misc_feature (66)..(316): Homolog of NCBI NO: 7798662 NR Description: class I chitinase [Arabis lignifera]
  misc_feature (54)..(316): Homolog of NCBI NO: 7798640 NR Description: class I chitinase [Arabis blepharophylla]
  misc_feature (74)..(316): Homolog of NCBI NO: 7798632 NR Description: class I chitinase [Arabis holboellii]
  misc_feature (74)..(316): Homolog of NCBI NO: 7798664 NR Description: class I chitinase [Arabis lignifera]
  misc_feature (66)..(316): Homolog of NCBI NO: 7798670 NR Description: class I chitinase [Arabis microphylla]
  misc_feature (3)..(325): Homolog of NCBI NO: 27817867 NR Description: OJ1081_B12.16 [Oryza sativa (japonica
  misc_feature (2)..(326): Homolog of NCBI NO: 32401253 NR Description: class VII chitinase precursor [Gossypium
  misc_feature (17)..(325): Homolog of NCBI NO: 15228911 NR Description: glycosyl hydrolase family 19 (chitinase)
  misc_feature (14)..(326): Homolog of NCBI NO: 15221283 NR Description: glycosyl hydrolase family 19 (chitinase)
MMMEMAKRNAVVAALAALVLLAASVAVDAQENSDVKTLVKYKHGKKYCDKGWECKGWSIYCCNLTITDYFQTYQFENLFSKRNSPVAHAVGFWDYHSFIAAAALFEPEGFGTTGNKTMQMMEIAAFFGHVGSKTSCGYGVATGGPLAWGLCYNHEMSPMQSYCDDYFKLTYPCTPGADYYGRGAIPIFWNYNYGAVGEALKIDLLSHPEYIEQNATLAFQAAIWRWMTPMKKSQPSAHDAFVGSWKPTKNDTMENRVPGFGTTMNILYGDGVCGQGDVDSMNNIVSHYLYYLDLLGVGREQAGPHDILTCAEQVPFNPSSKPASSS

SEQ ID NO: 59446 - protein, 325 aa, Glycine max
  peptide (1)..(325): Ceres Seq. ID no. 14307283
  misc_feature (73)..(315): Homolog of NCBI NO: 7798678 NR Description: class I chitinase [Arabis parishii]
  misc_feature (65)..(315): Homolog of NCBI NO: 7798662 NR Description: class I chitinase [Arabis lignifera]
  misc_feature (53)..(315): Homolog of NCBI NO: 7798640 NR Description: class I chitinase [Arabis blepharophylla]
  misc_feature (73)..(315): Homolog of NCBI NO: 7798632 NR Description: class I chitinase [Arabis holboellii]
  misc_feature (73)..(315): Homolog of NCBI NO: 7798664 NR Description: class I chitinase [Arabis lignifera]
  misc_feature (65)..(315): Homolog of NCBI NO: 7798670 NR Description: class I chitinase [Arabis microphylla]
  misc_feature (2)..(324): Homolog of NCBI NO: 27817867 NR Description: OJ1081_B12.16 [Oryza sativa (japonica
  misc_feature (1)..(325): Homolog of NCBI NO: 32401253 NR Description: class VII chitinase precursor [Gossypium
  misc_feature (16)..(324): Homolog of NCBI NO: 15228911 NR Description: glycosyl hydrolase family 19 (chitinase)
  misc_feature (13)..(325): Homolog of NCBI NO: 15221283 NR Description: glycosyl hydrolase family 19 (chitinase)
MMEMAKRNAVVAALAALVLLAASVAVDAQENSDVKTLVKYKHGKKYCDKGWECKGWSIYCCNLTITDYFQTYQFENLFSKRNSPVAHAVGFWDYHSFIAAAALFEPEGFGTTGNKTMQMMEIAAFFGHVGSKTSCGYGVATGGPLAWGLCYNHEMSPMQSYCDDYFKLTYPCTPGADYYGRGAIPIFWNYNYGAVGEALKIDLLSHPEYIEQNATLAFQAAIWRWMTPMKKSQPSAHDAFVGSWKPTKNDTMENRVPGFGTTMNILYGDGVCGQGDVDSMNNIVSHYLYYLDLLGVGREQAGPHDILTCAEQVPFNPSSKPASSS

SEQ ID NO: 59447 - DNA, 1204 bp, Glycine max
  misc_feature (1)..(1204): Ceres Seq. ID no. 14313060
acatcgtacacacacacacacacacttttttcaaggcataggattggtgaggcaaacttgaattgaagtgaagaaggagatggctgcaacctcttccttgtgctcatcgaccctccaatcccagatcaatggattcttccttcacaaaacctctctttcccatactccttccctcactttctccaggaggaaaatttcaaccacagtgaaggctacatctcgagtcgacaagttttcaaaaagcgatatcattgtctctccgtccattctttctgcaaacttttcaaaattgggagagcaggtgaaagcagtagaattggctggttgtgattggattcacgttgatgtaatggatggtcgctttgttccaaatattacaattggacctcttgtggttgatgcattgcgccctgtgacagatcttcctttggatgtacacctgatgattgtagagcctgaacaaagggtaccagattttattaaggcaggagctgatatagtcagtgttcattgtgaacaatcttccaccatccatttgcatcgtacagttaatcaagtgaaaagtctgggagctaaagctggagttgtcttaaaccccggtacccccttaagtgcaatagaatatatccttgatgtggttgatttggtcttaattatgtccgtaaaccctggctttggtggccagagttttattgagagtcaagtaaagaaaatttctgatttgagaagattgtgtgcggagaagggagtgaatccatggattgaagtagatggtggagttggtccagcaaatgcatacaaggtgattgaggctggagccaatgcactggttgctggctctgctgtttttggagctaaagattatgccgaagctataagaggaatcaaaaccagcaaaagacctgaagtagttgctgtgtgaaatgcctgtgtggttccatattcaccgtacgctccaatgtaagctgtattttttgccccatagaggtttatccattaaattttggcatatcgttttactgattgggtggttgaatataagcaaaattgactgccagtatgagaaacaatcaagtaaaataatggcagacattgcttatgcgccagtttcaaagtcaactatattatataattaagttatgcttgtggctcaatcatcacatgtatctgactgataattactcaatactagtagaaattttac

SEQ ID NO: 59448 - protein, 280 aa, Glycine max
  peptide (1)..(280): Ceres Seq. ID no. 14313061
  misc_feature (58)..(260): Pfam Name: Ribulose-phosphate 3 epimerase family Pfam Description: Ribulose-phosphate 3 epimerase family
  misc_feature (53)..(275): Homolog of NCBI NO: 17228277 NR Description: ribulose-phosphate 3-epimerase [Nostoc sp. PCC
  misc_feature (47)..(276): Homolog of NCBI NO: 4930130 NR Description: Chain A, D-Ribulose-5-Phosphate 3-Epimerase From
  misc_feature (7)..(278): Homolog of NCBI NO: 6647761 NR Description: Ribulose-phosphate 3-epimerase, chloroplast
  misc_feature (7)..(278): Homolog of NCBI NO: 19071636 NR Description: ribulose-5-phosphate-3-epimerase
  misc_feature (45)..(280): Homolog of NCBI NO: 3264792 NR Description: ribulose-phosphate 3-epimerase mature form
  misc_feature (2)..(280): Homolog of NCBI NO: 15240250 NR Description: ribulose-5-phosphate-3-epimerase [Arabidopsis
  misc_feature (6)..(280): Homolog of NCBI NO: 2499728 NR Description: Ribulose-phosphate 3-epimerase, chloroplast
  misc_feature (5)..(280): Homolog of NCBI NO: 3264790 NR Description: ribulose-phosphate 3-epimerase transit form
  misc_feature (3)..(280): Homolog of NCBI NO: 2833386 NR Description: Ribulose-phosphate 3-epimerase, chloroplast
  misc_feature (2)..(280): Homolog of NCBI NO: 20339362 NR Description: ribulose-5-phosphate-3-epimerase [Pisum sativum]
MAATSSLCSSTLQSQINGFFLHKTSLSHTPSLTFSRRKISTTVKATSRVDKFSKSDIIVSPSILSANFSKLGEQVKAVELAGCDWIHVDVMDGRFVPNITIGPLVVDALRPVTDLPLDVHLMIVEPEQRVPDFIKAGADIVSVHCEQSSTIHLHRTVNQVKSLGAKAGVVLNPGTPLSAIEYILDVVDLVLIMSVNPGFGGQSFIESQVKKISDLRRLCAEKGVNPWIEVDGGVGPANAYKVIEAGANALVAGSAVFGAKDYAEAIRGIKTSKRPEVVAV

SEQ ID NO: 59449 - protein, 190 aa, Glycine max
  peptide (1)..(190): Ceres Seq. ID no. 14313062
  misc_feature (1)..(170): Pfam Name: Ribulose-phosphate 3 epimerase family Pfam Description: Ribulose-phosphate 3 epimerase family
  misc_feature (1)..(185): Homolog of NCBI NO: 17228277 NR Description: ribulose-phosphate 3-epimerase [Nostoc sp. PCC
  misc_feature (1)..(186): Homolog of NCBI NO: 4930130 NR Description: Chain A, D-Ribulose-5-Phosphate 3-Epimerase From
  misc_feature (1)..(188): Homolog of NCBI NO: 6647761 NR Description: Ribulose-phosphate 3-epimerase, chloroplast
  misc_feature (1)..(188): Homolog of NCBI NO: 19071636 NR Description: ribulose-5-phosphate-3-epimerase
  misc_feature (1)..(190): Homolog of NCBI NO: 3264792 NR Description: ribulose-phosphate 3-epimerase mature form
  misc_feature (1)..(190): Homolog of NCBI NO: 15240250 NR Description: ribulose-5-phosphate-3-epimerase [Arabidopsis
  misc_feature (1)..(190): Homolog of NCBI NO: 2499728 NR Description: Ribulose-phosphate 3-epimerase, chloroplast
  misc_feature (1)..(190): Homolog of NCBI NO: 3264790 NR Description: ribulose-phosphate 3-epimerase transit form
  misc_feature (1)..(190): Homolog of NCBI NO: 2833386 NR Description: Ribulose-phosphate 3-epimerase, chloroplast
  misc_feature (1)..(190): Homolog of NCBI NO: 20339362 NR Description: ribulose-5-phosphate-3-epimerase [Pisum sativum]
MDGRFVPNITIGPLVVDALRPVTDLPLDVHLMIVEPEQRVPDFIKAGADIVSVHCEQSSTIHLHRTVNQVKSLGAKAGVVLNPGTPLSAIEYILDVVDLVLIMSVNPGFGGQSFIESQVKKISDLRRLCAEKGVNPWIEVDGGVGPANAYKVIEAGANALVAGSAVFGAKDYAEAIRGIKTSKRPEVVAV

SEQ ID NO: 59450 - protein, 159 aa, Glycine max
  peptide (1)..(159): Ceres Seq. ID no. 14313063
  misc_feature (1)..(139): Pfam Name: Ribulose-phosphate 3 epimerase family Pfam Description: Ribulose-phosphate 3 epimerase family
  misc_feature (1)..(154): Homolog of NCBI NO: 17228277 NR Description: ribulose-phosphate 3-epimerase [Nostoc sp. PCC
  misc_feature (1)..(155): Homolog of NCBI NO: 4930130 NR Description: Chain A, D-Ribulose-5-Phosphate 3-Epimerase From
  misc_feature (1)..(157): Homolog of NCBI NO: 6647761 NR Description: Ribulose-phosphate 3-epimerase, chloroplast
  misc_feature (1)..(157): Homolog of NCBI NO: 19071636 NR Description: ribulose-5-phosphate-3-epimerase
  misc_feature (1)..(159): Homolog of NCBI NO: 3264792 NR Description: ribulose-phosphate 3-epimerase mature form
  misc_feature (1)..(159): Homolog of NCBI NO: 15240250 NR Description: ribulose-5-phosphate-3-epimerase [Arabidopsis
  misc_feature (1)..(159): Homolog of NCBI NO: 2499728 NR Description: Ribulose-phosphate 3-epimerase, chloroplast
  misc_feature (1)..(159): Homolog of NCBI NO: 3264790 NR Description: ribulose-phosphate 3-epimerase transit form
  misc_feature (1)..(159): Homolog of NCBI NO: 2833386 NR Description: Ribulose-phosphate 3-epimerase, chloroplast
  misc_feature (1)..(159): Homolog of NCBI NO: 20339362 NR Description: ribulose-5-phosphate-3-epimerase [Pisum sativum]
MIVEPEQRVPDFIKAGADIVSVHCEQSSTIHLHRTVNQVKSLGAKAGVVLNPGTPLSAIEYILDVVDLVLIMSVNPGFGGQSFIESQVKKISDLRRLCAEKGVNPWIEVDGGVGPANAYKVIEAGANALVAGSAVFGAKDYAEAIRGIKTSKRPEVVAV

SEQ ID NO: 59451 - DNA, 727 bp, Glycine max
  misc_feature (1)..(727): Ceres Seq. ID no. 15176099
gttttttatttttattattattattattgttgttatttctgccacaacatttaggggtgcattgcaaatggcttccattgttgcaagcttgccgccaccattgctgctccctgctagaaaatatcatccgggcaacttcccaagttcccctttttctcttctttcagggagacggaatcatgtttcttttgttgtgaaggcttctggagaaagttctgaatcttcaactacccttactgtttttaagtctgttcagaatgtttgggatcaacctgaggaccgtctgggacttattggtttgggatttgcagccatagcagcattttgggcatcaacaaatttgattgcggccattgacaaattgccagttttcccaacagtactggaattaattggaatattttactctgtgtggtttacttatcgctatctcatattcaaacctgaccgggaagagctttttcaaatcttgaacaagtcagcatcagatatcttgggccagtaagatgtgcggccgaaatgctatgctagattgggaggaaaaggtgaaaggggctttggttgtcttcactccaatcgtaaatgtcaatgcaaggattatttatttggtttaagaccactatattacatcaatgagttaaagcttacttcttttgtgttggtttctttgtataaaattttaactgagttcccttgtgcatcaaactatcaagagtaaaactagcct

SEQ ID NO: 59452 - protein, 167 aa, Glycine max
  peptide (1)..(167): Ceres Seq. ID no. 15176100
  misc_feature (84)..(167): Homolog of NCBI NO: 23042108 NR Description: hypothetical protein [Trichodesmium erythraeum
  misc_feature (101)..(166): Homolog of NCBI NO: 18420175 NR Description: expressed protein [Arabidopsis thaliana]
  misc_feature (101)..(166): Homolog of NCBI NO: 7485852 NR Description: hypothetical protein F20D10.220 - Arabidopsis
  misc_feature (36)..(166): Homolog of NCBI NO: 687677 NR Description: unknown
  misc_feature (23)..(166): Homolog of NCBI NO: 34393236 NR Description: unknown protein [Oryza sativa (japonica
  misc_feature (64)..(166): Homolog of NCBI NO: 21555057 NR Description: unknown [Arabidopsis thaliana]
  misc_feature (64)..(166): Homolog of NCBI NO: 18407178 NR Description: expressed protein [Arabidopsis thaliana]
  misc_feature (23)..(167): Homolog of NCBI NO: 34909746 NR Description: contains ESTs
  misc_feature (23)..(167): Homolog of NCBI NO: 21554231 NR Description: unknown [Arabidopsis thaliana]
  misc_feature (23)..(167): Homolog of NCBI NO: 18403896 NR Description: expressed protein [Arabidopsis thaliana]
FFIFIIIIIVVISATTFRGALQMASIVASLPPPLLLPARKYHPGNFPSSPFSLLSGRRNHVSFVVKASGESSESSTTLTVFKSVQNVWDQPEDRLGLIGLGFAAIAAFWASTNLIAAIDKLPVFPTVLELIGIFYSVWFTYRYLIFKPDREELFQILNKSASDILGQ

SEQ ID NO: 59453 - protein, 145 aa, Glycine max
  peptide (1)..(145): Ceres Seq. ID no. 15176101
  misc_feature (62)..(145): Homolog of NCBI NO: 23042108 NR Description: hypothetical protein [Trichodesmium erythraeum
  misc_feature (79)..(144): Homolog of NCBI NO: 18420175 NR Description: expressed protein [Arabidopsis thaliana]
  misc_feature (79)..(144): Homolog of NCBI NO: 7485852 NR Description: hypothetical protein F20D10.220 - Arabidopsis
  misc_feature (14)..(144): Homolog of NCBI NO: 687677 NR Description: unknown
  misc_feature (1)..(144): Homolog of NCBI NO: 34393236 NR Description: unknown protein [Oryza sativa (japonica
  misc_feature (42)..(144): Homolog of NCBI NO: 21555057 NR Description: unknown [Arabidopsis thaliana]
  misc_feature (42)..(144): Homolog of NCBI NO: 18407178 NR Description: expressed protein [Arabidopsis thaliana]
  misc_feature (1)..(145): Homolog of NCBI NO: 34909746 NR Description: contains ESTs
  misc_feature (1)..(145): Homolog of NCBI NO: 21554231 NR Description: unknown [Arabidopsis thaliana]
  misc_feature (1)..(145): Homolog of NCBI NO: 18403896 NR Description: expressed protein [Arabidopsis thaliana]
MASIVASLPPPLLLPARKYHPGNFPSSPFSLLSGRRNHVSFVVKASGESSESSTTLTVFKSVQNVWDQPEDRLGLIGLGFAAIAAFWASTNLIAAIDKLPVFPTVLELIGIFYSVWFTYRYLIFKPDREELFQILNKSASDILGQ

SEQ ID NO: 59454 - DNA, 1187 bp, Glycine max
  misc_feature (1)..(1187): Ceres Seq. ID no. 15170943
gagttcaatgattgattggagcagaattagagcaaaatatttatattctgttgcataagtactctgtactcaaatggaattatttcattctcaaaataaataccatacttttcttttcatttcataagagatacaaagaatgaattttgttcattcacatgtgagggattgatttccttttaatgttaaatcttggaaccatgttacatgccatataaacagggaccacataagggtaaagcaactaaagcgtaggctttaggtccaccagcaaaaaactatttgatattagtacttataaagtaaaaaaggcctcatcatatactgataaaaagaaaaccacatatgttagtaaaaatgcccaacgtatttaaagtgcaaaatttcttttaaaaattgttttaggttttgtttatcgttggacggaccctgcatatagtaacagaccaacaatagtttgcaacaaaaataaccttatgtttcatcatcatatgtatgaacataacctcggtctccacatttgtttttgtttgtttattgttgttaatttggttattgccagagactcaagaagttgccgaagtgaaaccaactgagggctctgtcaaccgagatgcagtgcttgcaagagttgcaactgagaagagattgtcactaatcaaagcatgggaagaaagtgaaaaatcaaaagctgaaaacaaggctcacaaaaagctttcatccgtttctgcatgggaaaacagcaagaaagctgctgtggaggctgacctgaaaaagattgaagaagaactggagaagaaaaaggcagaagctgcagaaaagataaaaaacaaaattgctgcaatccacaaggaagctgaagaaagaagagcaataattgaggcaaagaaaggggaagatcttcttaaggcagaggaacaagctgcaaagtatagagcaactggaacagctccaaagaaactccttggttgtttctaatgcttcaaatctcaagcattgtggggaaagaaaaagttatttttttattgtgtatctttggttattaaatatcattaatacaagtgtggttttagtttacatgttggagatttagcccatgttcatttattatgtgtgcaaacctgacacattggcgtgtatataccaactactttgtggataaagaaattaaattattcaatctgtgc

SEQ ID NO: 59455 - protein, 160 aa, Glycine max
  peptide (1)..(160): Ceres Seq. ID no. 15170944
  misc_feature (48)..(157): Pfam Name: Remorin, C-terminal region Pfam Description: Remorin, C-terminal region
  misc_feature (44)..(160): Homolog of NCBI NO: 18395321 NR Description: expressed protein [Arabidopsis thaliana]
  misc_feature (21)..(160): Homolog of NCBI NO: 4883530 NR Description: remorin 2 [Lycopersicon esculentum]
  misc_feature (25)..(160): Homolog of NCBI NO: 15225899 NR Description: remorin [Arabidopsis thaliana]
  misc_feature (27)..(160): Homolog of NCBI NO: 15229057 NR Description: remorin -related protein [Arabidopsis thaliana]
  misc_feature (31)..(160): Homolog of NCBI NO: 32489830 NR Description: OSJNBb0039L24.13 [Oryza sativa (japonica
  misc_feature (25)..(160): Homolog of NCBI NO: 15233068 NR Description: DNA-binding protein -related [Arabidopsis
  misc_feature (23)..(160): Homolog of NCBI NO: 4731573 NR Description: remorin 1 [Lycopersicon esculentum]
  misc_feature (20)..(159): Homolog of NCBI NO: 21555669 NR Description: remorin [Arabidopsis thaliana]
  misc_feature (20)..(159): Homolog of NCBI NO: 15237822 NR Description: expressed protein [Arabidopsis thaliana]
  misc_feature (17)..(160): Homolog of NCBI NO: 34925093 NR Description: Remorin (pp34)
MNITSVSTFVFVCLLLLIWLLPETQEVAEVKPTEGSVNRDAVLARVATEKRLSLIKAWEESEKSKAENKAHKKLSSVSAWENSKKAAVEADLKKIEEELEKKKAEAAEKIKNKIAAIHKEAEERRAIIEAKKGEDLLKAEEQAAKYRATGTAPKKLLGCF

SEQ ID NO: 59456 - DNA, 1515 bp, Glycine max
  misc_feature (1)..(1515): Ceres Seq. ID no. 14307678
tttcttctgtagatccatctatctagcttcggagctgcaaatggacgtcgcagtcactgccttccggtcaccgctgatcatcctccgaagaccggtcaacgagtctgcctcagctcggttcggttccacttttgggttttccagaaagcagcaacggttcagttcagtatgtatccccaaacacaagcacaagcaaggtcgtagaagagggtttgtagttagagcttctgcatcctcatctccggagtcggatgatgccaagattgctcctcttcagtttgaatcctcaattgggcagttcctttctcagattttgaaagatcatccgcatcttgtgcctgctgccgttgaccagcagctccagcaactccaaactgaccgcgatgctcatcaacaaaacgaacaaccttctgcttcaaccactgatttagttttgtacaggagaattgctgaggtgaaggctaatgaaaggaggaaagctctggaagagatcttgtatgcattggtagtgcagaagttcatggatgctaatatttctttgataccctctgtaaccccagatctttctggtaaggttgatttgtggccaaatgaagatggtaaacttgagctgcttcactcacacgaagcatatgagatgattcaaaaccacctggctctcattctcggtaacagagctggagatttaacatcaatagctgaaatcagcaaattcagggtagggcaggtctacgcagcatcagtgatgtatggttattttcttagacgagttgaccaaaggttccagttggagaagacaatgaaagttcttccaaatgcaacagaaaaagagaatagtgctcatcaaactacaatggacaatgcaagacccagtattgaagaggacacttctcaagtgatgtctcatcctgaagtatctacctggcctggtggtgatgtccgtcccggtggatttggctatggtgtaaaggcaaccaggttgcgtaactacgtgatgtcctttgatggtgatacactacaaagatatgcaacaattagatccaaagaggctgtcagcatcatcgagaagcacacagaagcattgtttggaagacctgaaattgttgtaacacctgagggggcagtctctaaggatgaaaacatcaaaattagctttggtggtttaaagaagcttgttttagaggctgtgacatttggttcttttctctgggatgttgagagctatgtggactcaaggtaccattttgtgttgaactgagtaaatctttatatgtgtacccttttagatcccaccaggtgggagggaacctcgtgcattcagttgtccttttgagttctgtttgctctcatacatcacaaggcatagtttatagtgtgttggtactgactgatggagtaaatttgaatgtaacttcggtgttaaaagtccaaatattgtttcactaattaatatgtatatactgtagtggtagtggctctggatttcactaataaagggaagcttattttctagtt

SEQ ID NO: 59457 - protein, 418 aa, Glycine max
  peptide (1)..(418): Ceres Seq. ID no. 14307679
  misc_feature (68)..(418): Pfam Name: Protein of unknown function (DUF760) Pfam Description: Protein of unknown function (DUF760)
  misc_feature (49)..(264): Homolog of NCBI NO: 15239021 NR Description: expressed protein [Arabidopsis thaliana]
  misc_feature (326)..(413): Homolog of NCBI NO: 18397912 NR Description: expressed protein [Arabidopsis thaliana]
  misc_feature (72)..(264): Homolog of NCBI NO: 18397912 NR Description: expressed protein [Arabidopsis thaliana]
  misc_feature (67)..(416): Homolog of NCBI NO: 32489097 NR Description: OSJNBa0093F12.3 [Oryza sativa (japonica
  misc_feature (51)..(416): Homolog of NCBI NO: 18398302 NR Description: expressed protein [Arabidopsis thaliana]
  misc_feature (161)..(418): Homolog of NCBI NO: 13561930 NR Description: unknown [Brassica napus]
  misc_feature (27)..(418): Homolog of NCBI NO: 28301943 NR Description: unknown protein [Oryza sativa (japonica
  misc_feature (39)..(418): Homolog of NCBI NO: 15221185 NR Description: expressed protein [Arabidopsis thaliana]
  misc_feature (68)..(418): Homolog of NCBI NO: 18401645 NR Description: expressed protein [Arabidopsis thaliana]
  misc_feature (68)..(418): Homolog of NCBI NO: 17064820 NR Description: Unknown protein [Arabidopsis thaliana]
FFCRSIYLASELQMDVAVTAFRSPLIILRRPVNESASARFGSTFGFSRKQQRFSSVCIPKHKHKQGRRRGFVVRASASSSPESDDAKIAPLQFESSIGQFLSQILKDHPHLVPAAVDQQLQQLQTDRDAHQQNEQPSASTTDLVLYRRIAEVKANERRKALEEILYALVVQKFMDANISLIPSVTPDLSGKVDLWPNEDGKLELLHSHEAYEMIQNHLALILGNRAGDLTSIAEISKFRVGQVYAASVMYGYFLRRVDQRFQLEKTMKVLPNATEKENSAHQTTMDNARPSIEEDTSQVMSHPEVSTWPGGDVRPGGFGYGVKATRLRNYVMSFDGDTLQRYATIRSKEAVSIIEKHTEALFGRPEIVVTPEGAVSKDENIKISFGGLKKLVLEAVTFGSFLWDVESYVDSRYHFVLN

SEQ ID NO: 59458 - protein, 405 aa, Glycine max
  peptide (1)..(405): Ceres Seq. ID no. 14307680
  misc_feature (55)..(405): Pfam Name: Protein of unknown function (DUF760) Pfam Description: Protein of unknown function (DUF760)
  misc_feature (36)..(251): Homolog of NCBI NO: 15239021 NR Description: expressed protein [Arabidopsis thaliana]
  misc_feature (313)..(400): Homolog of NCBI NO: 18397912 NR Description: expressed protein [Arabidopsis thaliana]
  misc_feature (59)..(251): Homolog of NCBI NO: 18397912 NR Description: expressed protein [Arabidopsis thaliana]
  misc_feature (54)..(403): Homolog of NCBI NO: 32489097 NR Description: OSJNBa0093F12.3 [Oryza sativa (japonica
  misc_feature (38)..(403): Homolog of NCBI NO: 18398302 NR Description: expressed protein [Arabidopsis thaliana]
  misc_feature (148)..(405): Homolog of NCBI NO: 13561930 NR Description: unknown [Brassica napus]
  misc_feature (14)..(405): Homolog of NCBI NO: 28301943 NR Description: unknown protein [Oryza sativa (japonica
  misc_feature (26)..(405): Homolog of NCBI NO: 15221185 NR Description: expressed protein [Arabidopsis thaliana]
  misc_feature (55)..(405): Homolog of NCBI NO: 18401645 NR Description: expressed protein [Arabidopsis thaliana]
  misc_feature (55)..(405): Homolog of NCBI NO: 17064820 NR Description: Unknown protein [Arabidopsis thaliana]
MDVAVTAFRSPLIILRRPVNESASARFGSTFGFSRKQQRFSSVCIPKHKHKQGRRRGFVVRASASSSPESDDAKIAPLQFESSIGQFLSQILKDHPHLVPAAVDQQLQQLQTDRDAHQQNEQPSASTTDLVLYRRIAEVKANERRKALEEILYALVVQKFMDANISLIPSVTPDLSGKVDLWPNEDGKLELLHSHEAYEMIQNHLALILGNRAGDLTSIAEISKFRVGQVYAASVMYGYFLRRVDQRFQLEKTMKVLPNATEKENSAHQTTMDNARPSIEEDTSQVMSHPEVSTWPGGDVRPGGFGYGVKATRLRNYVMSFDGDTLQRYATIRSKEAVSIIEKHTEALFGRPEIVVTPEGAVSKDENIKISFGGLKKLVLEAVTFGSFLWDVESYVDSRYHFVLN

SEQ ID NO: 59459 - protein, 245 aa, Glycine max
  peptide (1)..(245): Ceres Seq. ID no. 14307681
  misc_feature (1)..(245): Pfam Name: Protein of unknown function (DUF760) Pfam Description: Protein of unknown function (DUF760)
  misc_feature (1)..(91): Homolog of NCBI NO: 15239021 NR Description: expressed protein [Arabidopsis thaliana]
  misc_feature (153)..(240): Homolog of NCBI NO: 18397912 NR Description: expressed protein [Arabidopsis thaliana]
  misc_feature (1)..(91): Homolog of NCBI NO: 18397912 NR Description: expressed protein [Arabidopsis thaliana]
  misc_feature (1)..(243): Homolog of NCBI NO: 32489097 NR Description: OSJNBa0093F12.3 [Oryza sativa (japonica
  misc_feature (1)..(243): Homolog of NCBI NO: 18398302 NR Description: expressed protein [Arabidopsis thaliana]
  misc_feature (1)..(245): Homolog of NCBI NO: 13561930 NR Description: unknown [Brassica napus]
  misc_feature (1)..(245): Homolog of NCBI NO: 28301943 NR Description: unknown protein [Oryza sativa (japonica
  misc_feature (1)..(245): Homolog of NCBI NO: 15221185 NR Description: expressed protein [Arabidopsis thaliana]
  misc_feature (1)..(245): Homolog of NCBI NO: 18401645 NR Description: expressed protein [Arabidopsis thaliana]
  misc_feature (1)..(245): Homolog of NCBI NO: 17064820 NR Description: Unknown protein [Arabidopsis thaliana]
MDANISLIPSVTPDLSGKVDLWPNEDGKLELLHSHEAYEMIQNHLALILGNRAGDLTSIAEISKFRVGQVYAASVMYGYFLRRVDQRFQLEKTMKVLPNATEKENSAHQTTMDNARPSIEEDTSQVMSHPEVSTWPGGDVRPGGFGYGVKATRLRNYVMSFDGDTLQRYATIRSKEAVSIIEKHTEALFGRPEIVVTPEGAVSKDENIKISFGGLKKLVLEAVTFGSFLWDVESYVDSRYHFVLN

SEQ ID NO: 59460 - DNA, 1280 bp, Glycine max
  misc_feature (1)..(1280): Ceres Seq. ID no. 14313022
tatgaatcgatggatgattcgatggcttacaaccatattgaacgactgttttttacgaccatagaaaaaaacacatttggtccggcattgaaattattagaaaaatatccaacgcagttgggccttgcaggagatgatcaacgtaattgccaaaatgcattgaagatgctggcacgaaagccttcagtaattctaaacaaagtagagaggagagaagaggggcaagagggtctgaaattgcttgagcgattatattggggcgttaataaaatggaggattgtacggtgtggttttctttagtgaaatcaggaaaccttgacgctttaaaacgccttattggaaataatagtgaagtgctcatgaccataaaggacagcgatggaatgagcctactgcataaggctgctttatgtcgccaacgtagcattgtttcctatatacaaggtttcacatccagagaagataaccttgtactgggaggggtcgacaataaaggtaacaacgttctacacttagctgctgcgaagcagcaatcttcgtcacatctattaagaaacgcaaaggtggaaatgcaaaatgatctcgcatggtttaaggaaatcgagaagaaatttcatgaattcagctacaacacaatggtgaacgacaaaggcaagacaccagaggaggtattttatgatcaacacgaggatttatctgacaagattaaagatgattccaaagaaatagccaactcgggcatgattgtggcaatacttgtggccacggtagcatttgccgctgctctcaccgttccaggtgaaaagaccaatgcgtggtttgttgtcttcatattcacaaatgcagttgcattatttgcttcttcagcgtcaatactctctttcttgtcaaatttcacttcattgagattcggacaacgcgaatttgtcaaatcactacatccgagcttgacttttgggcccgtgttactttttatctctgttgttgctatggttgtggcttttacagcagcctcctttttgatatttgatcacacctccaagtgggtttcttacgcagttgcttcaatggggttttttccattactgctgtttattctgtttcaattcaggtttttcgacgacagcttgtggtctagatattatcgtctgtccaaatttgaaaaatttgagtaagttattacagagatacagcttgtggtctagatattattgcctagattgttgcttgtcagccggtcaaaagcttgtgtttgaatttaagattattctgtattttc

SEQ ID NO: 59461 - protein, 391 aa, Glycine max
  peptide (1)..(391): Ceres Seq. ID no. 14313023
  misc_feature (30)..(358): Homolog of NCBI NO: 34908074 NR Description: P0506B12.26 [Oryza sativa (japonica
  misc_feature (101)..(263): Homolog of NCBI NO: 15238268 NR Description: expressed protein [Arabidopsis thaliana]
  misc_feature (49)..(387): Homolog of NCBI NO: 15232411 NR Description: hypothetical protein [Arabidopsis thaliana]
  misc_feature (95)..(381): Homolog of NCBI NO: 9758448 NR Description: gene_id:MUK11.5~unknown protein [Arabidopsis
  misc_feature (95)..(381): Homolog of NCBI NO: 15238302 NR Description: hypothetical protein [Arabidopsis thaliana]
  misc_feature (98)..(370): Homolog of NCBI NO: 9293890 NR Description: emb|CAB70981.1~gene_id:MVE11.3~similar to unknown
  misc_feature (98)..(387): Homolog of NCBI NO: 15238614 NR Description: hypothetical protein [Arabidopsis thaliana]
  misc_feature (29)..(370): Homolog of NCBI NO: 15230158 NR Description: hypothetical protein [Arabidopsis thaliana]
  misc_feature (101)..(381): Homolog of NCBI NO: 15238270 NR Description: expressed protein [Arabidopsis thaliana]
  misc_feature (101)..(381): Homolog of NCBI NO: 15238273 NR Description: hypothetical protein [Arabidopsis thaliana]
YESMDDSMAYNHIERLFFTTIEKNTFGPALKLLEKYPTQLGLAGDDQRNCQNALKMLARKPSVILNKVERREEGQEGLKLLERLYWGVNKMEDCTVWFSLVKSGNLDALKRLIGNNSEVLMTIKDSDGMSLLHKAALCRQRSIVSYIQGFTSREDNLVLGGVDNKGNNVLHLAAAKQQSSSHLLRNAKVEMQNDLAWFKEIEKKFHEFSYNTMVNDKGKTPEEVFYDQHEDLSDKIKDDSKEIANSGMIVAILVATVAFAAALTVPGEKTNAWFVVFIFTNAVALFASSASILSFLSNFTSLRFGQREFVKSLHPSLTFGPVLLFISVVAMVVAFTAASFLIFDHTSKWVSYAVASMGFFPLLLFILFQFRFFDDSLWSRYYRLSKFEKFE

SEQ ID NO: 59462 - protein, 388 aa, Glycine max
  peptide (1)..(388): Ceres Seq. ID no. 14313024
  misc_feature (27)..(355): Homolog of NCBI NO: 34908074 NR Description: P0506B12.26 [Oryza sativa (japonica
  misc_feature (98)..(260): Homolog of NCBI NO: 15238268 NR Description: expressed protein [Arabidopsis thaliana]
  misc_feature (46)..(384): Homolog of NCBI NO: 15232411 NR Description: hypothetical protein [Arabidopsis thaliana]
  misc_feature (92)..(378): Homolog of NCBI NO: 9758448 NR Description: gene_id:MUK11.5~unknown protein [Arabidopsis
  misc_feature (92)..(378): Homolog of NCBI NO: 15238302 NR Description: hypothetical protein [Arabidopsis thaliana]
  misc_feature (95)..(367): Homolog of NCBI NO: 9293890 NR Description: emb|CAB70981.1~gene_id:MVE11.3~similar to unknown
  misc_feature (95)..(384): Homolog of NCBI NO: 15238614 NR Description: hypothetical protein [Arabidopsis thaliana]
  misc_feature (26)..(367): Homolog of NCBI NO: 15230158 NR Description: hypothetical protein [Arabidopsis thaliana]
  misc_feature (98)..(378): Homolog of NCBI NO: 15238270 NR Description: expressed protein [Arabidopsis thaliana]
  misc_feature (98)..(378): Homolog of NCBI NO: 15238273 NR Description: hypothetical protein [Arabidopsis thaliana]
MDDSMAYNHIERLFFTTIEKNTFGPALKLLEKYPTQLGLAGDDQRNCQNALKMLARKPSVILNKVERREEGQEGLKLLERLYWGVNKMEDCTVWFSLVKSGNLDALKRLIGNNSEVLMTIKDSDGMSLLHKAALCRQRSIVSYIQGFTSREDNLVLGGVDNKGNNVLHLAAAKQQSSSHLLRNAKVEMQNDLAWFKEIEKKFHEFSYNTMVNDKGKTPEEVFYDQHEDLSDKIKDDSKEIANSGMIVAILVATVAFAAALTVPGEKTNAWFVVFIFTNAVALFASSASILSFLSNFTSLRFGQREFVKSLHPSLTFGPVLLFISVVAMVVAFTAASFLIFDHTSKWVSYAVASMGFFPLLLFILFQFRFFDDSLWSRYYRLSKFEKFE

SEQ ID NO: 59463 - protein, 384 aa, Glycine max
  peptide (1)..(384): Ceres Seq. ID no. 14313025
  misc_feature (23)..(351): Homolog of NCBI NO: 34908074 NR Description: P0506B12.26 [Oryza sativa (japonica
  misc_feature (94)..(256): Homolog of NCBI NO: 15238268 NR Description: expressed protein [Arabidopsis thaliana]
  misc_feature (42)..(380): Homolog of NCBI NO: 15232411 NR Description: hypothetical protein [Arabidopsis thaliana]
  misc_feature (88)..(374): Homolog of NCBI NO: 9758448 NR Description: gene_id:MUK11.5~unknown protein [Arabidopsis
  misc_feature (88)..(374): Homolog of NCBI NO: 15238302 NR Description: hypothetical protein [Arabidopsis thaliana]
  misc_feature (91)..(363): Homolog of NCBI NO: 9293890 NR Description: emb|CAB70981.1~gene_id:MVE11.3~similar to unknown
  misc_feature (91)..(380): Homolog of NCBI NO: 15238614 NR Description: hypothetical protein [Arabidopsis thaliana]
  misc_feature (22)..(363): Homolog of NCBI NO: 15230158 NR Description: hypothetical protein [Arabidopsis thaliana]
  misc_feature (94)..(374): Homolog of NCBI NO: 15238270 NR Description: expressed protein [Arabidopsis thaliana]
  misc_feature (94)..(374): Homolog of NCBI NO: 15238273 NR Description: hypothetical protein [Arabidopsis thaliana]
MAYNHIERLFFTTIEKNTFGPALKLLEKYPTQLGLAGDDQRNCQNALKMLARKPSVILNKVERREEGQEGLKLLERLYWGVNKMEDCTVWFSLVKSGNLDALKRLIGNNSEVLMTIKDSDGMSLLHKAALCRQRSIVSYIQGFTSREDNLVLGGVDNKGNNVLHLAAAKQQSSSHLLRNAKVEMQNDLAWFKEIEKKFHEFSYNTMVNDKGKTPEEVFYDQHEDLSDKIKDDSKEIANSGMIVAILVATVAFAAALTVPGEKTNAWFVVFIFTNAVALFASSASILSFLSNFTSLRFGQREFVKSLHPSLTFGPVLLFISVVAMVVAFTAASFLIFDHTSKWVSYAVASMGFFPLLLFILFQFRFFDDSLWSRYYRLSKFEKFE

SEQ ID NO: 59464 - DNA, 1349 bp, Glycine max
  misc_feature (1)..(1349): Ceres Seq. ID no. 14313951
gatctaaatctaacggaaaatattaccttcattatctcagcttctatgaaaaagcaactatactcatcacccacttactcctcccaccaaaaatccacacccggtgttaacatgagagaaagattggttcgcttgactgaaactgtcaatgaactcagaaccaacgtcgaaaccgaagtccaaaaccaggataacctcgaaaaagttagctcaaagaactacactcttatgaacacacaaatcaaggctttgagaaaagctttcaacacccttgctgatgtgattatggaagagttggacgctattaaatcagatgttgctcgtgattctcaggaggctaatgccgctattttccgcaagcttgatgagcttggttcacaagttaatagacttcaaaatgagaagcaggatcaaagggaacaaatgagtaatgttgaacagagtttgagagaaagaatagaagctttggaaagaaagcaagatgagaccagtcaagatgtccaagcagtcgtagaaaacaccaaagaagacaatagagtcctttatgaaaagctccacagtgtcattagaagtaacacttcaaagattgaccagttagctcaggacaatgaaaatgtgaatattgctttagatgaattaaagaacaagagcaatactgatggttctaatataaaggacatattccacaagattggcgaagtggatgatgaactaaagcaccatactcatgaactagccaataagcttggtgataccagaaaccagattactacacttagagaaagcttaaagggagacatttcaaacgctgctaaagctcaaattgagataaccagaagggttgaagaagtgaacactagacttaatgagaaggttcatgctgatcagttaagtgctcaacaaagattctctgaaattgaggacttggtcaatcaagttcaacatgagttccaggataatgttcaagagttggcaaagattcacaaggaaagttcgactcagattattgtggactttgaaaaggcgattagttctattaataatgacaataagatcttgtataagaagtttgcagtattggaaggatcagtaggaaagaatagagaagatcttggggcgatgatatcagatcatgagcatagtgttagcagaaagaatgagcaacttaacagagcggtctttgatatatgcagacaattgaatattaataatcctttgctttcgtattgatttacttttgatttagtatgatccgttcaattttttttacttttgaaatttatttgcataaaaaactgactatgaatacttctataaagatttttatgaataaagatccttcttagaac

SEQ ID NO: 59465 - protein, 409 aa, Glycine max
  peptide (1)..(409): Ceres Seq. ID no. 14313952
  misc_feature (35)..(408): Pfam Name: Myosin tail Pfam Description: Myosin tail
  misc_feature (37)..(329): Homolog of NCBI NO: 39582764 NR Description: Hypothetical protein CBG21911 [Caenorhabditis
  misc_feature (44)..(369): Homolog of NCBI NO: 19113921 NR Description: hypothetical coiled-coil protein
  misc_feature (37)..(329): Homolog of NCBI NO: 17508449 NR Description: MYOsin heavy chain structural gene, LEThal LET-75
  misc_feature (37)..(329): Homolog of NCBI NO: 127751 NR Description: Myosin heavy chain D (MHC D)
  misc_feature (40)..(401): Homolog of NCBI NO: 17509401 NR Description: UNCoordinated locomotion UNC-54, encodes major muscle myosin heavy chain MHC B (MYO-4), MYOsin heavy chain
  misc_feature (40)..(401): Homolog of NCBI NO: 127743 NR Description: Myosin heavy chain B (MHC B)
  misc_feature (40)..(330): Homolog of NCBI NO: 14192753 NR Description: myosin heavy chain [Trichinella spiralis]
  misc_feature (35)..(408): Homolog of NCBI NO: 6708502 NR Description: superfast myosin heavy chain [Felis catus]
  misc_feature (120)..(313): Homolog of NCBI NO: 6606247 NR Description: BdrC5 [Borrelia hermsii]
  misc_feature (38)..(390): Homolog of NCBI NO: 730093 NR Description: Myosin heavy chain, clone 203
DLNLTENITFIISASMKKQLYSSPTYSSHQKSTPGVNMRERLVRLTETVNELRTNVETEVQNQDNLEKVSSKNYTLMNTQIKALRKAFNTLADVIMEELDAIKSDVARDSQEANAAIFRKLDELGSQVNRLQNEKQDQREQMSNVEQSLRERIEALERKQDETSQDVQAVVENTKEDNRVLYEKLHSVIRSNTSKIDQLAQDNENVNIALDELKNKSNTDGSNIKDIFHKIGEVDDELKHHTHELANKLGDTRNQITTLRESLKGDISNAAKAQIEITRRVEEVNTRLNEKVHADQLSAQQRFSEIEDLVNQVQHEFQDNVQELAKIHKESSTQIIVDFEKAISSINNDNKILYKKFAVLEGSVGKNREDLGAMISDHEHSVSRKNEQLNRAVFDICRQLNINNPLLSY

SEQ ID NO: 59466 - protein, 394 aa, Glycine max
  peptide (1)..(394): Ceres Seq. ID no. 14313953
  misc_feature (20)..(393): Pfam Name: Myosin tail Pfam Description: Myosin tail
  misc_feature (22)..(314): Homolog of NCBI NO: 39582764 NR Description: Hypothetical protein CBG21911 [Caenorhabditis
  misc_feature (29)..(354): Homolog of NCBI NO: 19113921 NR Description: hypothetical coiled-coil protein
  misc_feature (22)..(314): Homolog of NCBI NO: 17508449 NR Description: MYOsin heavy chain structural gene, LEThal LET-75
  misc_feature (22)..(314): Homolog of NCBI NO: 127751 NR Description: Myosin heavy chain D (MHC D)
  misc_feature (25)..(386): Homolog of NCBI NO: 17509401 NR Description: UNCoordinated locomotion UNC-54, encodes major muscle myosin heavy chain MHC B (MYO-4), MYOsin heavy chain
  misc_feature (25)..(386): Homolog of NCBI NO: 127743 NR Description: Myosin heavy chain B (MHC B)
  misc_feature (25)..(315): Homolog of NCBI NO: 14192753 NR Description: myosin heavy chain [Trichinella spiralis]
  misc_feature (20)..(393): Homolog of NCBI NO: 6708502 NR Description: superfast myosin heavy chain [Felis catus]
  misc_feature (105)..(298): Homolog of NCBI NO: 6606247 NR Description: BdrC5 [Borrelia hermsii]
  misc_feature (23)..(375): Homolog of NCBI NO: 730093 NR Description: Myosin heavy chain, clone 203
MKKQLYSSPTYSSHQKSTPGVNMRERLVRLTETVNELRTNVETEVQNQDNLEKVSSKNYTLMNTQIKALRKAFNTLADVIMEELDAIKSDVARDSQEANAAIFRKLDELGSQVNRLQNEKQDQREQMSNVEQSLRERIEALERKQDETSQDVQAVVENTKEDNRVLYEKLHSVIRSNTSKIDQLAQDNENVNIALDELKNKSNTDGSNIKDIFHKIGEVDDELKHHTHELANKLGDTRNQITTLRESLKGDISNAAKAQIEITRRVEEVNTRLNEKVHADQLSAQQRFSEIEDLVNQVQHEFQDNVQELAKIHKESSTQIIVDFEKAISSINNDNKILYKKFAVLEGSVGKNREDLGAMISDHEHSVSRKNEQLNRAVFDICRQLNINNPLLSY

SEQ ID NO: 59467 - protein, 372 aa, Glycine max
  peptide (1)..(372): Ceres Seq. ID no. 14313954
  misc_feature (1)..(371): Pfam Name: Myosin tail Pfam Description: Myosin tail
  misc_feature (1)..(292): Homolog of NCBI NO: 39582764 NR Description: Hypothetical protein CBG21911 [Caenorhabditis
  misc_feature (7)..(332): Homolog of NCBI NO: 19113921 NR Description: hypothetical coiled-coil protein
  misc_feature (1)..(292): Homolog of NCBI NO: 17508449 NR Description: MYOsin heavy chain structural gene, LEThal LET-75
  misc_feature (1)..(292): Homolog of NCBI NO: 127751 NR Description: Myosin heavy chain D (MHC D)
  misc_feature (3)..(364): Homolog of NCBI NO: 17509401 NR Description: UNCoordinated locomotion UNC-54, encodes major muscle myosin heavy chain MHC B (MYO-4), MYOsin heavy chain
  misc_feature (3)..(364): Homolog of NCBI NO: 127743 NR Description: Myosin heavy chain B (MHC B)
  misc_feature (3)..(293): Homolog of NCBI NO: 14192753 NR Description: myosin heavy chain [Trichinella spiralis]
  misc_feature (1)..(371): Homolog of NCBI NO: 6708502 NR Description: superfast myosin heavy chain [Felis catus]
  misc_feature (83)..(276): Homolog of NCBI NO: 6606247 NR Description: BdrC5 [Borrelia hermsii]
  misc_feature (1)..(353): Homolog of NCBI NO: 730093 NR Description: Myosin heavy chain, clone 203
MRERLVRLTETVNELRTNVETEVQNQDNLEKVSSKNYTLMNTQIKALRKAFNTLADVIMEELDAIKSDVARDSQEANAAIFRKLDELGSQVNRLQNEKQDQREQMSNVEQSLRERIEALERKQDETSQDVQAVVENTKEDNRVLYEKLHSVIRSNTSKIDQLAQDNENVNIALDELKNKSNTDGSNIKDIFHKIGEVDDELKHHTHELANKLGDTRNQITTLRESLKGDISNAAKAQIEITRRVEEVNTRLNEKVHADQLSAQQRFSEIEDLVNQVQHEFQDNVQELAKIHKESSTQIIVDFEKAISSINNDNKILYKKFAVLEGSVGKNREDLGAMISDHEHSVSRKNEQLNRAVFDICRQLNINNPLLSY

SEQ ID NO: 59468 - DNA, 1730 bp, Glycine max
  misc_feature (1)..(1730): Ceres Seq. ID no. 15170897
acaaaaagctcctcagaacctatatggcaaggacctcatttttccaagcattggagctaatagagacgctcaaacaagcgcacctctcttctttccaaatgcaagcttctttaaaaagagtgatactaaaaagacactggactgtctcaaactgccaatgaataatctcagagaagacttttcagtgtcgtcttcaagcagatgcgactttgctaaccatcccaaggtcaaggaaaataactgtaaggagagattcaagaaaagcgaatgcatactggcccctccacaaaagagaaagcgctgtcagattcttaacgaattttcccaagaggactatttgagcccaaagcaccctcgagtcaaagctttacaaggaaatttgctcgatctcgcacgaaccgactctgaatccaggaaatcatcaaaatttgaggagtggcaaacacctcaaaagaagttccatgtcttttgggatcatcatgaaaatgaaaagcaagcaaaattatcagaaatgaagcatcatttgtttgaaagcgagtactccagactcaatagtgactataaaattcttgaagttctcggaagaggaagttttggcaaagtatatcgctgcatcaacagaattgacaagaacgaatacgcaatcaaagagacttttcgaagctttactggaaaaaacaaggtctatggcttgaacgaaacccaagctctcgcttctctcacagcatttgaggacaatacaaatgttgtcagatattttaattcatggatcgaagatgatagactttatcttgtgatggagttttgcccttcttctcttaaagaagaacgcaagcaaagaggaaagtttacagagactgctatcagaaaagcgcttcgagatgtttgtctcggccttgcttacctccatagacataacattgcacatttagatattaagccagaaaatattttaatttcaaaaactatgagatacaaaatcggagacatgggacaatcacgagttgtgaagcgagctggagatattgaagaaggtgattctcgttatgtcgcaccagagttgttaaactgtgatgactgtgaagacgaagttgacttgaaaaaatgtgatattttttcattaggcatgactgcatttgaattactcacagatcataactccccagcaaatggggatgaatggcatcagcttcgaaatggcagattagatcttttagaagcgattcctggtgtgtctcaacgattaaagatgctcatcagaaaaatgttgagcaagaatccatttgaaagaccatcggctcaagagcttttagctcatgatttgccaagtgagatggaaatcgaattaaaatgggaaaagatccaaaataggatcctccaagaaagaaagactgatttggaaaatcagttgaataaaagaaaaaagagaagaaactctgttgcttaattcaaattttgactttttgaatgctgcgccgctgttgaaattttgacctatccttacattattaaatgatattttacttttcatcgtttattattcagtgttaatatattattataagtttgagaaaaattttaaatatataatagaaattttgatgaattataccgactctctggtataatttcatctttatgtttattgttagcttgattgtatatctctaccttgctgatttgtagagtgcgtatatagagtataataatacccctccgttctttaaaac

SEQ ID NO: 59469 - protein, 481 aa, Glycine max
  peptide (1)..(481): Ceres Seq. ID no. 15170898
  misc_feature (190)..(439): Pfam Name: Protein kinase domain Pfam Description: Protein kinase domain
  misc_feature (151)..(322): Homolog of NCBI NO: 31226449 NR Description: ENSANGP00000010303 [Anopheles gambiae]
  misc_feature (187)..(439): Homolog of NCBI NO: 17536877 NR Description: WEE homolog, defective SPErmatogenesis SPE-37
  misc_feature (163)..(442): Homolog of NCBI NO: 16266769 NR Description: Myt1 [Asterina pectinifera]
  misc_feature (175)..(317): Homolog of NCBI NO: 5579439 NR Description: Wee1 kinase [Drosophila melanogaster]
  misc_feature (325)..(481): Homolog of NCBI NO: 5579439 NR Description: Wee1 kinase [Drosophila melanogaster]
  misc_feature (175)..(317): Homolog of NCBI NO: 17136988 NR Description: wee CG4488-PA [Drosophila melanogaster]
  misc_feature (325)..(481): Homolog of NCBI NO: 17136988 NR Description: wee CG4488-PA [Drosophila melanogaster]
  misc_feature (181)..(441): Homolog of NCBI NO: 25518409 NR Description: hypothetical protein F22D16.3 - Arabidopsis
  misc_feature (181)..(441): Homolog of NCBI NO: 15218666 NR Description: protein kinase, putative [Arabidopsis thaliana]
  misc_feature (181)..(439): Homolog of NCBI NO: 5821717 NR Description: Wee1-like protein [Zea mays]
QKAPQNLYGKDLIFPSIGANRDAQTSAPLFFPNASFFKKSDTKKTLDCLKLPMNNLREDFSVSSSSRCDFANHPKVKENNCKERFKKSECILAPPQKRKRCQILNEFSQEDYLSPKHPRVKALQGNLLDLARTDSESRKSSKFEEWQTPQKKFHVFWDHHENEKQAKLSEMKHHLFESEYSRLNSDYKILEVLGRGSFGKVYRCINRIDKNEYAIKETFRSFTGKNKVYGLNETQALASLTAFEDNTNVVRYFNSWIEDDRLYLVMEFCPSSLKEERKQRGKFTETAIRKALRDVCLGLAYLHRHNIAHLDIKPENILISKTMRYKIGDMGQSRVVKRAGDIEEGDSRYVAPELLNCDDCEDEVDLKKCDIFSLGMTAFELLTDHNSPANGDEWHQLRNGRLDLLEAIPGVSQRLKMLIRKMLSKNPFERPSAQELLAHDLPSEMEIELKWEKIQNRILQERKTDLENQLNKRKKRRNSVA

SEQ ID NO: 59470 - protein, 429 aa, Glycine max
  peptide (1)..(429): Ceres Seq. ID no. 15170899
  misc_feature (138)..(387): Pfam Name: Protein kinase domain Pfam Description: Protein kinase domain
  misc_feature (99)..(270): Homolog of NCBI NO: 31226449 NR Description: ENSANGP00000010303 [Anopheles gambiae]
  misc_feature (135)..(387): Homolog of NCBI NO: 17536877 NR Description: WEE homolog, defective SPErmatogenesis SPE-37
  misc_feature (111)..(390): Homolog of NCBI NO: 16266769 NR Description: Myt1 [Asterina pectinifera]
  misc_feature (123)..(265): Homolog of NCBI NO: 5579439 NR Description: Wee1 kinase [Drosophila melanogaster]
  misc_feature (273)..(429): Homolog of NCBI NO: 5579439 NR Description: Wee1 kinase [Drosophila melanogaster]
  misc_feature (123)..(265): Homolog of NCBI NO: 17136988 NR Description: wee CG4488-PA [Drosophila melanogaster]
  misc_feature (273)..(429): Homolog of NCBI NO: 17136988 NR Description: wee CG4488-PA [Drosophila melanogaster]
  misc_feature (129)..(389): Homolog of NCBI NO: 25518409 NR Description: hypothetical protein F22D16.3 - Arabidopsis
  misc_feature (129)..(389): Homolog of NCBI NO: 15218666 NR Description: protein kinase, putative [Arabidopsis thaliana]
  misc_feature (129)..(387): Homolog of NCBI NO: 5821717 NR Description: Wee1-like protein [Zea mays]
MNNLREDFSVSSSSRCDFANHPKVKENNCKERFKKSECILAPPQKRKRCQILNEFSQEDYLSPKHPRVKALQGNLLDLARTDSESRKSSKFEEWQTPQKKFHVFWDHHENEKQAKLSEMKHHLFESEYSRLNSDYKILEVLGRGSFGKVYRCINRIDKNEYAIKETFRSFTGKNKVYGLNETQALASLTAFEDNTNVVRYFNSWIEDDRLYLVMEFCPSSLKEERKQRGKFTETAIRKALRDVCLGLAYLHRHNIAHLDIKPENILISKTMRYKIGDMGQSRVVKRAGDIEEGDSRYVAPELLNCDDCEDEVDLKKCDIFSLGMTAFELLTDHNSPANGDEWHQLRNGRLDLLEAIPGVSQRLKMLIRKMLSKNPFERPSAQELLAHDLPSEMEIELKWEKIQNRILQERKTDLENQLNKRKKRRNSVA

SEQ ID NO: 59471 - protein, 311 aa, Glycine max
  peptide (1)..(311): Ceres Seq. ID no. 15170900
  misc_feature (20)..(269): Pfam Name: Protein kinase domain Pfam Description: Protein kinase domain
  misc_feature (1)..(152): Homolog of NCBI NO: 31226449 NR Description: ENSANGP00000010303 [Anopheles gambiae]
  misc_feature (17)..(269): Homolog of NCBI NO: 17536877 NR Description: WEE homolog, defective SPErmatogenesis SPE-37
  misc_feature (1)..(272): Homolog of NCBI NO: 16266769 NR Description: Myt1 [Asterina pectinifera]
  misc_feature (5)..(147): Homolog of NCBI NO: 5579439 NR Description: Wee1 kinase [Drosophila melanogaster]
  misc_feature (155)..(311): Homolog of NCBI NO: 5579439 NR Description: Wee1 kinase [Drosophila melanogaster]
  misc_feature (5)..(147): Homolog of NCBI NO: 17136988 NR Description: wee CG4488-PA [Drosophila melanogaster]
  misc_feature (155)..(311): Homolog of NCBI NO: 17136988 NR Description: wee CG4488-PA [Drosophila melanogaster]
  misc_feature (11)..(271): Homolog of NCBI NO: 25518409 NR Description: hypothetical protein F22D16.3 - Arabidopsis
  misc_feature (11)..(271): Homolog of NCBI NO: 15218666 NR Description: protein kinase, putative [Arabidopsis thaliana]
  misc_feature (11)..(269): Homolog of NCBI NO: 5821717 NR Description: Wee1-like protein [Zea mays]
MKHHLFESEYSRLNSDYKILEVLGRGSFGKVYRCINRIDKNEYAIKETFRSFTGKNKVYGLNETQALASLTAFEDNTNVVRYFNSWIEDDRLYLVMEFCPSSLKEERKQRGKFTETAIRKALRDVCLGLAYLHRHNIAHLDIKPENILISKTMRYKIGDMGQSRVVKRAGDIEEGDSRYVAPELLNCDDCEDEVDLKKCDIFSLGMTAFELLTDHNSPANGDEWHQLRNGRLDLLEAIPGVSQRLKMLIRKMLSKNPFERPSAQELLAHDLPSEMEIELKWEKIQNRILQERKTDLENQLNKRKKRRNSVA

SEQ ID NO: 59472 - DNA, 894 bp, Glycine max
  misc_feature (1)..(894): Ceres Seq. ID no. 15170399
aatcataacaacaacaatacaaaacaagtcaaacaaacaaaacacaacacaacaatattcaaaaatgtttagcaaaactggaaccttaactgtcaagccaatcatggccgaacttaagaaagacgaagacacactcacaaagcaagatccgtacgtcgttttctacttcggtgataagaaagttaaatcaaagacttgccgtggaggaggaaagaaaccttcttggcaagatgtgttcaccttccaaagaacaagcgaggatatgctcagaattgaactctgggacagagattacctctcccgtgatgactttttgggcgaaggagtagtttctatgtctagccttatgagcaccggcagaaccactaactgggtcgacctcactcacaagggaagatttgccggcaagcttttaatcgaaacggacttcagaggtgaccaaatcaagacaaccacaacaacaaccatgcaacaacctggttatgctatggacaagggtttccctaccatgcaacaacaaggctacatgccacaacaacctggttaccctatggataagggcatccctatgcaacagccttcatatcctatgcaacaacaaaacttccctatgcaacaacaaggcttccccactatgcaacaacaaagcttccctatgcaacaaggaggatacccaatccaacaagggggatacccaatgcaacaaggaggatacccaatgcaacaaggtggttaccaacaaggctatccccaaggcaagttttagtagagtagtcggataaatgcatataattcataataagaattaactcattccatagatttgaatgtaatcttctatatgattactgatagtatcaacaggtgtacaaaataatttacttcctgatcgat

SEQ ID NO: 59473 - protein, 254 aa, Glycine max
  peptide (1)..(254): Ceres Seq. ID no. 15170400
  misc_feature (29)..(107): Pfam Name: C2 domain Pfam Description: C2 domain
  misc_feature (47)..(166): Homolog of NCBI NO: 31324024 NR Description: elicitor-responsive protein [Oryza sativa]
  misc_feature (26)..(166): Homolog of NCBI NO: 7489474 NR Description: FIERG2 protein - rice
  misc_feature (40)..(254): Homolog of NCBI NO: 7486289 NR Description: hypothetical protein F28A23.90 - Arabidopsis
  misc_feature (29)..(254): Homolog of NCBI NO: 18418388 NR Description: C2 domain-containing protein [Arabidopsis
  misc_feature (27)..(251): Homolog of NCBI NO: 18913086 NR Description: Igr2p [Tetrahymena thermophila]
  misc_feature (27)..(250): Homolog of NCBI NO: 6469591 NR Description: unknown [Eufolliculina uhligi]
IITTTIQNKSNKQNTTQQYSKMFSKTGTLTVKPIMAELKKDEDTLTKQDPYVVFYFGDKKVKSKTCRGGGKKPSWQDVFTFQRTSEDMLRIELWDRDYLSRDDFLGEGVVSMSSLMSTGRTTNWVDLTHKGRFAGKLLIETDFRGDQIKTTTTTTMQQPGYAMDKGFPTMQQQGYMPQQPGYPMDKGIPMQQPSYPMQQQNFPMQQQGFPTMQQQSFPMQQGGYPIQQGGYPMQQGGYPMQQGGYQQGYPQGKF

SEQ ID NO: 59474 - protein, 233 aa, Glycine max
  peptide (1)..(233): Ceres Seq. ID no. 15170401
  misc_feature (8)..(86): Pfam Name: C2 domain Pfam Description: C2 domain
  misc_feature (26)..(145): Homolog of NCBI NO: 31324024 NR Description: elicitor-responsive protein [Oryza sativa]
  misc_feature (5)..(145): Homolog of NCBI NO: 7489474 NR Description: FIERG2 protein - rice
  misc_feature (19)..(233): Homolog of NCBI NO: 7486289 NR Description: hypothetical protein F28A23.90 - Arabidopsis
  misc_feature (8)..(233): Homolog of NCBI NO: 18418388 NR Description: C2 domain-containing protein [Arabidopsis
  misc_feature (6)..(230): Homolog of NCBI NO: 18913086 NR Description: Igr2p [Tetrahymena thermophila]
  misc_feature (6)..(229): Homolog of NCBI NO: 6469591 NR Description: unknown [Eufolliculina uhligi]
MFSKTGTLTVKPIMAELKKDEDTLTKQDPYVVFYFGDKKVKSKTCRGGGKKPSWQDVFTFQRTSEDMLRIELWDRDYLSRDDFLGEGVVSMSSLMSTGRTTNWVDLTHKGRFAGKLLIETDFRGDQIKTTTTTTMQQPGYAMDKGFPTMQQQGYMPQQPGYPMDKGIPMQQPSYPMQQQNFPMQQQGFPTMQQQSFPMQQGGYPIQQGGYPMQQGGYPMQQGGYQQGYPQGKF

SEQ ID NO: 59475 - protein, 220 aa, Glycine max
  peptide (1)..(220): Ceres Seq. ID no. 15170402
  misc_feature (1)..(73): Pfam Name: C2 domain Pfam Description: C2 domain
  misc_feature (13)..(132): Homolog of NCBI NO: 31324024 NR Description: elicitor-responsive protein [Oryza sativa]
  misc_feature (1)..(132): Homolog of NCBI NO: 7489474 NR Description: FIERG2 protein - rice
  misc_feature (6)..(220): Homolog of NCBI NO: 7486289 NR Description: hypothetical protein F28A23.90 - Arabidopsis
  misc_feature (1)..(220): Homolog of NCBI NO: 18418388 NR Description: C2 domain-containing protein [Arabidopsis
  misc_feature (1)..(217): Homolog of NCBI NO: 18913086 NR Description: Igr2p [Tetrahymena thermophila]
  misc_feature (1)..(216): Homolog of NCBI NO: 6469591 NR Description: unknown [Eufolliculina uhligi]
MAELKKDEDTLTKQDPYVVFYFGDKKVKSKTCRGGGKKPSWQDVFTFQRTSEDMLRIELWDRDYLSRDDFLGEGVVSMSSLMSTGRTTNWVDLTHKGRFAGKLLIETDFRGDQIKTTTTTTMQQPGYAMDKGFPTMQQQGYMPQQPGYPMDKGIPMQQPSYPMQQQNFPMQQQGFPTMQQQSFPMQQGGYPIQQGGYPMQQGGYPMQQGGYQQGYPQGKF

SEQ ID NO: 59476 - DNA, 1550 bp, Glycine max
  misc_feature (1)..(1550): Ceres Seq. ID no. 14315134
agacaggcacagacacagagggccaatatgaagactcgtacctctaagaagatctctgcaaaatgggttccaattttctctgtatcttccttccttattggaatgctcataacaaccaggatgtgggaaccaccagaatctaacggggtgttactgtcaaatcaccgacatgagcaagaactacaagtggtgtcaggggattgtgctactaaaaagcctgtgcaggatgaggatgtaatgagtaaagtgtacaaaacccatgaagccattcaatctctagacaagcaagtttccatgcttcagatggagctggcagcagcaaggagtacacgagaacccgagatctcggatggttcgaataacaccttggcctcgggggtaaccactgaaggcccaccaaggaagaaggtgtttgtagtgattggcataaacactgccttcagtagcaggaagcggcgtgattcggttagagagacttggatgcctcaaggtgaacagcttcttcaattggaacgcgagaagggaattgtcatcagattcatgattggtcacagtgcaacttctaacagcattctagatcgagctattgattcagaagaagcccagcacaaagacttccttcgcctggaacacgctgaagggtatcatgaattgtctgcaaagacaaaaacattcttttctacagcagttgcaaaatgggatgctgagttctatgtcaaagtggatgatgatgtccatgttaatttaggtgtacttgcaacaacccttgctcgtcatcgttccaaaccaagggtctatgttggatgtatgaaatctggacctgttctttctcgaaaggatgttaaatatcatgaacctgagttttggaagtttggagaagaggggaacaaatatttccgacatgcaactgggcagatatatgcaatctctaaggatctagccacctacatttccattaaccagccaattttgcacaaatatgccaatgaagatgtgtcacttggtgcatggttcataggtctggaagttgaacatatagatgaccgcagtatgtgctgtgggactcctccagattgtgagtggaaggcacaagcaggtaacatatgtgttgcatcctttgactggagctgtagtggaatctgcaagtcggtagagaagatcaaatatgtgcactcaaagtgtggtgaaggggatggagctgtttggagtgccttagtttaggtttgatgggttcaacagaaagccaactaactaattcacgtgttggtatgcatacctcccagctttttgtttttgggtgtgggaggatatgatgatatatttttggttcaactatagtctatacttggtattatgtgacatagacctctcttgttacatgtatctctttatatttttgttcctttgacccacccttttgcacaatgcctttggaggtagttgtgcggggtcaattttcagtgtagcttactaaagagcaatgaagtgatagtgttgttgattcgttcagtgataatatgaattatgaaatcactttatttttttcgatg

SEQ ID NO: 59477 - protein, 406 aa, Glycine max
  peptide (1)..(406): Ceres Seq. ID no. 14315135
  misc_feature (151)..(349): Pfam Name: Galactosyltransferase Pfam Description: Galactosyltransferase
  misc_feature (87)..(404): Homolog of NCBI NO: 15221085 NR Description: galactosyltransferase family [Arabidopsis
  misc_feature (2)..(403): Homolog of NCBI NO: 34907342 NR Description: putative elicitor response protein
  misc_feature (18)..(404): Homolog of NCBI NO: 15225684 NR Description: galactosyltransferase family [Arabidopsis
  misc_feature (11)..(402): Homolog of NCBI NO: 15223337 NR Description: galactosyltransferase family [Arabidopsis
  misc_feature (8)..(404): Homolog of NCBI NO: 15220440 NR Description: galactosyltransferase family [Arabidopsis
  misc_feature (13)..(404): Homolog of NCBI NO: 18395060 NR Description: galactosyltransferase family [Arabidopsis
  misc_feature (10)..(406): Homolog of NCBI NO: 34365705 NR Description: At1g77810 [Arabidopsis thaliana]
  misc_feature (10)..(406): Homolog of NCBI NO: 12323294 NR Description: putative (Avr9) elicitor response protein;
  misc_feature (10)..(406): Homolog of NCBI NO: 30699558 NR Description: Avr9 elicitor response protein -related
  misc_feature (10)..(405): Homolog of NCBI NO: 4138265 NR Description: Avr9 elicitor response protein [Nicotiana tabacum]
RQAQTQRANMKTRTSKKISAKWVPIFSVSSFLIGMLITTRMWEPPESNGVLLSNHRHEQELQVVSGDCATKKPVQDEDVMSKVYKTHEAIQSLDKQVSMLQMELAAARSTREPEISDGSNNTLASGVTTEGPPRKKVFVVIGINTAFSSRKRRDSVRETWMPQGEQLLQLEREKGIVIRFMIGHSATSNSILDRAIDSEEAQHKDFLRLEHAEGYHELSAKTKTFFSTAVAKWDAEFYVKVDDDVHVNLGVLATTLARHRSKPRVYVGCMKSGPVLSRKDVKYHEPEFWKFGEEGNKYFRHATGQIYAISKDLATYISINQPILHKYANEDVSLGAWFIGLEVEHIDDRSMCCGTPPDCEWKAQAGNICVASFDWSCSGICKSVEKIKYVHSKCGEGDGAVWSALV

SEQ ID NO: 59478 - protein, 397 aa, Glycine max
  peptide (1)..(397): Ceres Seq. ID no. 14315136
  misc_feature (142)..(340): Pfam Name: Galactosyltransferase Pfam Description: Galactosyltransferase
  misc_feature (78)..(395): Homolog of NCBI NO: 15221085 NR Description: galactosyltransferase family [Arabidopsis
  misc_feature (1)..(394): Homolog of NCBI NO: 34907342 NR Description: putative elicitor response protein
  misc_feature (9)..(395): Homolog of NCBI NO: 15225684 NR Description: galactosyltransferase family [Arabidopsis
  misc_feature (2)..(393): Homolog of NCBI NO: 15223337 NR Description: galactosyltransferase family [Arabidopsis
  misc_feature (1)..(395): Homolog of NCBI NO: 15220440 NR Description: galactosyltransferase family [Arabidopsis
  misc_feature (4)..(395): Homolog of NCBI NO: 18395060 NR Description: galactosyltransferase family [Arabidopsis
  misc_feature (1)..(397): Homolog of NCBI NO: 34365705 NR Description: At1g77810 [Arabidopsis thaliana]
  misc_feature (1)..(397): Homolog of NCBI NO: 12323294 NR Description: putative (Avr9) elicitor response protein;
  misc_feature (1)..(397): Homolog of NCBI NO: 30699558 NR Description: Avr9 elicitor response protein -related
  misc_feature (1)..(396): Homolog of NCBI NO: 4138265 NR Description: Avr9 elicitor response protein [Nicotiana tabacum]
MKTRTSKKISAKWVPIFSVSSFLIGMLITTRMWEPPESNGVLLSNHRHEQELQVVSGDCATKKPVQDEDVMSKVYKTHEAIQSLDKQVSMLQMELAAARSTREPEISDGSNNTLASGVTTEGPPRKKVFVVIGINTAFSSRKRRDSVRETWMPQGEQLLQLEREKGIVIRFMIGHSATSNSILDRAIDSEEAQHKDFLRLEHAEGYHELSAKTKTFFSTAVAKWDAEFYVKVDDDVHVNLGVLATTLARHRSKPRVYVGCMKSGPVLSRKDVKYHEPEFWKFGEEGNKYFRHATGQIYAISKDLATYISINQPILHKYANEDVSLGAWFIGLEVEHIDDRSMCCGTPPDCEWKAQAGNICVASFDWSCSGICKSVEKIKYVHSKCGEGDGAVWSALV

SEQ ID NO: 59479 - protein, 372 aa, Glycine max
  peptide (1)..(372): Ceres Seq. ID no. 14315137
  misc_feature (117)..(315): Pfam Name: Galactosyltransferase Pfam Description: Galactosyltransferase
  misc_feature (53)..(370): Homolog of NCBI NO: 15221085 NR Description: galactosyltransferase family [Arabidopsis
  misc_feature (1)..(369): Homolog of NCBI NO: 34907342 NR Description: putative elicitor response protein
  misc_feature (1)..(370): Homolog of NCBI NO: 15225684 NR Description: galactosyltransferase family [Arabidopsis
  misc_feature (1)..(368): Homolog of NCBI NO: 15223337 NR Description: galactosyltransferase family [Arabidopsis
  misc_feature (1)..(370): Homolog of NCBI NO: 15220440 NR Description: galactosyltransferase family [Arabidopsis
  misc_feature (1)..(370): Homolog of NCBI NO: 18395060 NR Description: galactosyltransferase family [Arabidopsis
  misc_feature (1)..(372): Homolog of NCBI NO: 34365705 NR Description: At1g77810 [Arabidopsis thaliana]
  misc_feature (1)..(372): Homolog of NCBI NO: 12323294 NR Description: putative (Avr9) elicitor response protein;
  misc_feature (1)..(372): Homolog of NCBI NO: 30699558 NR Description: Avr9 elicitor response protein -related
  misc_feature (1)..(371): Homolog of NCBI NO: 4138265 NR Description: Avr9 elicitor response protein [Nicotiana tabacum]
MLITTRMWEPPESNGVLLSNHRHEQELQVVSGDCATKKPVQDEDVMSKVYKTHEAIQSLDKQVSMLQMELAAARSTREPEISDGSNNTLASGVTTEGPPRKKVFVVIGINTAFSSRKRRDSVRETWMPQGEQLLQLEREKGIVIRFMIGHSATSNSILDRAIDSEEAQHKDFLRLEHAEGYHELSAKTKTFFSTAVAKWDAEFYVKVDDDVHVNLGVLATTLARHRSKPRVYVGCMKSGPVLSRKDVKYHEPEFWKFGEEGNKYFRHATGQIYAISKDLATYISINQPILHKYANEDVSLGAWFIGLEVEHIDDRSMCCGTPPDCEWKAQAGNICVASFDWSCSGICKSVEKIKYVHSKCGEGDGAVWSALV

SEQ ID NO: 59480 - DNA, 2005 bp, Glycine max
  misc_feature (1)..(2005): Ceres Seq. ID no. 14312180
tctctctctctcacacacacacacacactctccccgaggtttgagagggtactggcatccaaaaaatgggttctaaaactaatgcttcgggccatagagcacgaaggccgctgtcaatatttgctgtgcttggtctttgctgtttcttttatcttttgggagcatggcaaagaagtggatctgggaagggagataaccttgcattgaaagttaataacctgatgactgactgcactgttttacccaatttgagttttgaatctcatcacaatgatgtagaaattgtcgaacctgctgagccaaaagctaaagagttcaagccgtgtgatgtgaaatatactgattatacaccttgccaagagcaagaccgagcaatgacatttcccagagagaatatgatctatagagaaaggcattgtcccgctgaaaaggagaaattgcgctgcctcattccagcccccgaagggtacacaactccttttccgtggcctaaaagccgtgattatgcctactatgctaatgttccttacaagagcctgacagtggagaaggctgttcaaaactgggtgcaattccagggaaatgtgtttaaatttccaggtggagggaccatgttccctcacggagcagatgcatatattgatgaacttgcgtcagttattccaattgctgatggttctgttagaacagcactggacactggttgtggggttgcaagctggggagcctacttgctaaagagaaatgtgctggctatgtccttcgctccaaaggacaaccatgaagcacaagttcagtttgctctagaacgaggggtgcctgctgttattggtgtccttggcaccatccaccttccatacccatcaagagccttcgatatggcccagtgttctcgatgtctaataccatggacctcaaatgagggcatgtatctaatggaagttgaccgagtcttaaggcctggtggatactggattttgtctggccccccaattaattggaaaacatactaccaaacatggaagcgatccaaggaagatctgaaggcagaacaaacaaaacttgaggagttagctgaaagtctttgttgggaaaagaagtatgaaaagggtgatattgctatttggagaaagaaaataaatgctaaatcctgcaaaagaaagtctcccaatgtttgtggtttagataatgctgatgatgtgtggtaccaaaaaatggaggtctgtaaaacccctttacctgaggtaaccagcaaaaatgaagttgccggaggagagttacagaagtttcctgctagactttttgcagtccctcctcgaatagcccagggagctattccaggggttacagctgaatcttatcaagaggacaacaaattatggaaaaagcatgttaacgcttacaaaagaatgaataaattgattggcactactagatatcggaatgtgatggacatgaatgcaggccttggaggatttgcagctgcacttgaatcacaaaagtcttgggtgatgaatgttgtgccgtcaattgctgagaacactttgggtgttgtctatgagagaggtctgatcggcatttatcatgactggtgtgaaggcttttccacatacccaaggacatatgatcttattcatgctaatggtttattcagcatataccaggacaagtgcaacctagaagacatccttctagagatggatcgcatcctaaggcctgaaggagcaatcatcatccgggatgaagttgatgttcttaaccaggttaagaaaattgttgggggcatgagatgggatgccaaactggtggatcatgaggatggccctcttgtgcctgagaagatattggttgctctcaaagtgtattgggttggcaccagcaaaaacaaaacatccaatgaggaataaaaccactattgttcgggtgtgaatcttgtacttcagcctgcagtaacatccaaggtttctaaatccaacccaaagaaggaatggggaaaaatatgaat

SEQ ID NO: 59481 - protein, 613 aa, Glycine max
  peptide (1)..(613): Ceres Seq. ID no. 14312181
  misc_feature (93)..(598): Pfam Name: Putative methyltransferase Pfam Description: Putative methyltransferase
  misc_feature (11)..(608): Homolog of NCBI NO: 24413975 NR Description: hypothetical protein~similar to Oryza sativa
  misc_feature (3)..(613): Homolog of NCBI NO: 15235080 NR Description: dehydration-induced protein family [Arabidopsis
  misc_feature (32)..(610): Homolog of NCBI NO: 37537004 NR Description: hypothetical protein [Oryza sativa (japonica
  misc_feature (11)..(607): Homolog of NCBI NO: 18071395 NR Description: hypothetical protein [Oryza sativa]
  misc_feature (522)..(605): Homolog of NCBI NO: 25372106 NR Description: T2P11.4 protein - Arabidopsis thaliana
  misc_feature (1)..(549): Homolog of NCBI NO: 25372106 NR Description: T2P11.4 protein - Arabidopsis thaliana
  misc_feature (1)..(605): Homolog of NCBI NO: 18396075 NR Description: dehydration-induced protein family [Arabidopsis
  misc_feature (1)..(605): Homolog of NCBI NO: 6752888 NR Description: unknown [Malus x domestica]
  misc_feature (1)..(613): Homolog of NCBI NO: 7487775 NR Description: hypothetical protein T6K21.210 - Arabidopsis
  misc_feature (1)..(613): Homolog of NCBI NO: 22328758 NR Description: dehydration-induced protein family [Arabidopsis
MGSKTNASGHRARRPLSIFAVLGLCCFFYLLGAWQRSGSGKGDNLALKVNNLMTDCTVLPNLSFESHHNDVEIVEPAEPKAKEFKPCDVKYTDYTPCQEQDRAMTFPRENMIYRERHCPAEKEKLRCLIPAPEGYTTPFPWPKSRDYAYYANVPYKSLTVEKAVQNWVQFQGNVFKFPGGGTMFPHGADAYIDELASVIPIADGSVRTALDTGCGVASWGAYLLKRNVLAMSFAPKDNHEAQVQFALERGVPAVIGVLGTIHLPYPSRAFDMAQCSRCLIPWTSNEGMYLMEVDRVLRPGGYWILSGPPINWKTYYQTWKRSKEDLKAEQTKLEELAESLCWEKKYEKGDIAIWRKKINAKSCKRKSPNVCGLDNADDVWYQKMEVCKTPLPEVTSKNEVAGGELQKFPARLFAVPPRIAQGAIPGVTAESYQEDNKLWKKHVNAYKRMNKLIGTTRYRNVMDMNAGLGGFAAALESQKSWVMNVVPSIAENTLGVVYERGLIGIYHDWCEGFSTYPRTYDLIHANGLFSIYQDKCNLEDILLEMDRILRPEGAIIIRDEVDVLNQVKKIVGGMRWDAKLVDHEDGPLVPEKILVALKVYWVGTSKNKTSNEE

SEQ ID NO: 59482 - protein, 561 aa, Glycine max
  peptide (1)..(561): Ceres Seq. ID no. 14312182
  misc_feature (41)..(546): Pfam Name: Putative methyltransferase Pfam Description: Putative methyltransferase
  misc_feature (1)..(556): Homolog of NCBI NO: 24413975 NR Description: hypothetical protein~similar to Oryza sativa
  misc_feature (1)..(561): Homolog of NCBI NO: 15235080 NR Description: dehydration-induced protein family [Arabidopsis
  misc_feature (1)..(558): Homolog of NCBI NO: 37537004 NR Description: hypothetical protein [Oryza sativa (japonica
  misc_feature (1)..(555): Homolog of NCBI NO: 18071395 NR Description: hypothetical protein [Oryza sativa]
  misc_feature (470)..(553): Homolog of NCBI NO: 25372106 NR Description: T2P11.4 protein - Arabidopsis thaliana
  misc_feature (1)..(497): Homolog of NCBI NO: 25372106 NR Description: T2P11.4 protein - Arabidopsis thaliana
  misc_feature (1)..(553): Homolog of NCBI NO: 18396075 NR Description: dehydration-induced protein family [Arabidopsis
  misc_feature (1)..(553): Homolog of NCBI NO: 6752888 NR Description: unknown [Malus x domestica]
  misc_feature (1)..(561): Homolog of NCBI NO: 7487775 NR Description: hypothetical protein T6K21.210 - Arabidopsis
  misc_feature (1)..(561): Homolog of NCBI NO: 22328758 NR Description: dehydration-induced protein family [Arabidopsis
MTDCTVLPNLSFESHHNDVEIVEPAEPKAKEFKPCDVKYTDYTPCQEQDRAMTFPRENMIYRERHCPAEKEKLRCLIPAPEGYTTPFPWPKSRDYAYYANVPYKSLTVEKAVQNWVQFQGNVFKFPGGGTMFPHGADAYIDELASVIPIADGSVRTALDTGCGVASWGAYLLKRNVLAMSFAPKDNHEAQVQFALERGVPAVIGVLGTIHLPYPSRAFDMAQCSRCLIPWTSNEGMYLMEVDRVLRPGGYWILSGPPINWKTYYQTWKRSKEDLKAEQTKLEELAESLCWEKKYEKGDIAIWRKKINAKSCKRKSPNVCGLDNADDVWYQKMEVCKTPLPEVTSKNEVAGGELQKFPARLFAVPPRIAQGAIPGVTAESYQEDNKLWKKHVNAYKRMNKLIGTTRYRNVMDMNAGLGGFAAALESQKSWVMNVVPSIAENTLGVVYERGLIGIYHDWCEGFSTYPRTYDLIHANGLFSIYQDKCNLEDILLEMDRILRPEGAIIIRDEVDVLNQVKKIVGGMRWDAKLVDHEDGPLVPEKILVALKVYWVGTSKNKTSNEE

SEQ ID NO: 59483 - protein, 510 aa, Glycine max
  peptide (1)..(510): Ceres Seq. ID no. 14312183
  misc_feature (1)..(495): Pfam Name: Putative methyltransferase Pfam Description: Putative methyltransferase
  misc_feature (1)..(505): Homolog of NCBI NO: 24413975 NR Description: hypothetical protein~similar to Oryza sativa
  misc_feature (1)..(510): Homolog of NCBI NO: 15235080 NR Description: dehydration-induced protein family [Arabidopsis
  misc_feature (1)..(507): Homolog of NCBI NO: 37537004 NR Description: hypothetical protein [Oryza sativa (japonica
  misc_feature (1)..(504): Homolog of NCBI NO: 18071395 NR Description: hypothetical protein [Oryza sativa]
  misc_feature (419)..(502): Homolog of NCBI NO: 25372106 NR Description: T2P11.4 protein - Arabidopsis thaliana
  misc_feature (1)..(446): Homolog of NCBI NO: 25372106 NR Description: T2P11.4 protein - Arabidopsis thaliana
  misc_feature (1)..(502): Homolog of NCBI NO: 18396075 NR Description: dehydration-induced protein family [Arabidopsis
  misc_feature (1)..(502): Homolog of NCBI NO: 6752888 NR Description: unknown [Malus x domestica]
  misc_feature (1)..(510): Homolog of NCBI NO: 7487775 NR Description: hypothetical protein T6K21.210 - Arabidopsis
  misc_feature (1)..(510): Homolog of NCBI NO: 22328758 NR Description: dehydration-induced protein family [Arabidopsis
MTFPRENMIYRERHCPAEKEKLRCLIPAPEGYTTPFPWPKSRDYAYYANVPYKSLTVEKAVQNWVQFQGNVFKFPGGGTMFPHGADAYIDELASVIPIADGSVRTALDTGCGVASWGAYLLKRNVLAMSFAPKDNHEAQVQFALERGVPAVIGVLGTIHLPYPSRAFDMAQCSRCLIPWTSNEGMYLMEVDRVLRPGGYWILSGPPINWKTYYQTWKRSKEDLKAEQTKLEELAESLCWEKKYEKGDIAIWRKKINAKSCKRKSPNVCGLDNADDVWYQKMEVCKTPLPEVTSKNEVAGGELQKFPARLFAVPPRIAQGAIPGVTAESYQEDNKLWKKHVNAYKRMNKLIGTTRYRNVMDMNAGLGGFAAALESQKSWVMNVVPSIAENTLGVVYERGLIGIYHDWCEGFSTYPRTYDLIHANGLFSIYQDKCNLEDILLEMDRILRPEGAIIIRDEVDVLNQVKKIVGGMRWDAKLVDHEDGPLVPEKILVALKVYWVGTSKNKTSNEE

SEQ ID NO: 59484 - DNA, 892 bp, Glycine max
  misc_feature (1)..(892): Ceres Seq. ID no. 14307709
gttgtgtacttgtgtttcaattcattcttcggttgttctctatttgcgttttctcattttctttctttcgttctcttccgtggaacgagtagtagaaacttgaaatcaaaaggcagcgggggaaaaagaaaagagagaagtagggttcgaaaatggcagcagaatcatcagagggcgaagaagaaaccaagttaagcggaggtaaccaattgctcatagttgacgatgacttaacggaaatgggaaagaaagccgcttggagcgtgagttcctgcaaacccggtaacggcgtttcctctctccgtgacgacaatctcgaaacttattggcaatccgacggagggcaaccccatttagttaacattcagtttcagaagaaagttagacttcaattaattgtgctgtacgtggatttcaagcttgacgagagttacacgccgagcaaagtttccatccgtgccggtgatggttttcacaacttgaaggagattaagaccgtggaactcgtgaagccaactgggtgggtttatctttccttgtctggagttgatcctagggatacctttgtgaatactttcatgttgcaaattgctgtgttgtcaaaccatctcaatggaagggatactcacgtgcggcagatcaaagtttacgggcctcgaccgaaccctatcccacatcagccattccaatttacttcaagggaattcatcacctactcttctataagatgagagtttatggaaggatttgatgaagccaccaagtgttaaatcaaaggatgcttcccactaagttattatagcatctggaaggtctgaaaccaaatcactacagaccgaaatgtcaaaaatacatttcacttcaatagtattcttaaaaattgtcatatcag

SEQ ID NO: 59485 - protein, 192 aa, Glycine max
  peptide (1)..(192): Ceres Seq. ID no. 14307710
  misc_feature (2)..(192): Pfam Name: Anaphase-promoting complex, subunit 10 (APC10) Pfam Description: Anaphase-promoting complex, subunit 10 (APC10)
  misc_feature (5)..(132): Homolog of NCBI NO: 40746784 NR Description: hypothetical protein AN0911.2 [Aspergillus
  misc_feature (4)..(173): Homolog of NCBI NO: 32420809 NR Description: hypothetical protein ( (AL513409) related to
  misc_feature (24)..(169): Homolog of NCBI NO: 39595285 NR Description: Hypothetical protein CBG03913 [Caenorhabditis
  misc_feature (29)..(168): Homolog of NCBI NO: 16975123 NR Description: Chain A, Crystal Structure Of The Apc10DOC1
  misc_feature (29)..(192): Homolog of NCBI NO: 34395509 NR Description: Anaphase promoting complex subunit 10 (APC10)
  misc_feature (29)..(192): Homolog of NCBI NO: 4836700 NR Description: anaphase promoting complex subunit 10 [Homo
  misc_feature (29)..(192): Homolog of NCBI NO: 7657035 NR Description: anaphase-promoting complex subunit 10
  misc_feature (13)..(192): Homolog of NCBI NO: 5091606 NR Description: ESTs dbj|D15316 and dbj|C98044 come from this
  misc_feature (1)..(192): Homolog of NCBI NO: 21592739 NR Description: unknown [Arabidopsis thaliana]
  misc_feature (1)..(192): Homolog of NCBI NO: 18398701 NR Description: expressed protein [Arabidopsis thaliana]
MAAESSEGEEETKLSGGNQLLIVDDDLTEMGKKAAWSVSSCKPGNGVSSLRDDNLETYWQSDGGQPHLVNIQFQKKVRLQLIVLYVDFKLDESYTPSKVSIRAGDGFHNLKEIKTVELVKPTGWVYLSLSGVDPRDTFVNTFMLQIAVLSNHLNGRDTHVRQIKVYGPRPNPIPHQPFQFTSREFITYSSIR

SEQ ID NO: 59486 - protein, 163 aa, Glycine max
  peptide (1)..(163): Ceres Seq. ID no. 14307711
  misc_feature (1)..(163): Pfam Name: Anaphase-promoting complex, subunit 10 (APC10) Pfam Description: Anaphase-promoting complex, subunit 10 (APC10)
  misc_feature (1)..(103): Homolog of NCBI NO: 40746784 NR Description: hypothetical protein AN0911.2 [Aspergillus
  misc_feature (1)..(144): Homolog of NCBI NO: 32420809 NR Description: hypothetical protein ( (AL513409) related to
  misc_feature (1)..(140): Homolog of NCBI NO: 39595285 NR Description: Hypothetical protein CBG03913 [Caenorhabditis
  misc_feature (1)..(139): Homolog of NCBI NO: 16975123 NR Description: Chain A, Crystal Structure Of The Apc10DOC1
  misc_feature (1)..(163): Homolog of NCBI NO: 34395509 NR Description: Anaphase promoting complex subunit 10 (APC10)
  misc_feature (1)..(163): Homolog of NCBI NO: 4836700 NR Description: anaphase promoting complex subunit 10 [Homo
  misc_feature (1)..(163): Homolog of NCBI NO: 7657035 NR Description: anaphase-promoting complex subunit 10
  misc_feature (1)..(163): Homolog of NCBI NO: 5091606 NR Description: ESTs dbj|D15316 and dbj|C98044 come from this
  misc_feature (1)..(163): Homolog of NCBI NO: 21592739 NR Description: unknown [Arabidopsis thaliana]
  misc_feature (1)..(163): Homolog of NCBI NO: 18398701 NR Description: expressed protein [Arabidopsis thaliana]
MGKKAAWSVSSCKPGNGVSSLRDDNLETYWQSDGGQPHLVNIQFQKKVRLQLIVLYVDFKLDESYTPSKVSIRAGDGFHNLKEIKTVELVKPTGWVYLSLSGVDPRDTFVNTFMLQIAVLSNHLNGRDTHVRQIKVYGPRPNPIPHQPFQFTSREFITYSSIR

SEQ ID NO: 59487 - DNA, 1068 bp, Glycine max
  misc_feature (1)..(1068): Ceres Seq. ID no. 15224956
gccgatgaaattgacttctttgggttcggcggtaccctacacttagttgttgtgttgctgtgcacccggtgagcggtgacctcttccgctttgatcttcttctgtccaggctggttacttgggtcaaagatttctggcatctctgtcatggcaactagacttcagtttgagaataattgtgaagttggagtcttctcaaaacttaccaatgcctattgtttggttgctattggaggttccgaaaacttctacagtgcatttgaggctgagttagcagatgttatccctgtggtcaagacctccattggtggcactcgtattgttggtcgtctttgtgttggaaacaagaacgggcttctcttgccccataccatcacagaccaagagcttcaacatttgagaaacagtctacctgatcaagttgttgttcagcgtatagaagaaagattatccgctctgggaaattgtatagcatgtaatgaccatgtggccctcacacacactgatcttgacaaggaaactgaggagatgattgcagatgttctgggagtagaagttttcaggcagacagttgccggtaatattcttgtgggcagttactgtgtattctccaacagaggtggtttggtccaccctcatacttccatcgaagacttggatgaactttctacacttcttcaggttcctttggttgccgggactgtcaatcgtggtagcgaagtaatagctgctgggatgacggtaaatgattggacagcattttgtggttcagacaccacagcaacagagctctctgtgattgagagtgttttcaagctgagagaagcccaacccagcgccattgtcgatgagatgaggaaatcactcattgatacttatgtctaaatattgctcatgttctactgcttgttgctaagatattccagttttgtgtcagtttttcccggtgaacagtttgtgatagttttatcatctaaaatatgaatgtttatttcaatcaagaatcatggtttccattaattgtatgtcatcttttatttcaatcaaagatatggatgcttttacgtc

SEQ ID NO: 59488 - protein, 245 aa, Glycine max
  peptide (1)..(245): Ceres Seq. ID no. 15224957
  misc_feature (3)..(204): Pfam Name: eIF-6 family Pfam Description: eIF-6 family
  misc_feature (1)..(243): Homolog of NCBI NO: 11280198 NR Description: inducible mast cell-415 protein - bovine
  misc_feature (1)..(243): Homolog of NCBI NO: 29436495 NR Description: Similar to integrin beta 4 binding protein [Danio
  misc_feature (1)..(241): Homolog of NCBI NO: 34903364 NR Description: unnamed protein product [Oryza sativa (japonica
  misc_feature (1)..(243): Homolog of NCBI NO: 37181067 NR Description: p27BBP/eIF6 [Xenopus laevis]
  misc_feature (1)..(243): Homolog of NCBI NO: 13785574 NR Description: p27BBP protein [Homo sapiens]
  misc_feature (1)..(243): Homolog of NCBI NO: 6381991 NR Description: b4 integrin interactor homolog [Mus musculus]
  misc_feature (1)..(243): Homolog of NCBI NO: 4504771 NR Description: integrin beta 4 binding protein isoform a
  misc_feature (1)..(243): Homolog of NCBI NO: 27501448 NR Description: integrin beta 4 binding protein [Mus musculus]
  misc_feature (1)..(245): Homolog of NCBI NO: 15228161 NR Description: eukaryotic translation initiation factor 6
  misc_feature (1)..(245): Homolog of NCBI NO: 27261099 NR Description: putative eukaryotic translation initiation factor
MATRLQFENNCEVGVFSKLTNAYCLVAIGGSENFYSAFEAELADVIPVVKTSIGGTRIVGRLCVGNKNGLLLPHTITDQELQHLRNSLPDQVVVQRIEERLSALGNCIACNDHVALTHTDLDKETEEMIADVLGVEVFRQTVAGNILVGSYCVFSNRGGLVHPHTSIEDLDELSTLLQVPLVAGTVNRGSEVIAAGMTVNDWTAFCGSDTTATELSVIESVFKLREAQPSAIVDEMRKSLIDTYV

SEQ ID NO: 59489 - DNA, 566 bp, Glycine max
  misc_feature (1)..(566): Ceres Seq. ID no. 13593925
aaaacccatcaaattctttctaactcttacgtctattttcccccctcttcctctctctctttctctaatggagttcctcactttactttatggtgctatggcattgtacttgtgtttcctgatctggaaactgtttgatcagagaagggaccaagagagttacatattggactaccaactttacaagccaagcgatgaaagaaagcttggaactgaactctgtgggaagatcatagggaggaacaagcaattgggtctgaacgagtacaagttcctcctcaaggccattgtcaactctggcattggtgaggaaacttatgccccaagaaacgtcatcgagggccgagagacgaatccaacattggatgatagtgtcacagaaatggaggagtttttccatgacagcattgccaaactcctcgaaaggtcagggatttccccctcacagatcgatgtgcttgtggtgaatgtgtccatgttcgctgtagttccttccttaacttcaagaatcattaaccactacaagatgagggaggacataaaggcttacaacctcactgggatgg

SEQ ID NO: 59490 - protein, 188 aa, Glycine max
  peptide (1)..(188): Ceres Seq. ID no. 13593926
  misc_feature (44)..(187): Homolog of NCBI NO: 29417540 NR Description: beta-ketoacyl-CoA-synthase [Marchantia polymorpha]
  misc_feature (35)..(187): Homolog of NCBI NO: 22329274 NR Description: fatty acid elongase 3-ketoacyl-CoA synthase 1
  misc_feature (35)..(187): Homolog of NCBI NO: 4091810 NR Description: fatty acid elongase 3-ketoacyl-CoA synthase 1
  misc_feature (35)..(187): Homolog of NCBI NO: 40882682 NR Description: putative fatty acid elongase
  misc_feature (23)..(187): Homolog of NCBI NO: 37535300 NR Description: putative fatty acid elongase 3-ketoacyl-CoA
  misc_feature (20)..(187): Homolog of NCBI NO: 40882703 NR Description: putative fatty acid elongase
  misc_feature (20)..(187): Homolog of NCBI NO: 15238194 NR Description: beta-ketoacyl-CoA synthase family [Arabidopsis
  misc_feature (23)..(187): Homolog of NCBI NO: 15222994 NR Description: beta-ketoacyl-CoA synthase family [Arabidopsis
  misc_feature (23)..(187): Homolog of NCBI NO: 21536949 NR Description: putative fatty acid elongase [Arabidopsis
  misc_feature (23)..(187): Homolog of NCBI NO: 15226916 NR Description: beta-ketoacyl-CoA synthase family [Arabidopsis
KPIKFFLTLTSIFPPLPLSLSLMEFLTLLYGAMALYLCFLIWKLFDQRRDQESYILDYQLYKPSDERKLGTELCGKIIGRNKQLGLNEYKFLLKAIVNSGIGEETYAPRNVIEGRETNPTLDDSVTEMEEFFHDSIAKLLERSGISPSQIDVLVVNVSMFAVVPSLTSRIINHYKMREDIKAYNLTGM

SEQ ID NO: 59491 - protein, 166 aa, Glycine max
  peptide (1)..(166): Ceres Seq. ID no. 13593927
  misc_feature (22)..(165): Homolog of NCBI NO: 29417540 NR Description: beta-ketoacyl-CoA-synthase [Marchantia polymorpha]
  misc_feature (13)..(165): Homolog of NCBI NO: 22329274 NR Description: fatty acid elongase 3-ketoacyl-CoA synthase 1
  misc_feature (13)..(165): Homolog of NCBI NO: 4091810 NR Description: fatty acid elongase 3-ketoacyl-CoA synthase 1
  misc_feature (13)..(165): Homolog of NCBI NO: 40882682 NR Description: putative fatty acid elongase
  misc_feature (1)..(165): Homolog of NCBI NO: 37535300 NR Description: putative fatty acid elongase 3-ketoacyl-CoA
  misc_feature (1)..(165): Homolog of NCBI NO: 40882703 NR Description: putative fatty acid elongase
  misc_feature (1)..(165): Homolog of NCBI NO: 15238194 NR Description: beta-ketoacyl-CoA synthase family [Arabidopsis
  misc_feature (1)..(165): Homolog of NCBI NO: 15222994 NR Description: beta-ketoacyl-CoA synthase family [Arabidopsis
  misc_feature (1)..(165): Homolog of NCBI NO: 21536949 NR Description: putative fatty acid elongase [Arabidopsis
  misc_feature (1)..(165): Homolog of NCBI NO: 15226916 NR Description: beta-ketoacyl-CoA synthase family [Arabidopsis
MEFLTLLYGAMALYLCFLIWKLFDQRRDQESYILDYQLYKPSDERKLGTELCGKIIGRNKQLGLNEYKFLLKAIVNSGIGEETYAPRNVIEGRETNPTLDDSVTEMEEFFHDSIAKLLERSGISPSQIDVLVVNVSMFAVVPSLTSRIINHYKMREDIKAYNLTGM

SEQ ID NO: 59492 - protein, 156 aa, Glycine max
  peptide (1)..(156): Ceres Seq. ID no. 13593928
  misc_feature (12)..(155): Homolog of NCBI NO: 29417540 NR Description: beta-ketoacyl-CoA-synthase [Marchantia polymorpha]
  misc_feature (3)..(155): Homolog of NCBI NO: 22329274 NR Description: fatty acid elongase 3-ketoacyl-CoA synthase 1
  misc_feature (3)..(155): Homolog of NCBI NO: 4091810 NR Description: fatty acid elongase 3-ketoacyl-CoA synthase 1
  misc_feature (3)..(155): Homolog of NCBI NO: 40882682 NR Description: putative fatty acid elongase
  misc_feature (1)..(155): Homolog of NCBI NO: 37535300 NR Description: putative fatty acid elongase 3-ketoacyl-CoA
  misc_feature (1)..(155): Homolog of NCBI NO: 40882703 NR Description: putative fatty acid elongase
  misc_feature (1)..(155): Homolog of NCBI NO: 15238194 NR Description: beta-ketoacyl-CoA synthase family [Arabidopsis
  misc_feature (1)..(155): Homolog of NCBI NO: 15222994 NR Description: beta-ketoacyl-CoA synthase family [Arabidopsis
  misc_feature (1)..(155): Homolog of NCBI NO: 21536949 NR Description: putative fatty acid elongase [Arabidopsis
  misc_feature (1)..(155): Homolog of NCBI NO: 15226916 NR Description: beta-ketoacyl-CoA synthase family [Arabidopsis
MALYLCFLIWKLFDQRRDQESYILDYQLYKPSDERKLGTELCGKIIGRNKQLGLNEYKFLLKAIVNSGIGEETYAPRNVIEGRETNPTLDDSVTEMEEFFHDSIAKLLERSGISPSQIDVLVVNVSMFAVVPSLTSRIINHYKMREDIKAYNLTGM

SEQ ID NO: 59493 - DNA, 1731 bp, Glycine max
  misc_feature (1)..(1731): Ceres Seq. ID no. 14307218
taaacctcttacactacgtaatactccctttatcaaacctgatatgtctccagacccactaagtggagctttaggtgtttacaagaagaattgaataacttttcccaattactagctaaataatttttatggcatttttcataaaatatccaaatgctgaaactttctccctttggcacatccaatataattcatgcatttcatttcaacattttatcatatatttttcctaagtgattttctttctagtttcaaaagtaaccgaaatgacggatcctcctaaagaacaagaacaccaggaatccatagtttcaccttccacagatgaagctttgacatcttcgaaacgtggaaggtcacgaaaaacaaagcctaccaagttcataattaaccagaaatccaataccccatcaacaccccgaagatctaaaagaataaagcatgtggcagataaaactgccaacaatgttcccgaagtatcttcatccgaggaattattgaagggacgtacagctgaaaattcacaagtagatggcaaagaagtctcttcagatatcgatgccttagtaatctacaaaagaaaaagactacctcgaaggaggtcttctggtcaaataggcaagtccccaaagaaaactgttcctacagagcctccaactgctgcaatttcaagctctactactgcatcacctcctcatcaagatcctcctgcagctgctccagccaatgctgatgcttctcatattgaaaatacaaacactgctgagccagtattgagtaaaagccttgtcgaagaggtcgggaaagtgaaccctgctccagccaatgctcaagaacaaattgcttccagcaagggtcaagaatctccagatcaagttgactcaaaggctgatgaagtctctactgggaacaccccactcgatctagaagccattaacaaaatgattgaagatgaccctttgagtgctattgaaaatattctgacagggaaggtttccatttcttccaagactccacaatctatcactcaggcagaacaaccaaaagttcaaggctcccctgcagatgttctgtctaaagagctaaaagacttaatgcagacctttagcttaggtgattttgttactgactatgaacaaatgtcaaaggtcctacttattcttgaagagttgcagaagaatgagaagtttctttctcatgaacagcaaacattcataaaggccttcagactcttcttcaacaatgctgttactcaccgcaaagaatgtgatatggctagaataaagaaagtcgacttgaaccgagctaaagaagatatccttcgcaaactgcaagaagttaaacatacacaggaacaaatcacaatgtccatttcaaatgccgacaacagggtcaatgaaatatcttcttgtattgaacaacttgaagaacagttatacaaactgaaggaagagagggagacctttcagttggctattaaggaacgggagaaacaaagggagacattgaagaatgatagcatcttatgggctcatcagactaaggacctggtttttgatcttgcagagattgaggccaaagaaaaaatccttggacagcaacttgaagccgacaatgatgcatatgaccaatttaaagcgtcctttcctttttaatttccatttgaacaattgatagttgtaattacactgttatgttcaattcatgtgtggtttagttcatgtatgtttg

SEQ ID NO: 59494 - protein, 462 aa, Glycine max
  peptide (1)..(462): Ceres Seq. ID no. 14307219
  misc_feature (9)..(457): Pfam Name: Myosin tail Pfam Description: Myosin tail
MTDPPKEQEHQESIVSPSTDEALTSSKRGRSRKTKPTKFIINQKSNTPSTPRRSKRIKHVADKTANNVPEVSSSEELLKGRTAENSQVDGKEVSSDIDALVIYKRKRLPRRRSSGQIGKSPKKTVPTEPPTAAISSSTTASPPHQDPPAAAPANADASHIENTNTAEPVLSKSLVEEVGKVNPAPANAQEQIASSKGQESPDQVDSKADEVSTGNTPLDLEAINKMIEDDPLSAIENILTGKVSISSKTPQSITQAEQPKVQGSPADVLSKELKDLMQTFSLGDFVTDYEQMSKVLLILEELQKNEKFLSHEQQTFIKAFRLFFNNAVTHRKECDMARIKKVDLNRAKEDILRKLQEVKHTQEQITMSISNADNRVNEISSCIEQLEEQLYKLKEERETFQLAIKEREKQRETLKNDSILWAHQTKDLVFDLAEIEAKEKILGQQLEADNDAYDQFKASFPF

SEQ ID NO: 59495 - protein, 237 aa, Glycine max
  peptide (1)..(237): Ceres Seq. ID no. 14307220
  misc_feature (1)..(232): Pfam Name: Myosin tail Pfam Description: Myosin tail
MIEDDPLSAIENILTGKVSISSKTPQSITQAEQPKVQGSPADVLSKELKDLMQTFSLGDFVTDYEQMSKVLLILEELQKNEKFLSHEQQTFIKAFRLFFNNAVTHRKECDMARIKKVDLNRAKEDILRKLQEVKHTQEQITMSISNADNRVNEISSCIEQLEEQLYKLKEERETFQLAIKEREKQRETLKNDSILWAHQTKDLVFDLAEIEAKEKILGQQLEADNDAYDQFKASFPF

SEQ ID NO: 59496 - DNA, 1749 bp, Glycine max
  misc_feature (1)..(1749): Ceres Seq. ID no. 14303440
gattcacacctccacactgtctctatcaccaatcccttatatcccccctccacttagcataccataattcaccgtcaatttccccattgatgatccatttggcatttcatcatatttcaccacttgtcctactccacttggataatttcctaacgtatagttttcaaaaatccttgttcttcatgagcttatagtttatgagtcctacgatttttggcaattcagcaacactatagatatatcttaggctaagagaagccttagcagcaactcaaatccaaaagtgtaagcctttcttcttgttattagtccatcttcaccaatggaagagaatatgaagtgtgaactagttggtctcattgatgagttaatgcaagggaaggagctagcaaagcagctttgtgaccatctagtctcattatcatcatcatcttctcatgaaacaaatgaagtcctaattgagaaaatactttccacctatgagaaagcacttgccatgctgaattgcaaggctaatgtaggagaaagtaaggccaacattaatggcagcatgatggattccccttgttctttcacaaatggtagccccaaaagtgaggtcatggagcctgagattaagaacaaagatgtctttaagaaaagaaagaccatgtcaacgtgcacagaacaagtgaaggtgtgcttgggaacggcgcatgaaggatctctggatgatggctatagttggagaaaatatggacagaaggatattctcggagctaagtttccaagaggatattacagatgcacatatagaaatgtacaaggatgtctggccacaaagcaggtgcaaaagtcagatgaagacccaatgatatgtgaaataacctacaaaggaagacacacatgcacccaagcaagtcacttaaacaaaacagtgatacccccatcaaagacaaaggtgaacttgttgggagaaaataagcaccaaacccatcaaattaagaatcaaccacggcaagagaaaatagaacaacaaccaccagagacatttttcacatttggatcatcatcaggtcttgaagttaaaatagaggacatcgaccacaaggagggcatattcccatcattttgcttttcttctccatcaatagtagggtcagaaaatggggacgacaacaacagcagcatattctcatacaccatgattgagaacaacttaatggaaagcttctctcctgccttcatatctccaacaacttcagatatagaatcaaacactttctgccactgggggagcactggactaggccaaagtgtgcaaagctcagggtctgatatcactgatatagtttcagcaccaacttcagtcaccaattcaccaataatggaccttgatttctttttcgataagatcgatttcgacacagatttccctttgagcaccatggaactttgcacttaataaattgtccccacttctaagtttacagcatatgtgatttctatgcggattaactgtgagttttgtagatcctgactagcaccataaccgagggaaggaagtctataataatcaccatagatcatgtccataaatgaagacaatgaaaaacttccctcttgtgctaattaagagagttttcatgtacctaggctgcaatgtgaaaataatttgtaggttgtagcttaatttggtgcatgtttggtttgcaatggaaattgttgtaatgcgcgttccaatgtagatcttatggataaaagtaaaac

SEQ ID NO: 59497 - protein, 373 aa, Glycine max
  peptide (1)..(373): Ceres Seq. ID no. 14303441
  misc_feature (129)..(191): Pfam Name: WRKY DNA -binding domain Pfam Description: WRKY DNA -binding domain
  misc_feature (75)..(191): Homolog of NCBI NO: 34898262 NR Description: WRKY family transcription factor-like protein
  misc_feature (35)..(216): Homolog of NCBI NO: 34911952 NR Description: P0694A04.6 [Oryza sativa (japonica
  misc_feature (12)..(189): Homolog of NCBI NO: 40253471 NR Description: putative transcription factor WRKY5
  misc_feature (65)..(302): Homolog of NCBI NO: 15236622 NR Description: WRKY family transcription factor [Arabidopsis
  misc_feature (100)..(276): Homolog of NCBI NO: 15225975 NR Description: WRKY family transcription factor [Arabidopsis
  misc_feature (28)..(206): Homolog of NCBI NO: 18420751 NR Description: WRKY family transcription factor [Arabidopsis
  misc_feature (298)..(365): Homolog of NCBI NO: 30681651 NR Description: WRKY family transcription factor [Arabidopsis
  misc_feature (75)..(205): Homolog of NCBI NO: 30681651 NR Description: WRKY family transcription factor [Arabidopsis
  misc_feature (298)..(365): Homolog of NCBI NO: 15237039 NR Description: WRKY family transcription factor [Arabidopsis
  misc_feature (3)..(205): Homolog of NCBI NO: 15237039 NR Description: WRKY family transcription factor [Arabidopsis
MEENMKCELVGLIDELMQGKELAKQLCDHLVSLSSSSSHETNEVLIEKILSTYEKALAMLNCKANVGESKANINGSMMDSPCSFTNGSPKSEVMEPEIKNKDVFKKRKTMSTCTEQVKVCLGTAHEGSLDDGYSWRKYGQKDILGAKFPRGYYRCTYRNVQGCLATKQVQKSDEDPMICEITYKGRHTCTQASHLNKTVIPPSKTKVNLLGENKHQTHQIKNQPRQEKIEQQPPETFFTFGSSSGLEVKIEDIDHKEGIFPSFCFSSPSIVGSENGDDNNSSIFSYTMIENNLMESFSPAFISPTTSDIESNTFCHWGSTGLGQSVQSSGSDITDIVSAPTSVTNSPIMDLDFFFDKIDFDTDFPLSTMELCT

SEQ ID NO: 59498 - protein, 369 aa, Glycine max
  peptide (1)..(369): Ceres Seq. ID no. 14303442
  misc_feature (125)..(187): Pfam Name: WRKY DNA -binding domain Pfam Description: WRKY DNA -binding domain
  misc_feature (71)..(187): Homolog of NCBI NO: 34898262 NR Description: WRKY family transcription factor-like protein
  misc_feature (31)..(212): Homolog of NCBI NO: 34911952 NR Description: P0694A04.6 [Oryza sativa (japonica
  misc_feature (8)..(185): Homolog of NCBI NO: 40253471 NR Description: putative transcription factor WRKY5
  misc_feature (61)..(298): Homolog of NCBI NO: 15236622 NR Description: WRKY family transcription factor [Arabidopsis
  misc_feature (96)..(272): Homolog of NCBI NO: 15225975 NR Description: WRKY family transcription factor [Arabidopsis
  misc_feature (24)..(202): Homolog of NCBI NO: 18420751 NR Description: WRKY family transcription factor [Arabidopsis
  misc_feature (294)..(361): Homolog of NCBI NO: 30681651 NR Description: WRKY family transcription factor [Arabidopsis
  misc_feature (71)..(201): Homolog of NCBI NO: 30681651 NR Description: WRKY family transcription factor [Arabidopsis
  misc_feature (294)..(361): Homolog of NCBI NO: 15237039 NR Description: WRKY family transcription factor [Arabidopsis
  misc_feature (1)..(201): Homolog of NCBI NO: 15237039 NR Description: WRKY family transcription factor [Arabidopsis
MKCELVGLIDELMQGKELAKQLCDHLVSLSSSSSHETNEVLIEKILSTYEKALAMLNCKANVGESKANINGSMMDSPCSFTNGSPKSEVMEPEIKNKDVFKKRKTMSTCTEQVKVCLGTAHEGSLDDGYSWRKYGQKDILGAKFPRGYYRCTYRNVQGCLATKQVQKSDEDPMICEITYKGRHTCTQASHLNKTVIPPSKTKVNLLGENKHQTHQIKNQPRQEKIEQQPPETFFTFGSSSGLEVKIEDIDHKEGIFPSFCFSSPSIVGSENGDDNNSSIFSYTMIENNLMESFSPAFISPTTSDIESNTFCHWGSTGLGQSVQSSGSDITDIVSAPTSVTNSPIMDLDFFFDKIDFDTDFPLSTMELCT

SEQ ID NO: 59499 - protein, 357 aa, Glycine max
  peptide (1)..(357): Ceres Seq. ID no. 14303443
  misc_feature (113)..(175): Pfam Name: WRKY DNA -binding domain Pfam Description: WRKY DNA -binding domain
  misc_feature (59)..(175): Homolog of NCBI NO: 34898262 NR Description: WRKY family transcription factor-like protein
  misc_feature (19)..(200): Homolog of NCBI NO: 34911952 NR Description: P0694A04.6 [Oryza sativa (japonica
  misc_feature (1)..(173): Homolog of NCBI NO: 40253471 NR Description: putative transcription factor WRKY5
  misc_feature (49)..(286): Homolog of NCBI NO: 15236622 NR Description: WRKY family transcription factor [Arabidopsis
  misc_feature (84)..(260): Homolog of NCBI NO: 15225975 NR Description: WRKY family transcription factor [Arabidopsis
  misc_feature (12)..(190): Homolog of NCBI NO: 18420751 NR Description: WRKY family transcription factor [Arabidopsis
  misc_feature (282)..(349): Homolog of NCBI NO: 30681651 NR Description: WRKY family transcription factor [Arabidopsis
  misc_feature (59)..(189): Homolog of NCBI NO: 30681651 NR Description: WRKY family transcription factor [Arabidopsis
  misc_feature (282)..(349): Homolog of NCBI NO: 15237039 NR Description: WRKY family transcription factor [Arabidopsis
  misc_feature (1)..(189): Homolog of NCBI NO: 15237039 NR Description: WRKY family transcription factor [Arabidopsis
MQGKELAKQLCDHLVSLSSSSSHETNEVLIEKILSTYEKALAMLNCKANVGESKANINGSMMDSPCSFTNGSPKSEVMEPEIKNKDVFKKRKTMSTCTEQVKVCLGTAHEGSLDDGYSWRKYGQKDILGAKFPRGYYRCTYRNVQGCLATKQVQKSDEDPMICEITYKGRHTCTQASHLNKTVIPPSKTKVNLLGENKHQTHQIKNQPRQEKIEQQPPETFFTFGSSSGLEVKIEDIDHKEGIFPSFCFSSPSIVGSENGDDNNSSIFSYTMIENNLMESFSPAFISPTTSDIESNTFCHWGSTGLGQSVQSSGSDITDIVSAPTSVTNSPIMDLDFFFDKIDFDTDFPLSTMELCT

SEQ ID NO: 59500 - DNA, 2206 bp, Glycine max
  misc_feature (1)..(2206): Ceres Seq. ID no. 14303524
gaagatggcaacgttcacataccacgtagaaacagttcaatcattcttagccctaagcagacttcacatactcatccacttagtggcagtgttgtctctctgttactaccgcatcacccacttcttcctccaacctccaacagcgccatggcttctcatgactgctgcggagcttcttctctcgctgctctggttcttcaaccaagccttccggtggcgaccggtgtcgcggagcgtcatgactgagaagcttccgagtgaggagaagctgccggggcttgacatcttcgtgtgcacgctcgatcccgagaaggagcccaccgtggaggtcattgacaccatcatctccgccgtgtccatggattacccctccgacaagctttccgtctatctctccgacgacggcgggtgcgacgtgactctctatgggatccgagaggctgctgagttcgccaaggagtgggttccgttctgtaaaaagtatggggtgaagtcaaggtgtcccaaagtcttcttctctccctttggggatgaggatcaagagactcttcgggacgatcaattcagaacacagagagacctcgtcaaggctaaatacgagaaaatgcagaaaaatatcgagaaatttggttcagaccctaaaagtcgtcgtattgtgagtgacagacaacctcgtattgagattataaatgaccaaccgggaatgccacttattgtttatgtgtctcgcgaaagaaggccatcccttcctcacaaattcaaaggaggagccgtcaacacattgctcagagtctcaggtttaatcagtaatggaccttatgttctagtaatggactgtgatatgtatagcaatgatccaacctctgccaaacaagccatgtgcttctttcttgatcctgaaacgtccaaatatattgcatttgttcaattccctcaaatgtttcacaaccttagcaaaaaggacatttatgatagtcaagctagaactgcttttaagacaatgtggcaaggcatggatggactaagaggtccaggtctttctggcagcggcaattacttaagtagaagtgctttactatttggaagtccaaaccaaaaagatgactatctgcaagatgcacaaaagtacttcggcaagtctaccgcctacattgaatcactgaaggccatccgtggacagaaaagtagcaaaaagaatatttcaagagatgaaatgttaagagaagctcaagtagtggcctcttgttcctacgaaaataacacaaattggggcacagaggtgggattctcatatggcatattactagagagttctattactggctatattcttcacagcagaggatggaaatcagcatatctttacccgaaaacaccatgtttcttaggttgtgctcccactgacatcaaggaaggcatgcttcagttggttaagtggttgtctgaacttttgttgcttggtgtctcctccaaatacagcccattcacttatggattttcaagaatgtccatacttcacacattcacttattgcttcatcacaatgtcatccctttatgctgttgtcttcatcctctacggcattgtacctcaagtatgcctcctcaaaggaatccctgtgtttccaaaggccacagacccttggtttgccgtgtttgcatttgtgtatgtatctactcagattcaacatttgattgagattctctctggggatggatctgtgacaatgtggtgggatgaacaaagaatttggattctgaagtcagttaccagcatatttgcaattatagatggaatcaagaagtggttggggttgagcaaggtgaaattcaacttgtcaaacaaagccattgacaaagagaagctcaagaaatatgagcaaggtagattcgatttccaaggtgcagctgtgttcatggctccattggttctattactcacagccaacattgttagcttcttagttggtatatggagactatttaatttcaatgtgaaggattttgaagaaatgtttggtcaacttttcttagttacctatgtaatggttcttagttatccacttcttgaggccatggtaacaatgaaaagcaagagtggatagtgaaatttggtcacaaataattaggctcattcaagagtctaaattgattatgtatcttgagatgaaattgcttaatgcaatcttgttcgttcagtttaaaag

SEQ ID NO: 59501 - protein, 700 aa, Glycine max
  peptide (1)..(700): Ceres Seq. ID no. 14303525
  misc_feature (20)..(207): Pfam Name: Cellulose synthase Pfam Description: Cellulose synthase
  misc_feature (391)..(696): Homolog of NCBI NO: 16519225 NR Description: cellulose synthase-like protein OsCslE1 [Oryza
  misc_feature (48)..(367): Homolog of NCBI NO: 16519225 NR Description: cellulose synthase-like protein OsCslE1 [Oryza
  misc_feature (235)..(363): Homolog of NCBI NO: 2262114 NR Description: cellulose synthase isolog [Arabidopsis thaliana]
  misc_feature (20)..(207): Homolog of NCBI NO: 2262114 NR Description: cellulose synthase isolog [Arabidopsis thaliana]
  misc_feature (384)..(696): Homolog of NCBI NO: 2262114 NR Description: cellulose synthase isolog [Arabidopsis thaliana]
  misc_feature (230)..(363): Homolog of NCBI NO: 2262115 NR Description: cellulose synthase isolog [Arabidopsis thaliana]
  misc_feature (20)..(207): Homolog of NCBI NO: 2262115 NR Description: cellulose synthase isolog [Arabidopsis thaliana]
  misc_feature (376)..(693): Homolog of NCBI NO: 2262115 NR Description: cellulose synthase isolog [Arabidopsis thaliana]
  misc_feature (376)..(693): Homolog of NCBI NO: 30686386 NR Description: cellulose synthase - related [Arabidopsis
  misc_feature (20)..(363): Homolog of NCBI NO: 30686386 NR Description: cellulose synthase - related [Arabidopsis
KMATFTYHVETVQSFLALSRLHILIHLVAVLSLCYYRITHFFLQPPTAPWLLMTAAELLLSLLWFFNQAFRWRPVSRSVMTEKLPSEEKLPGLDIFVCTLDPEKEPTVEVIDTIISAVSMDYPSDKLSVYLSDDGGCDVTLYGIREAAEFAKEWVPFCKKYGVKSRCPKVFFSPFGDEDQETLRDDQFRTQRDLVKAKYEKMQKNIEKFGSDPKSRRIVSDRQPRIEIINDQPGMPLIVYVSRERRPSLPHKFKGGAVNTLLRVSGLISNGPYVLVMDCDMYSNDPTSAKQAMCFFLDPETSKYIAFVQFPQMFHNLSKKDIYDSQARTAFKTMWQGMDGLRGPGLSGSGNYLSRSALLFGSPNQKDDYLQDAQKYFGKSTAYIESLKAIRGQKSSKKNISRDEMLREAQVVASCSYENNTNWGTEVGFSYGILLESSITGYILHSRGWKSAYLYPKTPCFLGCAPTDIKEGMLQLVKWLSELLLLGVSSKYSPFTYGFSRMSILHTFTYCFITMSSLYAVVFILYGIVPQVCLLKGIPVFPKATDPWFAVFAFVYVSTQIQHLIEILSGDGSVTMWWDEQRIWILKSVTSIFAIIDGIKKWLGLSKVKFNLSNKAIDKEKLKKYEQGRFDFQGAAVFMAPLVLLLTANIVSFLVGIWRLFNFNVKDFEEMFGQLFLVTYVMVLSYPLLEAMVTMKSKSG

SEQ ID NO: 59502 - protein, 699 aa, Glycine max
  peptide (1)..(699): Ceres Seq. ID no. 14303526
  misc_feature (19)..(206): Pfam Name: Cellulose synthase Pfam Description: Cellulose synthase
  misc_feature (390)..(695): Homolog of NCBI NO: 16519225 NR Description: cellulose synthase-like protein OsCslE1 [Oryza
  misc_feature (47)..(366): Homolog of NCBI NO: 16519225 NR Description: cellulose synthase-like protein OsCslE1 [Oryza
  misc_feature (234)..(362): Homolog of NCBI NO: 2262114 NR Description: cellulose synthase isolog [Arabidopsis thaliana]
  misc_feature (19)..(206): Homolog of NCBI NO: 2262114 NR Description: cellulose synthase isolog [Arabidopsis thaliana]
  misc_feature (383)..(695): Homolog of NCBI NO: 2262114 NR Description: cellulose synthase isolog [Arabidopsis thaliana]
  misc_feature (229)..(362): Homolog of NCBI NO: 2262115 NR Description: cellulose synthase isolog [Arabidopsis thaliana]
  misc_feature (19)..(206): Homolog of NCBI NO: 2262115 NR Description: cellulose synthase isolog [Arabidopsis thaliana]
  misc_feature (375)..(692): Homolog of NCBI NO: 2262115 NR Description: cellulose synthase isolog [Arabidopsis thaliana]
  misc_feature (375)..(692): Homolog of NCBI NO: 30686386 NR Description: cellulose synthase - related [Arabidopsis
  misc_feature (19)..(362): Homolog of NCBI NO: 30686386 NR Description: cellulose synthase - related [Arabidopsis
MATFTYHVETVQSFLALSRLHILIHLVAVLSLCYYRITHFFLQPPTAPWLLMTAAELLLSLLWFFNQAFRWRPVSRSVMTEKLPSEEKLPGLDIFVCTLDPEKEPTVEVIDTIISAVSMDYPSDKLSVYLSDDGGCDVTLYGIREAAEFAKEWVPFCKKYGVKSRCPKVFFSPFGDEDQETLRDDQFRTQRDLVKAKYEKMQKNIEKFGSDPKSRRIVSDRQPRIEIINDQPGMPLIVYVSRERRPSLPHKFKGGAVNTLLRVSGLISNGPYVLVMDCDMYSNDPTSAKQAMCFFLDPETSKYIAFVQFPQMFHNLSKKDIYDSQARTAFKTMWQGMDGLRGPGLSGSGNYLSRSALLFGSPNQKDDYLQDAQKYFGKSTAYIESLKAIRGQKSSKKNISRDEMLREAQVVASCSYENNTNWGTEVGFSYGILLESSITGYILHSRGWKSAYLYPKTPCFLGCAPTDIKEGMLQLVKWLSELLLLGVSSKYSPFTYGFSRMSILHTFTYCFITMSSLYAVVFILYGIVPQVCLLKGIPVFPKATDPWFAVFAFVYVSTQIQHLIEILSGDGSVTMWWDEQRIWILKSVTSIFAIIDGIKKWLGLSKVKFNLSNKAIDKEKLKKYEQGRFDFQGAAVFMAPLVLLLTANIVSFLVGIWRLFNFNVKDFEEMFGQLFLVTYVMVLSYPLLEAMVTMKSKSG

SEQ ID NO: 59503 - protein, 648 aa, Glycine max
  peptide (1)..(648): Ceres Seq. ID no. 14303527
  misc_feature (1)..(155): Pfam Name: Cellulose synthase Pfam Description: Cellulose synthase
  misc_feature (339)..(644): Homolog of NCBI NO: 16519225 NR Description: cellulose synthase-like protein OsCslE1 [Oryza
  misc_feature (1)..(315): Homolog of NCBI NO: 16519225 NR Description: cellulose synthase-like protein OsCslE1 [Oryza
  misc_feature (183)..(311): Homolog of NCBI NO: 2262114 NR Description: cellulose synthase isolog [Arabidopsis thaliana]
  misc_feature (1)..(155): Homolog of NCBI NO: 2262114 NR Description: cellulose synthase isolog [Arabidopsis thaliana]
  misc_feature (332)..(644): Homolog of NCBI NO: 2262114 NR Description: cellulose synthase isolog [Arabidopsis thaliana]
  misc_feature (178)..(311): Homolog of NCBI NO: 2262115 NR Description: cellulose synthase isolog [Arabidopsis thaliana]
  misc_feature (1)..(155): Homolog of NCBI NO: 2262115 NR Description: cellulose synthase isolog [Arabidopsis thaliana]
  misc_feature (324)..(641): Homolog of NCBI NO: 2262115 NR Description: cellulose synthase isolog [Arabidopsis thaliana]
  misc_feature (324)..(641): Homolog of NCBI NO: 30686386 NR Description: cellulose synthase - related [Arabidopsis
  misc_feature (1)..(311): Homolog of NCBI NO: 30686386 NR Description: cellulose synthase - related [Arabidopsis
MTAAELLLSLLWFFNQAFRWRPVSRSVMTEKLPSEEKLPGLDIFVCTLDPEKEPTVEVIDTIISAVSMDYPSDKLSVYLSDDGGCDVTLYGIREAAEFAKEWVPFCKKYGVKSRCPKVFFSPFGDEDQETLRDDQFRTQRDLVKAKYEKMQKNIEKFGSDPKSRRIVSDRQPRIEIINDQPGMPLIVYVSRERRPSLPHKFKGGAVNTLLRVSGLISNGPYVLVMDCDMYSNDPTSAKQAMCFFLDPETSKYIAFVQFPQMFHNLSKKDIYDSQARTAFKTMWQGMDGLRGPGLSGSGNYLSRSALLFGSPNQKDDYLQDAQKYFGKSTAYIESLKAIRGQKSSKKNISRDEMLREAQVVASCSYENNTNWGTEVGFSYGILLESSITGYILHSRGWKSAYLYPKTPCFLGCAPTDIKEGMLQLVKWLSELLLLGVSSKYSPFTYGFSRMSILHTFTYCFITMSSLYAVVFILYGIVPQVCLLKGIPVFPKATDPWFAVFAFVYVSTQIQHLIEILSGDGSVTMWWDEQRIWILKSVTSIFAIIDGIKKWLGLSKVKFNLSNKAIDKEKLKKYEQGRFDFQGAAVFMAPLVLLLTANIVSFLVGIWRLFNFNVKDFEEMFGQLFLVTYVMVLSYPLLEAMVTMKSKSG

SEQ ID NO: 59504 - DNA, 1190 bp, Glycine max
  misc_feature (1)..(1190): Ceres Seq. ID no. 14307492
acgttgtcatcaaatcaaaacacatcacttcacttcacttcccttctctctctcttcgacgtacatttccatcttattagggtttctttccatggattccgattcttggatttccacgcgcatgtcgtcctcttcacgccgctatcattcgcgatctgatctgtacgtggaggagagtgaagggagcgatgatttcagggcggagtttctgtgccctttctgcgccgaggattacgacgtcgtttccctctgttgccacattgacgaccaccaccctatccaagccaaaaacggggtgtgtcccatttgtgggaagaaggtgggattggatctcgttggacatattactacgcaacatgggaacttcttgagggtgcagcgtaaaaggagggtcaggaaagtaggctctggttcaacaatgtctatattgagaaaagagttacgagaaggagccttgcactcccttcttggaggttcttcatacttagcttcctgcaattctgagcctgatcctctgttatcatcttttatgtttaacccagctgtaactgatgattctgcgagtgcaaaacctccttctgttgaagatgctctagtaaaagaaagttcaaaagacgatttcttggaaagaaaacctcaacagttacagctgtcagaagaagatcaagtagagaaggctcggaggtttgaattcgtgcaaggacttctgatgtccaccattcttgatgatatgttatgactgcatctgtagctcatatgccattattgtattaggagctggagctataagcaagagaaagatagagttatgcaaaatgatacgaagtggtagtagctgcatcggataaaatatgcaatttgtctatagttatgttcataaaatgcaacctttttttatatcctgcttgtgttctatgttagttccaaataatcaatggaaataaaattcgtttcacgagcatgggaacagcagaattcgtagaccatttttctgttttttttaggtttgtcttctagaatttagtcgatgacccatgtatataaaaagtgtgagagtgctcgagtgttgtcaatttgagctagtcttctgcaccaattggttgaattttcgtatggagcttgacgagaagagttgttgttgggaccaagtataagttcgttattagttaaatgtttcaaaatatctgatc

SEQ ID NO: 59505 - protein, 245 aa, Glycine max
  peptide (1)..(245): Ceres Seq. ID no. 14307493
  misc_feature (42)..(240): Pfam Name: Drought induced 19 protein (Di19) Pfam Description: Drought induced 19 protein (Di19)
  misc_feature (41)..(244): Homolog of NCBI NO: 30696095 NR Description: drought-induced protein -related [Arabidopsis
  misc_feature (41)..(244): Homolog of NCBI NO: 1076316 NR Description: drought-induced protein Di19 - Arabidopsis
  misc_feature (41)..(244): Homolog of NCBI NO: 15028023 NR Description: unknown protein [Arabidopsis thaliana]
  misc_feature (31)..(245): Homolog of NCBI NO: 15240426 NR Description: drought-induced protein -related [Arabidopsis
  misc_feature (31)..(243): Homolog of NCBI NO: 15230782 NR Description: drought-induced protein -related [Arabidopsis
  misc_feature (31)..(245): Homolog of NCBI NO: 28393233 NR Description: unknown protein [Arabidopsis thaliana]
  misc_feature (31)..(245): Homolog of NCBI NO: 25992529 NR Description: fiber protein Fb2 [Gossypium barbadense]
  misc_feature (31)..(243): Homolog of NCBI NO: 15239827 NR Description: drought-induced protein -related [Arabidopsis
  misc_feature (31)..(243): Homolog of NCBI NO: 13937216 NR Description: AT5g49230/K21P3_11 [Arabidopsis thaliana]
  misc_feature (31)..(243): Homolog of NCBI NO: 18377875 NR Description: AT3g06760/F3E22_10 [Arabidopsis thaliana]
RCHQIKTHHFTSLPFSLSSTYISILLGFLSMDSDSWISTRMSSSSRRYHSRSDLYVEESEGSDDFRAEFLCPFCAEDYDVVSLCCHIDDHHPIQAKNGVCPICGKKVGLDLVGHITTQHGNFLRVQRKRRVRKVGSGSTMSILRKELREGALHSLLGGSSYLASCNSEPDPLLSSFMFNPAVTDDSASAKPPSVEDALVKESSKDDFLERKPQQLQLSEEDQVEKARRFEFVQGLLMSTILDDML

SEQ ID NO: 59506 - protein, 215 aa, Glycine max
  peptide (1)..(215): Ceres Seq. ID no. 14307494
  misc_feature (12)..(210): Pfam Name: Drought induced 19 protein (Di19) Pfam Description: Drought induced 19 protein (Di19)
  misc_feature (11)..(214): Homolog of NCBI NO: 30696095 NR Description: drought-induced protein -related [Arabidopsis
  misc_feature (11)..(214): Homolog of NCBI NO: 1076316 NR Description: drought-induced protein Di19 - Arabidopsis
  misc_feature (11)..(214): Homolog of NCBI NO: 15028023 NR Description: unknown protein [Arabidopsis thaliana]
  misc_feature (1)..(215): Homolog of NCBI NO: 15240426 NR Description: drought-induced protein -related [Arabidopsis
  misc_feature (1)..(213): Homolog of NCBI NO: 15230782 NR Description: drought-induced protein -related [Arabidopsis
  misc_feature (1)..(215): Homolog of NCBI NO: 28393233 NR Description: unknown protein [Arabidopsis thaliana]
  misc_feature (1)..(215): Homolog of NCBI NO: 25992529 NR Description: fiber protein Fb2 [Gossypium barbadense]
  misc_feature (1)..(213): Homolog of NCBI NO: 15239827 NR Description: drought-induced protein -related [Arabidopsis
  misc_feature (1)..(213): Homolog of NCBI NO: 13937216 NR Description: AT5g49230/K21P3_11 [Arabidopsis thaliana]
  misc_feature (1)..(213): Homolog of NCBI NO: 18377875 NR Description: AT3g06760/F3E22_10 [Arabidopsis thaliana]
MDSDSWISTRMSSSSRRYHSRSDLYVEESEGSDDFRAEFLCPFCAEDYDVVSLCCHIDDHHPIQAKNGVCPICGKKVGLDLVGHITTQHGNFLRVQRKRRVRKVGSGSTMSILRKELREGALHSLLGGSSYLASCNSEPDPLLSSFMFNPAVTDDSASAKPPSVEDALVKESSKDDFLERKPQQLQLSEEDQVEKARRFEFVQGLLMSTILDDML

SEQ ID NO: 59507 - protein, 205 aa, Glycine max
  peptide (1)..(205): Ceres Seq. ID no. 14307495
  misc_feature (2)..(200): Pfam Name: Drought induced 19 protein (Di19) Pfam Description: Drought induced 19 protein (Di19)
  misc_feature (1)..(204): Homolog of NCBI NO: 30696095 NR Description: drought-induced protein -related [Arabidopsis
  misc_feature (1)..(204): Homolog of NCBI NO: 1076316 NR Description: drought-induced protein Di19 - Arabidopsis
  misc_feature (1)..(204): Homolog of NCBI NO: 15028023 NR Description: unknown protein [Arabidopsis thaliana]
  misc_feature (1)..(205): Homolog of NCBI NO: 15240426 NR Description: drought-induced protein -related [Arabidopsis
  misc_feature (1)..(203): Homolog of NCBI NO: 15230782 NR Description: drought-induced protein -related [Arabidopsis
  misc_feature (1)..(205): Homolog of NCBI NO: 28393233 NR Description: unknown protein [Arabidopsis thaliana]
  misc_feature (1)..(205): Homolog of NCBI NO: 25992529 NR Description: fiber protein Fb2 [Gossypium barbadense]
  misc_feature (1)..(203): Homolog of NCBI NO: 15239827 NR Description: drought-induced protein -related [Arabidopsis
  misc_feature (1)..(203): Homolog of NCBI NO: 13937216 NR Description: AT5g49230/K21P3_11 [Arabidopsis thaliana]
  misc_feature (1)..(203): Homolog of NCBI NO: 18377875 NR Description: AT3g06760/F3E22_10 [Arabidopsis thaliana]
MSSSSRRYHSRSDLYVEESEGSDDFRAEFLCPFCAEDYDVVSLCCHIDDHHPIQAKNGVCPICGKKVGLDLVGHITTQHGNFLRVQRKRRVRKVGSGSTMSILRKELREGALHSLLGGSSYLASCNSEPDPLLSSFMFNPAVTDDSASAKPPSVEDALVKESSKDDFLERKPQQLQLSEEDQVEKARRFEFVQGLLMSTILDDML

SEQ ID NO: 59508 - DNA, 1384 bp, Glycine max
  misc_feature (1)..(1384): Ceres Seq. ID no. 12607391
gttagttgaggtgtccactgaaatggtgtccttcatgagaccttggaattgaaacgaacgtcgaagggacgtgtctgactccgatggcttcctcataccgtgaccgtacgtcggagttccgattactatcggagactatgaagaagatcggaggtccggttcaacccgagaatcctccttcgacctctcgcggcggcgagtcgtcgtattcgagatccgaattcaaccgaaaggcctcgcgaatcgggttggggatccacgagacctcgcagaagatcgcgaggctcgcgcagctggcgaggaaatcgtccatgttcaacgatcccgccgtggagattcaggagctgactgttctgatcaagaacgagatcacgacactgaactcggctctctccgatttgcaaaccattcagaacacggatatggctgacggcggttactcgcaggatacgattgtgcattccaccgcggtttgtgatgacttgaagagcaaactcatgggagccacaaaacaccttcaagatgtcttaactgctaggacagagaatatcaaggctcatgagaacaggaagcagatattttccaagaatgcatcaagagagaaccctttccagcatcagccaaagccagctaatgagccgccaccttggtcaaattcatcgaatgcatcagagagtttgcaacaagaatcagcattaccatcaaatggagctcctgttggcaatcaactaagacgaaggttggctgtggacaacactccatcccagcaaatggaaatgtctatggtacagcaggttgtgcctcggcatgaaaactatgctcaaagtcgagcaactgctctgcacaatgtggaatctactatcacagaactaagtgggattttctcacatttggctacaatggttgcccatcaaggggagcttgctatcaggattgatgacaatatggatgagtcattggcaaatgttgaaggagctcacagttctttattgaggcatctcaaccgaatatcatcaaataggtggcttctaataaagatatttgccattctgatacttttcctcacgatcttcatattctttgtcgcctaatatacttccatatgctaatcatggaagtttcacttcgtggcttacttggatttgttttcgttcttctgtggagacaaaaacacaagagcaggtaaatgtgcggatgtattctatttgaatgtagatagagagctccgtcatctgtaaacattttacaatattcccatattcttagtttggcaatcattataggtgttattaaaatttcgttggtatgtaatccccatattaagcaaattgagtaagaaatatacgagtgtttggtaaattgatatagattcataatatttttc

SEQ ID NO: 59509 - protein, 335 aa, Glycine max
  peptide (1)..(335): Ceres Seq. ID no. 12607392
  misc_feature (248)..(311): Pfam Name: SNARE domain Pfam Description: SNARE domain
  misc_feature (1)..(168): Homolog of NCBI NO: 31212921 NR Description: ENSANGP00000012968 [Anopheles gambiae]
  misc_feature (4)..(331): Homolog of NCBI NO: 6323054 NR Description: Sed5p is a t-SNARE (soluble NSF attachment
  misc_feature (4)..(331): Homolog of NCBI NO: 32490453 NR Description: syntaxin homologue [Aspergillus oryzae]
  misc_feature (6)..(331): Homolog of NCBI NO: 40747582 NR Description: hypothetical protein AN9526.2 [Aspergillus
  misc_feature (7)..(335): Homolog of NCBI NO: 20148780 NR Description: syntaxin 5 [Phytophthora sojae]
  misc_feature (5)..(335): Homolog of NCBI NO: 28829569 NR Description: similar to syntaxin 5
  misc_feature (3)..(335): Homolog of NCBI NO: 30687459 NR Description: syntaxin of plants SYP32 [Arabidopsis thaliana]
  misc_feature (1)..(335): Homolog of NCBI NO: 34906154 NR Description: putative t-SNARE SED5 [Oryza sativa (japonica
  misc_feature (1)..(335): Homolog of NCBI NO: 15239228 NR Description: syntaxin SYP31
  misc_feature (1)..(335): Homolog of NCBI NO: 2981439 NR Description: syntaxin of plants 31 [Arabidopsis thaliana]
MASSYRDRTSEFRLLSETMKKIGGPVQPENPPSTSRGGESSYSRSEFNRKASRIGLGIHETSQKIARLAQLARKSSMFNDPAVEIQELTVLIKNEITTLNSALSDLQTIQNTDMADGGYSQDTIVHSTAVCDDLKSKLMGATKHLQDVLTARTENIKAHENRKQIFSKNASRENPFQHQPKPANEPPPWSNSSNASESLQQESALPSNGAPVGNQLRRRLAVDNTPSQQMEMSMVQQVVPRHENYAQSRATALHNVESTITELSGIFSHLATMVAHQGELAIRIDDNMDESLANVEGAHSSLLRHLNRISSNRWLLIKIFAILILFLTIFIFFVA

SEQ ID NO: 59510 - protein, 317 aa, Glycine max
  peptide (1)..(317): Ceres Seq. ID no. 12607393
  misc_feature (230)..(293): Pfam Name: SNARE domain Pfam Description: SNARE domain
  misc_feature (1)..(150): Homolog of NCBI NO: 31212921 NR Description: ENSANGP00000012968 [Anopheles gambiae]
  misc_feature (1)..(313): Homolog of NCBI NO: 6323054 NR Description: Sed5p is a t-SNARE (soluble NSF attachment
  misc_feature (1)..(313): Homolog of NCBI NO: 32490453 NR Description: syntaxin homologue [Aspergillus oryzae]
  misc_feature (1)..(313): Homolog of NCBI NO: 40747582 NR Description: hypothetical protein AN9526.2 [Aspergillus
  misc_feature (1)..(317): Homolog of NCBI NO: 20148780 NR Description: syntaxin 5 [Phytophthora sojae]
  misc_feature (1)..(317): Homolog of NCBI NO: 28829569 NR Description: similar to syntaxin 5
  misc_feature (1)..(317): Homolog of NCBI NO: 30687459 NR Description: syntaxin of plants SYP32 [Arabidopsis thaliana]
  misc_feature (1)..(317): Homolog of NCBI NO: 34906154 NR Description: putative t-SNARE SED5 [Oryza sativa (japonica
  misc_feature (1)..(317): Homolog of NCBI NO: 15239228 NR Description: syntaxin SYP31
  misc_feature (1)..(317): Homolog of NCBI NO: 2981439 NR Description: syntaxin of plants 31 [Arabidopsis thaliana]
MKKIGGPVQPENPPSTSRGGESSYSRSEFNRKASRIGLGIHETSQKIARLAQLARKSSMFNDPAVEIQELTVLIKNEITTLNSALSDLQTIQNTDMADGGYSQDTIVHSTAVCDDLKSKLMGATKHLQDVLTARTENIKAHENRKQIFSKNASRENPFQHQPKPANEPPPWSNSSNASESLQQESALPSNGAPVGNQLRRRLAVDNTPSQQMEMSMVQQVVPRHENYAQSRATALHNVESTITELSGIFSHLATMVAHQGELAIRIDDNMDESLANVEGAHSSLLRHLNRISSNRWLLIKIFAILILFLTIFIFFVA

SEQ ID NO: 59511 - protein, 259 aa, Glycine max
  peptide (1)..(259): Ceres Seq. ID no. 12607394
  misc_feature (172)..(235): Pfam Name: SNARE domain Pfam Description: SNARE domain
  misc_feature (1)..(92): Homolog of NCBI NO: 31212921 NR Description: ENSANGP00000012968 [Anopheles gambiae]
  misc_feature (1)..(255): Homolog of NCBI NO: 6323054 NR Description: Sed5p is a t-SNARE (soluble NSF attachment
  misc_feature (1)..(255): Homolog of NCBI NO: 32490453 NR Description: syntaxin homologue [Aspergillus oryzae]
  misc_feature (1)..(255): Homolog of NCBI NO: 40747582 NR Description: hypothetical protein AN9526.2 [Aspergillus
  misc_feature (1)..(259): Homolog of NCBI NO: 20148780 NR Description: syntaxin 5 [Phytophthora sojae]
  misc_feature (1)..(259): Homolog of NCBI NO: 28829569 NR Description: similar to syntaxin 5
  misc_feature (1)..(259): Homolog of NCBI NO: 30687459 NR Description: syntaxin of plants SYP32 [Arabidopsis thaliana]
  misc_feature (1)..(259): Homolog of NCBI NO: 34906154 NR Description: putative t-SNARE SED5 [Oryza sativa (japonica
  misc_feature (1)..(259): Homolog of NCBI NO: 15239228 NR Description: syntaxin SYP31
  misc_feature (1)..(259): Homolog of NCBI NO: 2981439 NR Description: syntaxin of plants 31 [Arabidopsis thaliana]
MFNDPAVEIQELTVLIKNEITTLNSALSDLQTIQNTDMADGGYSQDTIVHSTAVCDDLKSKLMGATKHLQDVLTARTENIKAHENRKQIFSKNASRENPFQHQPKPANEPPPWSNSSNASESLQQESALPSNGAPVGNQLRRRLAVDNTPSQQMEMSMVQQVVPRHENYAQSRATALHNVESTITELSGIFSHLATMVAHQGELAIRIDDNMDESLANVEGAHSSLLRHLNRISSNRWLLIKIFAILILFLTIFIFFVA

SEQ ID NO: 59512 - DNA, 1391 bp, Glycine max
  misc_feature (1)..(1391): Ceres Seq. ID no. 14307801
acactttttttgtctgttgaatcttgcgcttttagcttttatccattgaatagcaagagaccccttttgttcccttttgttttttagtcctttaaacattcttggcttctttgcagagctggaattttcactcttcaacccacattgttttgatcccaaatcagaaaaaaaaaaaaaaaaaattgggtttgatatgatccgtaagctgaaaggctgaaactagtatcattggagacaccctttttcatctcataatttgaggttgatcaacgagatcgtttcgttcagagttcagactaatcatggcgtgttccttgaacagtgttttctgtgttcctgacttgaatgagagcatgtttggttccagaaccaaaggggctttagtgccttgtccttcaaaaactggcaaagttaaatcatggggttgttctgttttgagtaatgctttcatgggaaaatccatttctcttgatgaaaagggttcaggatgttgcaactcaaaatcctccagtaatatccctgttcatgcacaagcaacaatttgtgttagcaaggctttgaagtggtggaagaagaccctaaagcctaatatgattgagatccattcagcacaagaactggtccattctttggtcaacgctggcgattcattgcttgtggttgatttctattcacttggttgtggaggctgcaaagcccttcatcctaagatctgtcaaatagctgaattgtacccaaatgcaacctttctgaaagtcaattacgaggaactgaaaacaatgtgtcacggtttacgaattcacgtgttacccttcttcaggttctatagaggttcggagggtcgagtttgtagcttcagctgtaccaatgccactatcaagaaatttaaggacgctttggcaaagcatgggagtgaacggtgtagttttggtccaacaaaaggtttggaagaatccgagttaaaaattttggcttctattggtgaaattaattcttctccgttactatgtcctaagctagggaaattggaagatttggttatggagagccatgatttttctggggtttggagcatggaaagtaatagcaggggaattatgctggatgctatatattgatttattttcaaactagctagtagggcatttattttgccatcttacagaatgaagattataatggagtaaagcacttccatatcatttgttttcctaaaatatttactgttttttattttttctgtaaattattattttattattttttttggaggggcttgtaacattattttggttggatttgagccctacaatttagcaagtgctgctgggatactatcttctgtatctgaaccctctcagattatttttaatagttctctaaatcatctt

SEQ ID NO: 59513 - protein, 271 aa, Glycine max
  peptide (1)..(271): Ceres Seq. ID no. 14307802
  misc_feature (102)..(203): Pfam Name: Thioredoxin Pfam Description: Thioredoxin
  misc_feature (14)..(218): Homolog of NCBI NO: 21553512 NR Description: putative thioredoxin [Arabidopsis thaliana]
  misc_feature (45)..(218): Homolog of NCBI NO: 4973258 NR Description: thioredoxin-like 2 [Arabidopsis thaliana]
  misc_feature (69)..(213): Homolog of NCBI NO: 21554313 NR Description: thioredoxin-like protein [Arabidopsis thaliana]
  misc_feature (69)..(213): Homolog of NCBI NO: 18417441 NR Description: thioredoxin family [Arabidopsis thaliana]
  misc_feature (87)..(221): Homolog of NCBI NO: 19071639 NR Description: putative thioredoxin [Oryza sativa (japonica
  misc_feature (47)..(225): Homolog of NCBI NO: 15225825 NR Description: thioredoxin family [Arabidopsis thaliana]
  misc_feature (75)..(256): Homolog of NCBI NO: 34394520 NR Description: putative thioredoxin [Oryza sativa (japonica
  misc_feature (28)..(232): Homolog of NCBI NO: 308906 NR Description: thioredoxin
  misc_feature (68)..(234): Homolog of NCBI NO: 15240254 NR Description: thioredoxin family [Arabidopsis thaliana]
  misc_feature (45)..(230): Homolog of NCBI NO: 15223262 NR Description: thioredoxin family [Arabidopsis thaliana]
MACSLNSVFCVPDLNESMFGSRTKGALVPCPSKTGKVKSWGCSVLSNAFMGKSISLDEKGSGCCNSKSSSNIPVHAQATICVSKALKWWKKTLKPNMIEIHSAQELVHSLVNAGDSLLVVDFYSLGCGGCKALHPKICQIAELYPNATFLKVNYEELKTMCHGLRIHVLPFFRFYRGSEGRVCSFSCTNATIKKFKDALAKHGSERCSFGPTKGLEESELKILASIGEINSSPLLCPKLGKLEDLVMESHDFSGVWSMESNSRGIMLDAIY

SEQ ID NO: 59514 - protein, 254 aa, Glycine max
  peptide (1)..(254): Ceres Seq. ID no. 14307803
  misc_feature (85)..(186): Pfam Name: Thioredoxin Pfam Description: Thioredoxin
  misc_feature (1)..(201): Homolog of NCBI NO: 21553512 NR Description: putative thioredoxin [Arabidopsis thaliana]
  misc_feature (28)..(201): Homolog of NCBI NO: 4973258 NR Description: thioredoxin-like 2 [Arabidopsis thaliana]
  misc_feature (52)..(196): Homolog of NCBI NO: 21554313 NR Description: thioredoxin-like protein [Arabidopsis thaliana]
  misc_feature (52)..(196): Homolog of NCBI NO: 18417441 NR Description: thioredoxin family [Arabidopsis thaliana]
  misc_feature (70)..(204): Homolog of NCBI NO: 19071639 NR Description: putative thioredoxin [Oryza sativa (japonica
  misc_feature (30)..(208): Homolog of NCBI NO: 15225825 NR Description: thioredoxin family [Arabidopsis thaliana]
  misc_feature (58)..(239): Homolog of NCBI NO: 34394520 NR Description: putative thioredoxin [Oryza sativa (japonica
  misc_feature (11)..(215): Homolog of NCBI NO: 308906 NR Description: thioredoxin
  misc_feature (51)..(217): Homolog of NCBI NO: 15240254 NR Description: thioredoxin family [Arabidopsis thaliana]
  misc_feature (28)..(213): Homolog of NCBI NO: 15223262 NR Description: thioredoxin family [Arabidopsis thaliana]
MFGSRTKGALVPCPSKTGKVKSWGCSVLSNAFMGKSISLDEKGSGCCNSKSSSNIPVHAQATICVSKALKWWKKTLKPNMIEIHSAQELVHSLVNAGDSLLVVDFYSLGCGGCKALHPKICQIAELYPNATFLKVNYEELKTMCHGLRIHVLPFFRFYRGSEGRVCSFSCTNATIKKFKDALAKHGSERCSFGPTKGLEESELKILASIGEINSSPLLCPKLGKLEDLVMESHDFSGVWSMESNSRGIMLDAIY

SEQ ID NO: 59515 - protein, 222 aa, Glycine max
  peptide (1)..(222): Ceres Seq. ID no. 14307804
  misc_feature (53)..(154): Pfam Name: Thioredoxin Pfam Description: Thioredoxin
  misc_feature (1)..(169): Homolog of NCBI NO: 21553512 NR Description: putative thioredoxin [Arabidopsis thaliana]
  misc_feature (1)..(169): Homolog of NCBI NO: 4973258 NR Description: thioredoxin-like 2 [Arabidopsis thaliana]
  misc_feature (20)..(164): Homolog of NCBI NO: 21554313 NR Description: thioredoxin-like protein [Arabidopsis thaliana]
  misc_feature (20)..(164): Homolog of NCBI NO: 18417441 NR Description: thioredoxin family [Arabidopsis thaliana]
  misc_feature (38)..(172): Homolog of NCBI NO: 19071639 NR Description: putative thioredoxin [Oryza sativa (japonica
  misc_feature (1)..(176): Homolog of NCBI NO: 15225825 NR Description: thioredoxin family [Arabidopsis thaliana]
  misc_feature (26)..(207): Homolog of NCBI NO: 34394520 NR Description: putative thioredoxin [Oryza sativa (japonica
  misc_feature (1)..(183): Homolog of NCBI NO: 308906 NR Description: thioredoxin
  misc_feature (19)..(185): Homolog of NCBI NO: 15240254 NR Description: thioredoxin family [Arabidopsis thaliana]
  misc_feature (1)..(181): Homolog of NCBI NO: 15223262 NR Description: thioredoxin family [Arabidopsis thaliana]
MGKSISLDEKGSGCCNSKSSSNIPVHAQATICVSKALKWWKKTLKPNMIEIHSAQELVHSLVNAGDSLLVVDFYSLGCGGCKALHPKICQIAELYPNATFLKVNYEELKTMCHGLRIHVLPFFRFYRGSEGRVCSFSCTNATIKKFKDALAKHGSERCSFGPTKGLEESELKILASIGEINSSPLLCPKLGKLEDLVMESHDFSGVWSMESNSRGIMLDAIY

SEQ ID NO: 59516 - DNA, 887 bp, Glycine max
  misc_feature (1)..(887): Ceres Seq. ID no. 14303453
aattaacactcacacccttttcagtttataccaaacaaatgatgttacagccttctttcttgtgcttctctttcatgtttctcatcacactccctcttggaaaaagctctaccaccttgaatgtacccaaggacataatcaatcaaacatgccaaaaatgtgccaaccaatccatcatcttgagctacaacctatgctccacttctcttccggcggttccggtgagtcactccgcgaatctcgaagggttggcgttggttgcaatggagctagcactagagaatgtgactagcactttggccaccatagagaagctattagacagcacaagccttgataactttgcgctggggtgcttggcagattgcttggagctgtactctgatgcagcatggacaatagtgaattctgtaggggttttcctctctgggaactatgatgtaactaggatttggatgagttcggttatggaagcagcatcaacgtgccaacaaggttttactgggagaggtgaagcttctcctttgacacaggagaactataatctctttcagttgtgtggtattgcactttgcattattcatttggccacacctggagtaccttctcaattaatccacagataaatttgccagtatatgctgtctttctcatcaataaagtgagagacattgtattagtatctcaaaatggacaatattagtgagtggtggaaacgttgtatcttaatagagatggaaattaagggaggaagacagagtagagatgctagtgctagacattaatagatatagaaattagaatgatctatgttttctttattttagtttttagtagagcgaaattttttgtagtagtgaaaaagaaagaaaggtgtattattatag

SEQ ID NO: 59517 - protein, 207 aa, Glycine max
  peptide (1)..(207): Ceres Seq. ID no. 14303454
  misc_feature (45)..(199): Homolog of NCBI NO: 20455196 NR Description: Pectinesterase inhibitor (Pectin methylesterase
  misc_feature (19)..(199): Homolog of NCBI NO: 27544452 NR Description: pectinmethylesterase inhibitor [Actinidia
  misc_feature (45)..(195): Homolog of NCBI NO: 32395573 NR Description: seed specific protein Bn15D12A [Brassica napus]
  misc_feature (43)..(185): Homolog of NCBI NO: 15237978 NR Description: invertase/pectin methylesterase inhibitor family
  misc_feature (18)..(183): Homolog of NCBI NO: 15237982 NR Description: invertase/pectin methylesterase inhibitor -
  misc_feature (45)..(195): Homolog of NCBI NO: 15237979 NR Description: invertase/pectin methylesterase inhibitor -
  misc_feature (41)..(195): Homolog of NCBI NO: 29839547 NR Description: Putative invertase inhibitor precursor (Pollen
  misc_feature (45)..(195): Homolog of NCBI NO: 21536868 NR Description: unknown [Arabidopsis thaliana]
  misc_feature (18)..(195): Homolog of NCBI NO: 7489247 NR Description: pistil-specific protein sts15 - potato
  misc_feature (22)..(202): Homolog of NCBI NO: 15240961 NR Description: hypothetical protein [Arabidopsis thaliana]
LTLTPFSVYTKQMMLQPSFLCFSFMFLITLPLGKSSTTLNVPKDIINQTCQKCANQSIILSYNLCSTSLPAVPVSHSANLEGLALVAMELALENVTSTLATIEKLLDSTSLDNFALGCLADCLELYSDAAWTIVNSVGVFLSGNYDVTRIWMSSVMEAASTCQQGFTGRGEASPLTQENYNLFQLCGIALCIIHLATPGVPSQLIHR

SEQ ID NO: 59518 - protein, 195 aa, Glycine max
  peptide (1)..(195): Ceres Seq. ID no. 14303455
  misc_feature (33)..(187): Homolog of NCBI NO: 20455196 NR Description: Pectinesterase inhibitor (Pectin methylesterase
  misc_feature (7)..(187): Homolog of NCBI NO: 27544452 NR Description: pectinmethylesterase inhibitor [Actinidia
  misc_feature (33)..(183): Homolog of NCBI NO: 32395573 NR Description: seed specific protein Bn15D12A [Brassica napus]
  misc_feature (31)..(173): Homolog of NCBI NO: 15237978 NR Description: invertase/pectin methylesterase inhibitor family
  misc_feature (6)..(171): Homolog of NCBI NO: 15237982 NR Description: invertase/pectin methylesterase inhibitor -
  misc_feature (33)..(183): Homolog of NCBI NO: 15237979 NR Description: invertase/pectin methylesterase inhibitor -
  misc_feature (29)..(183): Homolog of NCBI NO: 29839547 NR Description: Putative invertase inhibitor precursor (Pollen
  misc_feature (33)..(183): Homolog of NCBI NO: 21536868 NR Description: unknown [Arabidopsis thaliana]
  misc_feature (6)..(183): Homolog of NCBI NO: 7489247 NR Description: pistil-specific protein sts15 - potato
  misc_feature (10)..(190): Homolog of NCBI NO: 15240961 NR Description: hypothetical protein [Arabidopsis thaliana]
MMLQPSFLCFSFMFLITLPLGKSSTTLNVPKDIINQTCQKCANQSIILSYNLCSTSLPAVPVSHSANLEGLALVAMELALENVTSTLATIEKLLDSTSLDNFALGCLADCLELYSDAAWTIVNSVGVFLSGNYDVTRIWMSSVMEAASTCQQGFTGRGEASPLTQENYNLFQLCGIALCIIHLATPGVPSQLIHR

SEQ ID NO: 59519 - protein, 194 aa, Glycine max
  peptide (1)..(194): Ceres Seq. ID no. 14303456
  misc_feature (32)..(186): Homolog of NCBI NO: 20455196 NR Description: Pectinesterase inhibitor (Pectin methylesterase
  misc_feature (6)..(186): Homolog of NCBI NO: 27544452 NR Description: pectinmethylesterase inhibitor [Actinidia
  misc_feature (32)..(182): Homolog of NCBI NO: 32395573 NR Description: seed specific protein Bn15D12A [Brassica napus]
  misc_feature (30)..(172): Homolog of NCBI NO: 15237978 NR Description: invertase/pectin methylesterase inhibitor family
  misc_feature (5)..(170): Homolog of NCBI NO: 15237982 NR Description: invertase/pectin methylesterase inhibitor -
  misc_feature (32)..(182): Homolog of NCBI NO: 15237979 NR Description: invertase/pectin methylesterase inhibitor -
  misc_feature (28)..(182): Homolog of NCBI NO: 29839547 NR Description: Putative invertase inhibitor precursor (Pollen
  misc_feature (32)..(182): Homolog of NCBI NO: 21536868 NR Description: unknown [Arabidopsis thaliana]
  misc_feature (5)..(182): Homolog of NCBI NO: 7489247 NR Description: pistil-specific protein sts15 - potato
  misc_feature (9)..(189): Homolog of NCBI NO: 15240961 NR Description: hypothetical protein [Arabidopsis thaliana]
MLQPSFLCFSFMFLITLPLGKSSTTLNVPKDIINQTCQKCANQSIILSYNLCSTSLPAVPVSHSANLEGLALVAMELALENVTSTLATIEKLLDSTSLDNFALGCLADCLELYSDAAWTIVNSVGVFLSGNYDVTRIWMSSVMEAASTCQQGFTGRGEASPLTQENYNLFQLCGIALCIIHLATPGVPSQLIHR

SEQ ID NO: 59520 - DNA, 1198 bp, Glycine max
  misc_feature (1)..(1198): Ceres Seq. ID no. 14313038
agtttactttagagaggttttatttttatctcgcgtgaagtatcaagtgggaaatttcttttattaggtgatgttggaattagtgcttcaggtgtaataattcttgtggagaaattcacattcacaattgctactagtcttgactcttgagaatatttcatcaattcccttcttcccttttatgtttgatctttatttgacattgaccttgctgaaagcatacgttttggccagcaaaattcatcattccctttttgtactattattattattattattagtgcacctttaatgttaggttgataaaagttgttacaatttagctttcattaattggggtattttagaataggcatgttgttcaaataaaagcactttgctagattcttaaattgaagcctaagttctctgttttggcttaatggaagggcatctaaaaatggtgcttacatccgagactggtcttgagcctaaagagcaaaggttactatttagagggaaagagaaagaggatgaggaatgcttgcatatggtgggagtgaaagacatgtctaaggttatattgctagaggatccagccagcaaagagagaaagcttgaggagatgcataagagtgaagatatctcaaaggcatgtgaagccatctccaaagtcagaacagaagttgacaagctatatcaaaaggtggttgctttggagacaactgtttgtggtggtgctaaggttgaagacaaagaatttgctatcttgacagaattgctaatggttcaattgcttaaactggattccattgctgctgagggagaagccaaagggcagagaagagttgaggttcgtcgtgtacagagttatgtggacacaattgacaacctgaaggcaagaaattttgctgcatttagcaatgctggtaacaatgcagtccctgtgatttgggaggccttggaatccggagttggaagcttgaagtcaccaacttcatttccaacatctacagtgattactcaaaactgggagcactttgaataaatacaagttaatccttccactttatttatagaagaggcttctatgatgacacttggttttttgtaatgacaagctgtttttggtagggaagggttatgcttgtacaaaattaatacatgtacatgttacttctctatgtccaaataaacactgattttgccttgtgtgttc

SEQ ID NO: 59521 - protein, 201 aa, Glycine max
  peptide (1)..(201): Ceres Seq. ID no. 14313039
  misc_feature (71)..(152): Pfam Name: BAG domain Pfam Description: BAG domain
  misc_feature (14)..(156): Homolog of NCBI NO: 10334497 NR Description: hypothetical protein [Cicer arietinum]
  misc_feature (3)..(157): Homolog of NCBI NO: 21537107 NR Description: unknown [Arabidopsis thaliana]
  misc_feature (3)..(157): Homolog of NCBI NO: 15240726 NR Description: BAG domain containing protein [Arabidopsis
  misc_feature (3)..(158): Homolog of NCBI NO: 15242267 NR Description: BAG domain containing protein [Arabidopsis
  misc_feature (3)..(163): Homolog of NCBI NO: 34898024 NR Description: ESTs AU082174(S13676),AU032395(R3986) correspond a region of the predicted gene.~Similar to Arabidopsis thaliana
  misc_feature (3)..(163): Homolog of NCBI NO: 25553557 NR Description: OSJNBa0038F22.4 [Oryza sativa (japonica
  misc_feature (3)..(201): Homolog of NCBI NO: 21554254 NR Description: unknown [Arabidopsis thaliana]
  misc_feature (3)..(201): Homolog of NCBI NO: 19699283 NR Description: At3g51780/ORF3 [Arabidopsis thaliana]
  misc_feature (3)..(201): Homolog of NCBI NO: 15231035 NR Description: expressed protein [Arabidopsis thaliana]
  misc_feature (2)..(201): Homolog of NCBI NO: 34907972 NR Description: P0446G04.18 [Oryza sativa (japonica
MEGHLKMVLTSETGLEPKEQRLLFRGKEKEDEECLHMVGVKDMSKVILLEDPASKERKLEEMHKSEDISKACEAISKVRTEVDKLYQKVVALETTVCGGAKVEDKEFAILTELLMVQLLKLDSIAAEGEAKGQRRVEVRRVQSYVDTIDNLKARNFAAFSNAGNNAVPVIWEALESGVGSLKSPTSFPTSTVITQNWEHFE

SEQ ID NO: 59522 - protein, 195 aa, Glycine max
  peptide (1)..(195): Ceres Seq. ID no. 14313040
  misc_feature (65)..(146): Pfam Name: BAG domain Pfam Description: BAG domain
  misc_feature (8)..(150): Homolog of NCBI NO: 10334497 NR Description: hypothetical protein [Cicer arietinum]
  misc_feature (1)..(151): Homolog of NCBI NO: 21537107 NR Description: unknown [Arabidopsis thaliana]
  misc_feature (1)..(151): Homolog of NCBI NO: 15240726 NR Description: BAG domain containing protein [Arabidopsis
  misc_feature (1)..(152): Homolog of NCBI NO: 15242267 NR Description: BAG domain containing protein [Arabidopsis
  misc_feature (1)..(157): Homolog of NCBI NO: 34898024 NR Description: ESTs AU082174(S13676),AU032395(R3986) correspond a region of the predicted gene.~Similar to Arabidopsis thaliana
  misc_feature (1)..(157): Homolog of NCBI NO: 25553557 NR Description: OSJNBa0038F22.4 [Oryza sativa (japonica
  misc_feature (1)..(195): Homolog of NCBI NO: 19699283 NR Description: At3g51780/ORF3 [Arabidopsis thaliana]
  misc_feature (1)..(195): Homolog of NCBI NO: 21554254 NR Description: unknown [Arabidopsis thaliana]
  misc_feature (1)..(195): Homolog of NCBI NO: 15231035 NR Description: expressed protein [Arabidopsis thaliana]
  misc_feature (1)..(195): Homolog of NCBI NO: 34907972 NR Description: P0446G04.18 [Oryza sativa (japonica
MVLTSETGLEPKEQRLLFRGKEKEDEECLHMVGVKDMSKVILLEDPASKERKLEEMHKSEDISKACEAISKVRTEVDKLYQKVVALETTVCGGAKVEDKEFAILTELLMVQLLKLDSIAAEGEAKGQRRVEVRRVQSYVDTIDNLKARNFAAFSNAGNNAVPVIWEALESGVGSLKSPTSFPTSTVITQNWEHFE

SEQ ID NO: 59523 - protein, 165 aa, Glycine max
  peptide (1)..(165): Ceres Seq. ID no. 14313041
  misc_feature (35)..(116): Pfam Name: BAG domain Pfam Description: BAG domain
  misc_feature (1)..(120): Homolog of NCBI NO: 10334497 NR Description: hypothetical protein [Cicer arietinum]
  misc_feature (1)..(121): Homolog of NCBI NO: 21537107 NR Description: unknown [Arabidopsis thaliana]
  misc_feature (1)..(121): Homolog of NCBI NO: 15240726 NR Description: BAG domain containing protein [Arabidopsis
  misc_feature (1)..(122): Homolog of NCBI NO: 15242267 NR Description: BAG domain containing protein [Arabidopsis
  misc_feature (1)..(127): Homolog of NCBI NO: 34898024 NR Description: ESTs AU082174(S13676),AU032395(R3986) correspond a region of the predicted gene.~Similar to Arabidopsis thaliana
  misc_feature (1)..(127): Homolog of NCBI NO: 25553557 NR Description: OSJNBa0038F22.4 [Oryza sativa (japonica
  misc_feature (1)..(165): Homolog of NCBI NO: 21554254 NR Description: unknown [Arabidopsis thaliana]
  misc_feature (1)..(165): Homolog of NCBI NO: 19699283 NR Description: At3g51780/ORF3 [Arabidopsis thaliana]
  misc_feature (1)..(165): Homolog of NCBI NO: 15231035 NR Description: expressed protein [Arabidopsis thaliana]
  misc_feature (1)..(165): Homolog of NCBI NO: 34907972 NR Description: P0446G04.18 [Oryza sativa (japonica
MVGVKDMSKVILLEDPASKERKLEEMHKSEDISKACEAISKVRTEVDKLYQKVVALETTVCGGAKVEDKEFAILTELLMVQLLKLDSIAAEGEAKGQRRVEVRRVQSYVDTIDNLKARNFAAFSNAGNNAVPVIWEALESGVGSLKSPTSFPTSTVITQNWEHFE

SEQ ID NO: 59524 - DNA, 1102 bp, Glycine max
  misc_feature (1)..(1102): Ceres Seq. ID no. 14303970
acctaagattcagaatgtctggtcgtcactccgattccgattccaagcgatgccattctagattcgattcagaccccaacaagagatatagaagggatgaatatggaaaagaagacagagagagagtgtcaagtagcactgatgttcaaaatgaagctcttttcgctaagcacaacaaaccaaatgatcctatccaacttccaacatctctctcttattttcagcacaatgaacaaggtggcactgggcaggttggccgaagctctggtcaaaggaaggagcgtggacggtggaaggacacaaagaaacggtttaatattaatgaaagggaagagaaaaatcatggtagagagcagagaaatgagaaatcacaagctaaactggatgataatactttccagagaagagatggttttaccggaaggtcgagaaaaagagcttcatttagagagaagaagattgtagcggattcaggtgatgctaatgtggctgcagtaaagtcaggccagaaggaggaaagaaacagcaatccacagcatttggatagacctgagaagcattttgcagatgacaagggtgaagctaggaggggaagaaggtatggaggcaatgacagttacaagggaagagataaatttaatggaagacaaggctatcgtcctgagaagtggaaacatgatttgtatcaagaggtaaataaggatcccattccagagaatgaggatggccagattgcgaagctggaagcactcttggcttcataatatcatacgtgtgtatgtgtcaagctatcaccatcttcaactgtcaattttagaagatgcaaactagattcaattgaggcaggcaggttttaaaattggaatggagcacagagcaatttgcaatttggaattgtaataaagcatttttgcttgttttagacaatttctagttcgcaaagtatctacatgtctatgatttttattttggtcaatttatgtacacaccactattacggtggtttagctgaattggaaaagagtgtctcaattgcatgatcgccggttatggacatcacatatgtgaaagtagattttttaactttaaggtgaatttaatt

SEQ ID NO: 59525 - protein, 253 aa, Glycine max
  peptide (1)..(253): Ceres Seq. ID no. 14303971
  misc_feature (10)..(253): Pfam Name: Semenogelin Pfam Description: Semenogelin
  misc_feature (86)..(253): Homolog of NCBI NO: 15230914 NR Description: expressed protein [Arabidopsis thaliana]
LRFRMSGRHSDSDSKRCHSRFDSDPNKRYRRDEYGKEDRERVSSSTDVQNEALFAKHNKPNDPIQLPTSLSYFQHNEQGGTGQVGRSSGQRKERGRWKDTKKRFNINEREEKNHGREQRNEKSQAKLDDNTFQRRDGFTGRSRKRASFREKKIVADSGDANVAAVKSGQKEERNSNPQHLDRPEKHFADDKGEARRGRRYGGNDSYKGRDKFNGRQGYRPEKWKHDLYQEVNKDPIPENEDGQIAKLEALLAS

SEQ ID NO: 59526 - protein, 249 aa, Glycine max
  peptide (1)..(249): Ceres Seq. ID no. 14303972
  misc_feature (6)..(249): Pfam Name: Semenogelin Pfam Description: Semenogelin
  misc_feature (82)..(249): Homolog of NCBI NO: 15230914 NR Description: expressed protein [Arabidopsis thaliana]
MSGRHSDSDSKRCHSRFDSDPNKRYRRDEYGKEDRERVSSSTDVQNEALFAKHNKPNDPIQLPTSLSYFQHNEQGGTGQVGRSSGQRKERGRWKDTKKRFNINEREEKNHGREQRNEKSQAKLDDNTFQRRDGFTGRSRKRASFREKKIVADSGDANVAAVKSGQKEERNSNPQHLDRPEKHFADDKGEARRGRRYGGNDSYKGRDKFNGRQGYRPEKWKHDLYQEVNKDPIPENEDGQIAKLEALLAS

SEQ ID NO: 59527 - DNA, 1401 bp, Glycine max
  misc_feature (1)..(1401): Ceres Seq. ID no. 15225703
aannnnnngggccccccctcgagtcagctacgtaggccccccccccgataatctctgtttgtgaagttcttactgcggcagttagtaaatgacatacccttgccactaactaatgtcctctcattcccccgtttaaactcattcaccaattccacctctataaactataaacaccttacgttacagaataaaagtttctgactgacagaaattatggccagaagagatcttgaaagtggcggtggagtaaccaagaacaacagaagtgcagaggaaaactactctgcgcccgaatcttcccatgtttatgattctgagacccattggacatcatggctcgtgcccatgtttgtggttgctaatattgctgtctttgttattaccatgtacatcaacaattgtcccaggaacaaccttcgtttccaaggtcgctgcgtggcaaggtttcttggaaggttctcttttcagcctatgcaggagaatcccttgcttggtccttcttcttcaacattgaccaagatgggagctcttcgatgggataatgttgtgaatagacatcagggatggagacttgtcacttgcatttggttacatgctggggttattcatttgctggctaatatgttgagtctggtcttcattggcattcgccttgaacaacaattcgggtttattaagattggaatcatatacttggtgtctgggtttggtggaagtgtactgtcgtctctatttatcagagaccacatctctgtgggtgcttctggtgccctttttggacttcttggcgcaatgctgtctgaacttatcacaaactggactatatattccaataaagcaatggctttaataacccttctagtgatcattgtaatcaaccttggcattggcattttgccacacgtagataattttgctcacatcggaggattcctggtgggattactccttggctttattttgctgccacgtcctcagttcggttggttagagcagcgacgtcttcctgccggtgttcagatgaagtcaaagtacaagactcaccaatatgttctaggggttgtgtctcttattctgttgattgcagggttatcgactgcattggtgatgctatttcggggtgagaaagggtatgaccactgccattggtgtcgctacttaacatgtgtccctacttctaaatgggaatgcagcaatgacagttaaataagaaaggggaaatgattttcacttgcaatatcttttcttgtgtatagccatagagctcttagaaactggcttgttttgtctcttttagttttttttgttctttaaataattggtctgcctttatgaatttatgctttttttaaaaaaaaaattatacatattagtatatgatatataaagaaatttgcttgt

SEQ ID NO: 59528 - protein, 330 aa, Glycine max
  peptide (1)..(330): Ceres Seq. ID no. 15225704
  misc_feature (35)..(324): Homolog of NCBI NO: 15236387 NR Description: membrane protein, Rhomboid family [Arabidopsis
  misc_feature (5)..(329): Homolog of NCBI NO: 11357824 NR Description: hypothetical protein F5K20.80 - Arabidopsis
  misc_feature (25)..(326): Homolog of NCBI NO: 38344377 NR Description: OSJNBb0032E06.11 [Oryza sativa (japonica
  misc_feature (27)..(326): Homolog of NCBI NO: 25402744 NR Description: protein T12C24.28 [imported] - Arabidopsis
  misc_feature (27)..(326): Homolog of NCBI NO: 15222058 NR Description: membrane protein, Rhomboid family [Arabidopsis
  misc_feature (2)..(328): Homolog of NCBI NO: 37536172 NR Description: putative membrane protein
  misc_feature (5)..(329): Homolog of NCBI NO: 30693911 NR Description: membrane protein, Rhomboid family [Arabidopsis
  misc_feature (38)..(327): Homolog of NCBI NO: 294845 NR Description: membrane protein [Saccharum hybrid cultivar
  misc_feature (36)..(328): Homolog of NCBI NO: 15240744 NR Description: membrane protein, Rhomboid family [Arabidopsis
  misc_feature (1)..(326): Homolog of NCBI NO: 15221690 NR Description: membrane protein, Rhomboid family [Arabidopsis
MARRDLESGGGVTKNNRSAEENYSAPESSHVYDSETHWTSWLVPMFVVANIAVFVITMYINNCPRNNLRFQGRCVARFLGRFSFQPMQENPLLGPSSSTLTKMGALRWDNVVNRHQGWRLVTCIWLHAGVIHLLANMLSLVFIGIRLEQQFGFIKIGIIYLVSGFGGSVLSSLFIRDHISVGASGALFGLLGAMLSELITNWTIYSNKAMALITLLVIIVINLGIGILPHVDNFAHIGGFLVGLLLGFILLPRPQFGWLEQRRLPAGVQMKSKYKTHQYVLGVVSLILLIAGLSTALVMLFRGEKGYDHCHWCRYLTCVPTSKWECSNDS

SEQ ID NO: 59529 - protein, 286 aa, Glycine max
  peptide (1)..(286): Ceres Seq. ID no. 15225705
  misc_feature (1)..(280): Homolog of NCBI NO: 15236387 NR Description: membrane protein, Rhomboid family [Arabidopsis
  misc_feature (1)..(285): Homolog of NCBI NO: 11357824 NR Description: hypothetical protein F5K20.80 - Arabidopsis
  misc_feature (1)..(282): Homolog of NCBI NO: 38344377 NR Description: OSJNBb0032E06.11 [Oryza sativa (japonica
  misc_feature (1)..(282): Homolog of NCBI NO: 25402744 NR Description: protein T12C24.28 [imported] - Arabidopsis
  misc_feature (1)..(282): Homolog of NCBI NO: 15222058 NR Description: membrane protein, Rhomboid family [Arabidopsis
  misc_feature (1)..(284): Homolog of NCBI NO: 37536172 NR Description: putative membrane protein
  misc_feature (1)..(285): Homolog of NCBI NO: 30693911 NR Description: membrane protein, Rhomboid family [Arabidopsis
  misc_feature (1)..(283): Homolog of NCBI NO: 294845 NR Description: membrane protein [Saccharum hybrid cultivar
  misc_feature (1)..(284): Homolog of NCBI NO: 15240744 NR Description: membrane protein, Rhomboid family [Arabidopsis
  misc_feature (1)..(282): Homolog of NCBI NO: 15221690 NR Description: membrane protein, Rhomboid family [Arabidopsis
MFVVANIAVFVITMYINNCPRNNLRFQGRCVARFLGRFSFQPMQENPLLGPSSSTLTKMGALRWDNVVNRHQGWRLVTCIWLHAGVIHLLANMLSLVFIGIRLEQQFGFIKIGIIYLVSGFGGSVLSSLFIRDHISVGASGALFGLLGAMLSELITNWTIYSNKAMALITLLVIIVINLGIGILPHVDNFAHIGGFLVGLLLGFILLPRPQFGWLEQRRLPAGVQMKSKYKTHQYVLGVVSLILLIAGLSTALVMLFRGEKGYDHCHWCRYLTCVPTSKWECSNDS

SEQ ID NO: 59530 - protein, 273 aa, Glycine max
  peptide (1)..(273): Ceres Seq. ID no. 15225706
  misc_feature (1)..(267): Homolog of NCBI NO: 15236387 NR Description: membrane protein, Rhomboid family [Arabidopsis
  misc_feature (1)..(272): Homolog of NCBI NO: 11357824 NR Description: hypothetical protein F5K20.80 - Arabidopsis
  misc_feature (1)..(269): Homolog of NCBI NO: 38344377 NR Description: OSJNBb0032E06.11 [Oryza sativa (japonica
  misc_feature (1)..(269): Homolog of NCBI NO: 25402744 NR Description: protein T12C24.28 [imported] - Arabidopsis
  misc_feature (1)..(269): Homolog of NCBI NO: 15222058 NR Description: membrane protein, Rhomboid family [Arabidopsis
  misc_feature (1)..(271): Homolog of NCBI NO: 37536172 NR Description: putative membrane protein
  misc_feature (1)..(272): Homolog of NCBI NO: 30693911 NR Description: membrane protein, Rhomboid family [Arabidopsis
  misc_feature (1)..(270): Homolog of NCBI NO: 294845 NR Description: membrane protein [Saccharum hybrid cultivar
  misc_feature (1)..(271): Homolog of NCBI NO: 15240744 NR Description: membrane protein, Rhomboid family [Arabidopsis
  misc_feature (1)..(269): Homolog of NCBI NO: 15221690 NR Description: membrane protein, Rhomboid family [Arabidopsis
MYINNCPRNNLRFQGRCVARFLGRFSFQPMQENPLLGPSSSTLTKMGALRWDNVVNRHQGWRLVTCIWLHAGVIHLLANMLSLVFIGIRLEQQFGFIKIGIIYLVSGFGGSVLSSLFIRDHISVGASGALFGLLGAMLSELITNWTIYSNKAMALITLLVIIVINLGIGILPHVDNFAHIGGFLVGLLLGFILLPRPQFGWLEQRRLPAGVQMKSKYKTHQYVLGVVSLILLIAGLSTALVMLFRGEKGYDHCHWCRYLTCVPTSKWECSNDS

SEQ ID NO: 59531 - DNA, 1330 bp, Glycine max
  misc_feature (1)..(1330): Ceres Seq. ID no. 15172032
tctttggatctcacagccgccgctcgcggtggtgccaccgttgcactctccgctgctctctattcgatctccctctcaccgatactaagaaggtaaagtcgttaacgatggacgaagtctctggtagtaagagttgtggcactttggctctttctggaggttgatgaaggctatagttggatgaacacaactgaaatgaatggaaaccagcaccgttacaatcctttgctaatcagtaagcattgacaaggttcaaataaggctctgcgtttagattcggtgcagaatcagaggttggataagttgaattactaacttagataataattataattgtggaggtagtgaaattgaacagtggaaggcacgtgaagatgaaggtggacaaacagtggacattatgcgtattattttaacttatgggcttgatccaattaatggttcagtggagaacaaaccatgtctaacgaaaagggtagaagaatctgggagaagactgctgaaagaaatagtagagcacagtaacaaagcggaaaattctaattttccagacagcacagaggttgtcactggacatgttaaatgagcaagacaagggaaaaatagatgtttcaaatatgaagcaaggcgactggctttgcccgaagtagaacttaatttccatctactaattatttattgtattaaattgaaatcttgtgctagtttctcctgcacttgtttatgttttcattttcaattttcattggccagatgcaatttcatgaactttactagaaacattaggtgcttgcgctgtgacagcttctttgaggaaagaatcaaccaattgaaggaggataataatcaccttcctttgaagaagggagactggatatgcaataagtaatggttgttattatcttgtaggcttatatgacactagtatttaattttaaattataatcaattttgatttttgaagatgcaatttcctaaattttgcaaagaatacaagatgtttgcaatgcaaagaaaggacttccaatcgtcaaattaatcccggggagtggtaatgtgactcaggtgcatctacatcaatttcagaagaaacatggttttcctgaaatgtgatcatagacgccttatagtgtcaaaggcttcaagctcttcccttcaacctcagccagaagatatagaccacgataagaatagcaaatttgcctttgtggcacattagggtaatagaagtgatgaaacaccaatggtgtttgaaagaaaaaataggaacaaagattcacctatgtggagatttgtagaggattgaaatgaaaataacaagtgcttaaat

SEQ ID NO: 59532 - protein, 61 aa, Glycine max
  peptide (1)..(61): Ceres Seq. ID no. 15172033
  misc_feature (1)..(41): Homolog of NCBI NO: 25372841 NR Description: hypothetical protein F5A18.17 [imported] -
  misc_feature (1)..(41): Homolog of NCBI NO: 21593408 NR Description: unknown [Arabidopsis thaliana]
  misc_feature (1)..(41): Homolog of NCBI NO: 18409643 NR Description: expressed protein [Arabidopsis thaliana]
MRIILTYGLDPINGSVENKPCLTKRVEESGRRLLKEIVEHSNKAENSNFPDSTEVVTGHVK

SEQ ID NO: 59533 - protein, 53 aa, Glycine max
  peptide (1)..(53): Ceres Seq. ID no. 15172034
FGSHSRRSRWCHRCTLRCSLFDLPLTDTKKVKSLTMDEVSGSKSCGTLALSGG

SEQ ID NO: 59534 - protein, 41 aa, Glycine max
  peptide (1)..(41): Ceres Seq. ID no. 15172035
  misc_feature (1)..(41): Homolog of NCBI NO: 21593408 NR Description: unknown [Arabidopsis thaliana]
  misc_feature (1)..(41): Homolog of NCBI NO: 18409643 NR Description: expressed protein [Arabidopsis thaliana]
  misc_feature (1)..(41): Homolog of NCBI NO: 25372841 NR Description: hypothetical protein F5A18.17 [imported] -
  misc_feature (1)..(41): Homolog of NCBI NO: 13324787 NR Description: hypothetical protein [Oryza sativa]
  misc_feature (1)..(39): Homolog of NCBI NO: 21593408 NR Description: unknown [Arabidopsis thaliana]
  misc_feature (1)..(39): Homolog of NCBI NO: 18409643 NR Description: expressed protein [Arabidopsis thaliana]
MNFTRNIRCLRCDSFFEERINQLKEDNNHLPLKKGDWICNK

SEQ ID NO: 59535 - DNA, 1304 bp, Glycine max
  misc_feature (1)..(1304): Ceres Seq. ID no. 13593946
actaataattttatggctaaatgtaatgatttagtctttaacaatgtttgcatgtctatttattgtattacttttagttgctaattcttcagcatgaacaattaagattttccaaggataattctggtcacatattattaaaattacttactttgataggaataggctaataaataatgataataataataatccatcacatgggaaaggtgtattgaaaagatgctgttgaatttaccgatgaagttcctagttgggccaccttgtacaactaaatataatgcactatgtttctataaagattttgatatatggtgatcctatctaatttcgtatgatattaaactatcatcatctgatgcgatattacctgatatatctctggagacgatgggggcttattgtatactgagttactttacaggtgatgaatgaaggacctggacacatcccaatgcacaagattcctgaaaacatgcagaaacagttagaatggtgtagtgaagcgcctttttacactcttggtcctttaacaactgatattgcccccggctatgatcacatcacctctgcaattggtgctgccaatattggggcacttggtactgctcttctctgttatgtgactccaaaggaacatcttgggttgccaaaccgggatgacgtgaaggctggagttatagcctacaagatagcggctcatgctgctgatttagccaaaggtcatccatatgctcaagcctgggatgatgcattaagcaaggcaagatttgagttccgatggatggaccagtttgctttgtcattggatccgatgacagccatgtccttccatgacgaaaccctgccagcagatggtgcaaaagtggctcatttctgctcaatgtgtggccctaaattctgctctatgaagataacggaggatgtgaggaagtatgctgaggaacatggctatggaactgatgaagctttgcagcgtgggatggatgctatgagtgctgaatttcaagctgccaagaaaactatcagcggggagcaacatggtgaagctggcggagagatttacttgccagaagaatacgttagttccaagaggacttaaatggagcaaatcagttggaagaacttggagctagcttcccaactggcttatcagggtgtggagaagcattattaagccttaggaataggagagtaagtactgtttgtgaatgtctttggtttaagaactccgtcttatgtcaacttgtattctgttatacagttctcagcaataaactgctctggcaatctagtttcatgtg

SEQ ID NO: 59536 - protein, 224 aa, Glycine max
  peptide (1)..(224): Ceres Seq. ID no. 13593947
  misc_feature (1)..(168): Pfam Name: ThiC family Pfam Description: ThiC family
  misc_feature (1)..(194): Homolog of NCBI NO: 21397689 NR Description: ThiC, ThiC family [Bacillus anthracis A2012]
  misc_feature (1)..(196): Homolog of NCBI NO: 30023259 NR Description: Thiamine biosynthesis protein thiC [Bacillus
  misc_feature (1)..(193): Homolog of NCBI NO: 16077944 NR Description: thiA [Bacillus subtilis]
  misc_feature (1)..(214): Homolog of NCBI NO: 23107129 NR Description: hypothetical protein [Novosphingobium
  misc_feature (1)..(193): Homolog of NCBI NO: 22988228 NR Description: hypothetical protein [Burkholderia fungorum]
  misc_feature (1)..(194): Homolog of NCBI NO: 23137373 NR Description: hypothetical protein [Cytophaga hutchinsonii]
  misc_feature (1)..(196): Homolog of NCBI NO: 15614496 NR Description: thiamin biosynthesis protein [Bacillus
  misc_feature (1)..(222): Homolog of NCBI NO: 34897012 NR Description: putative thiamin biosynthesis protein [Oryza
  misc_feature (1)..(222): Homolog of NCBI NO: 12240033 NR Description: putative thiamine biosythesis protein ThiC [Poa
  misc_feature (1)..(221): Homolog of NCBI NO: 15227584 NR Description: thiamin biosynthesis protein -related
MNEGPGHIPMHKIPENMQKQLEWCSEAPFYTLGPLTTDIAPGYDHITSAIGAANIGALGTALLCYVTPKEHLGLPNRDDVKAGVIAYKIAAHAADLAKGHPYAQAWDDALSKARFEFRWMDQFALSLDPMTAMSFHDETLPADGAKVAHFCSMCGPKFCSMKITEDVRKYAEEHGYGTDEALQRGMDAMSAEFQAAKKTISGEQHGEAGGEIYLPEEYVSSKRT

SEQ ID NO: 59537 - protein, 215 aa, Glycine max
  peptide (1)..(215): Ceres Seq. ID no. 13593948
  misc_feature (1)..(159): Pfam Name: ThiC family Pfam Description: ThiC family
  misc_feature (1)..(185): Homolog of NCBI NO: 21397689 NR Description: ThiC, ThiC family [Bacillus anthracis A2012]
  misc_feature (1)..(187): Homolog of NCBI NO: 30023259 NR Description: Thiamine biosynthesis protein thiC [Bacillus
  misc_feature (1)..(184): Homolog of NCBI NO: 16077944 NR Description: thiA [Bacillus subtilis]
  misc_feature (1)..(205): Homolog of NCBI NO: 23107129 NR Description: hypothetical protein [Novosphingobium
  misc_feature (1)..(184): Homolog of NCBI NO: 22988228 NR Description: hypothetical protein [Burkholderia fungorum]
  misc_feature (1)..(185): Homolog of NCBI NO: 23137373 NR Description: hypothetical protein [Cytophaga hutchinsonii]
  misc_feature (1)..(187): Homolog of NCBI NO: 15614496 NR Description: thiamin biosynthesis protein [Bacillus
  misc_feature (1)..(213): Homolog of NCBI NO: 34897012 NR Description: putative thiamin biosynthesis protein [Oryza
  misc_feature (1)..(213): Homolog of NCBI NO: 12240033 NR Description: putative thiamine biosythesis protein ThiC [Poa
  misc_feature (1)..(212): Homolog of NCBI NO: 15227584 NR Description: thiamin biosynthesis protein -related
MHKIPENMQKQLEWCSEAPFYTLGPLTTDIAPGYDHITSAIGAANIGALGTALLCYVTPKEHLGLPNRDDVKAGVIAYKIAAHAADLAKGHPYAQAWDDALSKARFEFRWMDQFALSLDPMTAMSFHDETLPADGAKVAHFCSMCGPKFCSMKITEDVRKYAEEHGYGTDEALQRGMDAMSAEFQAAKKTISGEQHGEAGGEIYLPEEYVSSKRT

SEQ ID NO: 59538 - protein, 208 aa, Glycine max
  peptide (1)..(208): Ceres Seq. ID no. 13593949
  misc_feature (1)..(152): Pfam Name: ThiC family Pfam Description: ThiC family
  misc_feature (1)..(178): Homolog of NCBI NO: 21397689 NR Description: ThiC, ThiC family [Bacillus anthracis A2012]
  misc_feature (1)..(180): Homolog of NCBI NO: 30023259 NR Description: Thiamine biosynthesis protein thiC [Bacillus
  misc_feature (1)..(177): Homolog of NCBI NO: 16077944 NR Description: thiA [Bacillus subtilis]
  misc_feature (1)..(198): Homolog of NCBI NO: 23107129 NR Description: hypothetical protein [Novosphingobium
  misc_feature (1)..(177): Homolog of NCBI NO: 22988228 NR Description: hypothetical protein [Burkholderia fungorum]
  misc_feature (1)..(178): Homolog of NCBI NO: 23137373 NR Description: hypothetical protein [Cytophaga hutchinsonii]
  misc_feature (1)..(180): Homolog of NCBI NO: 15614496 NR Description: thiamin biosynthesis protein [Bacillus
  misc_feature (1)..(206): Homolog of NCBI NO: 34897012 NR Description: putative thiamin biosynthesis protein [Oryza
  misc_feature (1)..(206): Homolog of NCBI NO: 12240033 NR Description: putative thiamine biosythesis protein ThiC [Poa
  misc_feature (1)..(205): Homolog of NCBI NO: 15227584 NR Description: thiamin biosynthesis protein -related
MQKQLEWCSEAPFYTLGPLTTDIAPGYDHITSAIGAANIGALGTALLCYVTPKEHLGLPNRDDVKAGVIAYKIAAHAADLAKGHPYAQAWDDALSKARFEFRWMDQFALSLDPMTAMSFHDETLPADGAKVAHFCSMCGPKFCSMKITEDVRKYAEEHGYGTDEALQRGMDAMSAEFQAAKKTISGEQHGEAGGEIYLPEEYVSSKRT

SEQ ID NO: 59539 - DNA, 1732 bp, Glycine max
  misc_feature (1)..(1732): Ceres Seq. ID no. 15176433
atcactcgggtggcgtgctttggcttcccttccccctcttcttagcaaatgtttcaatattccaaggccatgttgcttaatttagttcttgtttcctttgtcctcttgagttctatcagagatgggagtgcagggatcaccagctctttcgttcggccacagtggccaggagttgacattcccgtggatcatgaagtatttgcagttccaaagggttataatgcacctcaacaagtgcacatcacgcaaggtgactatgatggaaaagcagtaatagtctcatgggtgaccccagatgaaccagggactcgccatgtgcaatatggcacatcaaaggataagtttaaaactagtgcagaaggcacagttgcaaactacactttctataactacaagtctggctacattcatcattgtcttattgaaggccttgagtataagacaaaatactactatagaattggaagtggtgattctgctcgagacttttggttcgaaacacctcctaaagttgggccagatactccctacaaatttgggatcattggtgatttggggcaaacgtttaattctctttcgacccttgagcattatttggagagtggaggagaggctgtgttatatgttggagatctttcttattctgatgaacatgactacaaagatatgggtttacggtgggatacatggggccgatttgctgaaaggagtgcagcatatcagccatggatgtggaatgtgggaaaccacgaagtagagtttttgcctgaagtgggagaagttgaacctttcaaaaactatctttaccgatatactactccctattcggcttccaaaagcaccagccccctctggtatgcagtcaggcgtgcctctgctcatatcattgtgctatcaagctattctccatttgtgaagtacacgcctcaatacatatggcttaaagaagagctggcgcgggttgatagaaagaagacaccttggctcattgtgctcgtgcacaagccactctacagcagcaacgtagctcactacatggagggtgaagccatgcgatcagtttttgagacatggttcgtccaatacaaagttgatgtcatctttgccggccatgtccatgcttatgaaagatcatatcgatactccaatatagactacaacataactggcggtagaaggtatcccatacctgacaaatcagcacctatttacataacaatcggagatggaggaaatctagaaggtcttgcctcaagttatttggatccacagccagaatattctgcattcagagaagcgagctatggacacgccacactggagataaaaaacaggacccatgctatctaccactggtatcgcaatgatgacggaaagaaagtcccagctgactctctcgtattgcataaccagtattggggaagcaatggaagaaaacagaatgaggttattgatgaagttgtcaatgttaaatgaagttggagcactcgtaaatcgtaaatatggtgttttgaaaagaataaaaatgtgcctatatattgtaatgtatgtagttcaatagtctccgagcgtgcgaaaaggttccattccatgtacttggcttgtattatacagctagcgctaagaaatattaaataaacgcgcttttagcaaggagaaaacaatcgagaccaagatattatctgttcacatctgtgtataatttttgaagcgtggattattttgctgctag

SEQ ID NO: 59540 - protein, 475 aa, Glycine max
  peptide (1)..(475): Ceres Seq. ID no. 15176434
  misc_feature (161)..(359): Pfam Name: Calcineurin-like phosphoesterase Pfam Description: Calcineurin-like phosphoesterase
MFQYSKAMLLNLVLVSFVLLSSIRDGSAGITSSFVRPQWPGVDIPVDHEVFAVPKGYNAPQQVHITQGDYDGKAVIVSWVTPDEPGTRHVQYGTSKDKFKTSAEGTVANYTFYNYKSGYIHHCLIEGLEYKTKYYYRIGSGDSARDFWFETPPKVGPDTPYKFGIIGDLGQTFNSLSTLEHYLESGGEAVLYVGDLSYSDEHDYKDMGLRWDTWGRFAERSAAYQPWMWNVGNHEVEFLPEVGEVEPFKNYLYRYTTPYSASKSTSPLWYAVRRASAHIIVLSSYSPFVKYTPQYIWLKEELARVDRKKTPWLIVLVHKPLYSSNVAHYMEGEAMRSVFETWFVQYKVDVIFAGHVHAYERSYRYSNIDYNITGGRRYPIPDKSAPIYITIGDGGNLEGLASSYLDPQPEYSAFREASYGHATLEIKNRTHAIYHWYRNDDGKKVPADSLVLHNQYWGSNGRKQNEVIDEVVNVK

SEQ ID NO: 59541 - protein, 468 aa, Glycine max
  peptide (1)..(468): Ceres Seq. ID no. 15176435
  misc_feature (154)..(352): Pfam Name: Calcineurin-like phosphoesterase Pfam Description: Calcineurin-like phosphoesterase
MLLNLVLVSFVLLSSIRDGSAGITSSFVRPQWPGVDIPVDHEVFAVPKGYNAPQQVHITQGDYDGKAVIVSWVTPDEPGTRHVQYGTSKDKFKTSAEGTVANYTFYNYKSGYIHHCLIEGLEYKTKYYYRIGSGDSARDFWFETPPKVGPDTPYKFGIIGDLGQTFNSLSTLEHYLESGGEAVLYVGDLSYSDEHDYKDMGLRWDTWGRFAERSAAYQPWMWNVGNHEVEFLPEVGEVEPFKNYLYRYTTPYSASKSTSPLWYAVRRASAHIIVLSSYSPFVKYTPQYIWLKEELARVDRKKTPWLIVLVHKPLYSSNVAHYMEGEAMRSVFETWFVQYKVDVIFAGHVHAYERSYRYSNIDYNITGGRRYPIPDKSAPIYITIGDGGNLEGLASSYLDPQPEYSAFREASYGHATLEIKNRTHAIYHWYRNDDGKKVPADSLVLHNQYWGSNGRKQNEVIDEVVNVK

SEQ ID NO: 59542 - protein, 269 aa, Glycine max
  peptide (1)..(269): Ceres Seq. ID no. 15176436
  misc_feature (1)..(153): Pfam Name: Calcineurin-like phosphoesterase Pfam Description: Calcineurin-like phosphoesterase
MGLRWDTWGRFAERSAAYQPWMWNVGNHEVEFLPEVGEVEPFKNYLYRYTTPYSASKSTSPLWYAVRRASAHIIVLSSYSPFVKYTPQYIWLKEELARVDRKKTPWLIVLVHKPLYSSNVAHYMEGEAMRSVFETWFVQYKVDVIFAGHVHAYERSYRYSNIDYNITGGRRYPIPDKSAPIYITIGDGGNLEGLASSYLDPQPEYSAFREASYGHATLEIKNRTHAIYHWYRNDDGKKVPADSLVLHNQYWGSNGRKQNEVIDEVVNVK

SEQ ID NO: 59543 - DNA, 1337 bp, Glycine max
  misc_feature (1)..(1337): Ceres Seq. ID no. 14313064
actcgaactcatcatttctaattgttctgatccatatatatcatactttctttgtaataacttaaagaaccccacaaaaacaccaaccatgtccacaattgcaaagagagatttgagttctaatgaagaagagagtgagctgagaagaggtccttggactcttgaagaagacagcttactcatacactatattgctcgtcatggtgaaggccgttggaatatgttagccaaaagtgcaggattgaagaggactggaaaaagttgcagacttagatggctgaattatttgaaaccagacattaagagagggaacctcactccacaggagcaactcttgatccttgaactccattccaagtggggtaacaggtggtcaaaaattgctcagcatctgccaggaagaacagacaatgagatcaagaactattggagaacaaggatacagaaacaggcacgccaacttaacattgaatctggtagcaagagattcattgatgctgtcaagtgtttttggatgccaagattgctccaaaagatggaacagagcaattctccaagccctcatcactcttccatgacaaacatgatgaatttagggaattccggagaagcttctatgagttcaatgtcaagcagcttcaatattaatccttctatgtcttcttcctcatctcctccacaaagggaatttattatggatgatgcaaatcattttaatactatgtccaaccccatcaatccatccccagattccttccaattttcacagctacttgaaatttctgaacaccccaaaagtccttcaaatgtgtttgagaacaatgtttgcagttatccaatccaggacaattgctatgttgataccaataactatggcatggaaggcataaacatggatcccctttcagcaatggatacttacgacttcccacagtttgattttcagacagcaggaaatggatggatgctagacagcatgggggattctactttatggaacatggaggctatgtgacagtgttggcaagagaaggcatgcatctcaagctcttttcatcgtgggatgttatattatcgaaagaaaaaaaagtttgaagattcttatgctatactgattcttagtgtgagtatacattctcataggtagaaattagtactaagtgtaaggttatttgatatgaacctcttgaaatatagtattttaaatagaaaatgcaggagatggtattagagttcccctgtttcagatttattagaagttggaaaagttgtaatttgaccaagacagtgtatcttggctgttataagtggcattttgaacataattcgttttaaag

SEQ ID NO: 59544 - protein, 337 aa, Glycine max
  peptide (1)..(337): Ceres Seq. ID no. 14313065
  misc_feature (102)..(147): Pfam Name: Myb-like DNA-binding domain Pfam Description: Myb-like DNA-binding domain
  misc_feature (36)..(334): Homolog of NCBI NO: 15230731 NR Description: myb family transcription factor (MYB108)
  misc_feature (41)..(337): Homolog of NCBI NO: 7446183 NR Description: ABA-induced myb-related protein Cpm10 -
  misc_feature (36)..(316): Homolog of NCBI NO: 34898110 NR Description: putative typical P-type R2R3 Myb protein
  misc_feature (30)..(223): Homolog of NCBI NO: 25294097 NR Description: probable Myb-like protein (Myb26)
  misc_feature (35)..(224): Homolog of NCBI NO: 13177578 NR Description: Myb transcription factor JAMyb [Oryza sativa]
  misc_feature (37)..(247): Homolog of NCBI NO: 23476301 NR Description: myb-like transcription factor 5 [Gossypium
  misc_feature (37)..(247): Homolog of NCBI NO: 14249015 NR Description: myb-like transcription factor Myb 5 [Gossypium
  misc_feature (30)..(223): Homolog of NCBI NO: 18395645 NR Description: myb family transcription factor(MYB116)
  misc_feature (30)..(192): Homolog of NCBI NO: 34895506 NR Description: putative myb-related transcription factor
  misc_feature (35)..(312): Homolog of NCBI NO: 15221373 NR Description: myb family transcription factor [Arabidopsis
LELIISNCSDPYISYFLCNNLKNPTKTPTMSTIAKRDLSSNEEESELRRGPWTLEEDSLLIHYIARHGEGRWNMLAKSAGLKRTGKSCRLRWLNYLKPDIKRGNLTPQEQLLILELHSKWGNRWSKIAQHLPGRTDNEIKNYWRTRIQKQARQLNIESGSKRFIDAVKCFWMPRLLQKMEQSNSPSPHHSSMTNMMNLGNSGEASMSSMSSSFNINPSMSSSSSPPQREFIMDDANHFNTMSNPINPSPDSFQFSQLLEISEHPKSPSNVFENNVCSYPIQDNCYVDTNNYGMEGINMDPLSAMDTYDFPQFDFQTAGNGWMLDSMGDSTLWNMEAM

SEQ ID NO: 59545 - protein, 308 aa, Glycine max
  peptide (1)..(308): Ceres Seq. ID no. 14313066
  misc_feature (73)..(118): Pfam Name: Myb-like DNA-binding domain Pfam Description: Myb-like DNA-binding domain
  misc_feature (7)..(305): Homolog of NCBI NO: 15230731 NR Description: myb family transcription factor (MYB108)
  misc_feature (12)..(308): Homolog of NCBI NO: 7446183 NR Description: ABA-induced myb-related protein Cpm10 -
  misc_feature (7)..(287): Homolog of NCBI NO: 34898110 NR Description: putative typical P-type R2R3 Myb protein
  misc_feature (1)..(194): Homolog of NCBI NO: 25294097 NR Description: probable Myb-like protein (Myb26)
  misc_feature (6)..(195): Homolog of NCBI NO: 13177578 NR Description: Myb transcription factor JAMyb [Oryza sativa]
  misc_feature (8)..(218): Homolog of NCBI NO: 23476301 NR Description: myb-like transcription factor 5 [Gossypium
  misc_feature (8)..(218): Homolog of NCBI NO: 14249015 NR Description: myb-like transcription factor Myb 5 [Gossypium
  misc_feature (1)..(194): Homolog of NCBI NO: 18395645 NR Description: myb family transcription factor(MYB116)
  misc_feature (1)..(163): Homolog of NCBI NO: 34895506 NR Description: putative myb-related transcription factor
  misc_feature (6)..(283): Homolog of NCBI NO: 15221373 NR Description: myb family transcription factor [Arabidopsis
MSTIAKRDLSSNEEESELRRGPWTLEEDSLLIHYIARHGEGRWNMLAKSAGLKRTGKSCRLRWLNYLKPDIKRGNLTPQEQLLILELHSKWGNRWSKIAQHLPGRTDNEIKNYWRTRIQKQARQLNIESGSKRFIDAVKCFWMPRLLQKMEQSNSPSPHHSSMTNMMNLGNSGEASMSSMSSSFNINPSMSSSSSPPQREFIMDDANHFNTMSNPINPSPDSFQFSQLLEISEHPKSPSNVFENNVCSYPIQDNCYVDTNNYGMEGINMDPLSAMDTYDFPQFDFQTAGNGWMLDSMGDSTLWNMEAM

SEQ ID NO: 59546 - protein, 264 aa, Glycine max
  peptide (1)..(264): Ceres Seq. ID no. 14313067
  misc_feature (29)..(74): Pfam Name: Myb-like DNA-binding domain Pfam Description: Myb-like DNA-binding domain
  misc_feature (1)..(261): Homolog of NCBI NO: 15230731 NR Description: myb family transcription factor (MYB108)
  misc_feature (1)..(264): Homolog of NCBI NO: 7446183 NR Description: ABA-induced myb-related protein Cpm10 -
  misc_feature (1)..(243): Homolog of NCBI NO: 34898110 NR Description: putative typical P-type R2R3 Myb protein
  misc_feature (1)..(150): Homolog of NCBI NO: 25294097 NR Description: probable Myb-like protein (Myb26)
  misc_feature (1)..(151): Homolog of NCBI NO: 13177578 NR Description: Myb transcription factor JAMyb [Oryza sativa]
  misc_feature (1)..(174): Homolog of NCBI NO: 23476301 NR Description: myb-like transcription factor 5 [Gossypium
  misc_feature (1)..(174): Homolog of NCBI NO: 14249015 NR Description: myb-like transcription factor Myb 5 [Gossypium
  misc_feature (1)..(150): Homolog of NCBI NO: 18395645 NR Description: myb family transcription factor(MYB116)
  misc_feature (1)..(119): Homolog of NCBI NO: 34895506 NR Description: putative myb-related transcription factor
  misc_feature (1)..(239): Homolog of NCBI NO: 15221373 NR Description: myb family transcription factor [Arabidopsis
MLAKSAGLKRTGKSCRLRWLNYLKPDIKRGNLTPQEQLLILELHSKWGNRWSKIAQHLPGRTDNEIKNYWRTRIQKQARQLNIESGSKRFIDAVKCFWMPRLLQKMEQSNSPSPHHSSMTNMMNLGNSGEASMSSMSSSFNINPSMSSSSSPPQREFIMDDANHFNTMSNPINPSPDSFQFSQLLEISEHPKSPSNVFENNVCSYPIQDNCYVDTNNYGMEGINMDPLSAMDTYDFPQFDFQTAGNGWMLDSMGDSTLWNMEAM

SEQ ID NO: 59547 - DNA, 1845 bp, Glycine max
  misc_feature (1)..(1845): Ceres Seq. ID no. 14313963
gagggaaagcaaaatatctgatctttctccctcccttgcactgagtaggcaatggcggaggaagcacagtactcatcgggacccgattccgcgcccctcaagcgcaagtacgaagaccaaccctccggcatcgagcttgccaagcagcgtgctcaggaagtcgccgcacgcctcctcaacgccgctcctcctccgccactcgacgccaagcgtcccaaacccgacaccggcttcgattctctcgatttgaagcctctgtattccgcatctcctcctcccgtctcctacggtcaccaaggttccagcaagaagattgatatccctaatggcagggttggtgtgattattggtaaaggcggagagactattaagtatctccagttgcagtctggtgccaaaattcaaattactcgtgatattgatgcggaccctaattcttccactaggacggttgagcttatgggcactcctgaagcaatttcctctgccgagaaactcatcaatgaagttcttgctgaggctgaatctgggggttctggcattgttactcgaagattcacgggacaagctgggtcggatgaatttgtcatgaaaatcccaaataataaggttggccttataattggcaaaggtggagaaactataaagaatatgcaagcttctactggagcacggattcaggtgatacctctgcatcttcccccgggtgacacatcaactgaaagaacattaaaaattgatggtactcctgagcaaattgagtctgcaaagcagttggtttatcaagtcatcagtggcgagaatcgtgttagaaatccagcaatgtctggtggttatcctcaacaaggttaccaatctcgaccaccatctaactgggctccccctgctccaacgcagcaacctggttatggctacgtgcaacctggagcatactctggtccatcaccccagtataacatgcctcagcaaccatatgcaggctatcctccccagcaacctgatggatattccaccaattgggatcagtctactgcaccacctcaccaacagtctactcatggtggtggttattattactatagtcaacagccacagcaaccacaaaatcctgggggtcctgcccctccagctgatggctctgcatacaattacagtcagccaccttcctctggttataaccaatcagcacagcagggttatgcacaggacagctataatgcatataatgcgcaatcacaatcagggtatgggcagccacctacatatgatcagcagcaaggctatggtagtgaaagcaacccggcacaagagggccacactgcaaactatgcagtacagggagattcagcccaagctccttctgcccaaccaattaccgtagcgcagcaaggttatcctaccaaccaactgcccagttcaaacactgccaactacccacctcaaggaactcctcagccaggttatggggttccccctacatcccaagcagcttatggcaatcaatcacagcctggttatggtggtgcagtgcaaccagggtacggtcctcaaacatatggtgctccgcagggtggccagcctggttatggtcaggcgctgccttcatacagcaacagttcttatggtgctggttatacacagactccggcgtataccggtgatggtaatgggaatgctcaggcaccccagagtgccattgctaaagcatccccttgatattttggccacccttcccctccccttctcatagacgatttttattgtgtttcaccgtttatggtactagtgacaccaatgtagcattgcattgtttagatggaagaaatggtgtattgtttttttttc

SEQ ID NO: 59548 - protein, 554 aa, Glycine max
  peptide (1)..(554): Ceres Seq. ID no. 14313964
  misc_feature (253)..(548): Pfam Name: High molecular weight glutenin subunit Pfam Description: High molecular weight glutenin subunit
  misc_feature (347)..(548): Homolog of NCBI NO: 25091747 NR Description: Zipcode-binding protein 2
  misc_feature (46)..(285): Homolog of NCBI NO: 25091747 NR Description: Zipcode-binding protein 2
  misc_feature (79)..(478): Homolog of NCBI NO: 4504865 NR Description: KH-type splicing regulatory protein (FUSE binding
  misc_feature (79)..(478): Homolog of NCBI NO: 39794540 NR Description: Unknown (protein for MGC:75632) [Silurana
  misc_feature (79)..(478): Homolog of NCBI NO: 28278093 NR Description: Similar to far upstream element (FUSE) binding
  misc_feature (82)..(246): Homolog of NCBI NO: 15217613 NR Description: KH domain protein [Arabidopsis thaliana]
  misc_feature (82)..(246): Homolog of NCBI NO: 25511683 NR Description: F14M2.18 protein - Arabidopsis thaliana
  misc_feature (80)..(536): Homolog of NCBI NO: 22328551 NR Description: KH domain protein [Arabidopsis thaliana]
  misc_feature (80)..(536): Homolog of NCBI NO: 7487735 NR Description: hypothetical protein T5L19.200 - Arabidopsis
  misc_feature (27)..(544): Homolog of NCBI NO: 15225229 NR Description: KH domain protein [Arabidopsis thaliana]
MAEEAQYSSGPDSAPLKRKYEDQPSGIELAKQRAQEVAARLLNAAPPPPLDAKRPKPDTGFDSLDLKPLYSASPPPVSYGHQGSSKKIDIPNGRVGVIIGKGGETIKYLQLQSGAKIQITRDIDADPNSSTRTVELMGTPEAISSAEKLINEVLAEAESGGSGIVTRRFTGQAGSDEFVMKIPNNKVGLIIGKGGETIKNMQASTGARIQVIPLHLPPGDTSTERTLKIDGTPEQIESAKQLVYQVISGENRVRNPAMSGGYPQQGYQSRPPSNWAPPAPTQQPGYGYVQPGAYSGPSPQYNMPQQPYAGYPPQQPDGYSTNWDQSTAPPHQQSTHGGGYYYYSQQPQQPQNPGGPAPPADGSAYNYSQPPSSGYNQSAQQGYAQDSYNAYNAQSQSGYGQPPTYDQQQGYGSESNPAQEGHTANYAVQGDSAQAPSAQPITVAQQGYPTNQLPSSNTANYPPQGTPQPGYGVPPTSQAAYGNQSQPGYGGAVQPGYGPQTYGAPQGGQPGYGQALPSYSNSSYGAGYTQTPAYTGDGNGNAQAPQSAIAKASP

SEQ ID NO: 59549 - protein, 418 aa, Glycine max
  peptide (1)..(418): Ceres Seq. ID no. 14313965
  misc_feature (117)..(412): Pfam Name: High molecular weight glutenin subunit Pfam Description: High molecular weight glutenin subunit
  misc_feature (211)..(412): Homolog of NCBI NO: 25091747 NR Description: Zipcode-binding protein 2
  misc_feature (1)..(149): Homolog of NCBI NO: 25091747 NR Description: Zipcode-binding protein 2
  misc_feature (1)..(342): Homolog of NCBI NO: 4504865 NR Description: KH-type splicing regulatory protein (FUSE binding
  misc_feature (1)..(342): Homolog of NCBI NO: 39794540 NR Description: Unknown (protein for MGC:75632) [Silurana
  misc_feature (1)..(342): Homolog of NCBI NO: 28278093 NR Description: Similar to far upstream element (FUSE) binding
  misc_feature (1)..(110): Homolog of NCBI NO: 15217613 NR Description: KH domain protein [Arabidopsis thaliana]
  misc_feature (1)..(110): Homolog of NCBI NO: 25511683 NR Description: F14M2.18 protein - Arabidopsis thaliana
  misc_feature (1)..(400): Homolog of NCBI NO: 22328551 NR Description: KH domain protein [Arabidopsis thaliana]
  misc_feature (1)..(400): Homolog of NCBI NO: 7487735 NR Description: hypothetical protein T5L19.200 - Arabidopsis
  misc_feature (1)..(408): Homolog of NCBI NO: 15225229 NR Description: KH domain protein [Arabidopsis thaliana]
MGTPEAISSAEKLINEVLAEAESGGSGIVTRRFTGQAGSDEFVMKIPNNKVGLIIGKGGETIKNMQASTGARIQVIPLHLPPGDTSTERTLKIDGTPEQIESAKQLVYQVISGENRVRNPAMSGGYPQQGYQSRPPSNWAPPAPTQQPGYGYVQPGAYSGPSPQYNMPQQPYAGYPPQQPDGYSTNWDQSTAPPHQQSTHGGGYYYYSQQPQQPQNPGGPAPPADGSAYNYSQPPSSGYNQSAQQGYAQDSYNAYNAQSQSGYGQPPTYDQQQGYGSESNPAQEGHTANYAVQGDSAQAPSAQPITVAQQGYPTNQLPSSNTANYPPQGTPQPGYGVPPTSQAAYGNQSQPGYGGAVQPGYGPQTYGAPQGGQPGYGQALPSYSNSSYGAGYTQTPAYTGDGNGNAQAPQSAIAKASP

SEQ ID NO: 59550 - protein, 375 aa, Glycine max
  peptide (1)..(375): Ceres Seq. ID no. 14313966
  misc_feature (74)..(369): Pfam Name: High molecular weight glutenin subunit Pfam Description: High molecular weight glutenin subunit
  misc_feature (168)..(369): Homolog of NCBI NO: 25091747 NR Description: Zipcode-binding protein 2
  misc_feature (1)..(106): Homolog of NCBI NO: 25091747 NR Description: Zipcode-binding protein 2
  misc_feature (1)..(299): Homolog of NCBI NO: 4504865 NR Description: KH-type splicing regulatory protein (FUSE binding
  misc_feature (1)..(299): Homolog of NCBI NO: 39794540 NR Description: Unknown (protein for MGC:75632) [Silurana
  misc_feature (1)..(299): Homolog of NCBI NO: 28278093 NR Description: Similar to far upstream element (FUSE) binding
  misc_feature (1)..(67): Homolog of NCBI NO: 15217613 NR Description: KH domain protein [Arabidopsis thaliana]
  misc_feature (1)..(67): Homolog of NCBI NO: 25511683 NR Description: F14M2.18 protein - Arabidopsis thaliana
  misc_feature (1)..(357): Homolog of NCBI NO: 22328551 NR Description: KH domain protein [Arabidopsis thaliana]
  misc_feature (1)..(357): Homolog of NCBI NO: 7487735 NR Description: hypothetical protein T5L19.200 - Arabidopsis
  misc_feature (1)..(365): Homolog of NCBI NO: 15225229 NR Description: KH domain protein [Arabidopsis thaliana]
MKIPNNKVGLIIGKGGETIKNMQASTGARIQVIPLHLPPGDTSTERTLKIDGTPEQIESAKQLVYQVISGENRVRNPAMSGGYPQQGYQSRPPSNWAPPAPTQQPGYGYVQPGAYSGPSPQYNMPQQPYAGYPPQQPDGYSTNWDQSTAPPHQQSTHGGGYYYYSQQPQQPQNPGGPAPPADGSAYNYSQPPSSGYNQSAQQGYAQDSYNAYNAQSQSGYGQPPTYDQQQGYGSESNPAQEGHTANYAVQGDSAQAPSAQPITVAQQGYPTNQLPSSNTANYPPQGTPQPGYGVPPTSQAAYGNQSQPGYGGAVQPGYGPQTYGAPQGGQPGYGQALPSYSNSSYGAGYTQTPAYTGDGNGNAQAPQSAIAKASP

SEQ ID NO: 59551 - DNA, 1455 bp, Glycine max
  misc_feature (1)..(1455): Ceres Seq. ID no. 14307004
taagaaggattaatggatgccaaataagaaaccacaaatatcccctgattataaaaaacatatttttaaatctgttttagccaattttagtttcaaggaataaaataaaataattttttttatatatataataagattcaaaatgaataattattagatgtaacaactaaaatataaaaattgtacggatataaagattaaataagtaattaaatcaataaatataaaagtatatctaatgaaacatgagaagtaagaaaatgttaaacatatatatcttagccttaaccatatacaattctatatggttaaaactattatagttaactttaactttaaccatttattaaactatacaattgaagtgtacttgtcttccatctcgtttgtgctttccctgcatgtagggtccaaattagtagtaaatgttagtagtatttaatgattttgttttacattaagtaattttatgtggggtgtgagaaaatacagaaacagatattggaaccggcgataaaaggaacggttaatgtgttgaaggcggcgaaggaagcaggggtggagcgcgtggtggcgacttcatcgatttcgtcgattatgccaagtcctaattggccagctgataagattaagggagaagagtgttggacggaccttgaatactgcaagcaaaaggggttgtattatcccattgcaaagactctagcagagaaagcgggttgggactttgcgaaggagacaggttttgatgttgtcatgataaaccctggtacagcattgggccctctgcttcctccaagaatcaattcaagcatggctgtgcttgttagtgttctcaaagggggcaaagagacctacgaggacttctttatgggaacggctcacttcaaagacatagcattggcacatattttggcacttgagaacaagaaagcagcaggaaggcacttgtgtgtggaatctattcgtcactttagtgatcttgtggacaaggttgctgagttataccctgaatacgatgtggctaagttgccaaaggatacccaaccagggttgttgagagcaagtggaaaggatgcatcaaagaagctgattgatttaggtctagaattcactcctgttgagcaaatcatcaaggatgcagtggagagtttgaagagcaggggctatgtctaatttctctgctactgcagaggaactgagtgcactgttacaagtggtggtggcgttaatattattgttctgccattgctttgactcattgttcatgccatttatgtttttacctatggtcttgtgttgtgcacttgtgcgtgtaactgtattctaaaataagggtcacttggatcagtggttgtaacgatatcaatgttttgcgagagttttaatttactcttgcagttattagtgaaagattgagcggtctcatcttcattgctcagtttaatcatcaag

SEQ ID NO: 59552 - protein, 192 aa, Glycine max
  peptide (1)..(192): Ceres Seq. ID no. 14307005
  misc_feature (1)..(192): Homolog of NCBI NO: 40233135 NR Description: cinnamoyl CoA reductase [Populus tomentosa]
  misc_feature (1)..(192): Homolog of NCBI NO: 31414896 NR Description: cinnamoyl CoA reductase [Fragaria x ananassa]
  misc_feature (1)..(192): Homolog of NCBI NO: 7431407 NR Description: cinnamoyl-CoA reductase (EC 1.2.1.44) CCR - cider
  misc_feature (1)..(192): Homolog of NCBI NO: 25140434 NR Description: cinnamoyl CoA reductase [Solanum tuberosum]
  misc_feature (1)..(192): Homolog of NCBI NO: 34906124 NR Description: putative cinnamoyl-CoA reductase
  misc_feature (33)..(192): Homolog of NCBI NO: 10180027 NR Description: putative cinnamoyl-CoA reductase [Prunus avium]
  misc_feature (1)..(192): Homolog of NCBI NO: 34907928 NR Description: putative cinnamoyl CoA reductase
  misc_feature (1)..(192): Homolog of NCBI NO: 15226955 NR Description: cinnamoyl-CoA reductase family [Arabidopsis
  misc_feature (1)..(192): Homolog of NCBI NO: 28876000 NR Description: putative cinnamoyl-CoA reductase
  misc_feature (1)..(192): Homolog of NCBI NO: 15237678 NR Description: cinnamoyl-CoA reductase family [Arabidopsis
MPSPNWPADKIKGEECWTDLEYCKQKGLYYPIAKTLAEKAGWDFAKETGFDVVMINPGTALGPLLPPRINSSMAVLVSVLKGGKETYEDFFMGTAHFKDIALAHILALENKKAAGRHLCVESIRHFSDLVDKVAELYPEYDVAKLPKDTQPGLLRASGKDASKKLIDLGLEFTPVEQIIKDAVESLKSRGYV

SEQ ID NO: 59553 - protein, 139 aa, Glycine max
  peptide (1)..(139): Ceres Seq. ID no. 14307006
  misc_feature (1)..(139): Homolog of NCBI NO: 40233135 NR Description: cinnamoyl CoA reductase [Populus tomentosa]
  misc_feature (1)..(139): Homolog of NCBI NO: 31414896 NR Description: cinnamoyl CoA reductase [Fragaria x ananassa]
  misc_feature (1)..(139): Homolog of NCBI NO: 7431407 NR Description: cinnamoyl-CoA reductase (EC 1.2.1.44) CCR - cider
  misc_feature (1)..(139): Homolog of NCBI NO: 25140434 NR Description: cinnamoyl CoA reductase [Solanum tuberosum]
  misc_feature (1)..(139): Homolog of NCBI NO: 34906124 NR Description: putative cinnamoyl-CoA reductase
  misc_feature (1)..(139): Homolog of NCBI NO: 10180027 NR Description: putative cinnamoyl-CoA reductase [Prunus avium]
  misc_feature (1)..(139): Homolog of NCBI NO: 34907928 NR Description: putative cinnamoyl CoA reductase
  misc_feature (1)..(139): Homolog of NCBI NO: 15226955 NR Description: cinnamoyl-CoA reductase family [Arabidopsis
  misc_feature (1)..(139): Homolog of NCBI NO: 28876000 NR Description: putative cinnamoyl-CoA reductase
  misc_feature (1)..(139): Homolog of NCBI NO: 15237678 NR Description: cinnamoyl-CoA reductase family [Arabidopsis
MINPGTALGPLLPPRINSSMAVLVSVLKGGKETYEDFFMGTAHFKDIALAHILALENKKAAGRHLCVESIRHFSDLVDKVAELYPEYDVAKLPKDTQPGLLRASGKDASKKLIDLGLEFTPVEQIIKDAVESLKSRGYV

SEQ ID NO: 59554 - protein, 120 aa, Glycine max
  peptide (1)..(120): Ceres Seq. ID no. 14307007
  misc_feature (1)..(120): Homolog of NCBI NO: 40233135 NR Description: cinnamoyl CoA reductase [Populus tomentosa]
  misc_feature (1)..(120): Homolog of NCBI NO: 31414896 NR Description: cinnamoyl CoA reductase [Fragaria x ananassa]
  misc_feature (1)..(120): Homolog of NCBI NO: 7431407 NR Description: cinnamoyl-CoA reductase (EC 1.2.1.44) CCR - cider
  misc_feature (1)..(120): Homolog of NCBI NO: 25140434 NR Description: cinnamoyl CoA reductase [Solanum tuberosum]
  misc_feature (1)..(120): Homolog of NCBI NO: 34906124 NR Description: putative cinnamoyl-CoA reductase
  misc_feature (1)..(120): Homolog of NCBI NO: 10180027 NR Description: putative cinnamoyl-CoA reductase [Prunus avium]
  misc_feature (1)..(120): Homolog of NCBI NO: 34907928 NR Description: putative cinnamoyl CoA reductase
  misc_feature (1)..(120): Homolog of NCBI NO: 15226955 NR Description: cinnamoyl-CoA reductase family [Arabidopsis
  misc_feature (1)..(120): Homolog of NCBI NO: 28876000 NR Description: putative cinnamoyl-CoA reductase
  misc_feature (1)..(120): Homolog of NCBI NO: 15237678 NR Description: cinnamoyl-CoA reductase family [Arabidopsis
MAVLVSVLKGGKETYEDFFMGTAHFKDIALAHILALENKKAAGRHLCVESIRHFSDLVDKVAELYPEYDVAKLPKDTQPGLLRASGKDASKKLIDLGLEFTPVEQIIKDAVESLKSRGYV

SEQ ID NO: 59555 - DNA, 1744 bp, Glycine max
  misc_feature (1)..(1744): Ceres Seq. ID no. 14313743
atactcacactcaacacaatcttgggagaggtaacaacaacagctctggtttttctttgcagccttcacagctagctaacacaaaaatgagaatcttgagttacctttacattgttctcatttgcattattcaagactcaagagagcttaaatagggaaagaggaacaaggcctttttcagttacctctaaatccagttcttgcaattccatttgtgagtgagttgttggaattggaatttggaagtagctaggcagtgtctcaaattaatggcatccatgtctcttattcttctttggttcctcttttttgctagtgaaatgatgtcaatgggaaatagtttacacaaggggcacatggtaatggaagaggaggaactgttgggattgtttgaagtgatggatgctcttctggaagacccttactgggcccaagcacatccaaagccatgcactgatactccatggccaggtgttgagtgtgaacttggcagcaataaccaacaaatctttcatgtcaccaaaatccacattggtcctgatatagtcttcccattctcaccttgcaaaccctcagcttatctctcacactccttgctgaaactcaagtatataaaaaccctttcaatttttaactgttttgttgcttcaccagttactctacccaaaactctctttggtcctttctcttcactagaacacttagctttggagaataacccttccctctatggtgaaatacctacaagtttgggaggtgttgctggtcttagggtcctgagcctctcccagaacagcttacaaggaaacatccctagccagattggtggtttggttagtctagagcaacttgaccttagttataacaacttgagtggtcaaatcccaaaggaaattggaggtttgaaaagcatgaccatattggacctaagttgcaatgcagttgaagggtttctgccttgttctcttggaaagcttcaacttctccagaagatggatttgcactctaacagactcagtgaaaacattcctcctgatataggaaacctcaagaggttagtcttgcttgatttgagtcataattttattgtagggcctattagtgaaaccttctcaagtttagaccttttggaatatttactcattgatgacaaccccattaaaggagggataccccagttcatagggaagcttaagaagctcaaatcattgagtttatcagggtgtggattaacaggttctataccctactctttctcttccttgaaaaatcttacagctctctccttaggtaacaatagtcttattggacaagttcctccaaatttgggttcactcccaagcctagatcaactgaatatcagccacaacaagctgagtggggttctagagctacctggtgacttcattcaaaagttaggtaaaagattggatttaagaggaaacagtgaactctgcatcaatgatcagtcaaagaagaagaacctctcttcttacttggaaatcccttcttgtttgaacacacgacagagaaatgatgataattattttgccggtggaccacttcaagatctttcaggactaaagccgtcttggtatgatagcaacccaagttcatgttcatcatggcctaatgatctacatgtcatcatatttaccttggttttaaacctggttatctgattcctgaatatcattttgtgtaacactagaaattaatattatataaatgttattctactctg

SEQ ID NO: 59556 - protein, 470 aa, Glycine max
  peptide (1)..(470): Ceres Seq. ID no. 14313744
  misc_feature (32)..(426): Homolog of NCBI NO: 18409119 NR Description: leucine rich repeat protein family [Arabidopsis
  misc_feature (3)..(399): Homolog of NCBI NO: 15236148 NR Description: leucine rich repeat protein family (fragment)
  misc_feature (3)..(399): Homolog of NCBI NO: 7487680 NR Description: hypothetical protein T5F17.10 - Arabidopsis
  misc_feature (53)..(448): Homolog of NCBI NO: 34912808 NR Description: P0501G01.13 [Oryza sativa (japonica
  misc_feature (32)..(470): Homolog of NCBI NO: 15230865 NR Description: leucine rich repeat protein family [Arabidopsis
  misc_feature (32)..(470): Homolog of NCBI NO: 11994758 NR Description: contains similarity to elicitor-inducible
  misc_feature (32)..(396): Homolog of NCBI NO: 15222215 NR Description: leucine rich repeat protein family [Arabidopsis
  misc_feature (32)..(399): Homolog of NCBI NO: 34894182 NR Description: P0439B06.12 [Oryza sativa (japonica
  misc_feature (32)..(400): Homolog of NCBI NO: 34910824 NR Description: putative Hcr2-0B [Oryza sativa (japonica
  misc_feature (1)..(402): Homolog of NCBI NO: 15228004 NR Description: leucine rich repeat protein family [Arabidopsis
MASMSLILLWFLFFASEMMSMGNSLHKGHMVMEEEELLGLFEVMDALLEDPYWAQAHPKPCTDTPWPGVECELGSNNQQIFHVTKIHIGPDIVFPFSPCKPSAYLSHSLLKLKYIKTLSIFNCFVASPVTLPKTLFGPFSSLEHLALENNPSLYGEIPTSLGGVAGLRVLSLSQNSLQGNIPSQIGGLVSLEQLDLSYNNLSGQIPKEIGGLKSMTILDLSCNAVEGFLPCSLGKLQLLQKMDLHSNRLSENIPPDIGNLKRLVLLDLSHNFIVGPISETFSSLDLLEYLLIDDNPIKGGIPQFIGKLKKLKSLSLSGCGLTGSIPYSFSSLKNLTALSLGNNSLIGQVPPNLGSLPSLDQLNISHNKLSGVLELPGDFIQKLGKRLDLRGNSELCINDQSKKKNLSSYLEIPSCLNTRQRNDDNYFAGGPLQDLSGLKPSWYDSNPSSCSSWPNDLHVIIFTLVLNLVI

SEQ ID NO: 59557 - protein, 467 aa, Glycine max
  peptide (1)..(467): Ceres Seq. ID no. 14313745
  misc_feature (29)..(423): Homolog of NCBI NO: 18409119 NR Description: leucine rich repeat protein family [Arabidopsis
  misc_feature (1)..(396): Homolog of NCBI NO: 15236148 NR Description: leucine rich repeat protein family (fragment)
  misc_feature (1)..(396): Homolog of NCBI NO: 7487680 NR Description: hypothetical protein T5F17.10 - Arabidopsis
  misc_feature (50)..(445): Homolog of NCBI NO: 34912808 NR Description: P0501G01.13 [Oryza sativa (japonica
  misc_feature (29)..(467): Homolog of NCBI NO: 15230865 NR Description: leucine rich repeat protein family [Arabidopsis
  misc_feature (29)..(467): Homolog of NCBI NO: 11994758 NR Description: contains similarity to elicitor-inducible
  misc_feature (29)..(393): Homolog of NCBI NO: 15222215 NR Description: leucine rich repeat protein family [Arabidopsis
  misc_feature (29)..(396): Homolog of NCBI NO: 34894182 NR Description: P0439B06.12 [Oryza sativa (japonica
  misc_feature (29)..(397): Homolog of NCBI NO: 34910824 NR Description: putative Hcr2-0B [Oryza sativa (japonica
  misc_feature (1)..(399): Homolog of NCBI NO: 15228004 NR Description: leucine rich repeat protein family [Arabidopsis
MSLILLWFLFFASEMMSMGNSLHKGHMVMEEEELLGLFEVMDALLEDPYWAQAHPKPCTDTPWPGVECELGSNNQQIFHVTKIHIGPDIVFPFSPCKPSAYLSHSLLKLKYIKTLSIFNCFVASPVTLPKTLFGPFSSLEHLALENNPSLYGEIPTSLGGVAGLRVLSLSQNSLQGNIPSQIGGLVSLEQLDLSYNNLSGQIPKEIGGLKSMTILDLSCNAVEGFLPCSLGKLQLLQKMDLHSNRLSENIPPDIGNLKRLVLLDLSHNFIVGPISETFSSLDLLEYLLIDDNPIKGGIPQFIGKLKKLKSLSLSGCGLTGSIPYSFSSLKNLTALSLGNNSLIGQVPPNLGSLPSLDQLNISHNKLSGVLELPGDFIQKLGKRLDLRGNSELCINDQSKKKNLSSYLEIPSCLNTRQRNDDNYFAGGPLQDLSGLKPSWYDSNPSSCSSWPNDLHVIIFTLVLNLVI

SEQ ID NO: 59558 - protein, 453 aa, Glycine max
  peptide (1)..(453): Ceres Seq. ID no. 14313746
  misc_feature (15)..(409): Homolog of NCBI NO: 18409119 NR Description: leucine rich repeat protein family [Arabidopsis
  misc_feature (1)..(382): Homolog of NCBI NO: 15236148 NR Description: leucine rich repeat protein family (fragment)
  misc_feature (1)..(382): Homolog of NCBI NO: 7487680 NR Description: hypothetical protein T5F17.10 - Arabidopsis
  misc_feature (36)..(431): Homolog of NCBI NO: 34912808 NR Description: P0501G01.13 [Oryza sativa (japonica
  misc_feature (15)..(453): Homolog of NCBI NO: 15230865 NR Description: leucine rich repeat protein family [Arabidopsis
  misc_feature (15)..(453): Homolog of NCBI NO: 11994758 NR Description: contains similarity to elicitor-inducible
  misc_feature (15)..(379): Homolog of NCBI NO: 15222215 NR Description: leucine rich repeat protein family [Arabidopsis
  misc_feature (15)..(382): Homolog of NCBI NO: 34894182 NR Description: P0439B06.12 [Oryza sativa (japonica
  misc_feature (15)..(383): Homolog of NCBI NO: 34910824 NR Description: putative Hcr2-0B [Oryza sativa (japonica
  misc_feature (1)..(385): Homolog of NCBI NO: 15228004 NR Description: leucine rich repeat protein family [Arabidopsis
MMSMGNSLHKGHMVMEEEELLGLFEVMDALLEDPYWAQAHPKPCTDTPWPGVECELGSNNQQIFHVTKIHIGPDIVFPFSPCKPSAYLSHSLLKLKYIKTLSIFNCFVASPVTLPKTLFGPFSSLEHLALENNPSLYGEIPTSLGGVAGLRVLSLSQNSLQGNIPSQIGGLVSLEQLDLSYNNLSGQIPKEIGGLKSMTILDLSCNAVEGFLPCSLGKLQLLQKMDLHSNRLSENIPPDIGNLKRLVLLDLSHNFIVGPISETFSSLDLLEYLLIDDNPIKGGIPQFIGKLKKLKSLSLSGCGLTGSIPYSFSSLKNLTALSLGNNSLIGQVPPNLGSLPSLDQLNISHNKLSGVLELPGDFIQKLGKRLDLRGNSELCINDQSKKKNLSSYLEIPSCLNTRQRNDDNYFAGGPLQDLSGLKPSWYDSNPSSCSSWPNDLHVIIFTLVLNLVI

SEQ ID NO: 59559 - DNA, 1136 bp, Glycine max
  misc_feature (1)..(1136): Ceres Seq. ID no. 14313718
aaacaaacatcaaacccatttttctatttttttttcttttcttttctctcttacacaccttccatgccttctcttttcaagagatctttcttccttctcctcctcctccttcatctccacaactcttaaaaaccctcctcatcgatccaacaagcagcaacctcactgaatctacaaacagtaacaaagattattactcgtagatccaataacagtaataacacctcagtttcttctcttaacagatcatgaattcctttcaagaatttgactcatcaaacacggacagtaacagtaccaaagccatcatcaacttcacatcaggtaacagcaccaatttcccaccagcgccaccaccatcatcatcttcaccgccatgttcctcttcttcttctggcaccaccaccctgagccgctacgagaaccaaaagcgccgcgactggaacacgttcgggcagtacctccgcaaccacaggcccccactctcgcttgcacggtgcagcggcgcgcacgtgctggagttcctgcggtacctggaccagttcgggaaaaccaaggttcacacgcagctttgtccattcttcgggcacccgaaccctcctgcagcgtgcccttgccttctacggcaagcgtgggggagcctggatgcactcatagggcgcctcagagctgcctttgaagagaatggagggaagcctgaggctaaccctttcggtgctcgcgctgtcagactctaccttcgcgaagtgcgtgattcgcaagccaaggctaggggaattagctacgagaagaagaagcgcaagcgtccccaacaacctcctttgcctccctcaaataatgcaaaagttgtgatttgacaatgggctgggggcactgcaatatgggcacaccctttgcaatggcattagaaaaatattgtgtaaacctaaactgcagtactctcggtagatgcagcagtaatttatgtagtggcagtaataaacactagggagggctgtgcatgtgtgtctgtgacaaatcaacaatatcacaacattgtccgatttgtattaataaaataaaaatgtgtatgaactcttgaagatgttatgaagaaaataataatggatctcaagatcttgtcagtttccatattg

SEQ ID NO: 59560 - protein, 202 aa, Glycine max
  peptide (1)..(202): Ceres Seq. ID no. 14313719
  misc_feature (38)..(170): Pfam Name: Protein of unknown function (DUF640) Pfam Description: Protein of unknown function (DUF640)
  misc_feature (14)..(190): Homolog of NCBI NO: 18412120 NR Description: expressed protein [Arabidopsis thaliana]
  misc_feature (45)..(187): Homolog of NCBI NO: 18406012 NR Description: expressed protein [Arabidopsis thaliana]
  misc_feature (46)..(194): Homolog of NCBI NO: 15237680 NR Description: hypothetical protein [Arabidopsis thaliana]
  misc_feature (36)..(187): Homolog of NCBI NO: 18390725 NR Description: expressed protein [Arabidopsis thaliana]
  misc_feature (28)..(193): Homolog of NCBI NO: 15229310 NR Description: hypothetical protein [Arabidopsis thaliana]
  misc_feature (43)..(192): Homolog of NCBI NO: 15241821 NR Description: expressed protein [Arabidopsis thaliana]
  misc_feature (32)..(202): Homolog of NCBI NO: 34907938 NR Description: B1088C09.17 [Oryza sativa (japonica
  misc_feature (45)..(190): Homolog of NCBI NO: 37535384 NR Description: hypothetical protein [Oryza sativa (japonica
  misc_feature (38)..(192): Homolog of NCBI NO: 38344650 NR Description: OSJNBb0072M01.12 [Oryza sativa (japonica
  misc_feature (21)..(198): Homolog of NCBI NO: 18402578 NR Description: expressed protein [Arabidopsis thaliana]
MNSFQEFDSSNTDSNSTKAIINFTSGNSTNFPPAPPPSSSSPPCSSSSSGTTTLSRYENQKRRDWNTFGQYLRNHRPPLSLARCSGAHVLEFLRYLDQFGKTKVHTQLCPFFGHPNPPAACPCLLRQAWGSLDALIGRLRAAFEENGGKPEANPFGARAVRLYLREVRDSQAKARGISYEKKKRKRPQQPPLPPSNNAKVVI

SEQ ID NO: 59561 - DNA, 1294 bp, Glycine max
  misc_feature (1)..(1294): Ceres Seq. ID no. 14303348
gtttcatgctgttgcgctaaatctctctctgaactctgaactctgaactgcacaaagccgtaactaatttctcagttcagaaagatctgctactctctctctctctctctctacttttagagcgttataataaatataagctgcataagttgaagactcagcaccgattcttcttcgtctgctgcaaattcagaagtagagatggcaagtcgagtgaaggaagatgagaaaaatgaacgaataattcgaggtcttctcaaactcgcaccaaatcgaagatgcattaactgtaacagcttgggaccacaatatgtgtgcacaaatttctggacgtttgtttgcactaactgtagcggaatacaccgagagtttacacatcgggtaaaatcagtttcaatggctaaatttagtgcacaggaagttagtgcacttcaagaaggaggaaatcagcgtgcaaaggaaatctattttaaagaatgggatccacaacgtcattctttgcctgatagcagcaatattgacaggctccgggactttattaagcatgtttatgtggatagaagattcagcggtgagaggacttatgacaaacctccaagagtaaagggtgacaaggatgatttccatgaaaacaagaggacagagacttatcacagaagcccttcatatgaggacacacatgaacgtcgttacagtgacaggtctagtcctggtggaagaagtcctgtatatgatcaagaaaataggcaatatggtgattacaagaaaagccctggtcgtcctccaataatcaatgattggcgtcgagaagatagatttggggatggatggaaatttgaagatcatagaatatctgatggaaatcataatgtggaaagtacttctcctgagcaaaccaaggatctggattcttccagcccacctgcagtccgacctgttagagagatcttgggagaaaatgtagtacctcttcgaataagtgaaccacccaaaacaaacagtggacaggctactaatggctcagcactcacacaggtgaagttattactgatgatgttccatatgcttcaaccatctgtgttgggagttaggacatttaatacactgttataatagttagttagtaggaggggttttagttaggcggattttctaggtaaatagctaggaggagggtggaaaggaatgggattttgattaatatcttttttgtaaaatgagcaatgctctgtaagcatcaaacgaacatggtaagtggcaataagcatgaacatcaacatgttcatttataaag

SEQ ID NO: 59562 - protein, 303 aa, Glycine max
  peptide (1)..(303): Ceres Seq. ID no. 14303349
  misc_feature (12)..(130): Pfam Name: Putative GTPase activating protein for Arf Pfam Description: Putative GTPase activating protein for Arf
  misc_feature (2)..(122): Homolog of NCBI NO: 34784857 NR Description: Unknown (protein for MGC:63481) [Danio rerio]
  misc_feature (1)..(134): Homolog of NCBI NO: 29245305 NR Description: GLP_333_15386_14190 [Giardia lamblia ATCC 50803]
  misc_feature (1)..(173): Homolog of NCBI NO: 34909220 NR Description: putative ARF GAP-like zinc finger-containing
  misc_feature (1)..(103): Homolog of NCBI NO: 7485983 NR Description: hypothetical protein F22O13.17 - Arabidopsis
  misc_feature (1)..(53): Homolog of NCBI NO: 9802557 NR Description: F22O13.16 [Arabidopsis thaliana]
  misc_feature (53)..(133): Homolog of NCBI NO: 9802557 NR Description: F22O13.16 [Arabidopsis thaliana]
  misc_feature (1)..(237): Homolog of NCBI NO: 30680774 NR Description: ARF GAP-like zinc finger-containing protein
  misc_feature (1)..(237): Homolog of NCBI NO: 30680768 NR Description: ARF GAP-like zinc finger-containing protein
  misc_feature (1)..(279): Homolog of NCBI NO: 7487869 NR Description: hypothetical protein T9E8.90 - Arabidopsis
  misc_feature (1)..(279): Homolog of NCBI NO: 22328591 NR Description: expressed protein [Arabidopsis thaliana]
MASRVKEDEKNERIIRGLLKLAPNRRCINCNSLGPQYVCTNFWTFVCTNCSGIHREFTHRVKSVSMAKFSAQEVSALQEGGNQRAKEIYFKEWDPQRHSLPDSSNIDRLRDFIKHVYVDRRFSGERTYDKPPRVKGDKDDFHENKRTETYHRSPSYEDTHERRYSDRSSPGGRSPVYDQENRQYGDYKKSPGRPPIINDWRREDRFGDGWKFEDHRISDGNHNVESTSPEQTKDLDSSSPPAVRPVREILGENVVPLRISEPPKTNSGQATNGSALTQVKLLLMMFHMLQPSVLGVRTFNTLL

SEQ ID NO: 59563 - protein, 238 aa, Glycine max
  peptide (1)..(238): Ceres Seq. ID no. 14303350
  misc_feature (1)..(65): Pfam Name: Putative GTPase activating protein for Arf Pfam Description: Putative GTPase activating protein for Arf
  misc_feature (1)..(111): Homolog of NCBI NO: 28850338 NR Description: hypothetical protein [Dictyostelium discoideum]
  misc_feature (1)..(57): Homolog of NCBI NO: 34784857 NR Description: Unknown (protein for MGC:63481) [Danio rerio]
  misc_feature (1)..(69): Homolog of NCBI NO: 29245305 NR Description: GLP_333_15386_14190 [Giardia lamblia ATCC 50803]
  misc_feature (1)..(108): Homolog of NCBI NO: 34909220 NR Description: putative ARF GAP-like zinc finger-containing
  misc_feature (1)..(38): Homolog of NCBI NO: 7485983 NR Description: hypothetical protein F22O13.17 - Arabidopsis
  misc_feature (1)..(68): Homolog of NCBI NO: 9802557 NR Description: F22O13.16 [Arabidopsis thaliana]
  misc_feature (1)..(172): Homolog of NCBI NO: 30680774 NR Description: ARF GAP-like zinc finger-containing protein
  misc_feature (1)..(172): Homolog of NCBI NO: 30680768 NR Description: ARF GAP-like zinc finger-containing protein
  misc_feature (1)..(214): Homolog of NCBI NO: 7487869 NR Description: hypothetical protein T9E8.90 - Arabidopsis
  misc_feature (1)..(214): Homolog of NCBI NO: 22328591 NR Description: expressed protein [Arabidopsis thaliana]
MAKFSAQEVSALQEGGNQRAKEIYFKEWDPQRHSLPDSSNIDRLRDFIKHVYVDRRFSGERTYDKPPRVKGDKDDFHENKRTETYHRSPSYEDTHERRYSDRSSPGGRSPVYDQENRQYGDYKKSPGRPPIINDWRREDRFGDGWKFEDHRISDGNHNVESTSPEQTKDLDSSSPPAVRPVREILGENVVPLRISEPPKTNSGQATNGSALTQVKLLLMMFHMLQPSVLGVRTFNTLL

SEQ ID NO: 59564 - DNA, 1544 bp, Glycine max
  misc_feature (1)..(1544): Ceres Seq. ID no. 14313807
gtcattcttgatggttctggagttcagaacaataataaagcgcaatcaacaagtgataaaattggaatgtctgattcaaaaaataaaatcgatgaagatgagactaatcctatcagtgcaggtagattttgtgaaaccatgcagggtgagacatctgtggaaaatatagttcttcgaaggcatactaatcctgatgctgcagctagaaatgggaaatcactaccaccagtgtatttttatgccctagaaagtgatcagcctatactggatatattaaagccgtctatagtcattgtttaccatccagatatgacctttgttagggaaattgaagtctacaaagctgagaatccctcaaaaaggttgaaagtatattttattttctatgaagattcaagtgaggttcagaagtttgaagcaagtatacgtagagagaatggagcatttgaatctttaattaggcaaaaatctttgatgatgattccagttgaccagagtgggcattctttaggattgaattctactttagagtcagatttaaatactcctcaaaacttcgtaaccagaaaagcaggtgggagaaaggaagctgagaaagaaatgcaggttattgtggacatgcgggagttcatgagcagccttccaaatgttcttcatcaaaagggaatgaacatcattccagtgaccctagaagttggtgactatattctatcaccattaatttgtgtggaaagaaaaagtattcaagatctctttatgagcttcacatcaggtcgtctataccaccaggtggagacaatggtacgatattacagaatacctgtactcttgatcgagttttcacaggataagagcttttcattccagtctgctagtgatattggtgatgatgtgacaccaaatagcattatatcaaagttgtctttgcttgctctacacttcccccgactacgaataatctggtctcgaagtttgcatgctactgccgaaatatttgcttcactgaaggcaaatcaagacgagccagatgaaacaaaagcaatcagagtgggtgtcccttcggaagaaggaattgtggaaaatgatgtgagggctgaaaattacaatacatccgctgtggagtttctaagacgatgtccaggtgttacagactcaaactacagggccataatggatggctgtaagagcttggcagaacttgcacttcttcctgtagagaagttagcggaattaatgggtggtcataaagctgctaggactcttagagattttctagatgctaaatacccaactttgttgtgagactatttgaataatttatttgtacaaaaaggtgctatccatttattcaagtcttctgttgtttcgattctacatcattgaattatgatggcaatccattgtaggaaattggaaaacgatccattgagttatttaatatttctccttctcgtggttcagtctgttgtaatttaacaatattgtattacttcacactaggtgagttcggttactgtggcagtgggatgttgtatatgtttaac

SEQ ID NO: 59565 - protein, 433 aa, Glycine max
  peptide (1)..(433): Ceres Seq. ID no. 14313808
  misc_feature (202)..(282): Pfam Name: ERCC4 domain Pfam Description: ERCC4 domain
  misc_feature (88)..(425): Homolog of NCBI NO: 32766570 NR Description: Unknown (protein for MGC:63468) [Danio rerio]
  misc_feature (88)..(429): Homolog of NCBI NO: 6683476 NR Description: ERCC4 [Cricetulus griseus]
  misc_feature (88)..(429): Homolog of NCBI NO: 1524411 NR Description: DNA repair endonuclease subunit
  misc_feature (88)..(433): Homolog of NCBI NO: 20073215 NR Description: excision repair cross-complementing rodent repair
  misc_feature (88)..(433): Homolog of NCBI NO: 7657064 NR Description: excision repair cross-complementing rodent repair
  misc_feature (88)..(433): Homolog of NCBI NO: 2896801 NR Description: ERCC4_MOUSE [Mus musculus]
  misc_feature (88)..(429): Homolog of NCBI NO: 4885217 NR Description: excision repair cross-complementing rodent repair
  misc_feature (88)..(429): Homolog of NCBI NO: 2842712 NR Description: DNA-REPAIR PROTEIN COMPLEMENTING XP-F CELL PIGMENTOSUM GROUP F COMPLEMENTING PROTEIN) (DNA EXCISION REPAIR
  misc_feature (72)..(433): Homolog of NCBI NO: 8926611 NR Description: 5' repair endonuclease [Arabidopsis thaliana]
  misc_feature (13)..(433): Homolog of NCBI NO: 15237571 NR Description: repair endonuclease (gb|AAF01274.1) [Arabidopsis
VILDGSGVQNNNKAQSTSDKIGMSDSKNKIDEDETNPISAGRFCETMQGETSVENIVLRRHTNPDAAARNGKSLPPVYFYALESDQPILDILKPSIVIVYHPDMTFVREIEVYKAENPSKRLKVYFIFYEDSSEVQKFEASIRRENGAFESLIRQKSLMMIPVDQSGHSLGLNSTLESDLNTPQNFVTRKAGGRKEAEKEMQVIVDMREFMSSLPNVLHQKGMNIIPVTLEVGDYILSPLICVERKSIQDLFMSFTSGRLYHQVETMVRYYRIPVLLIEFSQDKSFSFQSASDIGDDVTPNSIISKLSLLALHFPRLRIIWSRSLHATAEIFASLKANQDEPDETKAIRVGVPSEEGIVENDVRAENYNTSAVEFLRRCPGVTDSNYRAIMDGCKSLAELALLPVEKLAELMGGHKAARTLRDFLDAKYPTLL

SEQ ID NO: 59566 - protein, 411 aa, Glycine max
  peptide (1)..(411): Ceres Seq. ID no. 14313809
  misc_feature (180)..(260): Pfam Name: ERCC4 domain Pfam Description: ERCC4 domain
  misc_feature (66)..(403): Homolog of NCBI NO: 32766570 NR Description: Unknown (protein for MGC:63468) [Danio rerio]
  misc_feature (66)..(407): Homolog of NCBI NO: 6683476 NR Description: ERCC4 [Cricetulus griseus]
  misc_feature (66)..(407): Homolog of NCBI NO: 1524411 NR Description: DNA repair endonuclease subunit
  misc_feature (66)..(411): Homolog of NCBI NO: 7657064 NR Description: excision repair cross-complementing rodent repair
  misc_feature (66)..(411): Homolog of NCBI NO: 20073215 NR Description: excision repair cross-complementing rodent repair
  misc_feature (66)..(411): Homolog of NCBI NO: 2896801 NR Description: ERCC4_MOUSE [Mus musculus]
  misc_feature (66)..(407): Homolog of NCBI NO: 4885217 NR Description: excision repair cross-complementing rodent repair
  misc_feature (66)..(407): Homolog of NCBI NO: 2842712 NR Description: DNA-REPAIR PROTEIN COMPLEMENTING XP-F CELL PIGMENTOSUM GROUP F COMPLEMENTING PROTEIN) (DNA EXCISION REPAIR
  misc_feature (50)..(411): Homolog of NCBI NO: 8926611 NR Description: 5' repair endonuclease [Arabidopsis thaliana]
  misc_feature (1)..(411): Homolog of NCBI NO: 15237571 NR Description: repair endonuclease (gb|AAF01274.1) [Arabidopsis
MSDSKNKIDEDETNPISAGRFCETMQGETSVENIVLRRHTNPDAAARNGKSLPPVYFYALESDQPILDILKPSIVIVYHPDMTFVREIEVYKAENPSKRLKVYFIFYEDSSEVQKFEASIRRENGAFESLIRQKSLMMIPVDQSGHSLGLNSTLESDLNTPQNFVTRKAGGRKEAEKEMQVIVDMREFMSSLPNVLHQKGMNIIPVTLEVGDYILSPLICVERKSIQDLFMSFTSGRLYHQVETMVRYYRIPVLLIEFSQDKSFSFQSASDIGDDVTPNSIISKLSLLALHFPRLRIIWSRSLHATAEIFASLKANQDEPDETKAIRVGVPSEEGIVENDVRAENYNTSAVEFLRRCPGVTDSNYRAIMDGCKSLAELALLPVEKLAELMGGHKAARTLRDFLDAKYPTLL

SEQ ID NO: 59567 - protein, 387 aa, Glycine max
  peptide (1)..(387): Ceres Seq. ID no. 14313810
  misc_feature (156)..(236): Pfam Name: ERCC4 domain Pfam Description: ERCC4 domain
  misc_feature (42)..(379): Homolog of NCBI NO: 32766570 NR Description: Unknown (protein for MGC:63468) [Danio rerio]
  misc_feature (42)..(383): Homolog of NCBI NO: 6683476 NR Description: ERCC4 [Cricetulus griseus]
  misc_feature (42)..(383): Homolog of NCBI NO: 1524411 NR Description: DNA repair endonuclease subunit
  misc_feature (42)..(387): Homolog of NCBI NO: 7657064 NR Description: excision repair cross-complementing rodent repair
  misc_feature (42)..(387): Homolog of NCBI NO: 20073215 NR Description: excision repair cross-complementing rodent repair
  misc_feature (42)..(387): Homolog of NCBI NO: 2896801 NR Description: ERCC4_MOUSE [Mus musculus]
  misc_feature (42)..(383): Homolog of NCBI NO: 4885217 NR Description: excision repair cross-complementing rodent repair
  misc_feature (42)..(383): Homolog of NCBI NO: 2842712 NR Description: DNA-REPAIR PROTEIN COMPLEMENTING XP-F CELL PIGMENTOSUM GROUP F COMPLEMENTING PROTEIN) (DNA EXCISION REPAIR
  misc_feature (26)..(387): Homolog of NCBI NO: 8926611 NR Description: 5' repair endonuclease [Arabidopsis thaliana]
  misc_feature (1)..(387): Homolog of NCBI NO: 15237571 NR Description: repair endonuclease (gb|AAF01274.1) [Arabidopsis
MQGETSVENIVLRRHTNPDAAARNGKSLPPVYFYALESDQPILDILKPSIVIVYHPDMTFVREIEVYKAENPSKRLKVYFIFYEDSSEVQKFEASIRRENGAFESLIRQKSLMMIPVDQSGHSLGLNSTLESDLNTPQNFVTRKAGGRKEAEKEMQVIVDMREFMSSLPNVLHQKGMNIIPVTLEVGDYILSPLICVERKSIQDLFMSFTSGRLYHQVETMVRYYRIPVLLIEFSQDKSFSFQSASDIGDDVTPNSIISKLSLLALHFPRLRIIWSRSLHATAEIFASLKANQDEPDETKAIRVGVPSEEGIVENDVRAENYNTSAVEFLRRCPGVTDSNYRAIMDGCKSLAELALLPVEKLAELMGGHKAARTLRDFLDAKYPTLL

SEQ ID NO: 59568 - DNA, 1489 bp, Glycine max
  misc_feature (1)..(1489): Ceres Seq. ID no. 14313840
gttgcagaacaaacaccaacttggtaaccaggcttgcctcctcccggaatcaagaaaggagaaaggtgctattgtactggaaatgaaggacagaggacattgctcagagaagaaaattgattggaacagaaggcttcagaagcagcttatattagatgatcttcgcgttcgttcaatgcaaaacaggattcgaagagtagcctccacccataatgtagaagcttcacaaacccaaattccattatcttctggtataaacttgcaaaccttaaactacatagtgacaatgggattgggtagcaagaatatgactgtgataattgacactggaagcgacttgacatgggtccaatgtgagccttgcatgtcatgttataatcaacaaggaccaatattcaaaccttctacctcctcttcctatcaatcagtttcatgcaattcatcaacctgccaatctcttcaatttgccacaggaaacacaggagcctgtggaagtagtaatccatcaacttgtaactatgtggttaactatggtgatggatcttacactaatggtgagctaggtgttgaagcacttagttttggaggtgtttcagtgagtgattttgtatttggttgtggtaggaacaacaaaggtctatttggaggagtctctggccttatggggttgggaagaagttacctctcattggtatctcaaactaatgccacatttggaggagttttctcatactgcttaccaacaacagaagctggttcttctgggtcattagttatgggtaatgagtcttcagttttcaagaacgctaatcccatcacttacaccagaatgctttcaaatccacagctttccaacttctatattctcaatctcactggcatagatgttggtggtgtggctttgaaggccccattaagctttggcaatggtgggattttgattgattctggcactgtgatcacaagactgccctcatctgtgtacaaggctttgaaggcagagttcttgaaaaagttcacgggtttcccttcagcaccagggttttcaattttggacacttgtttcaatctcactgggtatgatgaagtgagcatacctaccataagtttgcgttttgagggcaatgctcagctaaacgtggatgcaactggcacattctacgttgtgaaagaggatgcttcgcaagtttgcttggcacttgcaagtctttctgatgcatatgacactgctattattgggaattatcagcaaaggaaccaaagggtaatatatgacaccaaacagtccaaagtgggatttgctgaggagccatgcagtttcgcttgaacagggaaatttcatagtataatagatgccaatgccattaaggaggatgcaaaaccttccagttcttctttttcatttttctatttggaccacatatatatacataactacatttgccatataaagaattactagcaacaagagtatcatcatttgacattc

SEQ ID NO: 59569 - protein, 441 aa, Glycine max
  peptide (1)..(441): Ceres Seq. ID no. 14313841
  misc_feature (37)..(432): Pfam Name: Eukaryotic aspartyl protease Pfam Description: Eukaryotic aspartyl protease
  misc_feature (52)..(257): Homolog of NCBI NO: 38344196 NR Description: OSJNBa0064G10.12 [Oryza sativa (japonica
  misc_feature (9)..(438): Homolog of NCBI NO: 15238250 NR Description: nucleoid DNA-binding protein cnd41 - like protein
  misc_feature (9)..(438): Homolog of NCBI NO: 24417232 NR Description: unknown [Arabidopsis thaliana]
  misc_feature (49)..(439): Homolog of NCBI NO: 22326716 NR Description: nucleoid DNA-binding protein cnd41 - like protein
  misc_feature (49)..(439): Homolog of NCBI NO: 11358588 NR Description: nucleoid DNA-binding protein cnd41-like protein -
  misc_feature (71)..(439): Homolog of NCBI NO: 24430421 NR Description: 41 kD chloroplast nucleoid DNA binding protein
  misc_feature (71)..(439): Homolog of NCBI NO: 7489168 NR Description: nucleoid DNA-binding protein cnd41, chloroplast -
  misc_feature (11)..(438): Homolog of NCBI NO: 21595063 NR Description: putative aspartyl protease [Arabidopsis thaliana]
  misc_feature (19)..(438): Homolog of NCBI NO: 25406599 NR Description: probable aspartyl proteinase, 105611-106921
  misc_feature (11)..(438): Homolog of NCBI NO: 18412482 NR Description: aspartyl protease -related [Arabidopsis thaliana]
LQNKHQLGNQACLLPESRKEKGAIVLEMKDRGHCSEKKIDWNRRLQKQLILDDLRVRSMQNRIRRVASTHNVEASQTQIPLSSGINLQTLNYIVTMGLGSKNMTVIIDTGSDLTWVQCEPCMSCYNQQGPIFKPSTSSSYQSVSCNSSTCQSLQFATGNTGACGSSNPSTCNYVVNYGDGSYTNGELGVEALSFGGVSVSDFVFGCGRNNKGLFGGVSGLMGLGRSYLSLVSQTNATFGGVFSYCLPTTEAGSSGSLVMGNESSVFKNANPITYTRMLSNPQLSNFYILNLTGIDVGGVALKAPLSFGNGGILIDSGTVITRLPSSVYKALKAEFLKKFTGFPSAPGFSILDTCFNLTGYDEVSIPTISLRFEGNAQLNVDATGTFYVVKEDASQVCLALASLSDAYDTAIIGNYQQRNQRVIYDTKQSKVGFAEEPCSFA

SEQ ID NO: 59570 - protein, 414 aa, Glycine max
  peptide (1)..(414): Ceres Seq. ID no. 14313842
  misc_feature (10)..(405): Pfam Name: Eukaryotic aspartyl protease Pfam Description: Eukaryotic aspartyl protease
  misc_feature (25)..(230): Homolog of NCBI NO: 38344196 NR Description: OSJNBa0064G10.12 [Oryza sativa (japonica
  misc_feature (1)..(411): Homolog of NCBI NO: 15238250 NR Description: nucleoid DNA-binding protein cnd41 - like protein
  misc_feature (1)..(411): Homolog of NCBI NO: 24417232 NR Description: unknown [Arabidopsis thaliana]
  misc_feature (22)..(412): Homolog of NCBI NO: 22326716 NR Description: nucleoid DNA-binding protein cnd41 - like protein
  misc_feature (22)..(412): Homolog of NCBI NO: 11358588 NR Description: nucleoid DNA-binding protein cnd41-like protein -
  misc_feature (44)..(412): Homolog of NCBI NO: 24430421 NR Description: 41 kD chloroplast nucleoid DNA binding protein
  misc_feature (44)..(412): Homolog of NCBI NO: 7489168 NR Description: nucleoid DNA-binding protein cnd41, chloroplast -
  misc_feature (1)..(411): Homolog of NCBI NO: 21595063 NR Description: putative aspartyl protease [Arabidopsis thaliana]
  misc_feature (1)..(411): Homolog of NCBI NO: 25406599 NR Description: probable aspartyl proteinase, 105611-106921
  misc_feature (1)..(411): Homolog of NCBI NO: 18412482 NR Description: aspartyl protease -related [Arabidopsis thaliana]
MKDRGHCSEKKIDWNRRLQKQLILDDLRVRSMQNRIRRVASTHNVEASQTQIPLSSGINLQTLNYIVTMGLGSKNMTVIIDTGSDLTWVQCEPCMSCYNQQGPIFKPSTSSSYQSVSCNSSTCQSLQFATGNTGACGSSNPSTCNYVVNYGDGSYTNGELGVEALSFGGVSVSDFVFGCGRNNKGLFGGVSGLMGLGRSYLSLVSQTNATFGGVFSYCLPTTEAGSSGSLVMGNESSVFKNANPITYTRMLSNPQLSNFYILNLTGIDVGGVALKAPLSFGNGGILIDSGTVITRLPSSVYKALKAEFLKKFTGFPSAPGFSILDTCFNLTGYDEVSIPTISLRFEGNAQLNVDATGTFYVVKEDASQVCLALASLSDAYDTAIIGNYQQRNQRVIYDTKQSKVGFAEEPCSFA

SEQ ID NO: 59571 - protein, 383 aa, Glycine max
  peptide (1)..(383): Ceres Seq. ID no. 14313843
  misc_feature (1)..(374): Pfam Name: Eukaryotic aspartyl protease Pfam Description: Eukaryotic aspartyl protease
  misc_feature (1)..(199): Homolog of NCBI NO: 38344196 NR Description: OSJNBa0064G10.12 [Oryza sativa (japonica
  misc_feature (1)..(380): Homolog of NCBI NO: 15238250 NR Description: nucleoid DNA-binding protein cnd41 - like protein
  misc_feature (1)..(380): Homolog of NCBI NO: 24417232 NR Description: unknown [Arabidopsis thaliana]
  misc_feature (1)..(381): Homolog of NCBI NO: 22326716 NR Description: nucleoid DNA-binding protein cnd41 - like protein
  misc_feature (1)..(381): Homolog of NCBI NO: 11358588 NR Description: nucleoid DNA-binding protein cnd41-like protein -
  misc_feature (13)..(381): Homolog of NCBI NO: 24430421 NR Description: 41 kD chloroplast nucleoid DNA binding protein
  misc_feature (13)..(381): Homolog of NCBI NO: 7489168 NR Description: nucleoid DNA-binding protein cnd41, chloroplast -
  misc_feature (1)..(380): Homolog of NCBI NO: 21595063 NR Description: putative aspartyl protease [Arabidopsis thaliana]
  misc_feature (1)..(380): Homolog of NCBI NO: 25406599 NR Description: probable aspartyl proteinase, 105611-106921
  misc_feature (1)..(380): Homolog of NCBI NO: 18412482 NR Description: aspartyl protease -related [Arabidopsis thaliana]
MQNRIRRVASTHNVEASQTQIPLSSGINLQTLNYIVTMGLGSKNMTVIIDTGSDLTWVQCEPCMSCYNQQGPIFKPSTSSSYQSVSCNSSTCQSLQFATGNTGACGSSNPSTCNYVVNYGDGSYTNGELGVEALSFGGVSVSDFVFGCGRNNKGLFGGVSGLMGLGRSYLSLVSQTNATFGGVFSYCLPTTEAGSSGSLVMGNESSVFKNANPITYTRMLSNPQLSNFYILNLTGIDVGGVALKAPLSFGNGGILIDSGTVITRLPSSVYKALKAEFLKKFTGFPSAPGFSILDTCFNLTGYDEVSIPTISLRFEGNAQLNVDATGTFYVVKEDASQVCLALASLSDAYDTAIIGNYQQRNQRVIYDTKQSKVGFAEEPCSFA

SEQ ID NO: 59572 - DNA, 1471 bp, Glycine max
  misc_feature (1)..(1471): Ceres Seq. ID no. 15169300
gtgttagtagagagacagagacaccggtcacagtcacaccacaccggcaaatattttgcattgcttagggttttggaacagattcaattcagcgttacttcaatccaagcacatggcgaaaggaaagcatacgcatacccgagcacaggggaagaagtggtcaacgttctcgctggttctgtgggcgcttttcttcctcacactcatcctcgtcgtgctccttgctctcggcattgtttatcttccaactaccgacgacgattttccaaccacggatctcagcgccttcaggcgcaagacctctcaaagtgccgagagtttggtggaaaatccgccggagcagtggaccgagattctctcctgggagcctagagcgttcatctatcacaattttctgtcaaaagaagaatgtgagtacttgattgaacttgccaaacctcaaatggtaaaatcaagtgttgttgatagcaagactgggaagagtacagaaagcagggttcgaaccagttcaggaatgttcttgaagagaggaaaggacaaaattgtccagaatatagagaaaagaattgctgactttaccttcatacctgaagagaatggagaaggacttcaaattcttcactacgaagtaggacaaaaatatgagcctcactatgattacttccttgatgagttcaacactaagaatggaggccaacgtattgctacagttcttatgtacctttcagatgttgaagaaggcggtgagactgtatttccggctgccaatgcaaattttagttctgtgccttggtggaatgatttatcccaatgtgcaagaaagggtctctcagtgaaaccaaaaatgggtgatgctctgctattttggagcatgaggcctgatgccacactagatccatctagtttacatggtggttgcccagtaattaaaggaaataaatggtcttcaacaaagtggatgcatcttcgtgagtacaaggtttgacccatcaactgcacaggattaacgtggtacagggtgagtatttcatcacattttggattggataaacacaagttcagtgcatttcatgttcaccttttatgctacctagtgatgttcccctttgctcaggtgcgccagcattttcttcacttgtagaataaaccatttggtttctctttctcatggatagacaattttggcattgccaagggaaaaaagaatactttcagttaatgatctgagttttagtcttgtagagttttcaagcgaatatgtctattaggtaagaggctcaccagggagtgatgtgttgaatacaagtagagataaatttgcaatttactggggagtgatgtgttgaatacaagtagagataaatttgcaatttagcatagtgaaaggatggtatgttggtcatagataagtttttgagaatgtgctatatttcacagaagtaagaaaaacaataatttttttagtttgtat

SEQ ID NO: 59573 - protein, 290 aa, Glycine max
  peptide (1)..(290): Ceres Seq. ID no. 15169301
  misc_feature (162)..(285): Pfam Name: 2OG-Fe(II) oxygenase superfamily Pfam Description: 2OG-Fe(II) oxygenase superfamily
  misc_feature (75)..(288): Homolog of NCBI NO: 29150365 NR Description: putative oxidoreductase [Oryza sativa (japonica
  misc_feature (18)..(131): Homolog of NCBI NO: 15233341 NR Description: oxidoreductase, 2OG-Fe(II) oxygenase family
  misc_feature (118)..(267): Homolog of NCBI NO: 15233341 NR Description: oxidoreductase, 2OG-Fe(II) oxygenase family
  misc_feature (13)..(290): Homolog of NCBI NO: 37535718 NR Description: putative prolyl 4-hydroxylase, alpha subunit
  misc_feature (1)..(267): Homolog of NCBI NO: 7488226 NR Description: procollagen-proline dioxygenase alpha chain
  misc_feature (1)..(267): Homolog of NCBI NO: 15239240 NR Description: oxidoreductase, 2OG-Fe(II) oxygenase family
  misc_feature (1)..(290): Homolog of NCBI NO: 21593091 NR Description: putative prolyl 4-hydroxylase, alpha subunit
  misc_feature (1)..(290): Homolog of NCBI NO: 15227885 NR Description: oxidoreductase, 2OG-Fe(II) oxygenase family
  misc_feature (5)..(290): Homolog of NCBI NO: 21537370 NR Description: putative prolyl 4-hydroxylase, alpha subunit
  misc_feature (5)..(290): Homolog of NCBI NO: 18394842 NR Description: oxidoreductase, 2OG-Fe(II) oxygenase family
MAKGKHTHTRAQGKKWSTFSLVLWALFFLTLILVVLLALGIVYLPTTDDDFPTTDLSAFRRKTSQSAESLVENPPEQWTEILSWEPRAFIYHNFLSKEECEYLIELAKPQMVKSSVVDSKTGKSTESRVRTSSGMFLKRGKDKIVQNIEKRIADFTFIPEENGEGLQILHYEVGQKYEPHYDYFLDEFNTKNGGQRIATVLMYLSDVEEGGETVFPAANANFSSVPWWNDLSQCARKGLSVKPKMGDALLFWSMRPDATLDPSSLHGGCPVIKGNKWSSTKWMHLREYKV

SEQ ID NO: 59574 - protein, 180 aa, Glycine max
  peptide (1)..(180): Ceres Seq. ID no. 15169302
  misc_feature (52)..(175): Pfam Name: 2OG-Fe(II) oxygenase superfamily Pfam Description: 2OG-Fe(II) oxygenase superfamily
  misc_feature (1)..(178): Homolog of NCBI NO: 29150365 NR Description: putative oxidoreductase [Oryza sativa (japonica
  misc_feature (1)..(21): Homolog of NCBI NO: 15233341 NR Description: oxidoreductase, 2OG-Fe(II) oxygenase family
  misc_feature (8)..(157): Homolog of NCBI NO: 15233341 NR Description: oxidoreductase, 2OG-Fe(II) oxygenase family
  misc_feature (1)..(180): Homolog of NCBI NO: 37535718 NR Description: putative prolyl 4-hydroxylase, alpha subunit
  misc_feature (1)..(157): Homolog of NCBI NO: 7488226 NR Description: procollagen-proline dioxygenase alpha chain
  misc_feature (1)..(157): Homolog of NCBI NO: 15239240 NR Description: oxidoreductase, 2OG-Fe(II) oxygenase family
  misc_feature (1)..(180): Homolog of NCBI NO: 21593091 NR Description: putative prolyl 4-hydroxylase, alpha subunit
  misc_feature (1)..(180): Homolog of NCBI NO: 15227885 NR Description: oxidoreductase, 2OG-Fe(II) oxygenase family
  misc_feature (1)..(180): Homolog of NCBI NO: 21537370 NR Description: putative prolyl 4-hydroxylase, alpha subunit
  misc_feature (1)..(180): Homolog of NCBI NO: 18394842 NR Description: oxidoreductase, 2OG-Fe(II) oxygenase family
MVKSSVVDSKTGKSTESRVRTSSGMFLKRGKDKIVQNIEKRIADFTFIPEENGEGLQILHYEVGQKYEPHYDYFLDEFNTKNGGQRIATVLMYLSDVEEGGETVFPAANANFSSVPWWNDLSQCARKGLSVKPKMGDALLFWSMRPDATLDPSSLHGGCPVIKGNKWSSTKWMHLREYKV

SEQ ID NO: 59575 - protein, 156 aa, Glycine max
  peptide (1)..(156): Ceres Seq. ID no. 15169303
  misc_feature (28)..(151): Pfam Name: 2OG-Fe(II) oxygenase superfamily Pfam Description: 2OG-Fe(II) oxygenase superfamily
  misc_feature (8)..(156): Homolog of NCBI NO: 37534316 NR Description: unknown protein [Oryza sativa (japonica
  misc_feature (1)..(154): Homolog of NCBI NO: 29150365 NR Description: putative oxidoreductase [Oryza sativa (japonica
  misc_feature (1)..(133): Homolog of NCBI NO: 15233341 NR Description: oxidoreductase, 2OG-Fe(II) oxygenase family
  misc_feature (1)..(156): Homolog of NCBI NO: 37535718 NR Description: putative prolyl 4-hydroxylase, alpha subunit
  misc_feature (1)..(133): Homolog of NCBI NO: 7488226 NR Description: procollagen-proline dioxygenase alpha chain
  misc_feature (1)..(133): Homolog of NCBI NO: 15239240 NR Description: oxidoreductase, 2OG-Fe(II) oxygenase family
  misc_feature (1)..(156): Homolog of NCBI NO: 21593091 NR Description: putative prolyl 4-hydroxylase, alpha subunit
  misc_feature (1)..(156): Homolog of NCBI NO: 15227885 NR Description: oxidoreductase, 2OG-Fe(II) oxygenase family
  misc_feature (1)..(156): Homolog of NCBI NO: 21537370 NR Description: putative prolyl 4-hydroxylase, alpha subunit
  misc_feature (1)..(156): Homolog of NCBI NO: 18394842 NR Description: oxidoreductase, 2OG-Fe(II) oxygenase family
MFLKRGKDKIVQNIEKRIADFTFIPEENGEGLQILHYEVGQKYEPHYDYFLDEFNTKNGGQRIATVLMYLSDVEEGGETVFPAANANFSSVPWWNDLSQCARKGLSVKPKMGDALLFWSMRPDATLDPSSLHGGCPVIKGNKWSSTKWMHLREYKV

SEQ ID NO: 59576 - DNA, 1292 bp, Glycine max
  misc_feature (1)..(1292): Ceres Seq. ID no. 15171109
acatattattttctgtggtttgtattttttgttctatctattttgtttcctcttgtgtgagcacatgtttgaaaatcaaatcaaaggcattcacttgaaccgttgttttcttttgacaaatttgtctgcacacttcattgggctcgcttaaagtgattcgtggttcatacttgttcacataaaaaagctacaagagaaagacgagcgctttcatatttgttgtaatcttaaaatcagacaaatggatgttgaagtagtagggcctatagtaggattttttcaaacttagttttctttcatctaccaaaatcttcgcattcacatttcacacactgtctggcatcccctaacaatattcattcatttattcattaccatttatgatgggattaatgcttaggtggcaaaagagagagccctaccagttggaccagaggaaggtggttttggaatgtcatatgatcttctgtatggacgagctggattcttatggggtgcattgttcgtgaacaagcacctaggagaagatgcagtgcccaaagacattttgatgcttattattgatgcggtgttggctggtggtagagcaggagcatctgatattaaagactgcccattgatgtatagatggcatggaacaaggtacttgggtgcagcaaatggccttgctggtatccttcatgtgctgctacattttccacttccaagtgaggatgctgaggatgtcaagggaactttgtggtacctcatgagtaagcgtttccctcacagtggaaactatccctccagtgaaggtaatccaagggataagttagtgcaatggggtcatggggcgactggcatggccatcacgttgtccaaagcagcagaggtatttcctaatgacagagaactaagagatgctgcaatagaagcaggtgaagttgtatggaagagtggattggtgaagaaggtgggacttgcagatggggtatctgggaatgcctatgccttcctttccctctacagactcactaaagagagtatatacgaagagagagcaaaatcattcgcttccttcttgtatgataatgcaaaatctctggctgctgccaatggctattcacttttccaaggacttgctgggacagcatgcctctggtttgatctgcttgcacccgacaactctaggttcccaggttatgaattatagatggttaaagtagagatggtgcttattctacaagcagaaggaacgtggcatggatggaaaatgttaggtagaacaccaatcataagtgatatgatctgat

SEQ ID NO: 59577 - protein, 246 aa, Glycine max
  peptide (1)..(246): Ceres Seq. ID no. 15171110
  misc_feature (1)..(246): Pfam Name: Lanthionine synthetase C-like protein Pfam Description: Lanthionine synthetase C-like protein
  misc_feature (4)..(246): Homolog of NCBI NO: 8923911 NR Description: LanC lantibiotic synthetase component C-like 2
  misc_feature (4)..(246): Homolog of NCBI NO: 19526936 NR Description: RIKEN cDNA 1700003F10 [Mus musculus]
  misc_feature (4)..(246): Homolog of NCBI NO: 30681129 NR Description: expressed protein [Arabidopsis thaliana]
  misc_feature (4)..(246): Homolog of NCBI NO: 25411993 NR Description: hypothetical protein At2g20770 [imported] -
  misc_feature (4)..(246): Homolog of NCBI NO: 21742091 NR Description: OSJNBa0074L08.13 [Oryza sativa (japonica
  misc_feature (4)..(246): Homolog of NCBI NO: 37535720 NR Description: putative lanthionine synthetase
  misc_feature (1)..(246): Homolog of NCBI NO: 15219126 NR Description: G protein-coupled receptor -related [Arabidopsis
  misc_feature (1)..(246): Homolog of NCBI NO: 15451140 NR Description: G protein-coupled receptor-like protein
  misc_feature (1)..(246): Homolog of NCBI NO: 15238395 NR Description: G protein-coupled receptor-related protein
  misc_feature (1)..(246): Homolog of NCBI NO: 8489877 NR Description: putative 7-transmembrane G-protein-coupled
MSYDLLYGRAGFLWGALFVNKHLGEDAVPKDILMLIIDAVLAGGRAGASDIKDCPLMYRWHGTRYLGAANGLAGILHVLLHFPLPSEDAEDVKGTLWYLMSKRFPHSGNYPSSEGNPRDKLVQWGHGATGMAITLSKAAEVFPNDRELRDAAIEAGEVVWKSGLVKKVGLADGVSGNAYAFLSLYRLTKESIYEERAKSFASFLYDNAKSLAAANGYSLFQGLAGTACLWFDLLAPDNSRFPGYEL

SEQ ID NO: 59578 - protein, 213 aa, Glycine max
  peptide (1)..(213): Ceres Seq. ID no. 15171111
  misc_feature (1)..(213): Pfam Name: Lanthionine synthetase C-like protein Pfam Description: Lanthionine synthetase C-like protein
  misc_feature (1)..(213): Homolog of NCBI NO: 8923911 NR Description: LanC lantibiotic synthetase component C-like 2
  misc_feature (1)..(213): Homolog of NCBI NO: 19526936 NR Description: RIKEN cDNA 1700003F10 [Mus musculus]
  misc_feature (1)..(213): Homolog of NCBI NO: 30681129 NR Description: expressed protein [Arabidopsis thaliana]
  misc_feature (1)..(213): Homolog of NCBI NO: 25411993 NR Description: hypothetical protein At2g20770 [imported] -
  misc_feature (1)..(213): Homolog of NCBI NO: 21742091 NR Description: OSJNBa0074L08.13 [Oryza sativa (japonica
  misc_feature (1)..(213): Homolog of NCBI NO: 37535720 NR Description: putative lanthionine synthetase
  misc_feature (1)..(213): Homolog of NCBI NO: 15219126 NR Description: G protein-coupled receptor -related [Arabidopsis
  misc_feature (1)..(213): Homolog of NCBI NO: 15451140 NR Description: G protein-coupled receptor-like protein
  misc_feature (1)..(213): Homolog of NCBI NO: 15238395 NR Description: G protein-coupled receptor-related protein
  misc_feature (1)..(213): Homolog of NCBI NO: 8489877 NR Description: putative 7-transmembrane G-protein-coupled
MLIIDAVLAGGRAGASDIKDCPLMYRWHGTRYLGAANGLAGILHVLLHFPLPSEDAEDVKGTLWYLMSKRFPHSGNYPSSEGNPRDKLVQWGHGATGMAITLSKAAEVFPNDRELRDAAIEAGEVVWKSGLVKKVGLADGVSGNAYAFLSLYRLTKESIYEERAKSFASFLYDNAKSLAAANGYSLFQGLAGTACLWFDLLAPDNSRFPGYEL

SEQ ID NO: 59579 - protein, 190 aa, Glycine max
  peptide (1)..(190): Ceres Seq. ID no. 15171112
  misc_feature (1)..(190): Pfam Name: Lanthionine synthetase C-like protein Pfam Description: Lanthionine synthetase C-like protein
  misc_feature (1)..(190): Homolog of NCBI NO: 8923911 NR Description: LanC lantibiotic synthetase component C-like 2
  misc_feature (1)..(190): Homolog of NCBI NO: 19526936 NR Description: RIKEN cDNA 1700003F10 [Mus musculus]
  misc_feature (1)..(190): Homolog of NCBI NO: 30681129 NR Description: expressed protein [Arabidopsis thaliana]
  misc_feature (1)..(190): Homolog of NCBI NO: 25411993 NR Description: hypothetical protein At2g20770 [imported] -
  misc_feature (1)..(190): Homolog of NCBI NO: 21742091 NR Description: OSJNBa0074L08.13 [Oryza sativa (japonica
  misc_feature (1)..(190): Homolog of NCBI NO: 37535720 NR Description: putative lanthionine synthetase
  misc_feature (1)..(190): Homolog of NCBI NO: 15219126 NR Description: G protein-coupled receptor -related [Arabidopsis
  misc_feature (1)..(190): Homolog of NCBI NO: 15451140 NR Description: G protein-coupled receptor-like protein
  misc_feature (1)..(190): Homolog of NCBI NO: 15238395 NR Description: G protein-coupled receptor-related protein
  misc_feature (1)..(190): Homolog of NCBI NO: 8489877 NR Description: putative 7-transmembrane G-protein-coupled
MYRWHGTRYLGAANGLAGILHVLLHFPLPSEDAEDVKGTLWYLMSKRFPHSGNYPSSEGNPRDKLVQWGHGATGMAITLSKAAEVFPNDRELRDAAIEAGEVVWKSGLVKKVGLADGVSGNAYAFLSLYRLTKESIYEERAKSFASFLYDNAKSLAAANGYSLFQGLAGTACLWFDLLAPDNSRFPGYEL

SEQ ID NO: 59580 - DNA, 862 bp, Glycine max
  misc_feature (1)..(862): Ceres Seq. ID no. 13593963
aatcccaattcccagggtctaagcagcacaacactagttcccaacgccgtcacccccgtttgtgcagtgaagaagaagaagatggccgtaaaatcgaagaaagagaaagaacacctgaatcttctcctaggttcccaccttactactatccatgaaaccctccaggttttggatcaaacaccgccatcttcttcttccgccaaagtcacctgggacgatgtcattaagatggctgaacaagtctcaaaacaagctaccacggtgggaatgctgtggactggagagaagccagatgccaaagcagttgaggaaaatatggcatcatatttcaacaccctgcaaggtttccttttactttcccatggcagtacagtaggtgcagggcctaccttgtcttctgctgttcatgcatccgtcaagcaagtcgttgattccagcttcagattgatgaaggaaactgtctctttatacgggtaccattctaaagacctgaaaatatcagtaccacaattggttggtgctgtctgggaagcctgttctgcccttaaaaagactccttccacaaatattacagcaattgggagaggaatgacacaggttgctgtttcagtgaaggacgttcttcgtgagatgaaagaattgaaacctgtttcatgtgatgatcaagttgacgaagctgctggtgagagttgtgcagaagcagcgtctgagccacatgatgataattcaagtgaaggtgatctagggaatgacctgtcacctgaagagatgaaagtggctgaaagagcaattgaggttgtctctaatacgctttcatttataagaatacttattcactccatcatacgcttgcttaagctgg

SEQ ID NO: 59581 - protein, 287 aa, Glycine max
  peptide (1)..(287): Ceres Seq. ID no. 13593964
  misc_feature (88)..(229): Homolog of NCBI NO: 25372690 NR Description: F19G10.7 protein - Arabidopsis thaliana
  misc_feature (33)..(229): Homolog of NCBI NO: 18395185 NR Description: hypothetical protein [Arabidopsis thaliana]
  misc_feature (32)..(286): Homolog of NCBI NO: 15223962 NR Description: hypothetical protein [Arabidopsis thaliana]
  misc_feature (33)..(286): Homolog of NCBI NO: 15219987 NR Description: expressed protein [Arabidopsis thaliana]
NPNSQGLSSTTLVPNAVTPVCAVKKKKMAVKSKKEKEHLNLLLGSHLTTIHETLQVLDQTPPSSSSAKVTWDDVIKMAEQVSKQATTVGMLWTGEKPDAKAVEENMASYFNTLQGFLLLSHGSTVGAGPTLSSAVHASVKQVVDSSFRLMKETVSLYGYHSKDLKISVPQLVGAVWEACSALKKTPSTNITAIGRGMTQVAVSVKDVLREMKELKPVSCDDQVDEAAGESCAEAASEPHDDNSSEGDLGNDLSPEEMKVAERAIEVVSNTLSFIRILIHSIIRLLKL

SEQ ID NO: 59582 - protein, 260 aa, Glycine max
  peptide (1)..(260): Ceres Seq. ID no. 13593965
  misc_feature (61)..(202): Homolog of NCBI NO: 25372690 NR Description: F19G10.7 protein - Arabidopsis thaliana
  misc_feature (6)..(202): Homolog of NCBI NO: 18395185 NR Description: hypothetical protein [Arabidopsis thaliana]
  misc_feature (5)..(259): Homolog of NCBI NO: 15223962 NR Description: hypothetical protein [Arabidopsis thaliana]
  misc_feature (6)..(259): Homolog of NCBI NO: 15219987 NR Description: expressed protein [Arabidopsis thaliana]
MAVKSKKEKEHLNLLLGSHLTTIHETLQVLDQTPPSSSSAKVTWDDVIKMAEQVSKQATTVGMLWTGEKPDAKAVEENMASYFNTLQGFLLLSHGSTVGAGPTLSSAVHASVKQVVDSSFRLMKETVSLYGYHSKDLKISVPQLVGAVWEACSALKKTPSTNITAIGRGMTQVAVSVKDVLREMKELKPVSCDDQVDEAAGESCAEAASEPHDDNSSEGDLGNDLSPEEMKVAERAIEVVSNTLSFIRILIHSIIRLLKL

SEQ ID NO: 59583 - protein, 211 aa, Glycine max
  peptide (1)..(211): Ceres Seq. ID no. 13593966
  misc_feature (12)..(153): Homolog of NCBI NO: 25372690 NR Description: F19G10.7 protein - Arabidopsis thaliana
  misc_feature (1)..(153): Homolog of NCBI NO: 18395185 NR Description: hypothetical protein [Arabidopsis thaliana]
  misc_feature (1)..(210): Homolog of NCBI NO: 15223962 NR Description: hypothetical protein [Arabidopsis thaliana]
  misc_feature (1)..(210): Homolog of NCBI NO: 15219987 NR Description: expressed protein [Arabidopsis thaliana]
MAEQVSKQATTVGMLWTGEKPDAKAVEENMASYFNTLQGFLLLSHGSTVGAGPTLSSAVHASVKQVVDSSFRLMKETVSLYGYHSKDLKISVPQLVGAVWEACSALKKTPSTNITAIGRGMTQVAVSVKDVLREMKELKPVSCDDQVDEAAGESCAEAASEPHDDNSSEGDLGNDLSPEEMKVAERAIEVVSNTLSFIRILIHSIIRLLKL

SEQ ID NO: 59584 - DNA, 1232 bp, Glycine max
  misc_feature (1)..(1232): Ceres Seq. ID no. 14314172
gagccgaaaaccattcatataattcgtggttccgctgaagccccgtttcatagatacttttctcatttggtgtatctgctaagcctatataccttcaggagatttcactctgctccccaaccccctttcctcttctattgattactacttattttcaagggatcaatacaatataatggttcaaacatgctaacggtgtatgctcccagagcagttctaaagtgccatttacaccaggattcagcttcttctcaacaaccatattcatatccatgcaagatcaataataatgttcatttggtgaattgtaatcctaaaccttttggcactccttgtactaatatatcgtttcatagttcctccttctctgggaaatgtgataagctacaaaagagccttcatctattccatcatgttgccacacataaatggctgtgtggattacaggattccatttcatctgatgatgagtatcgttcttcacgcaacatagccatcagcttgttcaggcgatacaggaacttcattgatcgtggtggaggggacaatctaaaagagttcatcactgccggggtaaatgcatatgcgctaggatgcactgatgaaggattaaggaaagaacttgtggatatgaagaattctgggatcgaaattgatgtaatgcaaagttatggtggaagcacaagcttaaaatctaagatcatctcagaggaggttgatgaatgcattctctggctaagcattatattcatcaccatcttgtgtacaccccaaccaactattgttagatggtcatctacaactccagtctcagatgaagttagacttcagtggaaaggcttttgtgctcttatagcaaatgcatattttatgaagggaatggcttggcttcctgtaaagactcttcaattagaacagacggctgtgatgggtcaggctgagaaaccgtcagttgttgctagccgaatgcgtttagtctttagcacacttgaggtagtgagtccacagtggccaagagcatagaccatgggatcatgttaaaactggctctcaatcatttcacgttgagttgtattccatatttgctaacaaatgtagcaatatcatgccagagaggatattaaaaaggaaagaaaagaaaaaactggatttctattttgtatgttatcaaagtgagacattatatattgcaattttagtgctatactaagttagaggaaggctaattatcg

SEQ ID NO: 59585 - protein, 278 aa, Glycine max
  peptide (1)..(278): Ceres Seq. ID no. 14314173
  misc_feature (1)..(277): Homolog of NCBI NO: 30017575 NR Description: unknown protein [Oryza sativa (japonica
  misc_feature (38)..(277): Homolog of NCBI NO: 15220740 NR Description: expressed protein [Arabidopsis thaliana]
MLTVYAPRAVLKCHLHQDSASSQQPYSYPCKINNNVHLVNCNPKPFGTPCTNISFHSSSFSGKCDKLQKSLHLFHHVATHKWLCGLQDSISSDDEYRSSRNIAISLFRRYRNFIDRGGGDNLKEFITAGVNAYALGCTDEGLRKELVDMKNSGIEIDVMQSYGGSTSLKSKIISEEVDECILWLSIIFITILCTPQPTIVRWSSTTPVSDEVRLQWKGFCALIANAYFMKGMAWLPVKTLQLEQTAVMGQAEKPSVVASRMRLVFSTLEVVSPQWPRA

SEQ ID NO: 59586 - DNA, 1836 bp, Glycine max
  misc_feature (1)..(1836): Ceres Seq. ID no. 15174547
agaatcagataagtgttggtttgtttttttgttgagaagagagaatggctgtggcgtcgtcatcatcccttatcacgttgaaggtgaaaccttgcattttcgggtctcctcggagatccgcggtggttcggaattgtgcgaagtcaacggcggggacaatatcgacgagttggagcctggacagctggagggcgaagaaggcgcttcagcttccggagtacccagatgcgaatgaattggacctagtcctccaaaccctctcttcttttcccccaatcgtcttcgccggcgaggcgaggaatctggaggagaagctcgctcaggctgccatggggaacgcttttctccttcagggcggtgattgcgccgagagcttcaaggaattcactgccaacaacatccgtgacaccttccgtgtcatccttcaaatgggtgtggtcctcatgttcggtggccaaatgcccgttatcaaggtggggagaatggcaggtcaatttgcaaagccgagatccgattcatttgaggagaagaatggagtgacgctcccgagttacaggggtgataatgtgaatggcgatgcatttgacgcggcatctagaatccccgatccacagaggatgataagagcctactgccaatctgtgtctactctgaaccttttgcgggcatttgccacgggaggttatgctgccatgcaaagggttaatcaatggaatcttgatttcatggagcatagtgaacagggagacaggtaccgtgaattagcccatagagtggatgaggctcttggcttcatgaatgttgctgggctcacagccgaccatcccatcatgagtacaacagacttttggacctcccatgagtgtttgcttctcccttatgagcaagcacttactagggaggattctactactgggcttcattatgattgctcagctcacatgctatgggttggggaacgtacccgccaacttgatggtgctcatgttgaattcttgagaggagttgctaatccacttggcatcaaggtgagtgataagatggttcccgatgaacttgttaagctgatagatattctgaaccctaaaaacaagcctggaagaattacagtcattgttagaatgggagctgagaatatgcgagtgaagcttccacatcttatcagggcagttcgcagagcaggtcaaattgtcacttgggttagtgaccccatgcatgggaacaccattaaagctccatctggacttaaaacccgctcttttgatgcaataagggctgagctgagggcattctttgatgtgcatgatcaagaaggaagctacccaggaggggttcatttagagatgacagggcagaacgtgacagaatgtgttggaggctcaaggactattacttatgatgacttgagctcacgctaccacacacattgtgatccaaggcttaatgcttctcaatctctcgagcttgcatttaatattgcggacaggttgcgcaagagaaggctcaattcaactcgatcacttggaatttagacaagagggggtctgtcttcctttgtacctggatcacaatactggtcaaacatgtgttgagttttcttgagcacagtgaacaaatactctactgggagccactctaccgagtttcataagaacttaaaatagtcggcacaattaatagttgtgctgtatgagtgttacaagacagttcaaaacactgcaggtgtatgtacttgcaagtttgcacttttaagtttggagatagtacgtgtgtagtatttatgctcgactcgagtaaatgagtaataaataaagtttcaaggtacaacttacatcg

SEQ ID NO: 59587 - protein, 495 aa, Glycine max
  peptide (1)..(495): Ceres Seq. ID no. 15174548
  misc_feature (43)..(479): Pfam Name: Class-II DAHP synthetase family Pfam Description: Class-II DAHP synthetase family
  misc_feature (43)..(489): Homolog of NCBI NO: 34906844 NR Description: putative phospho-2-dehydro-3-deoxyheptonate
  misc_feature (2)..(489): Homolog of NCBI NO: 24745903 NR Description: 3-deoxy-D-arabino-heptulosonate 7-phosphate
  misc_feature (2)..(489): Homolog of NCBI NO: 584777 NR Description: Phospho-2-dehydro-3-deoxyheptonate aldolase 1, precursor (Phospho-2-keto-3-deoxyheptonate aldolase 1) (DAHP
  misc_feature (15)..(494): Homolog of NCBI NO: 114193 NR Description: Phospho-2-dehydro-3-deoxyheptonate aldolase 1, precursor (Phospho-2-keto-3-deoxyheptonate aldolase 1) (DAHP
  misc_feature (16)..(486): Homolog of NCBI NO: 2398681 NR Description: 3-deoxy-D-arabino-heptulosonate 7-phosphate
  misc_feature (2)..(494): Homolog of NCBI NO: 584778 NR Description: Phospho-2-dehydro-3-deoxyheptonate aldolase 2, precursor (Phospho-2-keto-3-deoxyheptonate aldolase 2) (DAHP
  misc_feature (43)..(493): Homolog of NCBI NO: 2398679 NR Description: 3-deoxy-D-arabino-heptulosonate 7-phosphate
  misc_feature (33)..(489): Homolog of NCBI NO: 21593248 NR Description: 2-dehydro-3-deoxyphosphoheptonate aldolase
  misc_feature (33)..(489): Homolog of NCBI NO: 166690 NR Description: 3-deoxy-D-arabino-heptulosonate 7-phosphate
  misc_feature (33)..(489): Homolog of NCBI NO: 15234217 NR Description: 2-dehydro-3-deoxyphosphoheptonate aldolase (DHS2)
MAVASSSSLITLKVKPCIFGSPRRSAVVRNCAKSTAGTISTSWSLDSWRAKKALQLPEYPDANELDLVLQTLSSFPPIVFAGEARNLEEKLAQAAMGNAFLLQGGDCAESFKEFTANNIRDTFRVILQMGVVLMFGGQMPVIKVGRMAGQFAKPRSDSFEEKNGVTLPSYRGDNVNGDAFDAASRIPDPQRMIRAYCQSVSTLNLLRAFATGGYAAMQRVNQWNLDFMEHSEQGDRYRELAHRVDEALGFMNVAGLTADHPIMSTTDFWTSHECLLLPYEQALTREDSTTGLHYDCSAHMLWVGERTRQLDGAHVEFLRGVANPLGIKVSDKMVPDELVKLIDILNPKNKPGRITVIVRMGAENMRVKLPHLIRAVRRAGQIVTWVSDPMHGNTIKAPSGLKTRSFDAIRAELRAFFDVHDQEGSYPGGVHLEMTGQNVTECVGGSRTITYDDLSSRYHTHCDPRLNASQSLELAFNIADRLRKRRLNSTRSLGI

SEQ ID NO: 59588 - protein, 400 aa, Glycine max
  peptide (1)..(400): Ceres Seq. ID no. 15174549
  misc_feature (1)..(384): Pfam Name: Class-II DAHP synthetase family Pfam Description: Class-II DAHP synthetase family
  misc_feature (1)..(394): Homolog of NCBI NO: 34906844 NR Description: putative phospho-2-dehydro-3-deoxyheptonate
  misc_feature (1)..(394): Homolog of NCBI NO: 24745903 NR Description: 3-deoxy-D-arabino-heptulosonate 7-phosphate
  misc_feature (1)..(394): Homolog of NCBI NO: 584777 NR Description: Phospho-2-dehydro-3-deoxyheptonate aldolase 1, precursor (Phospho-2-keto-3-deoxyheptonate aldolase 1) (DAHP
  misc_feature (1)..(399): Homolog of NCBI NO: 114193 NR Description: Phospho-2-dehydro-3-deoxyheptonate aldolase 1, precursor (Phospho-2-keto-3-deoxyheptonate aldolase 1) (DAHP
  misc_feature (1)..(391): Homolog of NCBI NO: 2398681 NR Description: 3-deoxy-D-arabino-heptulosonate 7-phosphate
  misc_feature (1)..(399): Homolog of NCBI NO: 584778 NR Description: Phospho-2-dehydro-3-deoxyheptonate aldolase 2, precursor (Phospho-2-keto-3-deoxyheptonate aldolase 2) (DAHP
  misc_feature (1)..(398): Homolog of NCBI NO: 2398679 NR Description: 3-deoxy-D-arabino-heptulosonate 7-phosphate
  misc_feature (1)..(394): Homolog of NCBI NO: 21593248 NR Description: 2-dehydro-3-deoxyphosphoheptonate aldolase
  misc_feature (1)..(394): Homolog of NCBI NO: 166690 NR Description: 3-deoxy-D-arabino-heptulosonate 7-phosphate
  misc_feature (1)..(394): Homolog of NCBI NO: 15234217 NR Description: 2-dehydro-3-deoxyphosphoheptonate aldolase (DHS2)
MGNAFLLQGGDCAESFKEFTANNIRDTFRVILQMGVVLMFGGQMPVIKVGRMAGQFAKPRSDSFEEKNGVTLPSYRGDNVNGDAFDAASRIPDPQRMIRAYCQSVSTLNLLRAFATGGYAAMQRVNQWNLDFMEHSEQGDRYRELAHRVDEALGFMNVAGLTADHPIMSTTDFWTSHECLLLPYEQALTREDSTTGLHYDCSAHMLWVGERTRQLDGAHVEFLRGVANPLGIKVSDKMVPDELVKLIDILNPKNKPGRITVIVRMGAENMRVKLPHLIRAVRRAGQIVTWVSDPMHGNTIKAPSGLKTRSFDAIRAELRAFFDVHDQEGSYPGGVHLEMTGQNVTECVGGSRTITYDDLSSRYHTHCDPRLNASQSLELAFNIADRLRKRRLNSTRSLGI

SEQ ID NO: 59589 - protein, 367 aa, Glycine max
  peptide (1)..(367): Ceres Seq. ID no. 15174550
  misc_feature (1)..(351): Pfam Name: Class-II DAHP synthetase family Pfam Description: Class-II DAHP synthetase family
  misc_feature (1)..(361): Homolog of NCBI NO: 34906844 NR Description: putative phospho-2-dehydro-3-deoxyheptonate
  misc_feature (1)..(361): Homolog of NCBI NO: 24745903 NR Description: 3-deoxy-D-arabino-heptulosonate 7-phosphate
  misc_feature (1)..(361): Homolog of NCBI NO: 584777 NR Description: Phospho-2-dehydro-3-deoxyheptonate aldolase 1, precursor (Phospho-2-keto-3-deoxyheptonate aldolase 1) (DAHP
  misc_feature (1)..(366): Homolog of NCBI NO: 114193 NR Description: Phospho-2-dehydro-3-deoxyheptonate aldolase 1, precursor (Phospho-2-keto-3-deoxyheptonate aldolase 1) (DAHP
  misc_feature (1)..(358): Homolog of NCBI NO: 2398681 NR Description: 3-deoxy-D-arabino-heptulosonate 7-phosphate
  misc_feature (1)..(366): Homolog of NCBI NO: 584778 NR Description: Phospho-2-dehydro-3-deoxyheptonate aldolase 2, precursor (Phospho-2-keto-3-deoxyheptonate aldolase 2) (DAHP
  misc_feature (1)..(365): Homolog of NCBI NO: 2398679 NR Description: 3-deoxy-D-arabino-heptulosonate 7-phosphate
  misc_feature (1)..(361): Homolog of NCBI NO: 21593248 NR Description: 2-dehydro-3-deoxyphosphoheptonate aldolase
  misc_feature (1)..(361): Homolog of NCBI NO: 166690 NR Description: 3-deoxy-D-arabino-heptulosonate 7-phosphate
  misc_feature (1)..(361): Homolog of NCBI NO: 15234217 NR Description: 2-dehydro-3-deoxyphosphoheptonate aldolase (DHS2)
MGVVLMFGGQMPVIKVGRMAGQFAKPRSDSFEEKNGVTLPSYRGDNVNGDAFDAASRIPDPQRMIRAYCQSVSTLNLLRAFATGGYAAMQRVNQWNLDFMEHSEQGDRYRELAHRVDEALGFMNVAGLTADHPIMSTTDFWTSHECLLLPYEQALTREDSTTGLHYDCSAHMLWVGERTRQLDGAHVEFLRGVANPLGIKVSDKMVPDELVKLIDILNPKNKPGRITVIVRMGAENMRVKLPHLIRAVRRAGQIVTWVSDPMHGNTIKAPSGLKTRSFDAIRAELRAFFDVHDQEGSYPGGVHLEMTGQNVTECVGGSRTITYDDLSSRYHTHCDPRLNASQSLELAFNIADRLRKRRLNSTRSLGI

SEQ ID NO: 59590 - DNA, 894 bp, Glycine max
  misc_feature (1)..(894): Ceres Seq. ID no. 12612051
tttcaattcgcagaaaatggcaaaaaccatagggaagctggctgaaaaaacaccagaagttggtgaaactgtcagtggtttgcttgtaaaaaaaggcttcacatatcagattatggcagctgatgatctccatgtcttttcacaactatcaacagcaaacattactcagaggattaccatcccttattcaggtgcctttaatgtcatacagcatagactcaaacagatatatgaaagtgtagctcagtcagtggatgaagaatctggagttcccacattgcaagtccatgagtgtgttactgtgaaacatgaatctgaaaagcatgtctccttgcattgggcctctgatcccatgagtgacatggtatctgattcaattgttgctctggttttaaatatcaaccgcgatgtcccaaaaatagtgaatgaatctgatgccattaagattgaggaagagaatgagaaaaaggcagagaaggttatgcaagccctcctcgtttcactctttggagatgtgaaggtaggtgaaaacggaaaattgataattaacattgatgggaatgtagcagagctaaacaaagaaagtggggaagttgagagtgaaaatgaaggtctcaaggaaagagtaagaacagcattccggcgcattcaaagttctgtgaagccaattcctgtttctgcgccatagtttttcatttccttacattttctttggaaaaggtgaaatgccaccgataaggaacaccagctcacatgtccccgctaacatgagacaattatcacaacatgttaccttcccttccctttaacatgatgagctttgtcacagcattctctgtttccttttgtttattcttcaaatatttggtcatttaatctaaacttattttcttc

SEQ ID NO: 59591 - protein, 228 aa, Glycine max
  peptide (1)..(228): Ceres Seq. ID no. 12612052
  misc_feature (1)..(222): Homolog of NCBI NO: 19115175 NR Description: putative cleavage and polyadenylation specifity
  misc_feature (1)..(223): Homolog of NCBI NO: 18203388 NR Description: Cleavage and polyadenylation specificity factor,
  misc_feature (1)..(223): Homolog of NCBI NO: 31980904 NR Description: cleavage and polyadenylation specificity factor
  misc_feature (1)..(223): Homolog of NCBI NO: 27805863 NR Description: cleavage and polyadenylation specific factor 3,
  misc_feature (1)..(223): Homolog of NCBI NO: 15079675 NR Description: Similar to cleavage and polyadenylation specific
  misc_feature (1)..(223): Homolog of NCBI NO: 7706427 NR Description: cleavage and polyadenylation specific factor 3,
  misc_feature (1)..(223): Homolog of NCBI NO: 12846103 NR Description: unnamed protein product [Mus musculus]
  misc_feature (1)..(225): Homolog of NCBI NO: 27573349 NR Description: putative cleavage and polyadenylation specifity
  misc_feature (1)..(227): Homolog of NCBI NO: 18377654 NR Description: putative cleavage and polyadenylation specificity
  misc_feature (1)..(227): Homolog of NCBI NO: 15219848 NR Description: putative cleavage and polyadenylation specificity
FNSQKMAKTIGKLAEKTPEVGETVSGLLVKKGFTYQIMAADDLHVFSQLSTANITQRITIPYSGAFNVIQHRLKQIYESVAQSVDEESGVPTLQVHECVTVKHESEKHVSLHWASDPMSDMVSDSIVALVLNINRDVPKIVNESDAIKIEEENEKKAEKVMQALLVSLFGDVKVGENGKLIINIDGNVAELNKESGEVESENEGLKERVRTAFRRIQSSVKPIPVSAP

SEQ ID NO: 59592 - protein, 223 aa, Glycine max
  peptide (1)..(223): Ceres Seq. ID no. 12612053
  misc_feature (1)..(217): Homolog of NCBI NO: 19115175 NR Description: putative cleavage and polyadenylation specifity
  misc_feature (1)..(218): Homolog of NCBI NO: 18203388 NR Description: Cleavage and polyadenylation specificity factor,
  misc_feature (1)..(218): Homolog of NCBI NO: 31980904 NR Description: cleavage and polyadenylation specificity factor
  misc_feature (1)..(218): Homolog of NCBI NO: 27805863 NR Description: cleavage and polyadenylation specific factor 3,
  misc_feature (1)..(218): Homolog of NCBI NO: 15079675 NR Description: Similar to cleavage and polyadenylation specific
  misc_feature (1)..(218): Homolog of NCBI NO: 7706427 NR Description: cleavage and polyadenylation specific factor 3,
  misc_feature (1)..(218): Homolog of NCBI NO: 12846103 NR Description: unnamed protein product [Mus musculus]
  misc_feature (1)..(220): Homolog of NCBI NO: 27573349 NR Description: putative cleavage and polyadenylation specifity
  misc_feature (1)..(222): Homolog of NCBI NO: 18377654 NR Description: putative cleavage and polyadenylation specificity
  misc_feature (1)..(222): Homolog of NCBI NO: 15219848 NR Description: putative cleavage and polyadenylation specificity
MAKTIGKLAEKTPEVGETVSGLLVKKGFTYQIMAADDLHVFSQLSTANITQRITIPYSGAFNVIQHRLKQIYESVAQSVDEESGVPTLQVHECVTVKHESEKHVSLHWASDPMSDMVSDSIVALVLNINRDVPKIVNESDAIKIEEENEKKAEKVMQALLVSLFGDVKVGENGKLIINIDGNVAELNKESGEVESENEGLKERVRTAFRRIQSSVKPIPVSAP

SEQ ID NO: 59593 - protein, 191 aa, Glycine max
  peptide (1)..(191): Ceres Seq. ID no. 12612054
  misc_feature (1)..(185): Homolog of NCBI NO: 19115175 NR Description: putative cleavage and polyadenylation specifity
  misc_feature (1)..(186): Homolog of NCBI NO: 18203388 NR Description: Cleavage and polyadenylation specificity factor,
  misc_feature (1)..(186): Homolog of NCBI NO: 31980904 NR Description: cleavage and polyadenylation specificity factor
  misc_feature (1)..(186): Homolog of NCBI NO: 27805863 NR Description: cleavage and polyadenylation specific factor 3,
  misc_feature (1)..(186): Homolog of NCBI NO: 15079675 NR Description: Similar to cleavage and polyadenylation specific
  misc_feature (1)..(186): Homolog of NCBI NO: 7706427 NR Description: cleavage and polyadenylation specific factor 3,
  misc_feature (1)..(186): Homolog of NCBI NO: 12846103 NR Description: unnamed protein product [Mus musculus]
  misc_feature (1)..(188): Homolog of NCBI NO: 27573349 NR Description: putative cleavage and polyadenylation specifity
  misc_feature (1)..(190): Homolog of NCBI NO: 18377654 NR Description: putative cleavage and polyadenylation specificity
  misc_feature (1)..(190): Homolog of NCBI NO: 15219848 NR Description: putative cleavage and polyadenylation specificity
MAADDLHVFSQLSTANITQRITIPYSGAFNVIQHRLKQIYESVAQSVDEESGVPTLQVHECVTVKHESEKHVSLHWASDPMSDMVSDSIVALVLNINRDVPKIVNESDAIKIEEENEKKAEKVMQALLVSLFGDVKVGENGKLIINIDGNVAELNKESGEVESENEGLKERVRTAFRRIQSSVKPIPVSAP

SEQ ID NO: 59594 - DNA, 1375 bp, Glycine max
  misc_feature (1)..(1375): Ceres Seq. ID no. 14307670
attcagtttcacacacatttcacatatcttctcaagttcttttcaattcaaaatcaagatatggaagaacccgtcatggaacaacaaccctccgctgctgcctctgggaacactgccagacccaggcttcagaagtacgcactccgatctgccaataagttgaaggaagagaagtcagaaactcccaattgctccattcctacttctgaaaccatgagggggagaagtgtaggtgcttcaagtgtaagtaaaagtgtgagtgttcttgatttttctggcaaggacaagtctggtagtgccaagccacccagaaggctctcaattcctgccaaaacaccagccacttcaagacccaagctgggtggcaacagtaccccaatcactgagactagaactgggaggagtgcttttggtcaaggcagaagcaaaacaccaatttcagacatttccaagacatcttcacgaaccaagttaaatctcctaacttcggcttcgtattggttaaaccagatcaagctctctgaatccgcggccaagcactcaatttcacttggcttcttcaaactagctttggaggcaggatgtgagcctctcgggccaatgcaagaagggctaaaatcatatgtgggcagacatcagcttgatggtcttgaagaaactgtgaaagcattgtttgagagctataacatctcagaaacaatggagcagtggcaggtgtctgagactatttcacatgtgccagaagagggaactcggtcttccgatgatgatgtgcgtagctcttcttctaccatggggactagaaaactgaaaccaaagtgcttaaacactgattctactcaactcacaccttcgacagagtcagcaaagaaggagacaagtcaaaagagtaatcctggatccaggttgagagggaatctcagcacaaacaccacaactccaaggcctgctctagacaacaggaataataggttggttaaaaaatctgagaagccaagcaagcaagaaccaaataaggaaaagggcatgataaagaggcagggaaagaaatctgatgttaaagaagttagcactccaaagggaggcaaagaaaatatggaagctcggaccactgaagaaaacagcgtgacagaagtggtgtaaacaatctcatgtgcttgtatttctgaaattctgattccccaactttgaagtttgcctagggggtgttctctgtgtggagcgtgcttttgtatattgtataggctgcatttctctttgcttggtcacttggcatattgtgtttgtgtccttttattatacaattgctaatcaaaccatactgtattgaatgttattgtttgtctataaatgattccatactatttgtgaaggc

SEQ ID NO: 59595 - protein, 380 aa, Glycine max
  peptide (1)..(380): Ceres Seq. ID no. 14307671
  misc_feature (23)..(380): Homolog of NCBI NO: 15241865 NR Description: expressed protein [Arabidopsis thaliana]
IQFHTHFTYLLKFFSIQNQDMEEPVMEQQPSAAASGNTARPRLQKYALRSANKLKEEKSETPNCSIPTSETMRGRSVGASSVSKSVSVLDFSGKDKSGSAKPPRRLSIPAKTPATSRPKLGGNSTPITETRTGRSAFGQGRSKTPISDISKTSSRTKLNLLTSASYWLNQIKLSESAAKHSISLGFFKLALEAGCEPLGPMQEGLKSYVGRHQLDGLEETVKALFESYNISETMEQWQVSETISHVPEEGTRSSDDDVRSSSSTMGTRKLKPKCLNTDSTQLTPSTESAKKETSQKSNPGSRLRGNLSTNTTTPRPALDNRNNRLVKKSEKPSKQEPNKEKGMIKRQGKKSDVKEVSTPKGGKENMEARTTEENSVTEVV

SEQ ID NO: 59596 - protein, 360 aa, Glycine max
  peptide (1)..(360): Ceres Seq. ID no. 14307672
  misc_feature (3)..(360): Homolog of NCBI NO: 15241865 NR Description: expressed protein [Arabidopsis thaliana]
MEEPVMEQQPSAAASGNTARPRLQKYALRSANKLKEEKSETPNCSIPTSETMRGRSVGASSVSKSVSVLDFSGKDKSGSAKPPRRLSIPAKTPATSRPKLGGNSTPITETRTGRSAFGQGRSKTPISDISKTSSRTKLNLLTSASYWLNQIKLSESAAKHSISLGFFKLALEAGCEPLGPMQEGLKSYVGRHQLDGLEETVKALFESYNISETMEQWQVSETISHVPEEGTRSSDDDVRSSSSTMGTRKLKPKCLNTDSTQLTPSTESAKKETSQKSNPGSRLRGNLSTNTTTPRPALDNRNNRLVKKSEKPSKQEPNKEKGMIKRQGKKSDVKEVSTPKGGKENMEARTTEENSVTEVV

SEQ ID NO: 59597 - protein, 355 aa, Glycine max
  peptide (1)..(355): Ceres Seq. ID no. 14307673
  misc_feature (1)..(355): Homolog of NCBI NO: 15241865 NR Description: expressed protein [Arabidopsis thaliana]
MEQQPSAAASGNTARPRLQKYALRSANKLKEEKSETPNCSIPTSETMRGRSVGASSVSKSVSVLDFSGKDKSGSAKPPRRLSIPAKTPATSRPKLGGNSTPITETRTGRSAFGQGRSKTPISDISKTSSRTKLNLLTSASYWLNQIKLSESAAKHSISLGFFKLALEAGCEPLGPMQEGLKSYVGRHQLDGLEETVKALFESYNISETMEQWQVSETISHVPEEGTRSSDDDVRSSSSTMGTRKLKPKCLNTDSTQLTPSTESAKKETSQKSNPGSRLRGNLSTNTTTPRPALDNRNNRLVKKSEKPSKQEPNKEKGMIKRQGKKSDVKEVSTPKGGKENMEARTTEENSVTEVV

SEQ ID NO: 59598 - DNA, 1410 bp, Glycine max
  misc_feature (1)..(1410): Ceres Seq. ID no. 14313654
agagaaattccttgacataaccaaagatacattcgtggacatgatgctgctggacgccgtattcatcatggaacttatgttgagaaactgcgagttcaaatcacacaaagccaagcatgagcaaaaccacaagcgaaccgaatcctttagaattaaaaacaacaatgatctgatcatgacacactcatggcttagcaggaacatcgctggggacttgatccttatagagaaccaaatacccttttttgtgctgcagaaactctatgatgatgttgtccctcgtgaaagcaagaaggatgaacacactgcggggtttgttaagcttgctactgagtactttgctttctatgacacccaaatgtcttcttctggtgaaaccaagaaacactgttcctgttacatactccactgtctgaaggaaccttgtaagtcaaaaggaaaagataggagtgagatttcgaaacgtcctctaggaagcaattctgaagagaatccagaaggaccaaaacatttcactgatctgataaggtggcaattttaccttcccaccgagtgtgaagccggtcatgctcatcaggttctaagaactgcaacaaagttacaaggctcagggataagctttgagaaaggtgatgtgaacaagcggttactggaaatagccttcaagaagaccccaattctgagttcatttctttgctttggttgctttccattgtcgaagctcttcaaagcgcgtttgaggattccccaattgaaggtagaccacacaactgaacgtgtgttcaagaacctcgttgcttttgagcagtttcactatccagacaagccttacttttgcaactatgtttctttcattgactctctgatacacactcagcttgatgtggagttgctggttgagaaggaagtgattgtgcatgaacttgggagtgataaggaagtggcaactcttgttaatggtttatgcaaacatgttgtcacaaactcaacttgttaccatcacattataaataagctcaacgaccattacatgaacgattggaaccacactattgcggctttaaggttggtgtacttcagagatctttggagggcaagtggcactgtggtgggtattgctgtgctggtttttgctgtcttccaattcctccgtgtttgtcgttatctcttctagaatgaacaaaaatgtaactcagtttggattattattgcaaataacagctacaaccatggagtgcttattttcttcttgtttctaggggtttgatttgttgttgtttagatttcagattaggagttctgattctgtttttatataaatttaaaatatttaaaattatgttgttatacctacaaacaatggatgtatcagttatgttttgtgctctttatatatacagttgtttcaac

SEQ ID NO: 59599 - protein, 390 aa, Glycine max
  peptide (1)..(390): Ceres Seq. ID no. 14313655
  misc_feature (6)..(87): Pfam Name: Plant protein of unknown function Pfam Description: Plant protein of unknown function
  misc_feature (246)..(388): Homolog of NCBI NO: 15229684 NR Description: hypothetical protein [Arabidopsis thaliana]
  misc_feature (246)..(388): Homolog of NCBI NO: 15229687 NR Description: hypothetical protein [Arabidopsis thaliana]
  misc_feature (4)..(222): Homolog of NCBI NO: 15229687 NR Description: hypothetical protein [Arabidopsis thaliana]
  misc_feature (246)..(390): Homolog of NCBI NO: 15226899 NR Description: hypothetical protein [Arabidopsis thaliana]
  misc_feature (6)..(93): Homolog of NCBI NO: 15232337 NR Description: hypothetical protein [Arabidopsis thaliana]
  misc_feature (246)..(381): Homolog of NCBI NO: 15232337 NR Description: hypothetical protein [Arabidopsis thaliana]
  misc_feature (6)..(87): Homolog of NCBI NO: 18406666 NR Description: expressed protein [Arabidopsis thaliana]
  misc_feature (246)..(379): Homolog of NCBI NO: 18406666 NR Description: expressed protein [Arabidopsis thaliana]
  misc_feature (6)..(87): Homolog of NCBI NO: 7486946 NR Description: hypothetical protein At2g44930 [imported] -
  misc_feature (246)..(379): Homolog of NCBI NO: 7486946 NR Description: hypothetical protein At2g44930 [imported] -
EKFLDITKDTFVDMMLLDAVFIMELMLRNCEFKSHKAKHEQNHKRTESFRIKNNNDLIMTHSWLSRNIAGDLILIENQIPFFVLQKLYDDVVPRESKKDEHTAGFVKLATEYFAFYDTQMSSSGETKKHCSCYILHCLKEPCKSKGKDRSEISKRPLGSNSEENPEGPKHFTDLIRWQFYLPTECEAGHAHQVLRTATKLQGSGISFEKGDVNKRLLEIAFKKTPILSSFLCFGCFPLSKLFKARLRIPQLKVDHTTERVFKNLVAFEQFHYPDKPYFCNYVSFIDSLIHTQLDVELLVEKEVIVHELGSDKEVATLVNGLCKHVVTNSTCYHHIINKLNDHYMNDWNHTIAALRLVYFRDLWRASGTVVGIAVLVFAVFQFLRVCRYLF

SEQ ID NO: 59600 - protein, 377 aa, Glycine max
  peptide (1)..(377): Ceres Seq. ID no. 14313656
  misc_feature (1)..(74): Pfam Name: Plant protein of unknown function Pfam Description: Plant protein of unknown function
  misc_feature (233)..(375): Homolog of NCBI NO: 15229684 NR Description: hypothetical protein [Arabidopsis thaliana]
  misc_feature (233)..(375): Homolog of NCBI NO: 15229687 NR Description: hypothetical protein [Arabidopsis thaliana]
  misc_feature (1)..(209): Homolog of NCBI NO: 15229687 NR Description: hypothetical protein [Arabidopsis thaliana]
  misc_feature (233)..(377): Homolog of NCBI NO: 15226899 NR Description: hypothetical protein [Arabidopsis thaliana]
  misc_feature (1)..(80): Homolog of NCBI NO: 15232337 NR Description: hypothetical protein [Arabidopsis thaliana]
  misc_feature (233)..(368): Homolog of NCBI NO: 15232337 NR Description: hypothetical protein [Arabidopsis thaliana]
  misc_feature (1)..(74): Homolog of NCBI NO: 18406666 NR Description: expressed protein [Arabidopsis thaliana]
  misc_feature (233)..(366): Homolog of NCBI NO: 18406666 NR Description: expressed protein [Arabidopsis thaliana]
  misc_feature (1)..(74): Homolog of NCBI NO: 7486946 NR Description: hypothetical protein At2g44930 [imported] -
  misc_feature (233)..(366): Homolog of NCBI NO: 7486946 NR Description: hypothetical protein At2g44930 [imported] -
MMLLDAVFIMELMLRNCEFKSHKAKHEQNHKRTESFRIKNNNDLIMTHSWLSRNIAGDLILIENQIPFFVLQKLYDDVVPRESKKDEHTAGFVKLATEYFAFYDTQMSSSGETKKHCSCYILHCLKEPCKSKGKDRSEISKRPLGSNSEENPEGPKHFTDLIRWQFYLPTECEAGHAHQVLRTATKLQGSGISFEKGDVNKRLLEIAFKKTPILSSFLCFGCFPLSKLFKARLRIPQLKVDHTTERVFKNLVAFEQFHYPDKPYFCNYVSFIDSLIHTQLDVELLVEKEVIVHELGSDKEVATLVNGLCKHVVTNSTCYHHIINKLNDHYMNDWNHTIAALRLVYFRDLWRASGTVVGIAVLVFAVFQFLRVCRYLF

SEQ ID NO: 59601 - protein, 376 aa, Glycine max
  peptide (1)..(376): Ceres Seq. ID no. 14313657
  misc_feature (1)..(73): Pfam Name: Plant protein of unknown function Pfam Description: Plant protein of unknown function
  misc_feature (232)..(374): Homolog of NCBI NO: 15229684 NR Description: hypothetical protein [Arabidopsis thaliana]
  misc_feature (232)..(374): Homolog of NCBI NO: 15229687 NR Description: hypothetical protein [Arabidopsis thaliana]
  misc_feature (1)..(208): Homolog of NCBI NO: 15229687 NR Description: hypothetical protein [Arabidopsis thaliana]
  misc_feature (232)..(376): Homolog of NCBI NO: 15226899 NR Description: hypothetical protein [Arabidopsis thaliana]
  misc_feature (1)..(79): Homolog of NCBI NO: 15232337 NR Description: hypothetical protein [Arabidopsis thaliana]
  misc_feature (232)..(367): Homolog of NCBI NO: 15232337 NR Description: hypothetical protein [Arabidopsis thaliana]
  misc_feature (1)..(73): Homolog of NCBI NO: 18406666 NR Description: expressed protein [Arabidopsis thaliana]
  misc_feature (232)..(365): Homolog of NCBI NO: 18406666 NR Description: expressed protein [Arabidopsis thaliana]
  misc_feature (1)..(73): Homolog of NCBI NO: 7486946 NR Description: hypothetical protein At2g44930 [imported] -
  misc_feature (232)..(365): Homolog of NCBI NO: 7486946 NR Description: hypothetical protein At2g44930 [imported] -
MLLDAVFIMELMLRNCEFKSHKAKHEQNHKRTESFRIKNNNDLIMTHSWLSRNIAGDLILIENQIPFFVLQKLYDDVVPRESKKDEHTAGFVKLATEYFAFYDTQMSSSGETKKHCSCYILHCLKEPCKSKGKDRSEISKRPLGSNSEENPEGPKHFTDLIRWQFYLPTECEAGHAHQVLRTATKLQGSGISFEKGDVNKRLLEIAFKKTPILSSFLCFGCFPLSKLFKARLRIPQLKVDHTTERVFKNLVAFEQFHYPDKPYFCNYVSFIDSLIHTQLDVELLVEKEVIVHELGSDKEVATLVNGLCKHVVTNSTCYHHIINKLNDHYMNDWNHTIAALRLVYFRDLWRASGTVVGIAVLVFAVFQFLRVCRYLF

SEQ ID NO: 59602 - DNA, 1321 bp, Glycine max
  misc_feature (1)..(1321): Ceres Seq. ID no. 14313674
tctagattcacgtgttgtagaatcaacaacagattttcctcagaagttcttctactgcttttggtggggtttgcgcaatttaagttctcttggacaaaatctaaagactagtactgatgtctcagaaatagcttttgcaatcttcattgccatctttggattggtcttattctcattacttattggaaacatgcagaaatatctgcaatctacaactgtaagagtggaggagatgagagtgaagagacaggacgcagaacagtggatgtcccaccgtatgctacctgagaacttgagggaaagaattagaaagtacgaacagtaccaatggcaagaaaataggggtgttgaggaggaggcattaattcgtaaccttcctaaagatctcagaagggacattaagcgtcacctttgcttaactttagttaaaaaagtgccaatgtttgagaaaatggatgagcagttgttggatgcaatgtgtgatagactgaagccagtcctttatactgagaagagctacattgttcgtgaagaagatccagttgatgagatgcttttcattatgcgcggaaaagtttcgaccatgacaacgaatggtggaagaactggtttcttcaactccatgttcctcaaggctggtgacttttgtggagaggaacttctgacatgggctttggatcccaactcctcctcaaatctacccatttcaaccaggacagtagaaactatatcagaagttgaagcctttgctctcacggctgatgacttgaagtttgttgcttcccaatttcgacgccttcacagcaaacagctccaacacgctttcaggttctattcctcacagtggaagacatgggctgctactttcatacaagcagcttggcgtcgatactggaaaaagaagattgagaggtcattgcgcgaagcagaagatgagctacaagatgctttggcaaatgaggaagagtctagtctaagccttggtgcaaccatatatgcatcaaggtttgctgccaatgcactgcgaaatttgagagaaaatagcagacacaatagaatgcaacagagactactacctctgttacctccaaagccagctgaaccagatttcacttctcagaaacactaatttgcaaataggaataagtacatgttaatgttatccatactccatagctattttgtgtgtatattttgggagggttgcttaggaattgcttcaacaactacatgtggatatgtaggggtaatatttcatcaaaatttaattaaacaatcatttagattacaattttttaaataaccgtctagttaatactgc

SEQ ID NO: 59603 - protein, 375 aa, Glycine max
  peptide (1)..(375): Ceres Seq. ID no. 14313675
  misc_feature (162)..(265): Pfam Name: Cyclic nucleotide-binding domain Pfam Description: Cyclic nucleotide-binding domain
  misc_feature (1)..(370): Homolog of NCBI NO: 18407073 NR Description: cyclic nucleotide-regulated ion channel (CNGC3)
  misc_feature (1)..(371): Homolog of NCBI NO: 22328204 NR Description: cyclic nucleotide-regulated ion channel, putative
  misc_feature (1)..(371): Homolog of NCBI NO: 7484881 NR Description: cyclic nucleotide gated channel homolog F3I3.30 -
  misc_feature (1)..(372): Homolog of NCBI NO: 6969229 NR Description: cyclic nucleotide-gated calmodulin-binding ion
  misc_feature (1)..(372): Homolog of NCBI NO: 38503202 NR Description: Probable cyclic nucleotide-gated ion channel 10 nucleotide-and calmodulin-regulated ion channel 10)
  misc_feature (1)..(372): Homolog of NCBI NO: 18378827 NR Description: cyclic nucleotide-regulated ion channel
  misc_feature (1)..(374): Homolog of NCBI NO: 24943196 NR Description: cyclic nucleotide-gated channel C [Phaseolus
  misc_feature (1)..(373): Homolog of NCBI NO: 6969231 NR Description: cyclic nucleotide-gated calmodulin-binding ion
  misc_feature (1)..(372): Homolog of NCBI NO: 15238657 NR Description: cyclic nucleotide-regulated ion channel (CNGC1)
  misc_feature (3)..(375): Homolog of NCBI NO: 24943192 NR Description: cyclic nucleotide-gated channel A [Phaseolus
LDSRVVESTTDFPQKFFYCFWWGLRNLSSLGQNLKTSTDVSEIAFAIFIAIFGLVLFSLLIGNMQKYLQSTTVRVEEMRVKRQDAEQWMSHRMLPENLRERIRKYEQYQWQENRGVEEEALIRNLPKDLRRDIKRHLCLTLVKKVPMFEKMDEQLLDAMCDRLKPVLYTEKSYIVREEDPVDEMLFIMRGKVSTMTTNGGRTGFFNSMFLKAGDFCGEELLTWALDPNSSSNLPISTRTVETISEVEAFALTADDLKFVASQFRRLHSKQLQHAFRFYSSQWKTWAATFIQAAWRRYWKKKIERSLREAEDELQDALANEEESSLSLGATIYASRFAANALRNLRENSRHNRMQQRLLPLLPPKPAEPDFTSQKH

SEQ ID NO: 59604 - protein, 312 aa, Glycine max
  peptide (1)..(312): Ceres Seq. ID no. 14313676
  misc_feature (99)..(202): Pfam Name: Cyclic nucleotide-binding domain Pfam Description: Cyclic nucleotide-binding domain
  misc_feature (1)..(307): Homolog of NCBI NO: 18407073 NR Description: cyclic nucleotide-regulated ion channel (CNGC3)
  misc_feature (1)..(308): Homolog of NCBI NO: 22328204 NR Description: cyclic nucleotide-regulated ion channel, putative
  misc_feature (1)..(308): Homolog of NCBI NO: 7484881 NR Description: cyclic nucleotide gated channel homolog F3I3.30 -
  misc_feature (1)..(309): Homolog of NCBI NO: 6969229 NR Description: cyclic nucleotide-gated calmodulin-binding ion
  misc_feature (1)..(309): Homolog of NCBI NO: 38503202 NR Description: Probable cyclic nucleotide-gated ion channel 10 nucleotide-and calmodulin-regulated ion channel 10)
  misc_feature (1)..(309): Homolog of NCBI NO: 18378827 NR Description: cyclic nucleotide-regulated ion channel
  misc_feature (1)..(311): Homolog of NCBI NO: 24943196 NR Description: cyclic nucleotide-gated channel C [Phaseolus
  misc_feature (1)..(310): Homolog of NCBI NO: 6969231 NR Description: cyclic nucleotide-gated calmodulin-binding ion
  misc_feature (1)..(309): Homolog of NCBI NO: 15238657 NR Description: cyclic nucleotide-regulated ion channel (CNGC1)
  misc_feature (1)..(312): Homolog of NCBI NO: 24943192 NR Description: cyclic nucleotide-gated channel A [Phaseolus
MQKYLQSTTVRVEEMRVKRQDAEQWMSHRMLPENLRERIRKYEQYQWQENRGVEEEALIRNLPKDLRRDIKRHLCLTLVKKVPMFEKMDEQLLDAMCDRLKPVLYTEKSYIVREEDPVDEMLFIMRGKVSTMTTNGGRTGFFNSMFLKAGDFCGEELLTWALDPNSSSNLPISTRTVETISEVEAFALTADDLKFVASQFRRLHSKQLQHAFRFYSSQWKTWAATFIQAAWRRYWKKKIERSLREAEDELQDALANEEESSLSLGATIYASRFAANALRNLRENSRHNRMQQRLLPLLPPKPAEPDFTSQKH

SEQ ID NO: 59605 - protein, 298 aa, Glycine max
  peptide (1)..(298): Ceres Seq. ID no. 14313677
  misc_feature (85)..(188): Pfam Name: Cyclic nucleotide-binding domain Pfam Description: Cyclic nucleotide-binding domain
  misc_feature (1)..(293): Homolog of NCBI NO: 18407073 NR Description: cyclic nucleotide-regulated ion channel (CNGC3)
  misc_feature (1)..(294): Homolog of NCBI NO: 22328204 NR Description: cyclic nucleotide-regulated ion channel, putative
  misc_feature (1)..(294): Homolog of NCBI NO: 7484881 NR Description: cyclic nucleotide gated channel homolog F3I3.30 -
  misc_feature (1)..(295): Homolog of NCBI NO: 6969229 NR Description: cyclic nucleotide-gated calmodulin-binding ion
  misc_feature (1)..(295): Homolog of NCBI NO: 38503202 NR Description: Probable cyclic nucleotide-gated ion channel 10 nucleotide-and calmodulin-regulated ion channel 10)
  misc_feature (1)..(295): Homolog of NCBI NO: 18378827 NR Description: cyclic nucleotide-regulated ion channel
  misc_feature (1)..(297): Homolog of NCBI NO: 24943196 NR Description: cyclic nucleotide-gated channel C [Phaseolus
  misc_feature (1)..(296): Homolog of NCBI NO: 6969231 NR Description: cyclic nucleotide-gated calmodulin-binding ion
  misc_feature (1)..(295): Homolog of NCBI NO: 15238657 NR Description: cyclic nucleotide-regulated ion channel (CNGC1)
  misc_feature (1)..(298): Homolog of NCBI NO: 24943192 NR Description: cyclic nucleotide-gated channel A [Phaseolus
MRVKRQDAEQWMSHRMLPENLRERIRKYEQYQWQENRGVEEEALIRNLPKDLRRDIKRHLCLTLVKKVPMFEKMDEQLLDAMCDRLKPVLYTEKSYIVREEDPVDEMLFIMRGKVSTMTTNGGRTGFFNSMFLKAGDFCGEELLTWALDPNSSSNLPISTRTVETISEVEAFALTADDLKFVASQFRRLHSKQLQHAFRFYSSQWKTWAATFIQAAWRRYWKKKIERSLREAEDELQDALANEEESSLSLGATIYASRFAANALRNLRENSRHNRMQQRLLPLLPPKPAEPDFTSQKH

SEQ ID NO: 59606 - DNA, 1498 bp, Glycine max
  misc_feature (1)..(1498): Ceres Seq. ID no. 15225741
ccgggccccccctcgagtcagctacgtaggcccccccccccccaagcagtgtcagaaagcaaatattgcctattccgcaatatggcggaaaatgcttcgattgagctgaacaagtttgtgttcttttgtttgttggtgctaatacaagtggcagtttctgaaatcatttttgaagagcgttttgatgatggatggcgaggtaggtgggtgaagtcagactggaaaagcagtgaaggcaaagcaggttcattcaagcacacagctggaaaatgggccagtgatccagatgataaaggtattcaaacatccagtgatgccaaacactttgccatctctgcaaaaataccagaattcacaaacaagaacagaacattggtccttcagtattctgtaaaatttgagcaagagattgaatgtggtggaggttacatcaagcttctctctggatttgttaatcaaaagaagtttggtggggatacaccatatattttaatgtttggaccagatttatgtggcacggatacaaagaagctccatgtgatactctcctaccacggtcaaaattaccccataaagaaggacctgcaatgtgaaactgacaggttaactcacttctacacattcattctcaggccagatgccacatacagtgtcctggttgacaatagagagagagattccggaagcatgtatacagattgggatattcttcctccacgaaaaatcaaagatgtcaaggccaaaaagcctaaagactgggaagaaagagaatacattgaagaccctaatgatgtcaaacctgagggatatgattcgatcccaagagaaattcctgacccaaatgctaaagagcctgaaaactgggatgaagaggaagatgggaaatggaaaccaccaaagataccaaatccagcatacaaaggaccatggaaaagaaagaaaatcaagaaccctaactacaaagggaaatggaaaactccatggatagataatccagaatttgaagacgaccctgatctttatgtgcttaagcctatcaagtatgtgggcattgaagtttggcaggttaaaggcggttcagtttttgacaatgttttgatttgtgatgaccctgattatgcaaaacaagttgttgaggaagtgtttgccaacagggagattgaaaaggaaggttttgaagaagcagagaaagtaaggaaagccaaagaggaggaggaggctcaaagagcaagagaagaaggtgaaaagcgtagacgagagagaggtcatgatcgacgataccgggacaaatatagagacaaatatagaaggcatcgccaccatgattacgatgatcatgacgagctttgatgggataaaacgtccttctcagttctcacttatttggttgacaagaatttcgagattgttatgaattatagttacgttgatagtccatctcatgttaatttccaagggaaacattttaattttaaataaaaagtagtctatttgctgc

SEQ ID NO: 59607 - protein, 449 aa, Glycine max
  peptide (1)..(449): Ceres Seq. ID no. 15225742
  misc_feature (55)..(367): Pfam Name: Calreticulin family Pfam Description: Calreticulin family
  misc_feature (46)..(449): Homolog of NCBI NO: 11131769 NR Description: Calreticulin precursor
  misc_feature (44)..(449): Homolog of NCBI NO: 11131631 NR Description: Calreticulin precursor
  misc_feature (40)..(449): Homolog of NCBI NO: 12643243 NR Description: CALRETICULIN 2 PRECURSOR
  misc_feature (44)..(449): Homolog of NCBI NO: 9858814 NR Description: calreticulin [Pinus taeda]
  misc_feature (44)..(449): Homolog of NCBI NO: 11131745 NR Description: Calreticulin precursor
  misc_feature (42)..(405): Homolog of NCBI NO: 33517365 NR Description: calreticulin 3 [Brassica rapa subsp. pekinensis]
  misc_feature (37)..(449): Homolog of NCBI NO: 27311777 NR Description: calreticulin, putative [Arabidopsis thaliana]
  misc_feature (37)..(449): Homolog of NCBI NO: 12643531 NR Description: Calreticulin 3 precursor
  misc_feature (37)..(449): Homolog of NCBI NO: 18390896 NR Description: calreticulin 3 (CRT3) [Arabidopsis thaliana]
  misc_feature (41)..(449): Homolog of NCBI NO: 34907604 NR Description: putative calreticulin [Oryza sativa (japonica
PGPPSSQLRRPPPPQAVSESKYCLFRNMAENASIELNKFVFFCLLVLIQVAVSEIIFEERFDDGWRGRWVKSDWKSSEGKAGSFKHTAGKWASDPDDKGIQTSSDAKHFAISAKIPEFTNKNRTLVLQYSVKFEQEIECGGGYIKLLSGFVNQKKFGGDTPYILMFGPDLCGTDTKKLHVILSYHGQNYPIKKDLQCETDRLTHFYTFILRPDATYSVLVDNRERDSGSMYTDWDILPPRKIKDVKAKKPKDWEEREYIEDPNDVKPEGYDSIPREIPDPNAKEPENWDEEEDGKWKPPKIPNPAYKGPWKRKKIKNPNYKGKWKTPWIDNPEFEDDPDLYVLKPIKYVGIEVWQVKGGSVFDNVLICDDPDYAKQVVEEVFANREIEKEGFEEAEKVRKAKEEEEAQRAREEGEKRRRERGHDRRYRDKYRDKYRRHRHHDYDDHDEL

SEQ ID NO: 59608 - protein, 422 aa, Glycine max
  peptide (1)..(422): Ceres Seq. ID no. 15225743
  misc_feature (28)..(340): Pfam Name: Calreticulin family Pfam Description: Calreticulin family
  misc_feature (19)..(422): Homolog of NCBI NO: 11131769 NR Description: Calreticulin precursor
  misc_feature (17)..(422): Homolog of NCBI NO: 11131631 NR Description: Calreticulin precursor
  misc_feature (13)..(422): Homolog of NCBI NO: 12643243 NR Description: CALRETICULIN 2 PRECURSOR
  misc_feature (17)..(422): Homolog of NCBI NO: 9858814 NR Description: calreticulin [Pinus taeda]
  misc_feature (17)..(422): Homolog of NCBI NO: 11131745 NR Description: Calreticulin precursor
  misc_feature (15)..(378): Homolog of NCBI NO: 33517365 NR Description: calreticulin 3 [Brassica rapa subsp. pekinensis]
  misc_feature (10)..(422): Homolog of NCBI NO: 27311777 NR Description: calreticulin, putative [Arabidopsis thaliana]
  misc_feature (10)..(422): Homolog of NCBI NO: 12643531 NR Description: Calreticulin 3 precursor
  misc_feature (10)..(422): Homolog of NCBI NO: 18390896 NR Description: calreticulin 3 (CRT3) [Arabidopsis thaliana]
  misc_feature (14)..(422): Homolog of NCBI NO: 34907604 NR Description: putative calreticulin [Oryza sativa (japonica
MAENASIELNKFVFFCLLVLIQVAVSEIIFEERFDDGWRGRWVKSDWKSSEGKAGSFKHTAGKWASDPDDKGIQTSSDAKHFAISAKIPEFTNKNRTLVLQYSVKFEQEIECGGGYIKLLSGFVNQKKFGGDTPYILMFGPDLCGTDTKKLHVILSYHGQNYPIKKDLQCETDRLTHFYTFILRPDATYSVLVDNRERDSGSMYTDWDILPPRKIKDVKAKKPKDWEEREYIEDPNDVKPEGYDSIPREIPDPNAKEPENWDEEEDGKWKPPKIPNPAYKGPWKRKKIKNPNYKGKWKTPWIDNPEFEDDPDLYVLKPIKYVGIEVWQVKGGSVFDNVLICDDPDYAKQVVEEVFANREIEKEGFEEAEKVRKAKEEEEAQRAREEGEKRRRERGHDRRYRDKYRDKYRRHRHHDYDDHDEL

SEQ ID NO: 59609 - protein, 285 aa, Glycine max
  peptide (1)..(285): Ceres Seq. ID no. 15225744
  misc_feature (1)..(203): Pfam Name: Calreticulin family Pfam Description: Calreticulin family
  misc_feature (1)..(285): Homolog of NCBI NO: 11131769 NR Description: Calreticulin precursor
  misc_feature (1)..(285): Homolog of NCBI NO: 11131631 NR Description: Calreticulin precursor
  misc_feature (1)..(285): Homolog of NCBI NO: 12643243 NR Description: CALRETICULIN 2 PRECURSOR
  misc_feature (1)..(285): Homolog of NCBI NO: 9858814 NR Description: calreticulin [Pinus taeda]
  misc_feature (1)..(285): Homolog of NCBI NO: 11131745 NR Description: Calreticulin precursor
  misc_feature (1)..(241): Homolog of NCBI NO: 33517365 NR Description: calreticulin 3 [Brassica rapa subsp. pekinensis]
  misc_feature (1)..(285): Homolog of NCBI NO: 27311777 NR Description: calreticulin, putative [Arabidopsis thaliana]
  misc_feature (1)..(285): Homolog of NCBI NO: 12643531 NR Description: Calreticulin 3 precursor
  misc_feature (1)..(285): Homolog of NCBI NO: 18390896 NR Description: calreticulin 3 (CRT3) [Arabidopsis thaliana]
  misc_feature (1)..(285): Homolog of NCBI NO: 34907604 NR Description: putative calreticulin [Oryza sativa (japonica
MFGPDLCGTDTKKLHVILSYHGQNYPIKKDLQCETDRLTHFYTFILRPDATYSVLVDNRERDSGSMYTDWDILPPRKIKDVKAKKPKDWEEREYIEDPNDVKPEGYDSIPREIPDPNAKEPENWDEEEDGKWKPPKIPNPAYKGPWKRKKIKNPNYKGKWKTPWIDNPEFEDDPDLYVLKPIKYVGIEVWQVKGGSVFDNVLICDDPDYAKQVVEEVFANREIEKEGFEEAEKVRKAKEEEEAQRAREEGEKRRRERGHDRRYRDKYRDKYRRHRHHDYDDHDEL

SEQ ID NO: 59610 - DNA, 1346 bp, Glycine max
  misc_feature (1)..(1346): Ceres Seq. ID no. 14310446
ttacttcatatagagtctattttgtcttctatcagaatcgccctacaatttaatgcttgtttcttttacatttgattggctaaacatatcatgaaacaaacaagcaccaagtagaaatgtttttcaaccagtgaaagactgaaagtccattttcaaggcacatgaatcacaaaacatggatagagtaaatatcccagtgcaagctcagaaatagatcttattctgaatactctggtggtcaatagccacagcccacttctattttgtaaattagcttctagcttaagtacatctagatcatgaaaccaaactttgatcttgaagtggaggcatgtgcagcatatgaatctgaagttagcagccaggttgcttccaatgtatctattcaagaaacctctataggtccttgtagtgacagtctcactaacatttccaacatcacaaatccaatagggattcatcctaattcagatgctatttcacttgacttaagtctcaacttcaagaatagtgcgccagggggaagagattcaataggattctccttctcaagcactagcgagagcagcaatgaacctgcctcacaaactacagcagcaaccattccacgagtcttctcttgcaattactgccagcgcaagtttttcagttctcaggctcttggtggacaccagaatgcacacaagagagaaaggacattagcaaaaagggctatgagaatgggatttttctctgaaaggtacgccaatctagcatctctccctctgcatggttctttcaggtccttaggaataaaggcgcactcttcactgcaccatggtttctcaccaacaatgaggcgtcctgagataaagaacaatgcaagatttgatcaagggtatgttggccacccgatattcttggaggatgatgagtcagatttgttgtggcctggtagttttcgtcaagttgctgaggcaggtgatagtcatcagaatttcatactgactggaagttcaaatttgagttttactgaggtgaatccacctgtagacatagataactcaacaccagatttgactttgaaactttgaaggaggttatttggtatggttctgaccttgagttgtcttctttattgctatgttataacacagtaagacatgcatgcaaggggccatgattgccagattgattcctatactcagttgggtttccttttacttttactctcattttcagttttctgttaggaatcttgctttggtattttgctttttatgtttctcattgtataagagctccgggaggacaattttggagcttctgtgcttgttatataaatcatgttatcccttcactgtaag

SEQ ID NO: 59611 - protein, 257 aa, Glycine max
  peptide (1)..(257): Ceres Seq. ID no. 14310447
  misc_feature (106)..(128): Pfam Name: Zinc finger, C2H2 type Pfam Description: Zinc finger, C2H2 type
  misc_feature (70)..(193): Homolog of NCBI NO: 40538953 NR Description: expressed protein [Oryza sativa (japonica
  misc_feature (84)..(176): Homolog of NCBI NO: 15242152 NR Description: zinc finger protein 2 (ZFP2) [Arabidopsis
  misc_feature (95)..(172): Homolog of NCBI NO: 15238724 NR Description: ZFP3 zinc finger protein [Arabidopsis thaliana]
  misc_feature (58)..(172): Homolog of NCBI NO: 15238913 NR Description: zinc finger -related protein [Arabidopsis
  misc_feature (60)..(257): Homolog of NCBI NO: 15220823 NR Description: zinc finger protein [Arabidopsis thaliana]
  misc_feature (87)..(257): Homolog of NCBI NO: 18395528 NR Description: zinc finger protein 7, ZFP7 [Arabidopsis
  misc_feature (31)..(139): Homolog of NCBI NO: 1362017 NR Description: CCHH finger protein 4 - Arabidopsis thaliana
  misc_feature (151)..(257): Homolog of NCBI NO: 1362017 NR Description: CCHH finger protein 4 - Arabidopsis thaliana
  misc_feature (149)..(257): Homolog of NCBI NO: 15218939 NR Description: C2H2-type zinc finger protein -related
  misc_feature (31)..(159): Homolog of NCBI NO: 15218939 NR Description: C2H2-type zinc finger protein -related
MKPNFDLEVEACAAYESEVSSQVASNVSIQETSIGPCSDSLTNISNITNPIGIHPNSDAISLDLSLNFKNSAPGGRDSIGFSFSSTSESSNEPASQTTAATIPRVFSCNYCQRKFFSSQALGGHQNAHKRERTLAKRAMRMGFFSERYANLASLPLHGSFRSLGIKAHSSLHHGFSPTMRRPEIKNNARFDQGYVGHPIFLEDDESDLLWPGSFRQVAEAGDSHQNFILTGSSNLSFTEVNPPVDIDNSTPDLTLKL

SEQ ID NO: 59612 - DNA, 1796 bp, Glycine max
  misc_feature (1)..(1796): Ceres Seq. ID no. 14310375
ttttttcctccatttttcgcctcaatcgcacttctctaccttcgatagtaacagtaatctcgaattttaattccgaatatggaatcgagaactaagagtaatccccaattaactagagctctatgctatggaaacgatggcaagcagcagggaaggtcaccatccgttattgtcattggcggtggcatggctgggattgctgctgctcgtgcactccataatgcttcgtttcaggttgttctcttagagtcaagggatagaattggtggccgaattcacactgattactcatttggttttcctgttgacctgggagcatcatggttgcatggagtttccaacgagaatccgctggcttcggtgattgggaggctaggtctacctctttaccgtactagtggggataactccgtactctatgaccatgatttggaaagctatgcactttttgatatggatgggaaacaagttcctccagagttggtaacaaaagttggtgaaatatttgagacaattttacaggagacagataaaataagacaagaatccagtgaagacatgtctgtacttcgtggtctttccattgtttttgacaggaagccggaattgaggttggaggggcttgcgcataaggtgcttcagtggtacttatgcagaatggagggctggtttgctgcagattctgatactatttcactgaaaggatgggaccaggaggtgctgctccctggtggtcatggtcttatggtccgtggttacttgcctgttataaataccctagccaagggacttgatattctcttggggcacagggtcacaaaagtagttaggcgatataatggagtaaaggtaacagtggaaagtgggaaaacgttttttgctgatgctgctgttattgctgtcccacttggggtgctcaaggcaaagaaaatattgtttaagccaaagcttccagactggaaggaagctgccattgcggatcttgggattggacttgagaataaaatcattttacactttgaaaatgtgttttggcctaatgtggagttcttgggagtagttgcagatacatcttatggatgtagctacttccttaatctccacaaggccgccggtcatgctgttctggtttacatgccttctgggcagcttgccaaagacgttgaaaagatgtctgatgaagcagccgtcaacttcgctttcatgcagctcaagaagattcttccagatgcttcttcaccgattcagtatcttgtgtctcggtggggatcagatataaattcactaggttcatatagctacgatgcagttgggaaaccccatgaactatatgagaggctacgggtcccagtagataacttgttctttgcaggggaagcaacgagtatgagctatccaggatctgtccatggggcattctccactggaatgatggccgctgaagattgccggatgcgtgtgctcgagcgatatggagaggttgatttattccagccagtgatgggagaagaggcttccttgtctatcccacttcagatatctcgtctgtaatcatctttgggtcacaactagtggacagaaacagaatctatgcttgttcttttgttatcaacctataggctatatatagcaaatgttttggcaatagtcttcaagactatgtgtccacttgtgaaatcacattttgtgttgcatttccgtagtcagtgttactggtaatgtgaatattgcgtacctaaggccttgtcacttctatcagtctatatataataaaattgtggcaacaatttatgttc

SEQ ID NO: 59613 - protein, 490 aa, Glycine max
  peptide (1)..(490): Ceres Seq. ID no. 14310376
  misc_feature (39)..(458): Pfam Name: Flavin containing amine oxidoreductase Pfam Description: Flavin containing amine oxidoreductase
  misc_feature (357)..(490): Homolog of NCBI NO: 25404949 NR Description: protein F1E22.18 [imported] - Arabidopsis
  misc_feature (22)..(392): Homolog of NCBI NO: 25404949 NR Description: protein F1E22.18 [imported] - Arabidopsis
  misc_feature (22)..(490): Homolog of NCBI NO: 13877615 NR Description: putative protein kinase gb|AAD22129 [Arabidopsis
  misc_feature (22)..(490): Homolog of NCBI NO: 15218830 NR Description: amine oxidase family [Arabidopsis thaliana]
  misc_feature (20)..(490): Homolog of NCBI NO: 32488722 NR Description: OSJNBb0004A17.1 [Oryza sativa (japonica
  misc_feature (17)..(490): Homolog of NCBI NO: 38344167 NR Description: OSJNBa0053K19.6 [Oryza sativa (japonica
  misc_feature (1)..(490): Homolog of NCBI NO: 21553762 NR Description: putative amine oxidase [Arabidopsis thaliana]
  misc_feature (1)..(490): Homolog of NCBI NO: 15231622 NR Description: amine oxidase family [Arabidopsis thaliana]
  misc_feature (1)..(490): Homolog of NCBI NO: 18650598 NR Description: At2g43020/MFL8.12 [Arabidopsis thaliana]
  misc_feature (1)..(490): Homolog of NCBI NO: 15224204 NR Description: amine oxidase family [Arabidopsis thaliana]
MESRTKSNPQLTRALCYGNDGKQQGRSPSVIVIGGGMAGIAAARALHNASFQVVLLESRDRIGGRIHTDYSFGFPVDLGASWLHGVSNENPLASVIGRLGLPLYRTSGDNSVLYDHDLESYALFDMDGKQVPPELVTKVGEIFETILQETDKIRQESSEDMSVLRGLSIVFDRKPELRLEGLAHKVLQWYLCRMEGWFAADSDTISLKGWDQEVLLPGGHGLMVRGYLPVINTLAKGLDILLGHRVTKVVRRYNGVKVTVESGKTFFADAAVIAVPLGVLKAKKILFKPKLPDWKEAAIADLGIGLENKIILHFENVFWPNVEFLGVVADTSYGCSYFLNLHKAAGHAVLVYMPSGQLAKDVEKMSDEAAVNFAFMQLKKILPDASSPIQYLVSRWGSDINSLGSYSYDAVGKPHELYERLRVPVDNLFFAGEATSMSYPGSVHGAFSTGMMAAEDCRMRVLERYGEVDLFQPVMGEEASLSIPLQISRL

SEQ ID NO: 59614 - protein, 454 aa, Glycine max
  peptide (1)..(454): Ceres Seq. ID no. 14310377
  misc_feature (3)..(422): Pfam Name: Flavin containing amine oxidoreductase Pfam Description: Flavin containing amine oxidoreductase
  misc_feature (321)..(454): Homolog of NCBI NO: 25404949 NR Description: protein F1E22.18 [imported] - Arabidopsis
  misc_feature (1)..(356): Homolog of NCBI NO: 25404949 NR Description: protein F1E22.18 [imported] - Arabidopsis
  misc_feature (1)..(454): Homolog of NCBI NO: 13877615 NR Description: putative protein kinase gb|AAD22129 [Arabidopsis
  misc_feature (1)..(454): Homolog of NCBI NO: 15218830 NR Description: amine oxidase family [Arabidopsis thaliana]
  misc_feature (1)..(454): Homolog of NCBI NO: 32488722 NR Description: OSJNBb0004A17.1 [Oryza sativa (japonica
  misc_feature (1)..(454): Homolog of NCBI NO: 38344167 NR Description: OSJNBa0053K19.6 [Oryza sativa (japonica
  misc_feature (1)..(454): Homolog of NCBI NO: 21553762 NR Description: putative amine oxidase [Arabidopsis thaliana]
  misc_feature (1)..(454): Homolog of NCBI NO: 15231622 NR Description: amine oxidase family [Arabidopsis thaliana]
  misc_feature (1)..(454): Homolog of NCBI NO: 18650598 NR Description: At2g43020/MFL8.12 [Arabidopsis thaliana]
  misc_feature (1)..(454): Homolog of NCBI NO: 15224204 NR Description: amine oxidase family [Arabidopsis thaliana]
MAGIAAARALHNASFQVVLLESRDRIGGRIHTDYSFGFPVDLGASWLHGVSNENPLASVIGRLGLPLYRTSGDNSVLYDHDLESYALFDMDGKQVPPELVTKVGEIFETILQETDKIRQESSEDMSVLRGLSIVFDRKPELRLEGLAHKVLQWYLCRMEGWFAADSDTISLKGWDQEVLLPGGHGLMVRGYLPVINTLAKGLDILLGHRVTKVVRRYNGVKVTVESGKTFFADAAVIAVPLGVLKAKKILFKPKLPDWKEAAIADLGIGLENKIILHFENVFWPNVEFLGVVADTSYGCSYFLNLHKAAGHAVLVYMPSGQLAKDVEKMSDEAAVNFAFMQLKKILPDASSPIQYLVSRWGSDINSLGSYSYDAVGKPHELYERLRVPVDNLFFAGEATSMSYPGSVHGAFSTGMMAAEDCRMRVLERYGEVDLFQPVMGEEASLSIPLQISRL

SEQ ID NO: 59615 - protein, 365 aa, Glycine max
  peptide (1)..(365): Ceres Seq. ID no. 14310378
  misc_feature (1)..(333): Pfam Name: Flavin containing amine oxidoreductase Pfam Description: Flavin containing amine oxidoreductase
  misc_feature (232)..(365): Homolog of NCBI NO: 25404949 NR Description: protein F1E22.18 [imported] - Arabidopsis
  misc_feature (1)..(267): Homolog of NCBI NO: 25404949 NR Description: protein F1E22.18 [imported] - Arabidopsis
  misc_feature (1)..(365): Homolog of NCBI NO: 13877615 NR Description: putative protein kinase gb|AAD22129 [Arabidopsis
  misc_feature (1)..(365): Homolog of NCBI NO: 15218830 NR Description: amine oxidase family [Arabidopsis thaliana]
  misc_feature (1)..(365): Homolog of NCBI NO: 32488722 NR Description: OSJNBb0004A17.1 [Oryza sativa (japonica
  misc_feature (1)..(365): Homolog of NCBI NO: 38344167 NR Description: OSJNBa0053K19.6 [Oryza sativa (japonica
  misc_feature (1)..(365): Homolog of NCBI NO: 21553762 NR Description: putative amine oxidase [Arabidopsis thaliana]
  misc_feature (1)..(365): Homolog of NCBI NO: 15231622 NR Description: amine oxidase family [Arabidopsis thaliana]
  misc_feature (1)..(365): Homolog of NCBI NO: 18650598 NR Description: At2g43020/MFL8.12 [Arabidopsis thaliana]
  misc_feature (1)..(365): Homolog of NCBI NO: 15224204 NR Description: amine oxidase family [Arabidopsis thaliana]
MDGKQVPPELVTKVGEIFETILQETDKIRQESSEDMSVLRGLSIVFDRKPELRLEGLAHKVLQWYLCRMEGWFAADSDTISLKGWDQEVLLPGGHGLMVRGYLPVINTLAKGLDILLGHRVTKVVRRYNGVKVTVESGKTFFADAAVIAVPLGVLKAKKILFKPKLPDWKEAAIADLGIGLENKIILHFENVFWPNVEFLGVVADTSYGCSYFLNLHKAAGHAVLVYMPSGQLAKDVEKMSDEAAVNFAFMQLKKILPDASSPIQYLVSRWGSDINSLGSYSYDAVGKPHELYERLRVPVDNLFFAGEATSMSYPGSVHGAFSTGMMAAEDCRMRVLERYGEVDLFQPVMGEEASLSIPLQISRL

SEQ ID NO: 59616 - DNA, 1242 bp, Glycine max
  misc_feature (1)..(1242): Ceres Seq. ID no. 15169292
ggtatccgtgtcttccccaaccattccttaacccaccgcaaattcaaattcaattcgagctgaacctagggttagtcctattgccttcaccgatctcgaatttcggaaacggtaaaagaaaatgcacgtcaaatcggcgcagtcatcgttccgggatcggacacaggaattccacagcatcacagagaggttgaagaagtccggatcagggcccaatgggcccagtagtagcagcacttcttccagatcggaggaacagcgatccgcgatcgcgaatcaatcggagttcaatagaagggcctccaaaatcggctacgggattcaccaaacgtctcagaagctcgccaaactcgccaaattagcgaaaaggacttcggtttttgatgaccctactatggaaatccaagagcttacgggggttattaagcaggatatcactgctctgaactctgctgttgtggatcttcagttggtgtgtagctctaggaatgagactggaaatgtttctgccgatacctctagccattcgagcacggtggtcgatgacttgaagacacggttgatgagcaccaccaaagagtttaaggatgttttgaccatgagaactgagaatatgaaagtgcatgagaatagaagacagttgttttcgtcttctgcttctaaggattctgcgaatccttttattcggcaacggccgttggctgcaagggcggctgctagtacttctagtgcccctgctcttccctgggctaatgggtcaccatcttcatctcaggcgtttcccaagaagcaagtggatggggagagtcaaccattgttgcaacagcaacagcagcagcaggaggtagttccattgcaagatagttacatgcaaagcagagctgaagcacttcagaatgttgagtccactattcatgagcttagcaacattttcaatcagctagcaacacttgtttcccaacaaggagagattgccatcaggattgatgaaaacatggatgatacattggcaaacgtagagggagcacagggggctttgttgaagtatctgaacagcatatcttctaatcggtggttgatgatcaaaattttctttgtattaatatttttccttatggttttcttattttttgtggcatagtcatttgggtgacagaaatgaaaacaatgacatgagtgtcggcgttctgtatttctttaatatttatttctccaaatatatatattcattcttgcagagtt

SEQ ID NO: 59617 - protein, 339 aa, Glycine max
  peptide (1)..(339): Ceres Seq. ID no. 15169293
  misc_feature (54)..(158): Pfam Name: Syntaxin Pfam Description: Syntaxin
  misc_feature (9)..(332): Homolog of NCBI NO: 40747582 NR Description: hypothetical protein AN9526.2 [Aspergillus
  misc_feature (42)..(339): Homolog of NCBI NO: 24584581 NR Description: Syntaxin 5 CG4214-PA [Drosophila melanogaster]
  misc_feature (42)..(339): Homolog of NCBI NO: 542593 NR Description: SED5 protein - fruit fly (Drosophila
  misc_feature (35)..(339): Homolog of NCBI NO: 20148780 NR Description: syntaxin 5 [Phytophthora sojae]
  misc_feature (9)..(332): Homolog of NCBI NO: 32490453 NR Description: syntaxin homologue [Aspergillus oryzae]
  misc_feature (10)..(339): Homolog of NCBI NO: 28829569 NR Description: similar to syntaxin 5
  misc_feature (8)..(339): Homolog of NCBI NO: 2981439 NR Description: syntaxin of plants 31 [Arabidopsis thaliana]
  misc_feature (8)..(339): Homolog of NCBI NO: 15239228 NR Description: syntaxin of plants SYP31 [Arabidopsis thaliana]
  misc_feature (4)..(339): Homolog of NCBI NO: 34906154 NR Description: putative t-SNARE SED5 [Oryza sativa (japonica
  misc_feature (1)..(339): Homolog of NCBI NO: 30687459 NR Description: syntaxin of plants SYP32 [Arabidopsis thaliana]
MHVKSAQSSFRDRTQEFHSITERLKKSGSGPNGPSSSSTSSRSEEQRSAIANQSEFNRRASKIGYGIHQTSQKLAKLAKLAKRTSVFDDPTMEIQELTGVIKQDITALNSAVVDLQLVCSSRNETGNVSADTSSHSSTVVDDLKTRLMSTTKEFKDVLTMRTENMKVHENRRQLFSSSASKDSANPFIRQRPLAARAAASTSSAPALPWANGSPSSSQAFPKKQVDGESQPLLQQQQQQQEVVPLQDSYMQSRAEALQNVESTIHELSNIFNQLATLVSQQGEIAIRIDENMDDTLANVEGAQGALLKYLNSISSNRWLMIKIFFVLIFFLMVFLFFVA

SEQ ID NO: 59618 - protein, 248 aa, Glycine max
  peptide (1)..(248): Ceres Seq. ID no. 15169294
  misc_feature (1)..(67): Pfam Name: Syntaxin Pfam Description: Syntaxin
  misc_feature (1)..(241): Homolog of NCBI NO: 40747582 NR Description: hypothetical protein AN9526.2 [Aspergillus
  misc_feature (1)..(248): Homolog of NCBI NO: 24584581 NR Description: Syntaxin 5 CG4214-PA [Drosophila melanogaster]
  misc_feature (1)..(248): Homolog of NCBI NO: 542593 NR Description: SED5 protein - fruit fly (Drosophila
  misc_feature (1)..(248): Homolog of NCBI NO: 20148780 NR Description: syntaxin 5 [Phytophthora sojae]
  misc_feature (1)..(241): Homolog of NCBI NO: 32490453 NR Description: syntaxin homologue [Aspergillus oryzae]
  misc_feature (1)..(248): Homolog of NCBI NO: 28829569 NR Description: similar to syntaxin 5
  misc_feature (1)..(248): Homolog of NCBI NO: 2981439 NR Description: syntaxin of plants 31 [Arabidopsis thaliana]
  misc_feature (1)..(248): Homolog of NCBI NO: 15239228 NR Description: syntaxin of plants SYP31 [Arabidopsis thaliana]
  misc_feature (1)..(248): Homolog of NCBI NO: 34906154 NR Description: putative t-SNARE SED5 [Oryza sativa (japonica
  misc_feature (1)..(248): Homolog of NCBI NO: 30687459 NR Description: syntaxin of plants SYP32 [Arabidopsis thaliana]
MEIQELTGVIKQDITALNSAVVDLQLVCSSRNETGNVSADTSSHSSTVVDDLKTRLMSTTKEFKDVLTMRTENMKVHENRRQLFSSSASKDSANPFIRQRPLAARAAASTSSAPALPWANGSPSSSQAFPKKQVDGESQPLLQQQQQQQEVVPLQDSYMQSRAEALQNVESTIHELSNIFNQLATLVSQQGEIAIRIDENMDDTLANVEGAQGALLKYLNSISSNRWLMIKIFFVLIFFLMVFLFFVA

SEQ ID NO: 59619 - protein, 192 aa, Glycine max
  peptide (1)..(192): Ceres Seq. ID no. 15169295
  misc_feature (105)..(167): Pfam Name: SNARE domain Pfam Description: SNARE domain
  misc_feature (1)..(185): Homolog of NCBI NO: 40747582 NR Description: hypothetical protein AN9526.2 [Aspergillus
  misc_feature (1)..(192): Homolog of NCBI NO: 24584581 NR Description: Syntaxin 5 CG4214-PA [Drosophila melanogaster]
  misc_feature (1)..(192): Homolog of NCBI NO: 542593 NR Description: SED5 protein - fruit fly (Drosophila
  misc_feature (1)..(192): Homolog of NCBI NO: 20148780 NR Description: syntaxin 5 [Phytophthora sojae]
  misc_feature (1)..(185): Homolog of NCBI NO: 32490453 NR Description: syntaxin homologue [Aspergillus oryzae]
  misc_feature (1)..(192): Homolog of NCBI NO: 28829569 NR Description: similar to syntaxin 5
  misc_feature (1)..(192): Homolog of NCBI NO: 2981439 NR Description: syntaxin of plants 31 [Arabidopsis thaliana]
  misc_feature (1)..(192): Homolog of NCBI NO: 15239228 NR Description: syntaxin of plants SYP31 [Arabidopsis thaliana]
  misc_feature (1)..(192): Homolog of NCBI NO: 34906154 NR Description: putative t-SNARE SED5 [Oryza sativa (japonica
  misc_feature (1)..(192): Homolog of NCBI NO: 30687459 NR Description: syntaxin of plants SYP32 [Arabidopsis thaliana]
MSTTKEFKDVLTMRTENMKVHENRRQLFSSSASKDSANPFIRQRPLAARAAASTSSAPALPWANGSPSSSQAFPKKQVDGESQPLLQQQQQQQEVVPLQDSYMQSRAEALQNVESTIHELSNIFNQLATLVSQQGEIAIRIDENMDDTLANVEGAQGALLKYLNSISSNRWLMIKIFFVLIFFLMVFLFFVA

SEQ ID NO: 59620 - DNA, 1221 bp, Glycine max
  misc_feature (1)..(1221): Ceres Seq. ID no. 15176407
gttcttcctaaaacaaatcgtgtaaaggcaaagtacagacaaagttagttagaaattgaaagggaaagggaaacgaaaatgagtagtagggtttggtgtgtggtgatggtatcagcgttggcgttgatgttacaatggcacgaagcattcagctcctacgctggctccgcaagtgcgatcatcgacccttccaaggtcaaacaagtttcgtggaaaccgagagctttcgtttacgagggttttctgacggaattggaatgcgatcacttgatttccatcgccaaatcggagctcaagagatccgcggtggccgataatttgtccggcgagagcaagttgagcgaagtcagaacgagctccggcatgttcattcccaagaacaaggatctgattgttgctggtattgaagacaagatttcatcatggacctttcttccaaaagaaaatggagaagacatacaagtattaagatatgagcacgggcagaaatatgatcctcattatgattactttgctgataaagttaatatagctcggggtggacaccgagttgcgacagttctcatgtatctcactgatgtaaccaaaggtggtgagacagtgttccctgatgcagaggaatctccacgtcacaaaggttctgaaacaaatgaaaatctctctgagtgtgcccaaaaaggaatagcagtgaaaccacgaagaggggatgcacttcttttctttagtctctacccaaatgctatcccagacacactgagtctacatgcaggatgccctgtaattgaaggtgagaaatggtcagcaacaaaatggattcatgtggactcatttgacaaggtggtgggagatggaggggattgcaatgataagcacgaaaactgtgagagatgggctacccttggagaatgtactagtaatcccgaatatatggttggatctccaggccttcctggctactgcatgaaaagttgcaaggaatgttagaagtgttactgaatgctttccagattccacatggtatttttgacgttgactcaaatttcaattggttctcagatttttattatgtattttctttttttgtgaattgtattgtattctgtctcattataattagctctcagatagtgttctagtgcatggtcacacttcaagaggtacatttcgtcggatactttgtatgtaaaactacaaaaaaggaagtatacgttgttttatccc

SEQ ID NO: 59621 - protein, 301 aa, Glycine max
  peptide (1)..(301): Ceres Seq. ID no. 15176408
  misc_feature (123)..(248): Pfam Name: 2OG-Fe(II) oxygenase superfamily Pfam Description: 2OG-Fe(II) oxygenase superfamily
  misc_feature (30)..(301): Homolog of NCBI NO: 9294583 NR Description: prolyl 4-hydroxylase alpha subunit-like protein
  misc_feature (13)..(111): Homolog of NCBI NO: 37534316 NR Description: unknown protein [Oryza sativa (japonica
  misc_feature (103)..(301): Homolog of NCBI NO: 37534316 NR Description: unknown protein [Oryza sativa (japonica
  misc_feature (10)..(301): Homolog of NCBI NO: 29150365 NR Description: putative oxidoreductase [Oryza sativa (japonica
  misc_feature (186)..(301): Homolog of NCBI NO: 6437556 NR Description: unknown protein [Arabidopsis thaliana]
  misc_feature (3)..(180): Homolog of NCBI NO: 6437556 NR Description: unknown protein [Arabidopsis thaliana]
  misc_feature (3)..(301): Homolog of NCBI NO: 21618073 NR Description: prolyl 4-hydroxylase alpha subunit-like protein
  misc_feature (3)..(301): Homolog of NCBI NO: 18397528 NR Description: oxidoreductase, 2OG-Fe(II) oxygenase family
  misc_feature (9)..(301): Homolog of NCBI NO: 20260280 NR Description: unknown protein [Arabidopsis thaliana]
  misc_feature (9)..(301): Homolog of NCBI NO: 15239594 NR Description: oxidoreductase, 2OG-Fe(II) oxygenase family
MSSRVWCVVMVSALALMLQWHEAFSSYAGSASAIIDPSKVKQVSWKPRAFVYEGFLTELECDHLISIAKSELKRSAVADNLSGESKLSEVRTSSGMFIPKNKDLIVAGIEDKISSWTFLPKENGEDIQVLRYEHGQKYDPHYDYFADKVNIARGGHRVATVLMYLTDVTKGGETVFPDAEESPRHKGSETNENLSECAQKGIAVKPRRGDALLFFSLYPNAIPDTLSLHAGCPVIEGEKWSATKWIHVDSFDKVVGDGGDCNDKHENCERWATLGECTSNPEYMVGSPGLPGYCMKSCKEC

SEQ ID NO: 59622 - protein, 292 aa, Glycine max
  peptide (1)..(292): Ceres Seq. ID no. 15176409
  misc_feature (114)..(239): Pfam Name: 2OG-Fe(II) oxygenase superfamily Pfam Description: 2OG-Fe(II) oxygenase superfamily
  misc_feature (21)..(292): Homolog of NCBI NO: 9294583 NR Description: prolyl 4-hydroxylase alpha subunit-like protein
  misc_feature (4)..(102): Homolog of NCBI NO: 37534316 NR Description: unknown protein [Oryza sativa (japonica
  misc_feature (94)..(292): Homolog of NCBI NO: 37534316 NR Description: unknown protein [Oryza sativa (japonica
  misc_feature (1)..(292): Homolog of NCBI NO: 29150365 NR Description: putative oxidoreductase [Oryza sativa (japonica
  misc_feature (177)..(292): Homolog of NCBI NO: 6437556 NR Description: unknown protein [Arabidopsis thaliana]
  misc_feature (1)..(171): Homolog of NCBI NO: 6437556 NR Description: unknown protein [Arabidopsis thaliana]
  misc_feature (1)..(292): Homolog of NCBI NO: 21618073 NR Description: prolyl 4-hydroxylase alpha subunit-like protein
  misc_feature (1)..(292): Homolog of NCBI NO: 18397528 NR Description: oxidoreductase, 2OG-Fe(II) oxygenase family
  misc_feature (1)..(292): Homolog of NCBI NO: 20260280 NR Description: unknown protein [Arabidopsis thaliana]
  misc_feature (1)..(292): Homolog of NCBI NO: 15239594 NR Description: oxidoreductase, 2OG-Fe(II) oxygenase family
MVSALALMLQWHEAFSSYAGSASAIIDPSKVKQVSWKPRAFVYEGFLTELECDHLISIAKSELKRSAVADNLSGESKLSEVRTSSGMFIPKNKDLIVAGIEDKISSWTFLPKENGEDIQVLRYEHGQKYDPHYDYFADKVNIARGGHRVATVLMYLTDVTKGGETVFPDAEESPRHKGSETNENLSECAQKGIAVKPRRGDALLFFSLYPNAIPDTLSLHAGCPVIEGEKWSATKWIHVDSFDKVVGDGGDCNDKHENCERWATLGECTSNPEYMVGSPGLPGYCMKSCKEC

SEQ ID NO: 59623 - protein, 285 aa, Glycine max
  peptide (1)..(285): Ceres Seq. ID no. 15176410
  misc_feature (107)..(232): Pfam Name: 2OG-Fe(II) oxygenase superfamily Pfam Description: 2OG-Fe(II) oxygenase superfamily
  misc_feature (14)..(285): Homolog of NCBI NO: 9294583 NR Description: prolyl 4-hydroxylase alpha subunit-like protein
  misc_feature (1)..(95): Homolog of NCBI NO: 37534316 NR Description: unknown protein [Oryza sativa (japonica
  misc_feature (87)..(285): Homolog of NCBI NO: 37534316 NR Description: unknown protein [Oryza sativa (japonica
  misc_feature (1)..(285): Homolog of NCBI NO: 29150365 NR Description: putative oxidoreductase [Oryza sativa (japonica
  misc_feature (170)..(285): Homolog of NCBI NO: 6437556 NR Description: unknown protein [Arabidopsis thaliana]
  misc_feature (1)..(164): Homolog of NCBI NO: 6437556 NR Description: unknown protein [Arabidopsis thaliana]
  misc_feature (1)..(285): Homolog of NCBI NO: 21618073 NR Description: prolyl 4-hydroxylase alpha subunit-like protein
  misc_feature (1)..(285): Homolog of NCBI NO: 18397528 NR Description: oxidoreductase, 2OG-Fe(II) oxygenase family
  misc_feature (1)..(285): Homolog of NCBI NO: 20260280 NR Description: unknown protein [Arabidopsis thaliana]
  misc_feature (1)..(285): Homolog of NCBI NO: 15239594 NR Description: oxidoreductase, 2OG-Fe(II) oxygenase family
MLQWHEAFSSYAGSASAIIDPSKVKQVSWKPRAFVYEGFLTELECDHLISIAKSELKRSAVADNLSGESKLSEVRTSSGMFIPKNKDLIVAGIEDKISSWTFLPKENGEDIQVLRYEHGQKYDPHYDYFADKVNIARGGHRVATVLMYLTDVTKGGETVFPDAEESPRHKGSETNENLSECAQKGIAVKPRRGDALLFFSLYPNAIPDTLSLHAGCPVIEGEKWSATKWIHVDSFDKVVGDGGDCNDKHENCERWATLGECTSNPEYMVGSPGLPGYCMKSCKEC

SEQ ID NO: 59624 - DNA, 1328 bp, Glycine max
  misc_feature (1)..(1328): Ceres Seq. ID no. 14313847
acttcttccaatttcaaattcttcactcacccagtcgcgcttttctctgaatttcacgatgcgcacgtccagaaaagcagaaccctccaacaacgacgtcgtttcttcggaacacagaaactggagcaacatcttcaaatcgctggttcagatggtgtgcagccagcagaaccagcttcactccttcgcgagccgccacaagtttctcgaagaccgccttcgaatgcagcacgaagggtgggtctccgatgttcgatgtcacaaggatcaaatttctcagatgaatgggatgttgacgtttgaggagaagaaacagtcgctcgaggcggcaaaggcggattttgcgcttagtttgaagcacagagaggctgctatgttgaaatggattttagagcatgcagaggatgagttggcggattttaaagcctggtttgaaatcctttcttgtaaatcctctaatggagaagatcaaggaacagcatttaaggatactgacttgaagaagaaaggaagcacggatagagggaacatgtccactaggaatactgcagaaaaagagaagtattccagtgaaaacaaagatgaatttagtaggttaaaaggtgaatatgataagcttgctttagaaaaatattcggaggtgacgacactcttggcagaaaagaaatttatgtggaatcaatataatgtaatggagaatgattatgctgataaattaaggactaaagaagctgaagtagaaaaagcaaatgaaaagataaagatacttgtttctagcatggagcagctacagtctgaaaattatgaaaaggatagtaaaatatcagagttacaaagtaaaatggctgagatggaagctgagacaaaaagattgaacaatgaaatatctgaactctcagtggagttggaatctttaagaaagttcaggaacagccaagttacaccatctgttttaaatcgctgcacagaaggaactaaagcacctgagtcaggagttgttaagagcaacaagagtagaagaaatatgactctgaaaaaagaaatatgtactcctgatgctccagttcctgccaaatcctctgaaaaggggacaaaaacaaaaagcatgaagaggaaagaggctccagttattcccacttctgagactccgaaactgttctcttccggcttcaaggttccaaaactgaagtcctctgtaagggtcacatgacagatgacaccttccgataacttttagtgtgttacttaggatatgttagtcttgtacacgcgacttttgtattatatgctccttgtgtaaactatgtattatgaatgagctttctgtc

SEQ ID NO: 59625 - protein, 402 aa, Glycine max
  peptide (1)..(402): Ceres Seq. ID no. 14313848
  misc_feature (21)..(320): Homolog of NCBI NO: 38344113 NR Description: OSJNBb0050O03.10 [Oryza sativa (japonica
  misc_feature (35)..(391): Homolog of NCBI NO: 25518429 NR Description: hypothetical protein T20H2.23 - Arabidopsis
  misc_feature (35)..(343): Homolog of NCBI NO: 15223725 NR Description: expressed protein [Arabidopsis thaliana]
  misc_feature (198)..(395): Homolog of NCBI NO: 25518429 NR Description: hypothetical protein T20H2.23 - Arabidopsis
  misc_feature (198)..(397): Homolog of NCBI NO: 15223725 NR Description: expressed protein [Arabidopsis thaliana]
LLPISNSSLTQSRFSLNFTMRTSRKAEPSNNDVVSSEHRNWSNIFKSLVQMVCSQQNQLHSFASRHKFLEDRLRMQHEGWVSDVRCHKDQISQMNGMLTFEEKKQSLEAAKADFALSLKHREAAMLKWILEHAEDELADFKAWFEILSCKSSNGEDQGTAFKDTDLKKKGSTDRGNMSTRNTAEKEKYSSENKDEFSRLKGEYDKLALEKYSEVTTLLAEKKFMWNQYNVMENDYADKLRTKEAEVEKANEKIKILVSSMEQLQSENYEKDSKISELQSKMAEMEAETKRLNNEISELSVELESLRKFRNSQVTPSVLNRCTEGTKAPESGVVKSNKSRRNMTLKKEICTPDAPVPAKSSEKGTKTKSMKRKEAPVIPTSETPKLFSSGFKVPKLKSSVRVT

SEQ ID NO: 59626 - protein, 383 aa, Glycine max
  peptide (1)..(383): Ceres Seq. ID no. 14313849
  misc_feature (2)..(301): Homolog of NCBI NO: 38344113 NR Description: OSJNBb0050O03.10 [Oryza sativa (japonica
  misc_feature (16)..(372): Homolog of NCBI NO: 25518429 NR Description: hypothetical protein T20H2.23 - Arabidopsis
  misc_feature (16)..(324): Homolog of NCBI NO: 15223725 NR Description: expressed protein [Arabidopsis thaliana]
  misc_feature (179)..(376): Homolog of NCBI NO: 25518429 NR Description: hypothetical protein T20H2.23 - Arabidopsis
  misc_feature (179)..(378): Homolog of NCBI NO: 15223725 NR Description: expressed protein [Arabidopsis thaliana]
MRTSRKAEPSNNDVVSSEHRNWSNIFKSLVQMVCSQQNQLHSFASRHKFLEDRLRMQHEGWVSDVRCHKDQISQMNGMLTFEEKKQSLEAAKADFALSLKHREAAMLKWILEHAEDELADFKAWFEILSCKSSNGEDQGTAFKDTDLKKKGSTDRGNMSTRNTAEKEKYSSENKDEFSRLKGEYDKLALEKYSEVTTLLAEKKFMWNQYNVMENDYADKLRTKEAEVEKANEKIKILVSSMEQLQSENYEKDSKISELQSKMAEMEAETKRLNNEISELSVELESLRKFRNSQVTPSVLNRCTEGTKAPESGVVKSNKSRRNMTLKKEICTPDAPVPAKSSEKGTKTKSMKRKEAPVIPTSETPKLFSSGFKVPKLKSSVRVT

SEQ ID NO: 59627 - protein, 352 aa, Glycine max
  peptide (1)..(352): Ceres Seq. ID no. 14313850
  misc_feature (1)..(270): Homolog of NCBI NO: 38344113 NR Description: OSJNBb0050O03.10 [Oryza sativa (japonica
  misc_feature (1)..(341): Homolog of NCBI NO: 25518429 NR Description: hypothetical protein T20H2.23 - Arabidopsis
  misc_feature (1)..(293): Homolog of NCBI NO: 15223725 NR Description: expressed protein [Arabidopsis thaliana]
  misc_feature (148)..(345): Homolog of NCBI NO: 25518429 NR Description: hypothetical protein T20H2.23 - Arabidopsis
  misc_feature (148)..(347): Homolog of NCBI NO: 15223725 NR Description: expressed protein [Arabidopsis thaliana]
MVCSQQNQLHSFASRHKFLEDRLRMQHEGWVSDVRCHKDQISQMNGMLTFEEKKQSLEAAKADFALSLKHREAAMLKWILEHAEDELADFKAWFEILSCKSSNGEDQGTAFKDTDLKKKGSTDRGNMSTRNTAEKEKYSSENKDEFSRLKGEYDKLALEKYSEVTTLLAEKKFMWNQYNVMENDYADKLRTKEAEVEKANEKIKILVSSMEQLQSENYEKDSKISELQSKMAEMEAETKRLNNEISELSVELESLRKFRNSQVTPSVLNRCTEGTKAPESGVVKSNKSRRNMTLKKEICTPDAPVPAKSSEKGTKTKSMKRKEAPVIPTSETPKLFSSGFKVPKLKSSVRVT

SEQ ID NO: 59628 - DNA, 1164 bp, Glycine max
  misc_feature (1)..(1164): Ceres Seq. ID no. 15169703
ataaattaagaaccctcttttgggaggtgtccttctttttcatgcccatctttcccctaatgctggtggtgggttcagttttttggtgaggaaggataataaagaaggaagctttttttgtgtgagagaaggaagaggagaaaagaaggcatggggagagggaagattgagattaagaagattgagaatttgaacagcagacaagttaccttctccaagaggagaaatgggttgttgaagaaggccaaagagttgtctgttctctgtgatgcagaggttgctgtcatcatattctccagcactggcaagctttatgagttctcaaacacaagcatggagcataccctttcgaggtacagtaaaggcgcagaatcagattctgcagagcaacctattgatgtgcccccaacagatgttatggctgtggagcctgatactaaccttttgatggaggaaataacaaagcttcgatcagcatacttaaggatgatgggtaaggagcttgatggattgagccttaaagaactgcaacaactagaaaatcaactaagtgaagggatgcaatctgtcaaagacaagaaggaacaagtacttgtggaacagcttaggaagtccaggatacaggagcaaaaggccatgctggaaaatgaagttctgcgcaaacagcttgaggaaatacaaaataaaacaaagtcacagttccttgaattcagctctttggataggacattttccaagaatggttcaaaatcccttttcaattgtgcttcagaggaaaatgacctttcagatacttccttgcagttagggttgtcaacagattatggtcgccagaggaaagcattgaagatggaaccttgcaacgactcagggagtcaagtggcttcacattgacattttagtactgaaagcttacctttagaacatgggaaacatggcctagttctttatctggtcacattaagtttagcttatagaaatagtttaggctaaatttaataaatttatatttagttcacaaatttttggctttcaccagcgtttgattgctaaattaggtgtaagtttacatgctaaatgactcaccctattgaaatactttagtcatttagttcaaccaaacggttttcaggttattaagatggttgattagataaaaaggtc

SEQ ID NO: 59629 - protein, 247 aa, Glycine max
  peptide (1)..(247): Ceres Seq. ID no. 15169704
  misc_feature (9)..(59): Pfam Name: SRF-type transcription factor (DNA-binding and Pfam Description: SRF-type transcription factor (DNA-binding and
  misc_feature (1)..(220): Homolog of NCBI NO: 4033710 NR Description: AGAMOUS-like MADS-box transcription factor
  misc_feature (1)..(220): Homolog of NCBI NO: 4103486 NR Description: MADS box protein [Pinus radiata]
  misc_feature (1)..(220): Homolog of NCBI NO: 4101710 NR Description: MADS box transcription factor [Pinus resinosa]
  misc_feature (1)..(220): Homolog of NCBI NO: 21396795 NR Description: MADS-box gene 2 protein [Lycopodium annotinum]
  misc_feature (7)..(240): Homolog of NCBI NO: 862646 NR Description: MADS-box protein AGL15
  misc_feature (1)..(240): Homolog of NCBI NO: 7446561 NR Description: MADS box protein AGL15 (type 2) - rape
  misc_feature (1)..(240): Homolog of NCBI NO: 3831486 NR Description: Agamous-like MADS box protein AGL15
  misc_feature (1)..(240): Homolog of NCBI NO: 15240706 NR Description: floral homeotic protein, AGL15 [Arabidopsis
  misc_feature (1)..(246): Homolog of NCBI NO: 21593229 NR Description: MADS transcription factor-like protein
  misc_feature (1)..(246): Homolog of NCBI NO: 15230284 NR Description: MADS-box protein [Arabidopsis thaliana]
MGRGKIEIKKIENLNSRQVTFSKRRNGLLKKAKELSVLCDAEVAVIIFSSTGKLYEFSNTSMEHTLSRYSKGAESDSAEQPIDVPPTDVMAVEPDTNLLMEEITKLRSAYLRMMGKELDGLSLKELQQLENQLSEGMQSVKDKKEQVLVEQLRKSRIQEQKAMLENEVLRKQLEEIQNKTKSQFLEFSSLDRTFSKNGSKSLFNCASEENDLSDTSLQLGLSTDYGRQRKALKMEPCNDSGSQVASH

SEQ ID NO: 59630 - protein, 186 aa, Glycine max
  peptide (1)..(186): Ceres Seq. ID no. 15169705
  misc_feature (41)..(113): Pfam Name: K-box region Pfam Description: K-box region
  misc_feature (1)..(159): Homolog of NCBI NO: 4033710 NR Description: AGAMOUS-like MADS-box transcription factor
  misc_feature (1)..(159): Homolog of NCBI NO: 4103486 NR Description: MADS box protein [Pinus radiata]
  misc_feature (1)..(159): Homolog of NCBI NO: 4101710 NR Description: MADS box transcription factor [Pinus resinosa]
  misc_feature (1)..(159): Homolog of NCBI NO: 21396795 NR Description: MADS-box gene 2 protein [Lycopodium annotinum]
  misc_feature (1)..(179): Homolog of NCBI NO: 862646 NR Description: MADS-box protein AGL15
  misc_feature (1)..(179): Homolog of NCBI NO: 7446561 NR Description: MADS box protein AGL15 (type 2) - rape
  misc_feature (1)..(179): Homolog of NCBI NO: 3831486 NR Description: Agamous-like MADS box protein AGL15
  misc_feature (1)..(179): Homolog of NCBI NO: 15240706 NR Description: floral homeotic protein, AGL15 [Arabidopsis
  misc_feature (1)..(185): Homolog of NCBI NO: 21593229 NR Description: MADS transcription factor-like protein
  misc_feature (1)..(185): Homolog of NCBI NO: 15230284 NR Description: MADS-box protein [Arabidopsis thaliana]
MEHTLSRYSKGAESDSAEQPIDVPPTDVMAVEPDTNLLMEEITKLRSAYLRMMGKELDGLSLKELQQLENQLSEGMQSVKDKKEQVLVEQLRKSRIQEQKAMLENEVLRKQLEEIQNKTKSQFLEFSSLDRTFSKNGSKSLFNCASEENDLSDTSLQLGLSTDYGRQRKALKMEPCNDSGSQVASH

SEQ ID NO: 59631 - protein, 158 aa, Glycine max
  peptide (1)..(158): Ceres Seq. ID no. 15169706
  misc_feature (13)..(85): Pfam Name: K-box region Pfam Description: K-box region
  misc_feature (1)..(131): Homolog of NCBI NO: 4033710 NR Description: AGAMOUS-like MADS-box transcription factor
  misc_feature (1)..(131): Homolog of NCBI NO: 4103486 NR Description: MADS box protein [Pinus radiata]
  misc_feature (1)..(131): Homolog of NCBI NO: 4101710 NR Description: MADS box transcription factor [Pinus resinosa]
  misc_feature (1)..(131): Homolog of NCBI NO: 21396795 NR Description: MADS-box gene 2 protein [Lycopodium annotinum]
  misc_feature (1)..(151): Homolog of NCBI NO: 862646 NR Description: MADS-box protein AGL15
  misc_feature (1)..(151): Homolog of NCBI NO: 7446561 NR Description: MADS box protein AGL15 (type 2) - rape
  misc_feature (1)..(151): Homolog of NCBI NO: 3831486 NR Description: Agamous-like MADS box protein AGL15
  misc_feature (1)..(151): Homolog of NCBI NO: 15240706 NR Description: floral homeotic protein, AGL15 [Arabidopsis
  misc_feature (1)..(157): Homolog of NCBI NO: 21593229 NR Description: MADS transcription factor-like protein
  misc_feature (1)..(157): Homolog of NCBI NO: 15230284 NR Description: MADS-box protein [Arabidopsis thaliana]
MAVEPDTNLLMEEITKLRSAYLRMMGKELDGLSLKELQQLENQLSEGMQSVKDKKEQVLVEQLRKSRIQEQKAMLENEVLRKQLEEIQNKTKSQFLEFSSLDRTFSKNGSKSLFNCASEENDLSDTSLQLGLSTDYGRQRKALKMEPCNDSGSQVASH

SEQ ID NO: 59632 - DNA, 1617 bp, Glycine max
  misc_feature (1)..(1617): Ceres Seq. ID no. 15172112
aagaggggcttccccacgccatcctctctcccaacaagagagcgaacgagcccattcctgtttctccaccaccgaacacacacacgccctttgcttccttcctcacctcgcgctaacctgcaccccccttcttatcctgcgcaccccttctttatccaattctttcctcagattcggagcaccgcgcgcgccaccattgggaaaagaggttccggtgctgggggcctagggttagggtttctgagagatgtgggatgctccatgcattgatgagccttatcgcgcgctgttggaagccgttcgggcacggtgacgatgccggtaatgccgccgccggaagagaatgcaaggacggcctcctctggttccgcgacatcggaaagtttgcagccggcgatttctccatggccgtcgtccaggccaaccaggtcatcgaggaccagagccagatcgagtccggcgccttcggcaccttcgtcggcgtctacgacggccacggcggccccgattgctcccgctacgtttgcgataacttgttccgcaatctccaagcgatattggccgagtcacagagtgttgtgacatctgaggccattcatcaggcgttccggcggacagaggaggggtttacggcgcttgtttcggagctgtggagctctcggccgcagattgcgactactgggacgtgttgtttggttggggttatttgtcggcagacactctttgtggcaagtcttggagattcccgtgctgtgttgggtaggagagttggcaacaccggtgggatggccgcgattcagttgtctacggagcacaatgcgaattttgaggctgtcaggcaggagcttaaggaattgcacccgaatgacccccagattgttgtcctcaaacatggagtgtggagagtaaagggcattattcaggtttctagatctataggtgacgtatatatgaaacatgcgcagtttaaccgagaacccattaatgcaaaattcagactccccgaaccaatgaacatgcctttcttgtctgctaatccaactattctttctcatcctctccaaccaaatgattccttccttatatttgcatcagatggtttatgggagcacctgagtaatgatcaagcagtggatattgttcacagcagtccatgcgcgggtagtgcgaagaaacttgtcaaggctgccctacaagaagcagcaagaaaacgtgaaatgcgatattcagacctttacaagattgacaagaaggttcgtcgccattttcacgacgatataactgttattgttttattcttaaaccacaaccttatatccaggggtgcagttctaaatacaccacttacaattcgtagtgctctcgatcactgacgcttcatgatttgtaaacatgcttctcttatacgggtgttctggcaactgtgccaataccagaaaatacaccattggtacgttgctagaatataccattcatagtgctgccacgtatggttactgataccgagacaacttattgatgacgcacgaacttgtaacacttgttagaagtttatccatgaaaatgaaaaagagaaaaagaaaaaaaaaaatatcagaaaagtaacttttgattagt

SEQ ID NO: 59633 - protein, 372 aa, Glycine max
  peptide (1)..(372): Ceres Seq. ID no. 15172113
  misc_feature (39)..(321): Pfam Name: Protein phosphatase 2C Pfam Description: Protein phosphatase 2C
  misc_feature (6)..(369): Homolog of NCBI NO: 7485891 NR Description: hypothetical protein F20M13.80 - Arabidopsis
  misc_feature (1)..(367): Homolog of NCBI NO: 7768153 NR Description: protein phosphatase 2C (PP2C) [Fagus sylvatica]
  misc_feature (1)..(369): Homolog of NCBI NO: 17064756 NR Description: putative protein phosphatase-2c [Arabidopsis
  misc_feature (1)..(369): Homolog of NCBI NO: 22329238 NR Description: protein phosphatase-2c -related [Arabidopsis
  misc_feature (1)..(363): Homolog of NCBI NO: 18855039 NR Description: putative protein phosphatase [Oryza sativa]
  misc_feature (1)..(372): Homolog of NCBI NO: 31249768 NR Description: putative protein phosphatase 2C
  misc_feature (1)..(372): Homolog of NCBI NO: 11282004 NR Description: protein phosphatase 2C homolog [imported] -
  misc_feature (1)..(372): Homolog of NCBI NO: 21537406 NR Description: protein phosphatase-2c, putative [Arabidopsis
  misc_feature (6)..(372): Homolog of NCBI NO: 7670033 NR Description: protein phosphatase 2C-like protein [Arabidopsis
  misc_feature (1)..(372): Homolog of NCBI NO: 18401370 NR Description: protein phosphatase-2c -related [Arabidopsis
MLHALMSLIARCWKPFGHGDDAGNAAAGRECKDGLLWFRDIGKFAAGDFSMAVVQANQVIEDQSQIESGAFGTFVGVYDGHGGPDCSRYVCDNLFRNLQAILAESQSVVTSEAIHQAFRRTEEGFTALVSELWSSRPQIATTGTCCLVGVICRQTLFVASLGDSRAVLGRRVGNTGGMAAIQLSTEHNANFEAVRQELKELHPNDPQIVVLKHGVWRVKGIIQVSRSIGDVYMKHAQFNREPINAKFRLPEPMNMPFLSANPTILSHPLQPNDSFLIFASDGLWEHLSNDQAVDIVHSSPCAGSAKKLVKAALQEAARKREMRYSDLYKIDKKVRRHFHDDITVIVLFLNHNLISRGAVLNTPLTIRSALDH

SEQ ID NO: 59634 - protein, 367 aa, Glycine max
  peptide (1)..(367): Ceres Seq. ID no. 15172114
  misc_feature (34)..(316): Pfam Name: Protein phosphatase 2C Pfam Description: Protein phosphatase 2C
  misc_feature (1)..(364): Homolog of NCBI NO: 7485891 NR Description: hypothetical protein F20M13.80 - Arabidopsis
  misc_feature (1)..(362): Homolog of NCBI NO: 7768153 NR Description: protein phosphatase 2C (PP2C) [Fagus sylvatica]
  misc_feature (1)..(364): Homolog of NCBI NO: 17064756 NR Description: putative protein phosphatase-2c [Arabidopsis
  misc_feature (1)..(364): Homolog of NCBI NO: 22329238 NR Description: protein phosphatase-2c -related [Arabidopsis
  misc_feature (1)..(358): Homolog of NCBI NO: 18855039 NR Description: putative protein phosphatase [Oryza sativa]
  misc_feature (1)..(367): Homolog of NCBI NO: 31249768 NR Description: putative protein phosphatase 2C
  misc_feature (1)..(367): Homolog of NCBI NO: 11282004 NR Description: protein phosphatase 2C homolog [imported] -
  misc_feature (1)..(367): Homolog of NCBI NO: 21537406 NR Description: protein phosphatase-2c, putative [Arabidopsis
  misc_feature (1)..(367): Homolog of NCBI NO: 7670033 NR Description: protein phosphatase 2C-like protein [Arabidopsis
  misc_feature (1)..(367): Homolog of NCBI NO: 18401370 NR Description: protein phosphatase-2c -related [Arabidopsis
MSLIARCWKPFGHGDDAGNAAAGRECKDGLLWFRDIGKFAAGDFSMAVVQANQVIEDQSQIESGAFGTFVGVYDGHGGPDCSRYVCDNLFRNLQAILAESQSVVTSEAIHQAFRRTEEGFTALVSELWSSRPQIATTGTCCLVGVICRQTLFVASLGDSRAVLGRRVGNTGGMAAIQLSTEHNANFEAVRQELKELHPNDPQIVVLKHGVWRVKGIIQVSRSIGDVYMKHAQFNREPINAKFRLPEPMNMPFLSANPTILSHPLQPNDSFLIFASDGLWEHLSNDQAVDIVHSSPCAGSAKKLVKAALQEAARKREMRYSDLYKIDKKVRRHFHDDITVIVLFLNHNLISRGAVLNTPLTIRSALDH

SEQ ID NO: 59635 - protein, 322 aa, Glycine max
  peptide (1)..(322): Ceres Seq. ID no. 15172115
  misc_feature (1)..(271): Pfam Name: Protein phosphatase 2C Pfam Description: Protein phosphatase 2C
  misc_feature (1)..(319): Homolog of NCBI NO: 7485891 NR Description: hypothetical protein F20M13.80 - Arabidopsis
  misc_feature (1)..(317): Homolog of NCBI NO: 7768153 NR Description: protein phosphatase 2C (PP2C) [Fagus sylvatica]
  misc_feature (1)..(319): Homolog of NCBI NO: 17064756 NR Description: putative protein phosphatase-2c [Arabidopsis
  misc_feature (1)..(319): Homolog of NCBI NO: 22329238 NR Description: protein phosphatase-2c -related [Arabidopsis
  misc_feature (1)..(313): Homolog of NCBI NO: 18855039 NR Description: putative protein phosphatase [Oryza sativa]
  misc_feature (1)..(322): Homolog of NCBI NO: 31249768 NR Description: putative protein phosphatase 2C
  misc_feature (1)..(322): Homolog of NCBI NO: 11282004 NR Description: protein phosphatase 2C homolog [imported] -
  misc_feature (1)..(322): Homolog of NCBI NO: 21537406 NR Description: protein phosphatase-2c, putative [Arabidopsis
  misc_feature (1)..(322): Homolog of NCBI NO: 7670033 NR Description: protein phosphatase 2C-like protein [Arabidopsis
  misc_feature (1)..(322): Homolog of NCBI NO: 18401370 NR Description: protein phosphatase-2c -related [Arabidopsis
MAVVQANQVIEDQSQIESGAFGTFVGVYDGHGGPDCSRYVCDNLFRNLQAILAESQSVVTSEAIHQAFRRTEEGFTALVSELWSSRPQIATTGTCCLVGVICRQTLFVASLGDSRAVLGRRVGNTGGMAAIQLSTEHNANFEAVRQELKELHPNDPQIVVLKHGVWRVKGIIQVSRSIGDVYMKHAQFNREPINAKFRLPEPMNMPFLSANPTILSHPLQPNDSFLIFASDGLWEHLSNDQAVDIVHSSPCAGSAKKLVKAALQEAARKREMRYSDLYKIDKKVRRHFHDDITVIVLFLNHNLISRGAVLNTPLTIRSALDH

SEQ ID NO: 59636 - DNA, 1326 bp, Glycine max
  misc_feature (1)..(1326): Ceres Seq. ID no. 14307464
aattactatttttcactttctcctttcaatatgaggaaccccactcacaagtcccctgaggttgaaaatgatggtgattttaaagttcatctgttctcttcatcatccgagttgcttgaaaagcttcatgaaaaatggagttcagtggagaaaccaccatacccagctatttattctagtatttatggaggtatcatacttgatccagcaatgatggtaatccccattgatgatcacatggttcacagagggcatggtgtgtttgatacagctattgttctagatggatacctctatgagttggatgttcaccttgacagattcctaagttcagcctccaaagcaaagatatcctctcccttttctcgatcagtgcttcacagcattctaatacaactaactgcagcatcaaaatgcaagaagggaactctaagatactggctcagtgcaggtcctggagatttcttgctatcatcagcaggatgtccaacatctgcattctatgcagtagtcattgaccaagatatttcccaatgcaaagagggagttaaagtgattacttccaacataccaatgaagccttctctatttgccacagccaaaaatgtgaactatcttccaaatgtcctttcagtaatggaagctgaagagaaaggagcatcttcttctatatgggttgatgaggaaggttatattgctgaaggtccaaatgtgaatgttgctttcataactcaagacaaggaacttgtcatgcctccttttgataacatcttacatggttgcactgcaaaaaggctccttgaactggcacccaagttggttgatcaagggcttctgaaaggtgtagcaactaaaaaactaactgtggaggaagctaaagctgctgctgaaatgatgtatgtaggaagcacgcttcctctgttgcctatcatcgtttgggatgatcaacccattggcaatggaagggtgggagaattaacaatgttactttcggatatgctttgggatgatatggtagctggccctggcacacagaggatacctgttccttatgttgagtaaacctacaaagtcatcaaattacaggctgggaacaactttcttacttttctatgtcatgttcctaggagttctccttgcaaagatttatcaagaggtttctctttgtatttgctttttgtatttcaagtgtgaacactgaacaagtccttaagtgaagcaccaggtgtttcctgcaacacaaaatttacgtagcagataaatagtccttgaactgtttcacgttgttgtattgatataataataataatgaagactcttcatgct

SEQ ID NO: 59637 - protein, 353 aa, Glycine max
  peptide (1)..(353): Ceres Seq. ID no. 14307465
  misc_feature (63)..(335): Pfam Name: Aminotransferase class IV Pfam Description: Aminotransferase class IV
  misc_feature (74)..(333): Homolog of NCBI NO: 33599322 NR Description: probable aminotransferase [Bordetella
  misc_feature (76)..(336): Homolog of NCBI NO: 13488121 NR Description: branched-chain amino acid aminotransferase
  misc_feature (74)..(332): Homolog of NCBI NO: 11498538 NR Description: branched-chain amino acid aminotransferase (ilvE)
  misc_feature (74)..(336): Homolog of NCBI NO: 13470635 NR Description: D-alanine aminotransferase [Mesorhizobium loti]
  misc_feature (61)..(336): Homolog of NCBI NO: 15669197 NR Description: branched-chain amino acid aminotransferase (ilvE)
  misc_feature (74)..(327): Homolog of NCBI NO: 20095063 NR Description: Branched-chain amino acid aminotransferase
  misc_feature (39)..(338): Homolog of NCBI NO: 23474241 NR Description: hypothetical protein [Desulfovibrio desulfuricans
  misc_feature (57)..(351): Homolog of NCBI NO: 9758354 NR Description: branched-chain amino acid aminotransferase-like
  misc_feature (56)..(351): Homolog of NCBI NO: 22327924 NR Description: branched-chain amino acid
  misc_feature (57)..(351): Homolog of NCBI NO: 34904468 NR Description: putative branched-chain amino acid
NYYFSLSPFNMRNPTHKSPEVENDGDFKVHLFSSSSELLEKLHEKWSSVEKPPYPAIYSSIYGGIILDPAMMVIPIDDHMVHRGHGVFDTAIVLDGYLYELDVHLDRFLSSASKAKISSPFSRSVLHSILIQLTAASKCKKGTLRYWLSAGPGDFLLSSAGCPTSAFYAVVIDQDISQCKEGVKVITSNIPMKPSLFATAKNVNYLPNVLSVMEAEEKGASSSIWVDEEGYIAEGPNVNVAFITQDKELVMPPFDNILHGCTAKRLLELAPKLVDQGLLKGVATKKLTVEEAKAAAEMMYVGSTLPLLPIIVWDDQPIGNGRVGELTMLLSDMLWDDMVAGPGTQRIPVPYVE

SEQ ID NO: 59638 - protein, 343 aa, Glycine max
  peptide (1)..(343): Ceres Seq. ID no. 14307466
  misc_feature (53)..(325): Pfam Name: Aminotransferase class IV Pfam Description: Aminotransferase class IV
  misc_feature (64)..(323): Homolog of NCBI NO: 33599322 NR Description: probable aminotransferase [Bordetella
  misc_feature (66)..(326): Homolog of NCBI NO: 13488121 NR Description: branched-chain amino acid aminotransferase
  misc_feature (64)..(322): Homolog of NCBI NO: 11498538 NR Description: branched-chain amino acid aminotransferase (ilvE)
  misc_feature (64)..(326): Homolog of NCBI NO: 13470635 NR Description: D-alanine aminotransferase [Mesorhizobium loti]
  misc_feature (51)..(326): Homolog of NCBI NO: 15669197 NR Description: branched-chain amino acid aminotransferase (ilvE)
  misc_feature (64)..(317): Homolog of NCBI NO: 20095063 NR Description: Branched-chain amino acid aminotransferase
  misc_feature (29)..(328): Homolog of NCBI NO: 23474241 NR Description: hypothetical protein [Desulfovibrio desulfuricans
  misc_feature (47)..(341): Homolog of NCBI NO: 9758354 NR Description: branched-chain amino acid aminotransferase-like
  misc_feature (46)..(341): Homolog of NCBI NO: 22327924 NR Description: branched-chain amino acid
  misc_feature (47)..(341): Homolog of NCBI NO: 34904468 NR Description: putative branched-chain amino acid
MRNPTHKSPEVENDGDFKVHLFSSSSELLEKLHEKWSSVEKPPYPAIYSSIYGGIILDPAMMVIPIDDHMVHRGHGVFDTAIVLDGYLYELDVHLDRFLSSASKAKISSPFSRSVLHSILIQLTAASKCKKGTLRYWLSAGPGDFLLSSAGCPTSAFYAVVIDQDISQCKEGVKVITSNIPMKPSLFATAKNVNYLPNVLSVMEAEEKGASSSIWVDEEGYIAEGPNVNVAFITQDKELVMPPFDNILHGCTAKRLLELAPKLVDQGLLKGVATKKLTVEEAKAAAEMMYVGSTLPLLPIIVWDDQPIGNGRVGELTMLLSDMLWDDMVAGPGTQRIPVPYVE

SEQ ID NO: 59639 - protein, 283 aa, Glycine max
  peptide (1)..(283): Ceres Seq. ID no. 14307467
  misc_feature (1)..(265): Pfam Name: Aminotransferase class IV Pfam Description: Aminotransferase class IV
  misc_feature (4)..(263): Homolog of NCBI NO: 33599322 NR Description: probable aminotransferase [Bordetella
  misc_feature (6)..(266): Homolog of NCBI NO: 13488121 NR Description: branched-chain amino acid aminotransferase
  misc_feature (4)..(262): Homolog of NCBI NO: 11498538 NR Description: branched-chain amino acid aminotransferase (ilvE)
  misc_feature (4)..(266): Homolog of NCBI NO: 13470635 NR Description: D-alanine aminotransferase [Mesorhizobium loti]
  misc_feature (1)..(266): Homolog of NCBI NO: 15669197 NR Description: branched-chain amino acid aminotransferase (ilvE)
  misc_feature (4)..(257): Homolog of NCBI NO: 20095063 NR Description: Branched-chain amino acid aminotransferase
  misc_feature (1)..(268): Homolog of NCBI NO: 23474241 NR Description: hypothetical protein [Desulfovibrio desulfuricans
  misc_feature (1)..(281): Homolog of NCBI NO: 9758354 NR Description: branched-chain amino acid aminotransferase-like
  misc_feature (1)..(281): Homolog of NCBI NO: 22327924 NR Description: branched-chain amino acid
  misc_feature (1)..(281): Homolog of NCBI NO: 34904468 NR Description: putative branched-chain amino acid
MMVIPIDDHMVHRGHGVFDTAIVLDGYLYELDVHLDRFLSSASKAKISSPFSRSVLHSILIQLTAASKCKKGTLRYWLSAGPGDFLLSSAGCPTSAFYAVVIDQDISQCKEGVKVITSNIPMKPSLFATAKNVNYLPNVLSVMEAEEKGASSSIWVDEEGYIAEGPNVNVAFITQDKELVMPPFDNILHGCTAKRLLELAPKLVDQGLLKGVATKKLTVEEAKAAAEMMYVGSTLPLLPIIVWDDQPIGNGRVGELTMLLSDMLWDDMVAGPGTQRIPVPYVE

SEQ ID NO: 59640 - DNA, 1618 bp, Glycine max
  misc_feature (1)..(1618): Ceres Seq. ID no. 15171549
gagaacaaaagcgagtgtgagtctcatgggcatgcagacgctgaccctctttcgctccccccaccctatttctcaaaacgctgtcgttccccgccacgccatgtcccgctcctccgaaacctcctttcccaccctcactactatctccatctctttctctcaactccaagtctctctctctctttcactgttctgcgttttcgttttcaatatttttagtgatcgaaaacaacgctcaagctgctttctactttaaaaaattactatcgttcgtgttacatgtgtttgttcctctgttttgtgataagaacgccgacttgtcgttcaagattgaagaaggctttggacccaatggattggggattctatccgtcactgatgtcccaggatactcttcattgcgtagaaatctattgcatcttgcaccaagattggcaaatcttcccaaagaagtgaaggaggatcttgaagatcctcatagtaggtacaattttggttggagtcatgggaaagagaaacttgaatctgggaagccagatattttaaaaggatctttctatgccaatcccatacttgatacacctacaacagaggcttctttgatacaacggtatccatcatattgcggctcaaatatatggcctagaaacgctttaccagaacttgaagtggctttcaaagcacttgggaagctgatatttgacattggattgatgttggcatatcactgcgatcaatatgtatccaaagggatgaaaattcacaaggatgaaggtctggaatcaatacttcgttgctcccgctgtcataaaggacgtttgctatattattttccttcacaacagggagtcccagatggcaactctttgtcttcttggtgtggatggcatactgaccacggttcactggcaggtctgacttgtggtatgtttacgagagatggtgtagaaattgcttgccctgatagtgctgctggcctctatattcgaacaagaaataatcaaattatcaaagttgtctatggaaaagatgatatagcataccaaattggtgaaaccactgaaatactttctggaggttatctttgtgcaacacctcattgtgttcaggctcctacgggggaggagtcctctggtattgagcgctcaacatttgcattattcatgcagcctgactgggatgaaaagctcaatttacccgagaaagttcacattcataaagagcttattccatcaaatgctgcccttacttttggagagtattcagagatgctgctcgacaaatattaccaccaaaaacagaactaacttgttacttctctgccaacaagcataactggttgaagagacttagcctgtgaattcatgagactaaaataaaattgtgtgaatgtgtagtcgctattggataatctcaaaagaaaagaataactgggtaaggttacaagggtaactggttgaagaaacttagccggttaattcacgggtaaatgtgtagtcgctattggggtaatagcaaaagaaaaagaaaattcttatagattacgtggaatagcaacatttaatttatttaacaggatattaacttatgggatggaatgaaagttactgtacaatcc

SEQ ID NO: 59641 - protein, 197 aa, Glycine max
  peptide (1)..(197): Ceres Seq. ID no. 15171550
  misc_feature (55)..(159): Homolog of NCBI NO: 40747370 NR Description: hypothetical protein AN0427.2 [Aspergillus
  misc_feature (51)..(191): Homolog of NCBI NO: 37532348 NR Description: unknown protein [Oryza sativa (japonica
  misc_feature (1)..(53): Homolog of NCBI NO: 37532348 NR Description: unknown protein [Oryza sativa (japonica
  misc_feature (1)..(86): Homolog of NCBI NO: 40747370 NR Description: hypothetical protein AN0427.2 [Aspergillus
  misc_feature (83)..(165): Homolog of NCBI NO: 32422631 NR Description: hypothetical protein [Neurospora crassa]
  misc_feature (1)..(54): Homolog of NCBI NO: 32422631 NR Description: hypothetical protein [Neurospora crassa]
  misc_feature (22)..(192): Homolog of NCBI NO: 2982272 NR Description: hypothetical protein [Picea mariana]
  misc_feature (1)..(194): Homolog of NCBI NO: 28829713 NR Description: similar to Arabidopsis thaliana (Mouse-ear
  misc_feature (1)..(195): Homolog of NCBI NO: 22531058 NR Description: putative protein [Arabidopsis thaliana]
  misc_feature (62)..(195): Homolog of NCBI NO: 15235700 NR Description: expressed protein [Arabidopsis thaliana]
MLAYHCDQYVSKGMKIHKDEGLESILRCSRCHKGRLLYYFPSQQGVPDGNSLSSWCGWHTDHGSLAGLTCGMFTRDGVEIACPDSAAGLYIRTRNNQIIKVVYGKDDIAYQIGETTEILSGGYLCATPHCVQAPTGEESSGIERSTFALFMQPDWDEKLNLPEKVHIHKELIPSNAALTFGEYSEMLLDKYYHQKQN

SEQ ID NO: 59642 - protein, 184 aa, Glycine max
  peptide (1)..(184): Ceres Seq. ID no. 15171551
  misc_feature (42)..(146): Homolog of NCBI NO: 40747370 NR Description: hypothetical protein AN0427.2 [Aspergillus
  misc_feature (38)..(178): Homolog of NCBI NO: 37532348 NR Description: unknown protein [Oryza sativa (japonica
  misc_feature (1)..(40): Homolog of NCBI NO: 37532348 NR Description: unknown protein [Oryza sativa (japonica
  misc_feature (1)..(73): Homolog of NCBI NO: 40747370 NR Description: hypothetical protein AN0427.2 [Aspergillus
  misc_feature (70)..(152): Homolog of NCBI NO: 32422631 NR Description: hypothetical protein [Neurospora crassa]
  misc_feature (1)..(41): Homolog of NCBI NO: 32422631 NR Description: hypothetical protein [Neurospora crassa]
  misc_feature (9)..(179): Homolog of NCBI NO: 2982272 NR Description: hypothetical protein [Picea mariana]
  misc_feature (1)..(181): Homolog of NCBI NO: 28829713 NR Description: similar to Arabidopsis thaliana (Mouse-ear
  misc_feature (1)..(182): Homolog of NCBI NO: 22531058 NR Description: putative protein [Arabidopsis thaliana]
  misc_feature (49)..(182): Homolog of NCBI NO: 15235700 NR Description: expressed protein [Arabidopsis thaliana]
MKIHKDEGLESILRCSRCHKGRLLYYFPSQQGVPDGNSLSSWCGWHTDHGSLAGLTCGMFTRDGVEIACPDSAAGLYIRTRNNQIIKVVYGKDDIAYQIGETTEILSGGYLCATPHCVQAPTGEESSGIERSTFALFMQPDWDEKLNLPEKVHIHKELIPSNAALTFGEYSEMLLDKYYHQKQN

SEQ ID NO: 59643 - protein, 126 aa, Glycine max
  peptide (1)..(126): Ceres Seq. ID no. 15171552
  misc_feature (1)..(88): Homolog of NCBI NO: 40747370 NR Description: hypothetical protein AN0427.2 [Aspergillus
  misc_feature (1)..(120): Homolog of NCBI NO: 37532348 NR Description: unknown protein [Oryza sativa (japonica
  misc_feature (1)..(15): Homolog of NCBI NO: 40747370 NR Description: hypothetical protein AN0427.2 [Aspergillus
  misc_feature (12)..(94): Homolog of NCBI NO: 32422631 NR Description: hypothetical protein [Neurospora crassa]
  misc_feature (1)..(121): Homolog of NCBI NO: 2982272 NR Description: hypothetical protein [Picea mariana]
  misc_feature (1)..(123): Homolog of NCBI NO: 28829713 NR Description: similar to Arabidopsis thaliana (Mouse-ear
  misc_feature (1)..(124): Homolog of NCBI NO: 22531058 NR Description: putative protein [Arabidopsis thaliana]
  misc_feature (1)..(124): Homolog of NCBI NO: 15235700 NR Description: expressed protein [Arabidopsis thaliana]
MFTRDGVEIACPDSAAGLYIRTRNNQIIKVVYGKDDIAYQIGETTEILSGGYLCATPHCVQAPTGEESSGIERSTFALFMQPDWDEKLNLPEKVHIHKELIPSNAALTFGEYSEMLLDKYYHQKQN

SEQ ID NO: 59644 - DNA, 1555 bp, Glycine max
  misc_feature (1)..(1555): Ceres Seq. ID no. 14316204
tgatcaaatggagcgtcaatttattcccacaatggttgtgatattcataaggaattcttgattggcaggtctttgatgggcataacggtatatcagctgctatttttgcgaaggaaaacttgctaagtaatgttttgagtgcaatacctcaagatattagcagggatgcttggcttcaggctcttcctcgtgctctggttgttggttttgtgaagactgacatagagtttcagcaaaagggggaaacttctggaacaacagctacatttgttttggttgatggatggactatcactgttgcatctgtgggagattcccgctgcatattagatactcagggaggtgttgtttctctcttgacagttgatcacaggctggaagagaatgcagaagagagggagcgcgttactgccagcggtggtgaagtaggaagactcaatgtatttggaggcaatgaggttgggcctcttcgctgctggccaggtggattgtgcctatctagatctataggtgacacagacgtgggagaatttattgtgccaataccacatgttaagcaagtgaagctttcaaatgctggtggaaggcttattatagcttctgatggtatttgggatgctttatcatctgatatggctgctaagtcttgtcggggtctacctgcagagcttgctgcaaaactagtggttaaggaagctctaaggtcaagaggcctcaaggatgatacaacttgccttgttgtagatattattccttcggacctccctgtattaccaccaattccaagaaagaaacataatatgctaacttcgcttctattttttggaaagaaatctgagaactctatgaacaaagctaccaataagctttctgcagttggtgttgtggaggagttatttgaagagggttctgcaatgcttacagaaaggctaggtaaggatttcccgcttaacaagaattctggtattttccgttgtgcggtttgccaaatggaccaaccccctggtgatggtttatcaatgaactctgggccttttttctctcctgcatctaatccatgggaaggcccattcctctgcacaaactgttggaagaagaaggatgccatggaaggaaaaagcctagcagacccaccgttacagcataatgattatctagtattacagtagtagcatagtaaatattagtataatttttccctggcagtgtgagcatgcttgactttacattttcggtggttattgccatagatgtgtaagaaatgaggttgagaattgagatagggctagtaggtgttttggaggttgctgcaagtttgattctggcttgtgctcagctgttggaagttggactgactgacagaacaaacaagaaagttgtgtctggtagaaaaaaattctagtgaaatctgctaacggcttgtatttgtaagtaaactgaagcttttgtggctgcctctgttttgagagtgcttcaatgctacacagcccaaatgcatctgtatcttttaaacttatgttatacaaatacaactacatgtctcgaatgtctctgt

SEQ ID NO: 59645 - protein, 178 aa, Glycine max
  peptide (1)..(178): Ceres Seq. ID no. 14316205
  misc_feature (1)..(162): Homolog of NCBI NO: 38344839 NR Description: OSJNBa0064H22.20 [Oryza sativa (japonica
  misc_feature (1)..(162): Homolog of NCBI NO: 14029015 NR Description: Unknown protein [Oryza sativa]
  misc_feature (1)..(162): Homolog of NCBI NO: 15292869 NR Description: unknown protein [Arabidopsis thaliana]
  misc_feature (1)..(162): Homolog of NCBI NO: 18401703 NR Description: protein phosphatase 2C (PP2C) -related
  misc_feature (1)..(99): Homolog of NCBI NO: 34898168 NR Description: protein phosphatase 2C-like
  misc_feature (1)..(96): Homolog of NCBI NO: 16930415 NR Description: At1g09160/T12M4_13 [Arabidopsis thaliana]
  misc_feature (1)..(162): Homolog of NCBI NO: 34914644 NR Description: OSJNBa0054L14.21 [Oryza sativa (japonica
  misc_feature (1)..(162): Homolog of NCBI NO: 34394411 NR Description: protein phosphatase 2C-like
  misc_feature (1)..(162): Homolog of NCBI NO: 15221404 NR Description: protein phosphatase 2C (PP2C) -related
  misc_feature (1)..(162): Homolog of NCBI NO: 15217454 NR Description: protein phosphatase 2C (PP2C) -related
MAAKSCRGLPAELAAKLVVKEALRSRGLKDDTTCLVVDIIPSDLPVLPPIPRKKHNMLTSLLFFGKKSENSMNKATNKLSAVGVVEELFEEGSAMLTERLGKDFPLNKNSGIFRCAVCQMDQPPGDGLSMNSGPFFSPASNPWEGPFLCTNCWKKKDAMEGKSLADPPLQHNDYLVLQ

SEQ ID NO: 59646 - protein, 122 aa, Glycine max
  peptide (1)..(122): Ceres Seq. ID no. 14316206
  misc_feature (1)..(106): Homolog of NCBI NO: 38344839 NR Description: OSJNBa0064H22.20 [Oryza sativa (japonica
  misc_feature (1)..(106): Homolog of NCBI NO: 14029015 NR Description: Unknown protein [Oryza sativa]
  misc_feature (1)..(106): Homolog of NCBI NO: 15292869 NR Description: unknown protein [Arabidopsis thaliana]
  misc_feature (1)..(106): Homolog of NCBI NO: 18401703 NR Description: protein phosphatase 2C (PP2C) -related
  misc_feature (1)..(43): Homolog of NCBI NO: 34898168 NR Description: protein phosphatase 2C-like
  misc_feature (1)..(40): Homolog of NCBI NO: 16930415 NR Description: At1g09160/T12M4_13 [Arabidopsis thaliana]
  misc_feature (1)..(106): Homolog of NCBI NO: 34914644 NR Description: OSJNBa0054L14.21 [Oryza sativa (japonica
  misc_feature (1)..(106): Homolog of NCBI NO: 34394411 NR Description: protein phosphatase 2C-like
  misc_feature (1)..(106): Homolog of NCBI NO: 15221404 NR Description: protein phosphatase 2C (PP2C) -related
  misc_feature (1)..(106): Homolog of NCBI NO: 15217454 NR Description: protein phosphatase 2C (PP2C) -related
MLTSLLFFGKKSENSMNKATNKLSAVGVVEELFEEGSAMLTERLGKDFPLNKNSGIFRCAVCQMDQPPGDGLSMNSGPFFSPASNPWEGPFLCTNCWKKKDAMEGKSLADPPLQHNDYLVLQ

SEQ ID NO: 59647 - protein, 107 aa, Glycine max
  peptide (1)..(107): Ceres Seq. ID no. 14316207
  misc_feature (1)..(91): Homolog of NCBI NO: 38344839 NR Description: OSJNBa0064H22.20 [Oryza sativa (japonica
  misc_feature (1)..(91): Homolog of NCBI NO: 14029015 NR Description: Unknown protein [Oryza sativa]
  misc_feature (1)..(91): Homolog of NCBI NO: 15292869 NR Description: unknown protein [Arabidopsis thaliana]
  misc_feature (1)..(91): Homolog of NCBI NO: 18401703 NR Description: protein phosphatase 2C (PP2C) -related
  misc_feature (1)..(28): Homolog of NCBI NO: 34898168 NR Description: protein phosphatase 2C-like
  misc_feature (1)..(25): Homolog of NCBI NO: 16930415 NR Description: At1g09160/T12M4_13 [Arabidopsis thaliana]
  misc_feature (1)..(91): Homolog of NCBI NO: 34914644 NR Description: OSJNBa0054L14.21 [Oryza sativa (japonica
  misc_feature (1)..(91): Homolog of NCBI NO: 34394411 NR Description: protein phosphatase 2C-like
  misc_feature (1)..(91): Homolog of NCBI NO: 15221404 NR Description: protein phosphatase 2C (PP2C) -related
  misc_feature (1)..(91): Homolog of NCBI NO: 15217454 NR Description: protein phosphatase 2C (PP2C) -related
MNKATNKLSAVGVVEELFEEGSAMLTERLGKDFPLNKNSGIFRCAVCQMDQPPGDGLSMNSGPFFSPASNPWEGPFLCTNCWKKKDAMEGKSLADPPLQHNDYLVLQ

SEQ ID NO: 59648 - DNA, 1505 bp, Glycine max
  misc_feature (1)..(1505): Ceres Seq. ID no. 14307694
ttgcttgaacacagtgccgaggttgaaaccgttgatgatgctggctacactctgttgcattgtgatgctgaggtagaccatttgcaagttgccctctacttgatcgctcatgattcctagaaagattggagtttccattccaatgaaggctaccttatttatgacatacataatggttgatggatgggctggaattgctggtgagattctcagattaaagccattggttatataccatctcagaaacatgttcttatcaaatggttacctggatgaaggggttaaagaaattggtgcatttgtggcttcaagggggtcgctttagcttctgggatcttttggatttggacaaaattccagggaaaggatgggattgtggcaaatttctatagcctacattcatggatgagtttggcttttgtatccctcttcggatcccagaaactaaagcatacaattcacaccaccaaagctggtatgaagttcctgcaaatgaaatttcatgaggagttctccaatctagagtagttagtagtgagtagtaagagggaggaagcagaagtgaagcgatgaatgccctagatcgttacgagcgtttcgtcgtccctgaagggtttcttatgagagggacacgaagatcatcaatgcggcgtccttcaccattgagagagaggagcacaccatcgacaacatcctacgcatgcagcttcacagagaccccaatgtcttgtttgtcggatacaagcttcctcatcctcttcaatacaaaattattgtcaggtgatattcttggtcgcacagttcataaatttcaccaatatggaacatagaaaatagccaagggccatagagcaccaaaggaagcatgttgatgttgatggtttcttggtaagagtgataacttgcaaccatacgggcaagacaggttccatgataagatctttgactgcacatggttctagaattgttgttttatgttcagatcatttaggagacaatgcgagtccaaatttcaacttgagaccaacatgtgcttatttcatcactgaggtagcaaaatgagcatccggaagggctcacatagtacaggcttccatagctgatggtgttttgtcaggtaatactgaccccaagaaaaatattgagttgctacaagatgctattgcttctattactctcttaggaagcataatcacgtccatccctttatcgaggcaagcatgttcatagcttagctcatgcaacttctggatatcacaaagttcttgaagaaaatagcaaactatacaatcaagttcatgatcttaagggtaaatttctgattggttggttgctataagcttagtatgagttatatctttcacacctttctaaagattttgttccttttattgtgcctccctgaaatggttaggcctcgtggagatatgatataggtataggttggataaaatttaattcgactcgacacatttttatacttaataaaaaaattcatttacttt

SEQ ID NO: 59649 - protein, 86 aa, Glycine max
  peptide (1)..(86): Ceres Seq. ID no. 14307695
MNALDRYERFVVPEGFLMRGTRRSSMRRPSPLRERSTPSTTSYACSFTETPMSCLSDTSFLILFNTKLLSGDILGRTVHKFHQYGT

SEQ ID NO: 59650 - protein, 71 aa, Glycine max
  peptide (1)..(71): Ceres Seq. ID no. 14307696
  misc_feature (2)..(48): Homolog of NCBI NO: 7486105 NR Description: hypothetical protein F24O1.3 - Arabidopsis
  misc_feature (2)..(49): Homolog of NCBI NO: 15810533 NR Description: unknown protein [Arabidopsis thaliana]
  misc_feature (2)..(49): Homolog of NCBI NO: 15233476 NR Description: ERD4 protein-related [Arabidopsis thaliana]
  misc_feature (1)..(49): Homolog of NCBI NO: 34913548 NR Description: OJ1029_F04.25 [Oryza sativa (japonica
  misc_feature (2)..(49): Homolog of NCBI NO: 17381104 NR Description: unknown protein [Arabidopsis thaliana]
  misc_feature (2)..(49): Homolog of NCBI NO: 37537172 NR Description: unknown protein [Oryza sativa (japonica
  misc_feature (2)..(49): Homolog of NCBI NO: 7485199 NR Description: hypothetical protein - Arabidopsis thaliana
  misc_feature (2)..(49): Homolog of NCBI NO: 15233100 NR Description: ERD4 protein-related [Arabidopsis thaliana]
  misc_feature (2)..(49): Homolog of NCBI NO: 15222569 NR Description: ERD4 protein-related [Arabidopsis thaliana]
  misc_feature (2)..(49): Homolog of NCBI NO: 22328665 NR Description: ERD4 protein-related [Arabidopsis thaliana]
MIPRKIGVSIPMKATLFMTYIMVDGWAGIAGEILRLKPLVIYHLRNMFLSNGYLDEGVKEIGAFVASRGSL

SEQ ID NO: 59651 - protein, 69 aa, Glycine max
  peptide (1)..(69): Ceres Seq. ID no. 14307697
MRGTRRSSMRRPSPLRERSTPSTTSYACSFTETPMSCLSDTSFLILFNTKLLSGDILGRTVHKFHQYGT

SEQ ID NO: 59652 - DNA, 1409 bp, Glycine max
  misc_feature (1)..(1409): Ceres Seq. ID no. 14307716
tgctcttgatgaaaaaatcaggtctcaaatggatgttattgacaatggtgtccctgctccattatcaatgttcagtgagagtgattcagacatgaaatctgttaatatagatgacttgctgcccaaagaaaagctgcagaggaagttgccaaagccatcagcgggaaggcgaaaaaatggttacctacaaaatggtggttctgtgcatccttatgctgatccagagcaatgtgcagatacaaagcaatcctttggagcctcttccagtggggttacttctcttgatagcatccagaaacataagttgaacatagattctgattctttaggctgtatacagacacaaattcctatgacacgccctgactatagtcatgctccaaatcacacttccctctttccgactttgtctggatcaagatctgagcatgatggacatctgtctccttctcttaaagaatcatcttatgcatcaaacatggagagttcccatggtcattctttggaggctgcggccttgaaaacaaaagagaatagagaaaagttgtataattgctgtgatggacccctaaatagtagtttcaaaaatgaaaatacaccaaatcaaatgccattttgcagtccgggttcagctcagcaagtaggtcatcattttgaaaatgaaaatgaaggtcatagtgaattccgaggagttggcctaggcttttcaccagaaatagattcatcaacagtgcaggaaagctcatccatgggctctgctctggaccaagcttcacttgaagcaactagcttttgccacctgcaacagatcatggatcagttggatattaaaaccaaaatgtgcataagggacagtctataccgcttggctaagagtgctgagcatagacacaataattcaaatgcaaatggttgcattggagacgatgaaacatgcaaagcaatgatggcgcaggatgcaaacaggtgtgccggattaatggatatggaaactgacacaaaccccattgatcggtctgtagcacacttactgtttcacaggccctcagatccatcagtgttgcttcctaacgaaactttacctttcaaatccagtgccacgatgcatcatggatcagtgatcaatccaccagtgaagactgagaaacaggtctgtcaggaagattctactggagtggaaaaaaaggttttacggggtaacacctaatgaaagtgaaaccagcgttggcgcatttcgttgtacaatttatacttttccggtcattgtcgtatatgatgatgtataattatttcgggctaactcggatccctttgttaatttctgaagcatttttgcataggatgccataatactaatgtaactttgtgctaatcaaatcatcaaaaggtagcatacgatgatttagtgt

SEQ ID NO: 59653 - protein, 401 aa, Glycine max
  peptide (1)..(401): Ceres Seq. ID no. 14307717
  misc_feature (232)..(350): Homolog of NCBI NO: 15232525 NR Description: expressed protein [Arabidopsis thaliana]
  misc_feature (113)..(383): Homolog of NCBI NO: 15237638 NR Description: expressed protein [Arabidopsis thaliana]
ALDEKIRSQMDVIDNGVPAPLSMFSESDSDMKSVNIDDLLPKEKLQRKLPKPSAGRRKNGYLQNGGSVHPYADPEQCADTKQSFGASSSGVTSLDSIQKHKLNIDSDSLGCIQTQIPMTRPDYSHAPNHTSLFPTLSGSRSEHDGHLSPSLKESSYASNMESSHGHSLEAAALKTKENREKLYNCCDGPLNSSFKNENTPNQMPFCSPGSAQQVGHHFENENEGHSEFRGVGLGFSPEIDSSTVQESSSMGSALDQASLEATSFCHLQQIMDQLDIKTKMCIRDSLYRLAKSAEHRHNNSNANGCIGDDETCKAMMAQDANRCAGLMDMETDTNPIDRSVAHLLFHRPSDPSVLLPNETLPFKSSATMHHGSVINPPVKTEKQVCQEDSTGVEKKVLRGNT

SEQ ID NO: 59654 - protein, 392 aa, Glycine max
  peptide (1)..(392): Ceres Seq. ID no. 14307718
  misc_feature (223)..(341): Homolog of NCBI NO: 15232525 NR Description: expressed protein [Arabidopsis thaliana]
  misc_feature (104)..(374): Homolog of NCBI NO: 15237638 NR Description: expressed protein [Arabidopsis thaliana]
MDVIDNGVPAPLSMFSESDSDMKSVNIDDLLPKEKLQRKLPKPSAGRRKNGYLQNGGSVHPYADPEQCADTKQSFGASSSGVTSLDSIQKHKLNIDSDSLGCIQTQIPMTRPDYSHAPNHTSLFPTLSGSRSEHDGHLSPSLKESSYASNMESSHGHSLEAAALKTKENREKLYNCCDGPLNSSFKNENTPNQMPFCSPGSAQQVGHHFENENEGHSEFRGVGLGFSPEIDSSTVQESSSMGSALDQASLEATSFCHLQQIMDQLDIKTKMCIRDSLYRLAKSAEHRHNNSNANGCIGDDETCKAMMAQDANRCAGLMDMETDTNPIDRSVAHLLFHRPSDPSVLLPNETLPFKSSATMHHGSVINPPVKTEKQVCQEDSTGVEKKVLRGNT

SEQ ID NO: 59655 - protein, 379 aa, Glycine max
  peptide (1)..(379): Ceres Seq. ID no. 14307719
  misc_feature (210)..(328): Homolog of NCBI NO: 15232525 NR Description: expressed protein [Arabidopsis thaliana]
  misc_feature (91)..(361): Homolog of NCBI NO: 15237638 NR Description: expressed protein [Arabidopsis thaliana]
MFSESDSDMKSVNIDDLLPKEKLQRKLPKPSAGRRKNGYLQNGGSVHPYADPEQCADTKQSFGASSSGVTSLDSIQKHKLNIDSDSLGCIQTQIPMTRPDYSHAPNHTSLFPTLSGSRSEHDGHLSPSLKESSYASNMESSHGHSLEAAALKTKENREKLYNCCDGPLNSSFKNENTPNQMPFCSPGSAQQVGHHFENENEGHSEFRGVGLGFSPEIDSSTVQESSSMGSALDQASLEATSFCHLQQIMDQLDIKTKMCIRDSLYRLAKSAEHRHNNSNANGCIGDDETCKAMMAQDANRCAGLMDMETDTNPIDRSVAHLLFHRPSDPSVLLPNETLPFKSSATMHHGSVINPPVKTEKQVCQEDSTGVEKKVLRGNT

SEQ ID NO: 59656 - DNA, 1541 bp, Glycine max
  misc_feature (1)..(1541): Ceres Seq. ID no. 15174669
gaaaaatgggtaaaagcaaccccaaaattcttgcgtgtccgaaacctctgaaagaaattgcaatctaatcaaagccagagtgaatgctgttgaacgctgtctgaattttttgagctaaataaaagaagaaaaacagggtgagagagaaacagagtgagagagaaacagaggatcttcatatgaagagtgaagtgagttggagaataaagattcaacaacctgggaaagccgggagagtttttcttggagggaattttggactgcatccatgaaatcacaacagctcttgcttttgctgataggatgagcgattctgcatacagagtccaaaccacaccgcgccttgctcaatggagaatcgaaaacttggcttcttgcacttaccgcaaatcagatcctttcaagatcggaaactggaattgggttttgtttgttaaattgttcccagaaatatccaatcttacgagagacaaccccccaattgcatctttcatcgttcgggtcgttagttctgttggaggtcgccaggccatcacacatccagaaataaaggacaaagtgttaaagaacaacgaggattttgtttgggcaattgaggttccactaactgggaaattcattattgacgtagagtttcttgatttgaagactgcatccccaaacggtggagaaccttgttccatttgggcagaaggatttactcagcaaagatcaaatgcaaaagccatagagtctcttggtagaatgctaacagaaggcattcacacagacatcaccatcaatgcttctgatggaagtataggagctcatagagctgttcttgctgccagatcacctgtcttccgcagcatgttctcacataatcttcaggagaaagagttatcaaccataaacatctcagacatgtcacttgaatcatgccaggcttttctctattatctttatgggataatcaaacatgaagagtttctgactcataggctggcccttctgcaggcggctgacaagtatgacatatctgacttgagagatgtatgccacgaaagtcttctagaagatattgacacaaagaatgtacttgagaggctccaaaatgcatctctatatcagttgatgaaactgaagatgagttgcatccgatatcttgtgaagtttggtaaaatatatgaaattcgcgatgatttcaataccttcctgcgaaatgcagatagggatctgatttctgaagtcttccatgaagttcttgatgcttggaaaggattctgaagattttgcagcttcaatgaaagataggaaagcttgttgttattcaacatacccaagaaataggttgtttcaatttgttgtgcaggatttgttttgatgaacctaattctttctctcagatgattttttattattattatgattttatgtacatacttatgttgtgctcttcaaatgtaaaccataaggtattattgtttacaaaaaatgtatatcatatgaaaagaaaagtaacatattcatgaatgcaaaaggtcctcctgaattctgatgat

SEQ ID NO: 59657 - protein, 320 aa, Glycine max
  peptide (1)..(320): Ceres Seq. ID no. 15174670
  misc_feature (145)..(253): Pfam Name: BTB/POZ domain Pfam Description: BTB/POZ domain
  misc_feature (143)..(320): Homolog of NCBI NO: 34766460 NR Description: TDPOZ4 [Mus musculus]
  misc_feature (133)..(302): Homolog of NCBI NO: 15223447 NR Description: expressed protein [Arabidopsis thaliana]
  misc_feature (132)..(313): Homolog of NCBI NO: 25150010 NR Description: speckle-type POZ protein Spop, postmeiotic regulator of meiotic-specific spindle component MEI-1., Maternal
  misc_feature (57)..(282): Homolog of NCBI NO: 34858205 NR Description: similar to speckle-type POZ protein-like 1; POZ
  misc_feature (143)..(282): Homolog of NCBI NO: 34858214 NR Description: similar to speckle-type POZ protein-like 1; POZ
  misc_feature (143)..(282): Homolog of NCBI NO: 27661061 NR Description: similar to speckle-type POZ protein
  misc_feature (42)..(318): Homolog of NCBI NO: 38637050 NR Description: POZ domain protein family-like
  misc_feature (1)..(318): Homolog of NCBI NO: 15219092 NR Description: POZ domain protein family [Arabidopsis thaliana]
  misc_feature (1)..(283): Homolog of NCBI NO: 8778495 NR Description: F20N2.15 [Arabidopsis thaliana]
  misc_feature (1)..(320): Homolog of NCBI NO: 15222771 NR Description: POZ domain protein family [Arabidopsis thaliana]
MSDSAYRVQTTPRLAQWRIENLASCTYRKSDPFKIGNWNWVLFVKLFPEISNLTRDNPPIASFIVRVVSSVGGRQAITHPEIKDKVLKNNEDFVWAIEVPLTGKFIIDVEFLDLKTASPNGGEPCSIWAEGFTQQRSNAKAIESLGRMLTEGIHTDITINASDGSIGAHRAVLAARSPVFRSMFSHNLQEKELSTINISDMSLESCQAFLYYLYGIIKHEEFLTHRLALLQAADKYDISDLRDVCHESLLEDIDTKNVLERLQNASLYQLMKLKMSCIRYLVKFGKIYEIRDDFNTFLRNADRDLISEVFHEVLDAWKGF

SEQ ID NO: 59658 - protein, 173 aa, Glycine max
  peptide (1)..(173): Ceres Seq. ID no. 15174671
  misc_feature (1)..(106): Pfam Name: BTB/POZ domain Pfam Description: BTB/POZ domain
  misc_feature (1)..(173): Homolog of NCBI NO: 34766460 NR Description: TDPOZ4 [Mus musculus]
  misc_feature (1)..(155): Homolog of NCBI NO: 15223447 NR Description: expressed protein [Arabidopsis thaliana]
  misc_feature (1)..(166): Homolog of NCBI NO: 25150010 NR Description: speckle-type POZ protein Spop, postmeiotic regulator of meiotic-specific spindle component MEI-1., Maternal
  misc_feature (1)..(135): Homolog of NCBI NO: 34858205 NR Description: similar to speckle-type POZ protein-like 1; POZ
  misc_feature (1)..(135): Homolog of NCBI NO: 34858214 NR Description: similar to speckle-type POZ protein-like 1; POZ
  misc_feature (1)..(135): Homolog of NCBI NO: 27661061 NR Description: similar to speckle-type POZ protein
  misc_feature (1)..(171): Homolog of NCBI NO: 38637050 NR Description: POZ domain protein family-like
  misc_feature (1)..(171): Homolog of NCBI NO: 15219092 NR Description: POZ domain protein family [Arabidopsis thaliana]
  misc_feature (1)..(136): Homolog of NCBI NO: 8778495 NR Description: F20N2.15 [Arabidopsis thaliana]
  misc_feature (1)..(173): Homolog of NCBI NO: 15222771 NR Description: POZ domain protein family [Arabidopsis thaliana]
MLTEGIHTDITINASDGSIGAHRAVLAARSPVFRSMFSHNLQEKELSTINISDMSLESCQAFLYYLYGIIKHEEFLTHRLALLQAADKYDISDLRDVCHESLLEDIDTKNVLERLQNASLYQLMKLKMSCIRYLVKFGKIYEIRDDFNTFLRNADRDLISEVFHEVLDAWKGF

SEQ ID NO: 59659 - DNA, 1569 bp, Glycine max
  misc_feature (1)..(1569): Ceres Seq. ID no. 15227110
acatttttgaatttgacagttagttttacagaacctaacaaattgctgtatcgtatatatgctatgcacacaggttctattttctcctttatttattttctaaatccttctcttattttcttatttaattattgaatttattagaatttagactctttcagttcaataaactttaaaactcttgagcctagggatacaaatatattgtatgcttccatgtgaattttcttctcttaatgcttatgagttatgactaatcttgctctcttaagggattattatattgttcccagtaggggaaaaaggatttatcatctaaggaattagggttaaattaattaaattaaagaaattggttaggaattgcataaaacatggatttaatgttacttataattagttcctttccattgctggtttaatataatatgacgtgctggaaatgatcataaatcaagtaaaacctctgcagataacatgctgtatgataatcggtaaaattaaatatacattatcaaacatacaaaggagaaaacaaaacaaatgtattccagtcttctattgaaactgggaaaattcttcgttgacaacttacaagattacacaaaattctcaatacaacataagatacgaacgagtaaagaaaaagaaattccttcaaaattgcatacatatttcaccacagactgacttaatcaatacaaaaagatgcgagacacaaaacgaaaagaagaaaataattgaaagtgctacaagaagttcatgatttactctttaacccaaccaatccagaagctagtaggaatttcagcaaagcacaacaacatcaggaccctactggtcttgcatgcagccaagaaaggtacttacaggtgatcattattgtgccacatgaaccaaacagatctcgtagttatttatcagtaacatcatcatcaatgttctttacataaaagtttgatgatgatgttacatgaaacttgattgggtgagtttttggatgcactagacatcaattatgcagtaagtagttagctgcagagatctttatttatttccaattttgaatatctaaagacaacatttctcttggggaaaatttttaagccaaacttctattttctgtgtagcatgcattttaatatttaattcgtagtttttctgtctctattgattactgcagattgaatttgagccagaatatttggtggagtttgataatccagatattgatgagaaggaacaaattccactacgggatgcacttgagaaggcgaaaccattcttgatgtcatatgaggggattcaaagtcaggaagagtgggagaaaataatggaagagacaatggcgcgagttccattgttgaaaaagattgttgatcactacagtggacctgatagggtaactaccaagaagcaacaagaagaattagacagagttgctaaaactcttcctgaaagtgcaccatcttcagtagaacaatttactaatcgttctgttatttctcttcaggtttggaactgtaaatattgatattgtgttgggcataaaatgtcttttacttgggc

SEQ ID NO: 59660 - protein, 81 aa, Glycine max
  peptide (1)..(81): Ceres Seq. ID no. 15227111
  misc_feature (1)..(75): Homolog of NCBI NO: 8671859 NR Description: Contains similarity to RNA-binding protein from thaliana gi|2129727 and contains RNA recognition PF|00076 domain.
  misc_feature (1)..(75): Homolog of NCBI NO: 21593693 NR Description: Contains similarity to RNA-binding protein from
  misc_feature (1)..(75): Homolog of NCBI NO: 18404554 NR Description: expressed protein [Arabidopsis thaliana]
MSYEGIQSQEEWEKIMEETMARVPLLKKIVDHYSGPDRVTTKKQQEELDRVAKTLPESAPSSVEQFTNRSVISLQVWNCKY

SEQ ID NO: 59661 - protein, 66 aa, Glycine max
  peptide (1)..(66): Ceres Seq. ID no. 15227112
  misc_feature (1)..(60): Homolog of NCBI NO: 8671859 NR Description: Contains similarity to RNA-binding protein from thaliana gi|2129727 and contains RNA recognition PF|00076 domain.
  misc_feature (1)..(60): Homolog of NCBI NO: 21593693 NR Description: Contains similarity to RNA-binding protein from
  misc_feature (1)..(60): Homolog of NCBI NO: 18404554 NR Description: expressed protein [Arabidopsis thaliana]
MEETMARVPLLKKIVDHYSGPDRVTTKKQQEELDRVAKTLPESAPSSVEQFTNRSVISLQVWNCKY

SEQ ID NO: 59662 - protein, 62 aa, Glycine max
  peptide (1)..(62): Ceres Seq. ID no. 15227113
  misc_feature (1)..(56): Homolog of NCBI NO: 8671859 NR Description: Contains similarity to RNA-binding protein from thaliana gi|2129727 and contains RNA recognition PF|00076 domain.
  misc_feature (1)..(56): Homolog of NCBI NO: 21593693 NR Description: Contains similarity to RNA-binding protein from
  misc_feature (1)..(56): Homolog of NCBI NO: 18404554 NR Description: expressed protein [Arabidopsis thaliana]
MARVPLLKKIVDHYSGPDRVTTKKQQEELDRVAKTLPESAPSSVEQFTNRSVISLQVWNCKY

SEQ ID NO: 59663 - DNA, 1344 bp, Glycine max
  misc_feature (1)..(1344): Ceres Seq. ID no. 15172070
acgctcaacctccgtcaaagcaaagaaacagtgtttcatcatttgggtttcgcagaagagagagaaacccatttctagagagagaaactcgcagtcgcagacatgtcttccttcgatgccttcgccgacgacttgaacgtcaactcttcttccactcgccagcacgacgatgacgaggacaacttctctggctacggcggctactcctccttcaccggaggattctccgccgacggagatgtcgccgtcgatcactccgccgccgcgtcgccggagatctacggcttcactgattcgaatcccgcttactctcagtctcccttcgaatcggccaccgtagagaacgaaaacggaaacggatacggcgacggcgacggtgtttttgtctccgacggtccggtgcttcctccgccgacggagatggagccggaggaaggttacgctcttcgcgagtggcgccgtcaaaatgccattcagctagaggagaaggagaaaagggaaaaagaaatgagattgaagattattgaagaagctgaggagtataaggtggctttctatgagaagaggaagcttaatgttgagactaacaaggttcagaatagagaaagggagaagttattcgtggccaatcaagagaagtttcacaaagaggcagacaaagcttattggaaaaccattgcagagctcattcctcgtgaggttcccaacattgaaaagaaaagaggcaaaaaggatcaggacaagaagccatcaattacggtcatccaaggcccaaagcctggcaaacccacggatctgtctaggttgcggcaaatactgttaaagctgaagcatacaccaccacctcacatgattcctccaccaccggctcctgctaaagacgccaaagataataaggatggaaaagagaaagcagcatcaaaagcaactggatctgcagcagaaggtgcacctgattcacagccaaaggatgccacctctaatggcctcacagaagaaccccagaaagaagctcctgccactgaggagcagcctgctgcatgattttgtctatgatactttggttccccctcaatctttcttctgccacccctttctccaccctgcagtctttaatgaatctttttgccctgctattagtttctaatgcttatcggttgcattttattattattaactttaaggttttgtatgaattaaatccattattaacaattatgacgtggagattcaatgatcatgggtttaaatagtacatccttttagacagagtatatgttggaataattgctgtctggtggtgtcaaatagacaaatacaatgtttaatatttttcagttgttc

SEQ ID NO: 59664 - protein, 313 aa, Glycine max
  peptide (1)..(313): Ceres Seq. ID no. 15172071
  misc_feature (61)..(246): Pfam Name: Clathrin light chain Pfam Description: Clathrin light chain
  misc_feature (100)..(258): Homolog of NCBI NO: 11291712 NR Description: hypothetical protein [imported] - Arabidopsis
  misc_feature (100)..(258): Homolog of NCBI NO: 18409442 NR Description: expressed protein [Arabidopsis thaliana]
  misc_feature (43)..(279): Homolog of NCBI NO: 21593842 NR Description: unknown [Arabidopsis thaliana]
  misc_feature (41)..(279): Homolog of NCBI NO: 18405251 NR Description: expressed protein [Arabidopsis thaliana]
  misc_feature (4)..(309): Homolog of NCBI NO: 34394059 NR Description: hypothetical protein [Oryza sativa (japonica
  misc_feature (1)..(309): Homolog of NCBI NO: 32487391 NR Description: OSJNBb0017I01.5 [Oryza sativa (japonica
  misc_feature (1)..(313): Homolog of NCBI NO: 18399468 NR Description: expressed protein [Arabidopsis thaliana]
  misc_feature (1)..(313): Homolog of NCBI NO: 21536711 NR Description: unknown [Arabidopsis thaliana]
MSSFDAFADDLNVNSSSTRQHDDDEDNFSGYGGYSSFTGGFSADGDVAVDHSAAASPEIYGFTDSNPAYSQSPFESATVENENGNGYGDGDGVFVSDGPVLPPPTEMEPEEGYALREWRRQNAIQLEEKEKREKEMRLKIIEEAEEYKVAFYEKRKLNVETNKVQNREREKLFVANQEKFHKEADKAYWKTIAELIPREVPNIEKKRGKKDQDKKPSITVIQGPKPGKPTDLSRLRQILLKLKHTPPPHMIPPPPAPAKDAKDNKDGKEKAASKATGSAAEGAPDSQPKDATSNGLTEEPQKEAPATEEQPAA

SEQ ID NO: 59665 - protein, 207 aa, Glycine max
  peptide (1)..(207): Ceres Seq. ID no. 15172072
  misc_feature (1)..(140): Pfam Name: Clathrin light chain Pfam Description: Clathrin light chain
  misc_feature (1)..(152): Homolog of NCBI NO: 11291712 NR Description: hypothetical protein [imported] - Arabidopsis
  misc_feature (1)..(152): Homolog of NCBI NO: 18409442 NR Description: expressed protein [Arabidopsis thaliana]
  misc_feature (1)..(173): Homolog of NCBI NO: 21593842 NR Description: unknown [Arabidopsis thaliana]
  misc_feature (1)..(173): Homolog of NCBI NO: 18405251 NR Description: expressed protein [Arabidopsis thaliana]
  misc_feature (1)..(203): Homolog of NCBI NO: 34394059 NR Description: hypothetical protein [Oryza sativa (japonica
  misc_feature (1)..(203): Homolog of NCBI NO: 32487391 NR Description: OSJNBb0017I01.5 [Oryza sativa (japonica
  misc_feature (1)..(207): Homolog of NCBI NO: 18399468 NR Description: expressed protein [Arabidopsis thaliana]
  misc_feature (1)..(207): Homolog of NCBI NO: 21536711 NR Description: unknown [Arabidopsis thaliana]
MEPEEGYALREWRRQNAIQLEEKEKREKEMRLKIIEEAEEYKVAFYEKRKLNVETNKVQNREREKLFVANQEKFHKEADKAYWKTIAELIPREVPNIEKKRGKKDQDKKPSITVIQGPKPGKPTDLSRLRQILLKLKHTPPPHMIPPPPAPAKDAKDNKDGKEKAASKATGSAAEGAPDSQPKDATSNGLTEEPQKEAPATEEQPAA

SEQ ID NO: 59666 - protein, 178 aa, Glycine max
  peptide (1)..(178): Ceres Seq. ID no. 15172073
  misc_feature (1)..(111): Pfam Name: Clathrin light chain Pfam Description: Clathrin light chain
  misc_feature (1)..(123): Homolog of NCBI NO: 11291712 NR Description: hypothetical protein [imported] - Arabidopsis
  misc_feature (1)..(123): Homolog of NCBI NO: 18409442 NR Description: expressed protein [Arabidopsis thaliana]
  misc_feature (1)..(144): Homolog of NCBI NO: 21593842 NR Description: unknown [Arabidopsis thaliana]
  misc_feature (1)..(144): Homolog of NCBI NO: 18405251 NR Description: expressed protein [Arabidopsis thaliana]
  misc_feature (1)..(174): Homolog of NCBI NO: 34394059 NR Description: hypothetical protein [Oryza sativa (japonica
  misc_feature (1)..(174): Homolog of NCBI NO: 32487391 NR Description: OSJNBb0017I01.5 [Oryza sativa (japonica
  misc_feature (1)..(178): Homolog of NCBI NO: 18399468 NR Description: expressed protein [Arabidopsis thaliana]
  misc_feature (1)..(178): Homolog of NCBI NO: 21536711 NR Description: unknown [Arabidopsis thaliana]
MRLKIIEEAEEYKVAFYEKRKLNVETNKVQNREREKLFVANQEKFHKEADKAYWKTIAELIPREVPNIEKKRGKKDQDKKPSITVIQGPKPGKPTDLSRLRQILLKLKHTPPPHMIPPPPAPAKDAKDNKDGKEKAASKATGSAAEGAPDSQPKDATSNGLTEEPQKEAPATEEQPAA

SEQ ID NO: 59667 - DNA, 1238 bp, Glycine max
  misc_feature (1)..(1238): Ceres Seq. ID no. 15177807
aggaatttgctttgaacggaacaagaatccaatagaagaaagaagaagatgtggctttcggatcatcgattgtttcttctctgcattgtttgtggcctttacttttctctgcagttcacaacgggtcatgcagattcaaatgctggaagaactttgaatcaggagggtggtgatcatcaaatacattgctctagagaaagaagtagaacagcttggaaaatcattcaagagtatttgatgccctttgtggagaaagaaaaataccacatctcaaaaaggtgtaggcttcaccctgacaatgacatatacagagatcaggagcaacataagtttcatacagatataaacgaatggcagtgtgggttctgtaagaaaagtttctatgaagagaaacatcttgaccagcattttgacaacagacactccaatttgcttaatttgagtgaaagccagtgcatagcagatgtttgtggtgcactgcactgtgaccatgaaatgaattctggatcaaaaaaatcaaagtgcaatcctgctgctgctgcaaaaaataaacatctatgtgagagcttagccgatagttgttttcctgtcactgagggccctgcggcaagccgacttcatgaattcttcttgcaccaattctgtgatgcacacagctgcactggaaataggaaacctttctccagagggcgcaggaagaagacaaatgtgttctacatctttgtgtctattttgcttgtgatactgctgctactatactacctctacatttacttatatcagagaggaatgaaaagggaaactcaagtgctgaagcgcgtctcacaagccagcagaaagaaaaagccatcttaattgattgttctttccacaaaaagaagttctcaacctacattttcagaaagtaaaggtgtcactaatggatagagtgtgaactgcacgtaaatctacctacattacattttcagaaagttaaggtgtaactaatggatacagtcagaactgcacttggaatccagtttacgctattctgctatttgcaagagtacgtttgaaggcagaaagagattgtcagcttcaaaaatgacttctatgtgatttgctagtttgtaaaccaaattcttgtaaactttttgaacaaaaagggggctgcatgactgaatccaccttagttggccatttgcatttgattgtgcatgacagcactaacaagaaaaaataacatgaacatttgcaac

SEQ ID NO: 59668 - protein, 268 aa, Glycine max
  peptide (1)..(268): Ceres Seq. ID no. 15177808
  misc_feature (102)..(125): Pfam Name: Zinc finger, C2H2 type Pfam Description: Zinc finger, C2H2 type
  misc_feature (44)..(147): Homolog of NCBI NO: 19920466 NR Description: CG4133-PA [Drosophila melanogaster]
  misc_feature (44)..(147): Homolog of NCBI NO: 31222156 NR Description: ENSANGP00000018263 [Anopheles gambiae]
  misc_feature (1)..(268): Homolog of NCBI NO: 10177309 NR Description: gene_id:MDC12.25~unknown protein [Arabidopsis
  misc_feature (1)..(268): Homolog of NCBI NO: 18424689 NR Description: expressed protein [Arabidopsis thaliana]
  misc_feature (10)..(267): Homolog of NCBI NO: 26452757 NR Description: putative zinc finger protein [Arabidopsis
  misc_feature (10)..(267): Homolog of NCBI NO: 15237477 NR Description: zinc finger - like protein [Arabidopsis thaliana]
MWLSDHRLFLLCIVCGLYFSLQFTTGHADSNAGRTLNQEGGDHQIHCSRERSRTAWKIIQEYLMPFVEKEKYHISKRCRLHPDNDIYRDQEQHKFHTDINEWQCGFCKKSFYEEKHLDQHFDNRHSNLLNLSESQCIADVCGALHCDHEMNSGSKKSKCNPAAAAKNKHLCESLADSCFPVTEGPAASRLHEFFLHQFCDAHSCTGNRKPFSRGRRKKTNVFYIFVSILLVILLLLYYLYIYLYQRGMKRETQVLKRVSQASRKKKPS

SEQ ID NO: 59669 - protein, 205 aa, Glycine max
  peptide (1)..(205): Ceres Seq. ID no. 15177809
  misc_feature (39)..(62): Pfam Name: Zinc finger, C2H2 type Pfam Description: Zinc finger, C2H2 type
  misc_feature (1)..(84): Homolog of NCBI NO: 19920466 NR Description: CG4133-PA [Drosophila melanogaster]
  misc_feature (1)..(84): Homolog of NCBI NO: 31222156 NR Description: ENSANGP00000018263 [Anopheles gambiae]
  misc_feature (1)..(205): Homolog of NCBI NO: 10177309 NR Description: gene_id:MDC12.25~unknown protein [Arabidopsis
  misc_feature (1)..(205): Homolog of NCBI NO: 18424689 NR Description: expressed protein [Arabidopsis thaliana]
  misc_feature (1)..(204): Homolog of NCBI NO: 26452757 NR Description: putative zinc finger protein [Arabidopsis
  misc_feature (1)..(204): Homolog of NCBI NO: 15237477 NR Description: zinc finger - like protein [Arabidopsis thaliana]
MPFVEKEKYHISKRCRLHPDNDIYRDQEQHKFHTDINEWQCGFCKKSFYEEKHLDQHFDNRHSNLLNLSESQCIADVCGALHCDHEMNSGSKKSKCNPAAAAKNKHLCESLADSCFPVTEGPAASRLHEFFLHQFCDAHSCTGNRKPFSRGRRKKTNVFYIFVSILLVILLLLYYLYIYLYQRGMKRETQVLKRVSQASRKKKPS

SEQ ID NO: 59670 - DNA, 1155 bp, Glycine max
  misc_feature (1)..(1155): Ceres Seq. ID no. 14307540
agtttattttttctctctttgatcaaattcccttcccatggtctctctctcttcaattaattccatttagctttccccaaatcccaaaccctttttcgcttagatcccaatccaattgggttatggacatggcttccagtccccgcactgtagaagagatcttcaaggattacagcgccagaagaacctctgttattcgcgctctcactcacgacgttgatgaattttacggcctctgtgatccagataaggataacctgtgcctctatggacatccaaatgaggcctgggaagtaactctgccagcggaggaagttccgccagagctcccggagccggctcttggaatcaattttgctagggatggcatgaaccgcagggactggctttctctggttgctgtccacagtgattcatggttggtttctgtggccttttaccttggggctcgtcttaaccgcaatgaaaggaaacgattatttagcttgatcaatgatcttccatctgtttttgaagttgtgactgacaggaaaccagttaaggacaagccaactgcggatagtggaagcaagtctaggggaagtgccaagagatctagcgatgggcaagttaaaagcaacccaaagtttgtagatgagggttatgaggaggatgaagatgagcataatgaaacactttgtggaagctgcggcggaaattacaacgctgatgagttttggatttgctgtgacatatgtgagaggtggttccatgggaagtgtgttaagattacccctgcaaaggctgagagcataaagcaatataaatgtccatcatgcagcctgaggcggggcaggccttagactgaaagaggcgatggaatgggtacatgtgaggtgagtgttgtttcatggctgacaagatactgtaattttgttacatcacttacagaagttaatgtaatgggcatagtatcgatgctcaagggcaaatttatcagggattaagtttgtttttccagatgaaccattggtgcatgccacagggtatagaatagaacatgacaaattttaattttatgattagtttatatttagtagaatatttgcttgaactttaaatattgtaatttttttatttttaacattgtttaagaaaacaaaccttttcaacaag

SEQ ID NO: 59671 - protein, 279 aa, Glycine max
  peptide (1)..(279): Ceres Seq. ID no. 14307541
  misc_feature (225)..(272): Pfam Name: PHD-finger Pfam Description: PHD-finger
  misc_feature (48)..(278): Homolog of NCBI NO: 34907474 NR Description: nucleic acid binding protein
  misc_feature (47)..(273): Homolog of NCBI NO: 15223786 NR Description: nucleic acid binding protein (alfin-1) -related
  misc_feature (47)..(278): Homolog of NCBI NO: 7488751 NR Description: probable zinc finger protein - alfalfa (fragment)
  misc_feature (44)..(278): Homolog of NCBI NO: 15239624 NR Description: nucleic acid binding protein - like [Arabidopsis
  misc_feature (46)..(278): Homolog of NCBI NO: 15229157 NR Description: nucleic acid binding protein-related [Arabidopsis
  misc_feature (41)..(273): Homolog of NCBI NO: 34900462 NR Description: putative nucleic acid binding protein
  misc_feature (43)..(273): Homolog of NCBI NO: 29124114 NR Description: putative PHD-type zinc finger protein
  misc_feature (43)..(273): Homolog of NCBI NO: 28876028 NR Description: putative PHD-finger domain containing protein
  misc_feature (44)..(278): Homolog of NCBI NO: 15239180 NR Description: nucleic acid binding protein-related [Arabidopsis
  misc_feature (43)..(278): Homolog of NCBI NO: 15229696 NR Description: nucleic acid binding protein -related
FIFSLFDQIPFPWSLSLQLIPFSFPQIPNPFSLRSQSNWVMDMASSPRTVEEIFKDYSARRTSVIRALTHDVDEFYGLCDPDKDNLCLYGHPNEAWEVTLPAEEVPPELPEPALGINFARDGMNRRDWLSLVAVHSDSWLVSVAFYLGARLNRNERKRLFSLINDLPSVFEVVTDRKPVKDKPTADSGSKSRGSAKRSSDGQVKSNPKFVDEGYEEDEDEHNETLCGSCGGNYNADEFWICCDICERWFHGKCVKITPAKAESIKQYKCPSCSLRRGRP

SEQ ID NO: 59672 - protein, 239 aa, Glycine max
  peptide (1)..(239): Ceres Seq. ID no. 14307542
  misc_feature (185)..(232): Pfam Name: PHD-finger Pfam Description: PHD-finger
  misc_feature (8)..(238): Homolog of NCBI NO: 34907474 NR Description: nucleic acid binding protein
  misc_feature (7)..(233): Homolog of NCBI NO: 15223786 NR Description: nucleic acid binding protein (alfin-1) -related
  misc_feature (7)..(238): Homolog of NCBI NO: 7488751 NR Description: probable zinc finger protein - alfalfa (fragment)
  misc_feature (4)..(238): Homolog of NCBI NO: 15239624 NR Description: nucleic acid binding protein - like [Arabidopsis
  misc_feature (6)..(238): Homolog of NCBI NO: 15229157 NR Description: nucleic acid binding protein-related [Arabidopsis
  misc_feature (1)..(233): Homolog of NCBI NO: 34900462 NR Description: putative nucleic acid binding protein
  misc_feature (3)..(233): Homolog of NCBI NO: 29124114 NR Description: putative PHD-type zinc finger protein
  misc_feature (3)..(233): Homolog of NCBI NO: 28876028 NR Description: putative PHD-finger domain containing protein
  misc_feature (4)..(238): Homolog of NCBI NO: 15239180 NR Description: nucleic acid binding protein-related [Arabidopsis
  misc_feature (3)..(238): Homolog of NCBI NO: 15229696 NR Description: nucleic acid binding protein -related
MDMASSPRTVEEIFKDYSARRTSVIRALTHDVDEFYGLCDPDKDNLCLYGHPNEAWEVTLPAEEVPPELPEPALGINFARDGMNRRDWLSLVAVHSDSWLVSVAFYLGARLNRNERKRLFSLINDLPSVFEVVTDRKPVKDKPTADSGSKSRGSAKRSSDGQVKSNPKFVDEGYEEDEDEHNETLCGSCGGNYNADEFWICCDICERWFHGKCVKITPAKAESIKQYKCPSCSLRRGRP

SEQ ID NO: 59673 - protein, 237 aa, Glycine max
  peptide (1)..(237): Ceres Seq. ID no. 14307543
  misc_feature (183)..(230): Pfam Name: PHD-finger Pfam Description: PHD-finger
  misc_feature (6)..(236): Homolog of NCBI NO: 34907474 NR Description: nucleic acid binding protein
  misc_feature (5)..(231): Homolog of NCBI NO: 15223786 NR Description: nucleic acid binding protein (alfin-1) -related
  misc_feature (5)..(236): Homolog of NCBI NO: 7488751 NR Description: probable zinc finger protein - alfalfa (fragment)
  misc_feature (2)..(236): Homolog of NCBI NO: 15239624 NR Description: nucleic acid binding protein - like [Arabidopsis
  misc_feature (4)..(236): Homolog of NCBI NO: 15229157 NR Description: nucleic acid binding protein-related [Arabidopsis
  misc_feature (1)..(231): Homolog of NCBI NO: 34900462 NR Description: putative nucleic acid binding protein
  misc_feature (1)..(231): Homolog of NCBI NO: 29124114 NR Description: putative PHD-type zinc finger protein
  misc_feature (1)..(231): Homolog of NCBI NO: 28876028 NR Description: putative PHD-finger domain containing protein
  misc_feature (2)..(236): Homolog of NCBI NO: 15239180 NR Description: nucleic acid binding protein-related [Arabidopsis
  misc_feature (1)..(236): Homolog of NCBI NO: 15229696 NR Description: nucleic acid binding protein -related
MASSPRTVEEIFKDYSARRTSVIRALTHDVDEFYGLCDPDKDNLCLYGHPNEAWEVTLPAEEVPPELPEPALGINFARDGMNRRDWLSLVAVHSDSWLVSVAFYLGARLNRNERKRLFSLINDLPSVFEVVTDRKPVKDKPTADSGSKSRGSAKRSSDGQVKSNPKFVDEGYEEDEDEHNETLCGSCGGNYNADEFWICCDICERWFHGKCVKITPAKAESIKQYKCPSCSLRRGRP

SEQ ID NO: 59674 - DNA, 1109 bp, Glycine max
  misc_feature (1)..(1109): Ceres Seq. ID no. 14307018
gaaactgagcatctcattaagggataatttagtgaatatgtattttatcctcttaataaaaatgtctttttgtctgaatttttatatcaacaggtatggttacaaagatgttcggaaagaaaatcaccagacttttgagcagctgctgattgagagcctagagaagtttatacgtcgtgaggctcaggagaggtcactggagagtgatggggatggtgatactggttcagaggatgagtaccctaattctagggttctcatagctcccaatgggagcgtttactcacttggtgttcctcttcttgctggttttaaggatacaagcaaccccgttttagaagaaagcacattagacgtgataagcccggtatccactgatcccctggtgtttgatgctgagcagagccttgagagtgagttatcttttattcataaggctaaagaatctggtgttgtgtatcttcttggtcatggggatataagagcaaggaaggagtcgtggtttatcaagaagttagttataaactatttttatgcctttttgagaaagaactgcagaagggggatcacaactttaagtgtaccacactcacatttgatgcaagttagcatgacatacatggtttgaaaatcaatcaattttgcagcccaaataaaacgagtggcaattctcttgaaagctacagtttgatagcaatgaagggtccctggaaaggtcttattttggattgctcaatctgaaatgttcgatcctttctagccattttggatctccaaattgtttattgtccttccagcgcgagaatccggaagtagtcctgatgtttgttgtcgttgtggattcaccatctgcatatatgggattagaaaaaggctgataacaaagagaaaatgttaaaaactaacatccctccctatgcatacaatgcacatttgcgaatgtgtcaaattcaacttaaacgcaagaaccatggacatcgagtattgtacagtggcatgccattgcccttagttttcttattctatcacctttatttgttgtttaccttcccaactctgactaggcattttcttgattgaaacacaaatgagatcatatcttttttttc

SEQ ID NO: 59675 - protein, 208 aa, Glycine max
  peptide (1)..(208): Ceres Seq. ID no. 14307019
  misc_feature (29)..(208): Pfam Name: K+ potassium transporter Pfam Description: K+ potassium transporter
  misc_feature (29)..(208): Homolog of NCBI NO: 38502862 NR Description: Putative potassium transporter 12 (AtPOT12)
  misc_feature (29)..(208): Homolog of NCBI NO: 15219006 NR Description: potassium transporter, putative; protein id:
  misc_feature (29)..(208): Homolog of NCBI NO: 18138061 NR Description: putative potassium transporter [Vicia faba]
  misc_feature (29)..(208): Homolog of NCBI NO: 38345796 NR Description: OSJNBa0085I10.13 [Oryza sativa (japonica
  misc_feature (29)..(208): Homolog of NCBI NO: 18250714 NR Description: putative potasium transporter
  misc_feature (29)..(208): Homolog of NCBI NO: 22329125 NR Description: potassium transporter, putative (KUP5/KT5/POT13)
  misc_feature (29)..(208): Homolog of NCBI NO: 25345483 NR Description: probable potassium transporter AtKT5p (AtKT5)
  misc_feature (29)..(208): Homolog of NCBI NO: 7488157 NR Description: probable potassium transport protein KT5 -
  misc_feature (29)..(208): Homolog of NCBI NO: 22326688 NR Description: potassium transporter, putative
  misc_feature (29)..(208): Homolog of NCBI NO: 9955527 NR Description: potassium transport protein-like [Arabidopsis
KLSISLRDNLVNMYFILLIKMSFCLNFYINRYGYKDVRKENHQTFEQLLIESLEKFIRREAQERSLESDGDGDTGSEDEYPNSRVLIAPNGSVYSLGVPLLAGFKDTSNPVLEESTLDVISPVSTDPLVFDAEQSLESELSFIHKAKESGVVYLLGHGDIRARKESWFIKKLVINYFYAFLRKNCRRGITTLSVPHSHLMQVSMTYMV

SEQ ID NO: 59676 - protein, 196 aa, Glycine max
  peptide (1)..(196): Ceres Seq. ID no. 14307020
  misc_feature (17)..(196): Pfam Name: K+ potassium transporter Pfam Description: K+ potassium transporter
  misc_feature (17)..(196): Homolog of NCBI NO: 38502862 NR Description: Putative potassium transporter 12 (AtPOT12)
  misc_feature (17)..(196): Homolog of NCBI NO: 15219006 NR Description: potassium transporter, putative; protein id:
  misc_feature (17)..(196): Homolog of NCBI NO: 18138061 NR Description: putative potassium transporter [Vicia faba]
  misc_feature (17)..(196): Homolog of NCBI NO: 38345796 NR Description: OSJNBa0085I10.13 [Oryza sativa (japonica
  misc_feature (17)..(196): Homolog of NCBI NO: 18250714 NR Description: putative potasium transporter
  misc_feature (17)..(196): Homolog of NCBI NO: 22329125 NR Description: potassium transporter, putative (KUP5/KT5/POT13)
  misc_feature (17)..(196): Homolog of NCBI NO: 25345483 NR Description: probable potassium transporter AtKT5p (AtKT5)
  misc_feature (17)..(196): Homolog of NCBI NO: 7488157 NR Description: probable potassium transport protein KT5 -
  misc_feature (17)..(196): Homolog of NCBI NO: 22326688 NR Description: potassium transporter, putative
  misc_feature (17)..(196): Homolog of NCBI NO: 9955527 NR Description: potassium transport protein-like [Arabidopsis
MYFILLIKMSFCLNFYINRYGYKDVRKENHQTFEQLLIESLEKFIRREAQERSLESDGDGDTGSEDEYPNSRVLIAPNGSVYSLGVPLLAGFKDTSNPVLEESTLDVISPVSTDPLVFDAEQSLESELSFIHKAKESGVVYLLGHGDIRARKESWFIKKLVINYFYAFLRKNCRRGITTLSVPHSHLMQVSMTYMV

SEQ ID NO: 59677 - protein, 188 aa, Glycine max
  peptide (1)..(188): Ceres Seq. ID no. 14307021
  misc_feature (9)..(188): Pfam Name: K+ potassium transporter Pfam Description: K+ potassium transporter
  misc_feature (9)..(188): Homolog of NCBI NO: 38502862 NR Description: Putative potassium transporter 12 (AtPOT12)
  misc_feature (9)..(188): Homolog of NCBI NO: 15219006 NR Description: potassium transporter, putative; protein id:
  misc_feature (9)..(188): Homolog of NCBI NO: 18138061 NR Description: putative potassium transporter [Vicia faba]
  misc_feature (9)..(188): Homolog of NCBI NO: 38345796 NR Description: OSJNBa0085I10.13 [Oryza sativa (japonica
  misc_feature (9)..(188): Homolog of NCBI NO: 18250714 NR Description: putative potasium transporter
  misc_feature (9)..(188): Homolog of NCBI NO: 25345483 NR Description: probable potassium transporter AtKT5p (AtKT5)
  misc_feature (9)..(188): Homolog of NCBI NO: 22329125 NR Description: potassium transporter, putative (KUP5/KT5/POT13)
  misc_feature (9)..(188): Homolog of NCBI NO: 7488157 NR Description: probable potassium transport protein KT5 -
  misc_feature (9)..(188): Homolog of NCBI NO: 22326688 NR Description: potassium transporter, putative
  misc_feature (9)..(188): Homolog of NCBI NO: 9955527 NR Description: potassium transport protein-like [Arabidopsis
MSFCLNFYINRYGYKDVRKENHQTFEQLLIESLEKFIRREAQERSLESDGDGDTGSEDEYPNSRVLIAPNGSVYSLGVPLLAGFKDTSNPVLEESTLDVISPVSTDPLVFDAEQSLESELSFIHKAKESGVVYLLGHGDIRARKESWFIKKLVINYFYAFLRKNCRRGITTLSVPHSHLMQVSMTYMV

SEQ ID NO: 59678 - DNA, 1294 bp, Glycine max
  misc_feature (1)..(1294): Ceres Seq. ID no. 15176759
gaacagaggctctgtccattaaaaccactctccaaaatttctctctccattccttgcgcttccatccatcatggccatcgcaacagagactcagcctcaacaacacaaggattcttcggaggtttcgggttcagctgcggagcaaagaaggtggacgcttaacgatttcgatatcggaaagcctcttggaaggggaaaattcggtcacgtctatttggccagagagaagactagtaatcatattgttgctttgaaagtactcttcaagagtcaattgcaacaatcccaagttgtgcatcaacttcgacgtgaagttgaaatacagagtcatctccgacatccccacattttgcgcctctatggatacttttatgatcagaaacgagtttatttgattttagagtatgcacccaaaggtgaactttacaaggaattgcaaaaatgcaaatatttcagtgaaaggcgtgcagctacttatgttgcatcattggcccgagcccttatatattgccatggaaagcatgtaatacatagggatattaaaccagagaaccttcttattggttcacagggtgagttgaaaatagcagactttgggtggtcagtgcacacattcaatcgcaggcggaccatgtgtggcacactggattaccttcctcctgagatggtggagagtgtagaacatgatgcgagtgtggatatatggagccttggtgtcttgtgctatgagtttctttatggagtccctccttttgaggctaaagaacattctgatacttacaggaggataatacaagtggatctgaagttccctcctaaaccaattgtgtcttcagctgcaaaggatctcattagtcagatgctggtcaaggattcctctcaacgtctaccattgcacaaactcctcgaacacccttggattgttcagaatgccgagccctctggtgtatataggagctagtgcaccttatcattcttatattgtattttcttaatcgtggaaatcatcaaaatagcagctgcttctaagtatttgacaacattttggttttgagatgatgcaactatttgaagtaggttgctaggttaagagaaatcacttgttatatgattgtaaaccctactccttcaagggctatataaagaataactgatgtcacttgttatttgattgtaaaccctactccttcaagggctatataaagaataactgatgtcacttgttgattgtaatccggtatactccaaaaggaaccgcccgtgttatcaatactgattttttattcgcggtatt

SEQ ID NO: 59679 - protein, 296 aa, Glycine max
  peptide (1)..(296): Ceres Seq. ID no. 15176760
  misc_feature (33)..(284): Pfam Name: Protein kinase domain Pfam Description: Protein kinase domain
  misc_feature (24)..(292): Homolog of NCBI NO: 33355454 NR Description: serine/threonine protein kinase 6 [Mus musculus]
  misc_feature (24)..(292): Homolog of NCBI NO: 27923856 NR Description: Serine/threonine kinase 6 (Aurora-family kinase (Aurora/IPL1-related kinase 1) (Ipl1- and aurora-related kinase
  misc_feature (24)..(292): Homolog of NCBI NO: 20862949 NR Description: serine/threonine kinase 6 [Mus musculus]
  misc_feature (24)..(289): Homolog of NCBI NO: 27923859 NR Description: Serine/threonine protein kinase Eg2-like
  misc_feature (24)..(289): Homolog of NCBI NO: 1079309 NR Description: protein kinase (EC 2.7.1.-) p46XlEg22 - African
  misc_feature (15)..(289): Homolog of NCBI NO: 27923860 NR Description: Serine/threonine protein kinase Eg2 (pEg2)
  misc_feature (11)..(295): Homolog of NCBI NO: 34906424 NR Description: putative protein kinase [Oryza sativa (japonica
  misc_feature (19)..(295): Homolog of NCBI NO: 15225210 NR Description: serine/threonine protein kinase, putative
  misc_feature (1)..(295): Homolog of NCBI NO: 21592557 NR Description: putative serine/threonine protein kinase
  misc_feature (1)..(295): Homolog of NCBI NO: 15233958 NR Description: protein kinase, putative [Arabidopsis thaliana]
MAIATETQPQQHKDSSEVSGSAAEQRRWTLNDFDIGKPLGRGKFGHVYLAREKTSNHIVALKVLFKSQLQQSQVVHQLRREVEIQSHLRHPHILRLYGYFYDQKRVYLILEYAPKGELYKELQKCKYFSERRAATYVASLARALIYCHGKHVIHRDIKPENLLIGSQGELKIADFGWSVHTFNRRRTMCGTLDYLPPEMVESVEHDASVDIWSLGVLCYEFLYGVPPFEAKEHSDTYRRIIQVDLKFPPKPIVSSAAKDLISQMLVKDSSQRLPLHKLLEHPWIVQNAEPSGVYRS

SEQ ID NO: 59680 - DNA, 897 bp, Glycine max
  misc_feature (1)..(897): Ceres Seq. ID no. 13642436
aaggaccacatgaagatggttacaactggagaaaatatggtcagaaagacatccttggagccaaatatcccagaagttactataggtgcaccttccgcagcactcagggctgttgggcaacaaagcaagtgcagagatcagatgaagatcccacaatgtttgacataacttacagaggaaatcatacctgttctcagggaaacaatgccgttctgccacccaagtcaccagaaaaacatgagaaaccagcacacagtcataacattgacattcaccatgcacaggcatcacaagaaagccttgcaaagttcagaagtatcttgtctgtcaacacagataatctggacaatggagatatggcatatgctttcactttcccttccacttcatttggatgcatgaaacaagaaaaccacagcttgattcctatggccctggagaatgactccttcttaagcgacctataccaaacacacctgttatccccaacaacaccagaatcaaattatttcccatctccaactttccagatgaatgagtttgatgggatctacaacaggtcacattcgaaatccgatatcaatgagatcatttccaccaacacatcagcaaccaattctccaattcctgatttcaatttctcacttgatccggtggaaattgatccaaatttccctttcaataccccaggatttttgtgctgattgcactataaatggaatactataagaatgtagtcttcataaaacgggacaatttcagacagcagtagaattgtagaataaagaatgagcaactgcagcacttatgaacgtccttgtagtcaatatcagaattgcaattttggctccgtgttagcaattagcagtatgcactttcaaataaaatagtttctgc

SEQ ID NO: 59681 - protein, 233 aa, Glycine max
  peptide (1)..(233): Ceres Seq. ID no. 13642437
  misc_feature (4)..(81): Homolog of NCBI NO: 21592990 NR Description: DNA-binding protein-like [Arabidopsis thaliana]
  misc_feature (4)..(81): Homolog of NCBI NO: 15228907 NR Description: WRKY family transcription factor [Arabidopsis
  misc_feature (1)..(167): Homolog of NCBI NO: 15225975 NR Description: WRKY family transcription factor [Arabidopsis
  misc_feature (4)..(226): Homolog of NCBI NO: 34898262 NR Description: WRKY family transcription factor-like protein
  misc_feature (4)..(185): Homolog of NCBI NO: 18420751 NR Description: WRKY family transcription factor [Arabidopsis
  misc_feature (1)..(66): Homolog of NCBI NO: 34911952 NR Description: P0694A04.6 [Oryza sativa (japonica
  misc_feature (1)..(76): Homolog of NCBI NO: 40253471 NR Description: putative transcription factor WRKY5
  misc_feature (1)..(187): Homolog of NCBI NO: 30681651 NR Description: WRKY family transcription factor [Arabidopsis
  misc_feature (1)..(187): Homolog of NCBI NO: 15237039 NR Description: WRKY family transcription factor [Arabidopsis
  misc_feature (1)..(136): Homolog of NCBI NO: 15236622 NR Description: WRKY family transcription factor [Arabidopsis
GPHEDGYNWRKYGQKDILGAKYPRSYYRCTFRSTQGCWATKQVQRSDEDPTMFDITYRGNHTCSQGNNAVLPPKSPEKHEKPAHSHNIDIHHAQASQESLAKFRSILSVNTDNLDNGDMAYAFTFPSTSFGCMKQENHSLIPMALENDSFLSDLYQTHLLSPTTPESNYFPSPTFQMNEFDGIYNRSHSKSDINEIISTNTSATNSPIPDFNFSLDPVEIDPNFPFNTPGFLC

SEQ ID NO: 59682 - protein, 182 aa, Glycine max
  peptide (1)..(182): Ceres Seq. ID no. 13642438
  misc_feature (1)..(30): Homolog of NCBI NO: 21592990 NR Description: DNA-binding protein-like [Arabidopsis thaliana]
  misc_feature (1)..(30): Homolog of NCBI NO: 15228907 NR Description: WRKY family transcription factor [Arabidopsis
  misc_feature (1)..(116): Homolog of NCBI NO: 15225975 NR Description: WRKY family transcription factor [Arabidopsis
  misc_feature (1)..(175): Homolog of NCBI NO: 34898262 NR Description: WRKY family transcription factor-like protein
  misc_feature (1)..(134): Homolog of NCBI NO: 18420751 NR Description: WRKY family transcription factor [Arabidopsis
  misc_feature (1)..(15): Homolog of NCBI NO: 34911952 NR Description: P0694A04.6 [Oryza sativa (japonica
  misc_feature (1)..(25): Homolog of NCBI NO: 40253471 NR Description: putative transcription factor WRKY5
  misc_feature (1)..(136): Homolog of NCBI NO: 30681651 NR Description: WRKY family transcription factor [Arabidopsis
  misc_feature (1)..(136): Homolog of NCBI NO: 15237039 NR Description: WRKY family transcription factor [Arabidopsis
  misc_feature (1)..(85): Homolog of NCBI NO: 15236622 NR Description: WRKY family transcription factor [Arabidopsis
MFDITYRGNHTCSQGNNAVLPPKSPEKHEKPAHSHNIDIHHAQASQESLAKFRSILSVNTDNLDNGDMAYAFTFPSTSFGCMKQENHSLIPMALENDSFLSDLYQTHLLSPTTPESNYFPSPTFQMNEFDGIYNRSHSKSDINEIISTNTSATNSPIPDFNFSLDPVEIDPNFPFNTPGFLC

SEQ ID NO: 59683 - DNA, 979 bp, Glycine max
  misc_feature (1)..(979): Ceres Seq. ID no. 15176881
aattgttctgctccttttttttagtggtaagaatagaacaagctaaggaacattggaatcttttgccatgacccaaagtgggacctgtgaccggtgcacaggctaagctaactaaaataccacttagcctggtaaacctaaccaacatgaaacattttcaataagatcaaaactttcaaactagttatgcttaaaatctattgaaatttcaacagagtattatttcttgtgatttcaactaccaaaatgatcaaaacctattaagatctataaacaagacacaaaatatacaccagtttaatttgaaagtgtttaatacagccccaaaataacaatactgatttcctagtaacctgcaacttaactgattgatgatttggaaaaaggaataagaggtgagttacatatactctatgaggagataataatcataatgaataggaagggggaaattaaaataactcctgagtagtttgcaactatataaactagattgtaacatcttaaatcaatggaagcattttttatctaatcacaattttaatgagttcatttataatgccccttgatctaaatgagtgtgacacatctcaacttggactgggttgattttttttctttttcctcctttgctttattaatcctaatttacgatacttattatagctttgctttatatcgggtaacaggccacaggaatggttacaatgatgaaggaactacaaataccaatggtgggaagtcatcatcttggcattgatgacactaggaacatagcaagagtactgcagcacatgctactagatggtgcactcgtccagattactgcaaggaggaatcctagatctcttagagatgtcaagtttcttttcaagaaccgtattggatagtgtacttctcaatggactatgtaactttttctaatacttttaatcgtggaattagttaactcaatgaacagattatagattataatttc

SEQ ID NO: 59684 - protein, 63 aa, Glycine max
  peptide (1)..(63): Ceres Seq. ID no. 15176882
  misc_feature (1)..(63): Homolog of NCBI NO: 11994503 NR Description: emb|CAB36829.1~gene_id:F4B12.5~strong similarity
  misc_feature (1)..(62): Homolog of NCBI NO: 18400647 NR Description: exonuclease protein family [Arabidopsis thaliana]
MVTMMKELQIPMVGSHHLGIDDTRNIARVLQHMLLDGALVQITARRNPRSLRDVKFLFKNRIG

SEQ ID NO: 59685 - protein, 61 aa, Glycine max
  peptide (1)..(61): Ceres Seq. ID no. 15176883
MSVTHLNLDWVDFFSFSSFALLILIYDTYYSFALYRVTGHRNGYNDEGTTNTNGGKSSSWH

SEQ ID NO: 59686 - protein, 60 aa, Glycine max
  peptide (1)..(60): Ceres Seq. ID no. 15176884
  misc_feature (1)..(60): Homolog of NCBI NO: 11994503 NR Description: emb|CAB36829.1~gene_id:F4B12.5~strong similarity
  misc_feature (1)..(59): Homolog of NCBI NO: 18400647 NR Description: exonuclease protein family [Arabidopsis thaliana]
MMKELQIPMVGSHHLGIDDTRNIARVLQHMLLDGALVQITARRNPRSLRDVKFLFKNRIG

SEQ ID NO: 59687 - DNA, 1343 bp, Glycine max
  misc_feature (1)..(1343): Ceres Seq. ID no. 15171556
atcacccttttggcagttaccaattcaactaccgcatcacatttacaaataaaactcaaaatccaaacaccaccgccacacaccaccttgtctattgattatcatatttattgtgagccttaactctagtattactactacttccacctttcatcatcactctttcagtccaatggggtggtctttctcaatttccgttttgctgtttcttacctttctcattcagatacatggaagaggctttgcagagaattatggttgtaatttgttccaaggaagttgggtttatgatgaatcataccctctttatgcaacctcacagtgtccctttatagagaaagaatttgattgtcaaaacaatggcagaccggataagttctatctcaaatatagatggcagccagcaggctgcaacttaacaagattcaacggtgaagatttcttaagaagacatagagggaggagtctcatgtttgtgggggattctttgagtttgaatcaatggcaatcactcacttgcatgcttcacatagctgtgccactagccccttacaacttagtgaggaatggagatctctccattttcacgtttccgacctatggtgttaaggtgatgttctcacgcaatgcatttcttgtggacatagttagtgagagtattggtcgagtactgaaactagattcaattcaagctggccaaacgtggaaaggaatagatatattgatatttgactcttggcattggtggcttcacacaggaagaaaacaaccatgggatttgattcaagtaggaaatcgtactgttagagacatgaatcgcttggttgcatacgagatagcgctgaatacatgggccaaatggattgattataatattgaccctaccagaacaagggttttattccaaggagtgtctccagatcatcaaaatccagcgcaatggggtgagccaagagcaaacttttgtgcagggcaaactaagccaatatcgggattaaggtatcctggaggaccaaacccagcagaggtggtattagagaaagtgctaaaggccatgcaaaagcctgtgtatttgctggacattacaaccctatcccagctaaggatagatggccacccttctgtttatggacatggtgggcatttggacatggattgcagccactggtgccttgctggtgttcctgatacttggaatgagcttctatatgttagtctctttcaaaattaagatcctattcttattgttattgctgattataaataaaatgtgtcccaagaaaatatatatctcaaattaattcagacaataaaatacagcaagatatgtataggtctatcat

SEQ ID NO: 59688 - protein, 352 aa, Glycine max
  peptide (1)..(352): Ceres Seq. ID no. 15171557
  misc_feature (192)..(349): Pfam Name: Arabidopsis proteins of unknown function Pfam Description: Arabidopsis proteins of unknown function
  misc_feature (10)..(251): Homolog of NCBI NO: 11994596 NR Description: gb|AAD22996.1~gene_id:T21E2.11~similar to unknown
  misc_feature (22)..(349): Homolog of NCBI NO: 18403435 NR Description: expressed protein [Arabidopsis thaliana]
  misc_feature (30)..(349): Homolog of NCBI NO: 28393769 NR Description: unknown protein [Arabidopsis thaliana]
  misc_feature (30)..(349): Homolog of NCBI NO: 21593142 NR Description: unknown [Arabidopsis thaliana]
  misc_feature (29)..(349): Homolog of NCBI NO: 18396930 NR Description: expressed protein [Arabidopsis thaliana]
  misc_feature (30)..(352): Homolog of NCBI NO: 18406003 NR Description: expressed protein [Arabidopsis thaliana]
  misc_feature (10)..(352): Homolog of NCBI NO: 15219157 NR Description: hypothetical protein [Arabidopsis thaliana]
  misc_feature (30)..(349): Homolog of NCBI NO: 34911864 NR Description: OSJNBb0032K15.9 [Oryza sativa (japonica
  misc_feature (1)..(352): Homolog of NCBI NO: 30350855 NR Description: hypothetical protein At2g30900 [Arabidopsis
  misc_feature (1)..(352): Homolog of NCBI NO: 15224585 NR Description: expressed protein [Arabidopsis thaliana]
MGWSFSISVLLFLTFLIQIHGRGFAENYGCNLFQGSWVYDESYPLYATSQCPFIEKEFDCQNNGRPDKFYLKYRWQPAGCNLTRFNGEDFLRRHRGRSLMFVGDSLSLNQWQSLTCMLHIAVPLAPYNLVRNGDLSIFTFPTYGVKVMFSRNAFLVDIVSESIGRVLKLDSIQAGQTWKGIDILIFDSWHWWLHTGRKQPWDLIQVGNRTVRDMNRLVAYEIALNTWAKWIDYNIDPTRTRVLFQGVSPDHQNPAQWGEPRANFCAGQTKPISGLRYPGGPNPAEVVLEKVLKAMQKPVYLLDITTLSQLRIDGHPSVYGHGGHLDMDCSHWCLAGVPDTWNELLYVSLFQN

SEQ ID NO: 59689 - protein, 253 aa, Glycine max
  peptide (1)..(253): Ceres Seq. ID no. 15171558
  misc_feature (93)..(250): Pfam Name: Arabidopsis proteins of unknown function Pfam Description: Arabidopsis proteins of unknown function
  misc_feature (1)..(152): Homolog of NCBI NO: 11994596 NR Description: gb|AAD22996.1~gene_id:T21E2.11~similar to unknown
  misc_feature (1)..(250): Homolog of NCBI NO: 18403435 NR Description: expressed protein [Arabidopsis thaliana]
  misc_feature (1)..(250): Homolog of NCBI NO: 28393769 NR Description: unknown protein [Arabidopsis thaliana]
  misc_feature (1)..(250): Homolog of NCBI NO: 21593142 NR Description: unknown [Arabidopsis thaliana]
  misc_feature (1)..(250): Homolog of NCBI NO: 18396930 NR Description: expressed protein [Arabidopsis thaliana]
  misc_feature (1)..(253): Homolog of NCBI NO: 18406003 NR Description: expressed protein [Arabidopsis thaliana]
  misc_feature (1)..(253): Homolog of NCBI NO: 15219157 NR Description: hypothetical protein [Arabidopsis thaliana]
  misc_feature (1)..(250): Homolog of NCBI NO: 34911864 NR Description: OSJNBb0032K15.9 [Oryza sativa (japonica
  misc_feature (1)..(253): Homolog of NCBI NO: 30350855 NR Description: hypothetical protein At2g30900 [Arabidopsis
  misc_feature (1)..(253): Homolog of NCBI NO: 15224585 NR Description: expressed protein [Arabidopsis thaliana]
MFVGDSLSLNQWQSLTCMLHIAVPLAPYNLVRNGDLSIFTFPTYGVKVMFSRNAFLVDIVSESIGRVLKLDSIQAGQTWKGIDILIFDSWHWWLHTGRKQPWDLIQVGNRTVRDMNRLVAYEIALNTWAKWIDYNIDPTRTRVLFQGVSPDHQNPAQWGEPRANFCAGQTKPISGLRYPGGPNPAEVVLEKVLKAMQKPVYLLDITTLSQLRIDGHPSVYGHGGHLDMDCSHWCLAGVPDTWNELLYVSLFQN

SEQ ID NO: 59690 - protein, 236 aa, Glycine max
  peptide (1)..(236): Ceres Seq. ID no. 15171559
  misc_feature (76)..(233): Pfam Name: Arabidopsis proteins of unknown function Pfam Description: Arabidopsis proteins of unknown function
  misc_feature (1)..(135): Homolog of NCBI NO: 11994596 NR Description: gb|AAD22996.1~gene_id:T21E2.11~similar to unknown
  misc_feature (1)..(233): Homolog of NCBI NO: 18403435 NR Description: expressed protein [Arabidopsis thaliana]
  misc_feature (1)..(233): Homolog of NCBI NO: 28393769 NR Description: unknown protein [Arabidopsis thaliana]
  misc_feature (1)..(233): Homolog of NCBI NO: 21593142 NR Description: unknown [Arabidopsis thaliana]
  misc_feature (1)..(233): Homolog of NCBI NO: 18396930 NR Description: expressed protein [Arabidopsis thaliana]
  misc_feature (1)..(236): Homolog of NCBI NO: 18406003 NR Description: expressed protein [Arabidopsis thaliana]
  misc_feature (1)..(236): Homolog of NCBI NO: 15219157 NR Description: hypothetical protein [Arabidopsis thaliana]
  misc_feature (1)..(233): Homolog of NCBI NO: 34911864 NR Description: OSJNBb0032K15.9 [Oryza sativa (japonica
  misc_feature (1)..(236): Homolog of NCBI NO: 30350855 NR Description: hypothetical protein At2g30900 [Arabidopsis
  misc_feature (1)..(236): Homolog of NCBI NO: 15224585 NR Description: expressed protein [Arabidopsis thaliana]
MLHIAVPLAPYNLVRNGDLSIFTFPTYGVKVMFSRNAFLVDIVSESIGRVLKLDSIQAGQTWKGIDILIFDSWHWWLHTGRKQPWDLIQVGNRTVRDMNRLVAYEIALNTWAKWIDYNIDPTRTRVLFQGVSPDHQNPAQWGEPRANFCAGQTKPISGLRYPGGPNPAEVVLEKVLKAMQKPVYLLDITTLSQLRIDGHPSVYGHGGHLDMDCSHWCLAGVPDTWNELLYVSLFQN

SEQ ID NO: 59691 - DNA, 1029 bp, Glycine max
  misc_feature (1)..(1029): Ceres Seq. ID no. 14307057
agcttatgccagaaaaatatcgatgttttattttatttcatttcttggttgtagttgaatcctctcactttgccaaaaaatcaaacaacataaccttaaattttcttgagggattgagttgttctgcattaagttctcagcacattctagccactgcataccatagcccgttctagattgtaacaaacccaactccctataataatctatgtgtggtccaccaagtgtggtccgtacttactctttcatgactgactttggtgcagacagtatgctcacaacaactaacatattagggagttgggcatctttatatttagttcatgactcttatgctttgatcaggttgtacattcatgcttaattatatgataattgggatatggtttgttcactaccatagtaataaggtgtagttatgtatattaattgatagttgttcaaatttatgttataccaagctaatgcattgagtaacactgcactgagtctagtgttgaaactcaggtagacaaatccactatgcctgcaaatacaaaggatgcattatatcaaagcttgcctcctaatataaaattagctctacgttccaaattaccatccctccgtgctgtagaagagataagtgtagcctatatcacatatgagatgcataaaaaattacattggttggttcccatggccattaacacatccaaagcacataagagatttggttggctaggggagtgggcatactcagggtatgaagtaaaaaagaagactggtgtaatgtggattgagacattctaccatgcagatagagagaaagtggaacattgtattcttgaacttctcttatggcttcatcgcttggccatcagaagtaaggctcacagtgatgctattgctggctaagtaaggtctgccacttgcgaagaaaatggaatgataaaactgaatttggtctcttttgattcaaccttaataaaggaaataattgcttaattagctctctaaataaatctcttgatttaagggattgcccgt

SEQ ID NO: 59692 - protein, 124 aa, Glycine max
  peptide (1)..(124): Ceres Seq. ID no. 14307058
  misc_feature (1)..(59): Pfam Name: Protein of unknown function (DUF668) Pfam Description: Protein of unknown function (DUF668)
  misc_feature (1)..(59): Homolog of NCBI NO: 25513510 NR Description: T5I8.21 protein - Arabidopsis thaliana
  misc_feature (1)..(121): Homolog of NCBI NO: 38345368 NR Description: OSJNBa0088K19.7 [Oryza sativa (japonica
  misc_feature (1)..(124): Homolog of NCBI NO: 34908726 NR Description: P0491F11.23 [Oryza sativa (japonica
  misc_feature (1)..(122): Homolog of NCBI NO: 18397646 NR Description: expressed protein [Arabidopsis thaliana]
  misc_feature (1)..(124): Homolog of NCBI NO: 30682523 NR Description: expressed protein [Arabidopsis thaliana]
  misc_feature (1)..(117): Homolog of NCBI NO: 15218580 NR Description: expressed protein [Arabidopsis thaliana]
  misc_feature (1)..(117): Homolog of NCBI NO: 25403424 NR Description: protein F23M19.3 [imported] - Arabidopsis
MPANTKDALYQSLPPNIKLALRSKLPSLRAVEEISVAYITYEMHKKLHWLVPMAINTSKAHKRFGWLGEWAYSGYEVKKKTGVMWIETFYHADREKVEHCILELLLWLHRLAIRSKAHSDAIAG

SEQ ID NO: 59693 - protein, 82 aa, Glycine max
  peptide (1)..(82): Ceres Seq. ID no. 14307059
  misc_feature (1)..(17): Homolog of NCBI NO: 25513510 NR Description: T5I8.21 protein - Arabidopsis thaliana
  misc_feature (1)..(79): Homolog of NCBI NO: 38345368 NR Description: OSJNBa0088K19.7 [Oryza sativa (japonica
  misc_feature (1)..(82): Homolog of NCBI NO: 34908726 NR Description: P0491F11.23 [Oryza sativa (japonica
  misc_feature (1)..(80): Homolog of NCBI NO: 18397646 NR Description: expressed protein [Arabidopsis thaliana]
  misc_feature (1)..(82): Homolog of NCBI NO: 30682523 NR Description: expressed protein [Arabidopsis thaliana]
  misc_feature (1)..(75): Homolog of NCBI NO: 15218580 NR Description: expressed protein [Arabidopsis thaliana]
  misc_feature (1)..(75): Homolog of NCBI NO: 25403424 NR Description: protein F23M19.3 [imported] - Arabidopsis
MHKKLHWLVPMAINTSKAHKRFGWLGEWAYSGYEVKKKTGVMWIETFYHADREKVEHCILELLLWLHRLAIRSKAHSDAIAG

SEQ ID NO: 59694 - protein, 72 aa, Glycine max
  peptide (1)..(72): Ceres Seq. ID no. 14307060
  misc_feature (1)..(69): Homolog of NCBI NO: 38345368 NR Description: OSJNBa0088K19.7 [Oryza sativa (japonica
  misc_feature (1)..(72): Homolog of NCBI NO: 34908726 NR Description: P0491F11.23 [Oryza sativa (japonica
  misc_feature (1)..(70): Homolog of NCBI NO: 18397646 NR Description: expressed protein [Arabidopsis thaliana]
  misc_feature (1)..(72): Homolog of NCBI NO: 30682523 NR Description: expressed protein [Arabidopsis thaliana]
  misc_feature (1)..(65): Homolog of NCBI NO: 15218580 NR Description: expressed protein [Arabidopsis thaliana]
  misc_feature (1)..(65): Homolog of NCBI NO: 25403424 NR Description: protein F23M19.3 [imported] - Arabidopsis
MAINTSKAHKRFGWLGEWAYSGYEVKKKTGVMWIETFYHADREKVEHCILELLLWLHRLAIRSKAHSDAIAG

SEQ ID NO: 59695 - DNA, 1654 bp, Glycine max
  misc_feature (1)..(1654): Ceres Seq. ID no. 14313897
gtgcttcgttgtgctacgccacgaaagaatttcttgttttctgctttcgaataaacgaataagaagccttcacaccgcttcgttgtgctgtgcttgcttctcttttattctttctattagtattcgtttcgttttctccgccgtttccgtagctcggcttcagcagcaccagaaccaggtgtctactatctgactacacatgtgctgttattgtcttccaattgggtgaagtctgattgaagagcaatgcagaaggatactagtaccaccgccccatcaaccacaagtggtcgggttaggcaccgaaaacgctcaaatgaggttattccggaagttagtaaagcaaatgggaccaagttactggttaatgacaaaagcaaatacaagtctatgctaattcgagcatattcatctgtatggatgattggcggctttgttttgatcatttatatgggtcacctctacatcactgcaatggtggttgttatccaaatcttcatggcaagggagctgttcaatctactcaggagagctcatgaagataggcagctgccaggatttaggctattaaattggcattttttcttcactgcaatgttatttgtttatggacgaattctgagtcaatgcctggttaacacagtaacttcagacatggttttatattggctagtgagcaatcttataaagtatcacatggttatctgctactccctgtacattgcaggatttatgtggttcattctcacgttgaagaagaagatgtacaagtaccaatttggccagtatgcttggacacacatgattctaattgttgtatttggccagtcctccttcaccgtggcaagcatttttgaagggattttctggtttcttctcccagcaacacttattgtcattaatgatattgctgcttatatctttggtttcttctttggaagaacccctttgatcaagttatctccaaagaaaacttgggagggttttataggggcatctgttaccaccatcatctctgcatttatgcttgctaacatcatgggtcgctctcagtggctaacgtgtccaaggaaggatttgtcaactggttggcttcactgtgatcctggtccactgtttaagccagaatcttatcccttacctggatgtatttctcactggttttcttggaaagagatatcaatcctaccaattcaatggcattctttatgtctaggcttgtttgcttcaattattgcaccttttggaggcttctttgcaagtggctttaaaagggcttttaaaataaaggactttggtgatagtattccgggacatggtggaattaccgacagaatggattgccagatggttatggccgtgtttgcatacatatatcatcagtcatttgttgtgccgcaaactctctcggttgaaatgattttggaccagatatcgatgaacctaacattcgatgagcaacaagctctatattggaggcttggggaaattttacaacaggggtttgctaggatgtcttagattcatggcgaggtgtatttgttctgtcaccttctattgtattccttcacatacaggggaaaaggaaaagatactatgtacatgtgtttgttttctatcttttgagtgaaacaaattaaaggttcagaagctg

SEQ ID NO: 59696 - protein, 424 aa, Glycine max
  peptide (1)..(424): Ceres Seq. ID no. 14313898
  misc_feature (5)..(408): Homolog of NCBI NO: 32419699 NR Description: hypothetical protein [Neurospora crassa]
  misc_feature (385)..(419): Homolog of NCBI NO: 37532798 NR Description: putative phosphatidate cytidylyltransferase
  misc_feature (277)..(367): Homolog of NCBI NO: 37532798 NR Description: putative phosphatidate cytidylyltransferase
  misc_feature (4)..(138): Homolog of NCBI NO: 37532798 NR Description: putative phosphatidate cytidylyltransferase
  misc_feature (3)..(417): Homolog of NCBI NO: 15236874 NR Description: phosphatidate cytidylyltransferase, putative
  misc_feature (4)..(419): Homolog of NCBI NO: 20303635 NR Description: putative CDP-diacylglycerol synthetase
  misc_feature (1)..(417): Homolog of NCBI NO: 7484839 NR Description: CDP-diacylglycerol synthetase homolog F24O1.17 -
  misc_feature (1)..(417): Homolog of NCBI NO: 30696710 NR Description: phosphatidate cytidylyltransferase (CDS)
  misc_feature (1)..(418): Homolog of NCBI NO: 15235611 NR Description: phosphatidate cytidylyltransferase, putative
  misc_feature (1)..(418): Homolog of NCBI NO: 3121837 NR Description: Phosphatidate cytidylyltransferase synthetase) (CDP-diglyceride pyrophosphorylase) synthase) (CDS) (CTP:phosphatidate cytidylyltransferase) (CDP-DAG
MQKDTSTTAPSTTSGRVRHRKRSNEVIPEVSKANGTKLLVNDKSKYKSMLIRAYSSVWMIGGFVLIIYMGHLYITAMVVVIQIFMARELFNLLRRAHEDRQLPGFRLLNWHFFFTAMLFVYGRILSQCLVNTVTSDMVLYWLVSNLIKYHMVICYSLYIAGFMWFILTLKKKMYKYQFGQYAWTHMILIVVFGQSSFTVASIFEGIFWFLLPATLIVINDIAAYIFGFFFGRTPLIKLSPKKTWEGFIGASVTTIISAFMLANIMGRSQWLTCPRKDLSTGWLHCDPGPLFKPESYPLPGCISHWFSWKEISILPIQWHSLCLGLFASIIAPFGGFFASGFKRAFKIKDFGDSIPGHGGITDRMDCQMVMAVFAYIYHQSFVVPQTLSVEMILDQISMNLTFDEQQALYWRLGEILQQGFARMS

SEQ ID NO: 59697 - protein, 376 aa, Glycine max
  peptide (1)..(376): Ceres Seq. ID no. 14313899
  misc_feature (1)..(360): Homolog of NCBI NO: 32419699 NR Description: hypothetical protein [Neurospora crassa]
  misc_feature (337)..(371): Homolog of NCBI NO: 37532798 NR Description: putative phosphatidate cytidylyltransferase
  misc_feature (229)..(319): Homolog of NCBI NO: 37532798 NR Description: putative phosphatidate cytidylyltransferase
  misc_feature (1)..(90): Homolog of NCBI NO: 37532798 NR Description: putative phosphatidate cytidylyltransferase
  misc_feature (1)..(369): Homolog of NCBI NO: 15236874 NR Description: phosphatidate cytidylyltransferase, putative
  misc_feature (1)..(371): Homolog of NCBI NO: 20303635 NR Description: putative CDP-diacylglycerol synthetase
  misc_feature (1)..(369): Homolog of NCBI NO: 7484839 NR Description: CDP-diacylglycerol synthetase homolog F24O1.17 -
  misc_feature (1)..(369): Homolog of NCBI NO: 30696710 NR Description: phosphatidate cytidylyltransferase (CDS)
  misc_feature (1)..(370): Homolog of NCBI NO: 15235611 NR Description: phosphatidate cytidylyltransferase, putative
  misc_feature (1)..(370): Homolog of NCBI NO: 3121837 NR Description: Phosphatidate cytidylyltransferase synthetase) (CDP-diglyceride pyrophosphorylase) synthase) (CDS) (CTP:phosphatidate cytidylyltransferase) (CDP-DAG
MLIRAYSSVWMIGGFVLIIYMGHLYITAMVVVIQIFMARELFNLLRRAHEDRQLPGFRLLNWHFFFTAMLFVYGRILSQCLVNTVTSDMVLYWLVSNLIKYHMVICYSLYIAGFMWFILTLKKKMYKYQFGQYAWTHMILIVVFGQSSFTVASIFEGIFWFLLPATLIVINDIAAYIFGFFFGRTPLIKLSPKKTWEGFIGASVTTIISAFMLANIMGRSQWLTCPRKDLSTGWLHCDPGPLFKPESYPLPGCISHWFSWKEISILPIQWHSLCLGLFASIIAPFGGFFASGFKRAFKIKDFGDSIPGHGGITDRMDCQMVMAVFAYIYHQSFVVPQTLSVEMILDQISMNLTFDEQQALYWRLGEILQQGFARMS

SEQ ID NO: 59698 - protein, 366 aa, Glycine max
  peptide (1)..(366): Ceres Seq. ID no. 14313900
  misc_feature (1)..(350): Homolog of NCBI NO: 32419699 NR Description: hypothetical protein [Neurospora crassa]
  misc_feature (327)..(361): Homolog of NCBI NO: 37532798 NR Description: putative phosphatidate cytidylyltransferase
  misc_feature (219)..(309): Homolog of NCBI NO: 37532798 NR Description: putative phosphatidate cytidylyltransferase
  misc_feature (1)..(80): Homolog of NCBI NO: 37532798 NR Description: putative phosphatidate cytidylyltransferase
  misc_feature (1)..(359): Homolog of NCBI NO: 15236874 NR Description: phosphatidate cytidylyltransferase, putative
  misc_feature (1)..(361): Homolog of NCBI NO: 20303635 NR Description: putative CDP-diacylglycerol synthetase
  misc_feature (1)..(359): Homolog of NCBI NO: 7484839 NR Description: CDP-diacylglycerol synthetase homolog F24O1.17 -
  misc_feature (1)..(359): Homolog of NCBI NO: 30696710 NR Description: phosphatidate cytidylyltransferase (CDS)
  misc_feature (1)..(360): Homolog of NCBI NO: 15235611 NR Description: phosphatidate cytidylyltransferase, putative
  misc_feature (1)..(360): Homolog of NCBI NO: 3121837 NR Description: Phosphatidate cytidylyltransferase synthetase) (CDP-diglyceride pyrophosphorylase) synthase) (CDS) (CTP:phosphatidate cytidylyltransferase) (CDP-DAG
MIGGFVLIIYMGHLYITAMVVVIQIFMARELFNLLRRAHEDRQLPGFRLLNWHFFFTAMLFVYGRILSQCLVNTVTSDMVLYWLVSNLIKYHMVICYSLYIAGFMWFILTLKKKMYKYQFGQYAWTHMILIVVFGQSSFTVASIFEGIFWFLLPATLIVINDIAAYIFGFFFGRTPLIKLSPKKTWEGFIGASVTTIISAFMLANIMGRSQWLTCPRKDLSTGWLHCDPGPLFKPESYPLPGCISHWFSWKEISILPIQWHSLCLGLFASIIAPFGGFFASGFKRAFKIKDFGDSIPGHGGITDRMDCQMVMAVFAYIYHQSFVVPQTLSVEMILDQISMNLTFDEQQALYWRLGEILQQGFARMS

SEQ ID NO: 59699 - DNA, 1339 bp, Glycine max
  misc_feature (1)..(1339): Ceres Seq. ID no. 15176095
atctaccactctagtctgccacatattaataataataattaataccatgccttaagctatgcctactttggggtttgcactatactatatggacataccattctatatttgcaatcagaatatatggattgctattaaacttataatttgtgatagttggtattttttttagcaatacaaagatcccaatatgataatcatgaatctcagtttttcaacttgaacttgactactttaaatttatgtattgttaggttcccagtggcatatattacacatccaaagactcaattggatactaagccagccccatttatggcagcattttcatcaaaaggaccaaatactatggtgccagagatcctaaagcctgatatcactgcaccaggcgtgtcagttatagcagcctatactgaggcccaaggaccaaccaatcaagtgttcgacaagcgcaggattccgtttaactcagtctcaggcacatcaatgtcatgccctcatgtttcaggcattgtgggactgttgagagccttatatcctacgtggagtaccgctgcaattaaatcagcaatcatgaccacagctacaacactagacaatgaggtggagccactactgaatgctactgatggcaaggcgacaccattcagttacggggcagggcatgttcaaccaaacagagcaatggatcccgggctagtttatgacataacaattgatgattacctcaacttcttatgtgctttaggatacaacgagacacagatctcagtgttcacagaaggtccatataaatgccgcaagaaatttagtctcctcaacctgaactatccctcaatcacagtcccaaaactctctgggtcagtgacagttacaaggacattgaaaaatgttggttctccagggacttacattgctcatgttcaaaacccgtatggaatcaccgtttctgtgaagccaagcatcttgaagttcaaaaatgttggtgaagagaagagctttaaattaaccttcaaggccatgcaaggaaaggccacaaataactacgcgtttggaaaactgatatggtcagatggcaagcattacgtcacgagtccaatagttgtgaaggccctcttaactagaaattgaagtaattggtgcaatttagctcatttgcatttctaattgattgttagcctattctaaattgtatgatatatcttctaaaatagggcttctttgagagttatctctgacattgattgataacaaagaaaccaacaagtggctttctttgggtgtacttttactatgattccaaggagaaataaaacctaacacgtccattctcctagtc

SEQ ID NO: 59700 - protein, 271 aa, Glycine max
  peptide (1)..(271): Ceres Seq. ID no. 15176096
  misc_feature (162)..(264): Pfam Name: Domain of Unknown Function (DUF1034) Pfam Description: Domain of Unknown Function (DUF1034)
  misc_feature (1)..(267): Homolog of NCBI NO: 24414066 NR Description: OJ1136_A10.14 [Oryza sativa (japonica
  misc_feature (1)..(246): Homolog of NCBI NO: 26451139 NR Description: putative subtilisin-like protease [Arabidopsis
  misc_feature (1)..(249): Homolog of NCBI NO: 20198252 NR Description: subtilisin-like serine protease AIR3 [Arabidopsis
  misc_feature (1)..(265): Homolog of NCBI NO: 30697281 NR Description: subtilisin-like serine protease [Arabidopsis
  misc_feature (1)..(265): Homolog of NCBI NO: 9757901 NR Description: serine protease-like protein [Arabidopsis
  misc_feature (1)..(265): Homolog of NCBI NO: 11358862 NR Description: subtilisin-like proteinase AIR3, auxin-induced
  misc_feature (1)..(265): Homolog of NCBI NO: 22325457 NR Description: subtilisin-like serine protease AIR3 [Arabidopsis
  misc_feature (1)..(265): Homolog of NCBI NO: 20198169 NR Description: subtilisin-like serine protease AIR3 [Arabidopsis
  misc_feature (1)..(265): Homolog of NCBI NO: 15010692 NR Description: At2g04160/T16B23.1 [Arabidopsis thaliana]
  misc_feature (26)..(266): Homolog of NCBI NO: 28912766 NR Description: subtilisin-like seed-specific protein [Arachis
MAAFSSKGPNTMVPEILKPDITAPGVSVIAAYTEAQGPTNQVFDKRRIPFNSVSGTSMSCPHVSGIVGLLRALYPTWSTAAIKSAIMTTATTLDNEVEPLLNATDGKATPFSYGAGHVQPNRAMDPGLVYDITIDDYLNFLCALGYNETQISVFTEGPYKCRKKFSLLNLNYPSITVPKLSGSVTVTRTLKNVGSPGTYIAHVQNPYGITVSVKPSILKFKNVGEEKSFKLTFKAMQGKATNNYAFGKLIWSDGKHYVTSPIVVKALLTRN

SEQ ID NO: 59701 - protein, 260 aa, Glycine max
  peptide (1)..(260): Ceres Seq. ID no. 15176097
  misc_feature (151)..(253): Pfam Name: Domain of Unknown Function (DUF1034) Pfam Description: Domain of Unknown Function (DUF1034)
  misc_feature (1)..(256): Homolog of NCBI NO: 24414066 NR Description: OJ1136_A10.14 [Oryza sativa (japonica
  misc_feature (1)..(235): Homolog of NCBI NO: 26451139 NR Description: putative subtilisin-like protease [Arabidopsis
  misc_feature (1)..(238): Homolog of NCBI NO: 20198252 NR Description: subtilisin-like serine protease AIR3 [Arabidopsis
  misc_feature (1)..(254): Homolog of NCBI NO: 30697281 NR Description: subtilisin-like serine protease [Arabidopsis
  misc_feature (1)..(254): Homolog of NCBI NO: 9757901 NR Description: serine protease-like protein [Arabidopsis
  misc_feature (1)..(254): Homolog of NCBI NO: 11358862 NR Description: subtilisin-like proteinase AIR3, auxin-induced
  misc_feature (1)..(254): Homolog of NCBI NO: 22325457 NR Description: subtilisin-like serine protease AIR3 [Arabidopsis
  misc_feature (1)..(254): Homolog of NCBI NO: 20198169 NR Description: subtilisin-like serine protease AIR3 [Arabidopsis
  misc_feature (1)..(254): Homolog of NCBI NO: 15010692 NR Description: At2g04160/T16B23.1 [Arabidopsis thaliana]
  misc_feature (15)..(255): Homolog of NCBI NO: 28912766 NR Description: subtilisin-like seed-specific protein [Arachis
MVPEILKPDITAPGVSVIAAYTEAQGPTNQVFDKRRIPFNSVSGTSMSCPHVSGIVGLLRALYPTWSTAAIKSAIMTTATTLDNEVEPLLNATDGKATPFSYGAGHVQPNRAMDPGLVYDITIDDYLNFLCALGYNETQISVFTEGPYKCRKKFSLLNLNYPSITVPKLSGSVTVTRTLKNVGSPGTYIAHVQNPYGITVSVKPSILKFKNVGEEKSFKLTFKAMQGKATNNYAFGKLIWSDGKHYVTSPIVVKALLTRN

SEQ ID NO: 59702 - protein, 214 aa, Glycine max
  peptide (1)..(214): Ceres Seq. ID no. 15176098
  misc_feature (105)..(207): Pfam Name: Domain of Unknown Function (DUF1034) Pfam Description: Domain of Unknown Function (DUF1034)
  misc_feature (1)..(210): Homolog of NCBI NO: 24414066 NR Description: OJ1136_A10.14 [Oryza sativa (japonica
  misc_feature (1)..(189): Homolog of NCBI NO: 26451139 NR Description: putative subtilisin-like protease [Arabidopsis
  misc_feature (1)..(192): Homolog of NCBI NO: 20198252 NR Description: subtilisin-like serine protease AIR3 [Arabidopsis
  misc_feature (1)..(208): Homolog of NCBI NO: 30697281 NR Description: subtilisin-like serine protease [Arabidopsis
  misc_feature (1)..(208): Homolog of NCBI NO: 9757901 NR Description: serine protease-like protein [Arabidopsis
  misc_feature (1)..(208): Homolog of NCBI NO: 11358862 NR Description: subtilisin-like proteinase AIR3, auxin-induced
  misc_feature (1)..(208): Homolog of NCBI NO: 20198169 NR Description: subtilisin-like serine protease AIR3 [Arabidopsis
  misc_feature (1)..(208): Homolog of NCBI NO: 22325457 NR Description: subtilisin-like serine protease AIR3 [Arabidopsis
  misc_feature (1)..(208): Homolog of NCBI NO: 15010692 NR Description: At2g04160/T16B23.1 [Arabidopsis thaliana]
  misc_feature (1)..(209): Homolog of NCBI NO: 28912766 NR Description: subtilisin-like seed-specific protein [Arachis
MSCPHVSGIVGLLRALYPTWSTAAIKSAIMTTATTLDNEVEPLLNATDGKATPFSYGAGHVQPNRAMDPGLVYDITIDDYLNFLCALGYNETQISVFTEGPYKCRKKFSLLNLNYPSITVPKLSGSVTVTRTLKNVGSPGTYIAHVQNPYGITVSVKPSILKFKNVGEEKSFKLTFKAMQGKATNNYAFGKLIWSDGKHYVTSPIVVKALLTRN

SEQ ID NO: 59703 - DNA, 1687 bp, Glycine max
  misc_feature (1)..(1687): Ceres Seq. ID no. 15172274
aaagctcaaagatatacacaaaaataaatcaccaatattttagaagaataaataaaagggttgtctcatggctgaggagtttcaagctaggatttgtggtgaaaactggtggagtagtaccactattgattcaacaagaagtactgtgttgttccctctaagttcatcatcatcatcatcatctatatcttcttctccttgttccgtggcagctaataattatgatgcaggaaactatagcactaggggaactagtgacatggatttgaaggcaacaaagtgttgtgctgaagagactaataacagtttggtttctgacactacttacctgggttttgttgatgcacacaagccacataagagtgaatcagcagctagtggaagtggtggcatgttgaccgattccaccttgcagatgatgggttttggcctcacatcatcatcagagaattggaatcagcctctattatttcgatgtaatggaagggcagagagcaatttccactccttgattcaggaagaaacgggaatagattcttctaattcacaaatccatagggattggatcccaaagagcttctcctctgacggtggcaaacaacaaattgatgataataatttcaagccattattattgaaccaacaagaattttcattagatgaccatagtctaagttctttaaccaccgctgggttatcatcaaaccgtggattccccaatggatcagcctcatcatatggtaacccttcaacgttgcaaagtttatatgaccctaattataatcctcatccacaacactcacttttcaccaaccgtccgatgtcctattcatcaaaagcatgttatgggacaccatgcactgaactgccaacattgtctaaagcttccactttttttaagcccacaaccacaacaattgcaaagcagcaacaccctaatattggacttcacttttcaaacaacactcctttctggaatgcttccgccgaggcacttcacgacataagagtaggtacctttgcttcaacacaatcacaatatcaaaggccaacctttgatgatgaagagaaacccaatttcccaattactctattaaacaggctcaatagtgaagaaattctagagttggcatcaatggctaagaaaaatgtttgtgaaccagcattaaagaggccaagaattgaaactccatctccattaccaactttcaaggttcggaaagagaagctaggggaccgggtcactgctcttcagcaattggtttcacctttcggaaagaccgacacagcatccgttcttcacgaagccatcgagtacattaagttccttcatgatcaagtcaatgttttgagtacttcatatatgaaaaatggagctcccactcaacagcagcagggctgtgatgatctgaaagactcagaaggaccacaacaagatttaaaaagcaaagggctgtgtctggtaccgatttcaagcacatttccagtggcaacaggagccactagtgctgatcaattgtggacgcctacattcagaggcgcactcttaaggtagagaagggctaataaagccaaagagactcaaccagtggagaaaaattgatgacgtattattaactattgcatgtgtaaaaggatggtgaagcaaatgtgaagccacagtttgatgatgagaaaaaagctgaat

SEQ ID NO: 59704 - protein, 495 aa, Glycine max
  peptide (1)..(495): Ceres Seq. ID no. 15172275
  misc_feature (384)..(421): Pfam Name: Helix-loop-helix DNA-binding domain Pfam Description: Helix-loop-helix DNA-binding domain
  misc_feature (364)..(495): Homolog of NCBI NO: 22093671 NR Description: bHLH transcription factor-like protein
  misc_feature (341)..(444): Homolog of NCBI NO: 34910130 NR Description: B1070A12.8 [Oryza sativa (japonica
  misc_feature (325)..(485): Homolog of NCBI NO: 22328848 NR Description: expressed protein [Arabidopsis thaliana]
  misc_feature (367)..(484): Homolog of NCBI NO: 15234636 NR Description: hypothetical protein [Arabidopsis thaliana]
  misc_feature (296)..(480): Homolog of NCBI NO: 25404333 NR Description: hypothetical protein T13M11.1 [imported] -
  misc_feature (296)..(443): Homolog of NCBI NO: 30696595 NR Description: expressed protein [Arabidopsis thaliana]
  misc_feature (120)..(491): Homolog of NCBI NO: 15232315 NR Description: bHLH transcription factor (bHLH123) -related
  misc_feature (120)..(491): Homolog of NCBI NO: 9294343 NR Description: gene_id:F3H11.2~unknown protein [Arabidopsis
  misc_feature (296)..(491): Homolog of NCBI NO: 21553730 NR Description: unknown [Arabidopsis thaliana]
  misc_feature (296)..(491): Homolog of NCBI NO: 18407276 NR Description: expressed protein [Arabidopsis thaliana]
MAEEFQARICGENWWSSTTIDSTRSTVLFPLSSSSSSSSISSSPCSVAANNYDAGNYSTRGTSDMDLKATKCCAEETNNSLVSDTTYLGFVDAHKPHKSESAASGSGGMLTDSTLQMMGFGLTSSSENWNQPLLFRCNGRAESNFHSLIQEETGIDSSNSQIHRDWIPKSFSSDGGKQQIDDNNFKPLLLNQQEFSLDDHSLSSLTTAGLSSNRGFPNGSASSYGNPSTLQSLYDPNYNPHPQHSLFTNRPMSYSSKACYGTPCTELPTLSKASTFFKPTTTTIAKQQHPNIGLHFSNNTPFWNASAEALHDIRVGTFASTQSQYQRPTFDDEEKPNFPITLLNRLNSEEILELASMAKKNVCEPALKRPRIETPSPLPTFKVRKEKLGDRVTALQQLVSPFGKTDTASVLHEAIEYIKFLHDQVNVLSTSYMKNGAPTQQQQGCDDLKDSEGPQQDLKSKGLCLVPISSTFPVATGATSADQLWTPTFRGALLR

SEQ ID NO: 59705 - protein, 431 aa, Glycine max
  peptide (1)..(431): Ceres Seq. ID no. 15172276
  misc_feature (320)..(357): Pfam Name: Helix-loop-helix DNA-binding domain Pfam Description: Helix-loop-helix DNA-binding domain
  misc_feature (300)..(431): Homolog of NCBI NO: 22093671 NR Description: bHLH transcription factor-like protein
  misc_feature (277)..(380): Homolog of NCBI NO: 34910130 NR Description: B1070A12.8 [Oryza sativa (japonica
  misc_feature (261)..(421): Homolog of NCBI NO: 22328848 NR Description: expressed protein [Arabidopsis thaliana]
  misc_feature (303)..(420): Homolog of NCBI NO: 15234636 NR Description: hypothetical protein [Arabidopsis thaliana]
  misc_feature (232)..(416): Homolog of NCBI NO: 25404333 NR Description: hypothetical protein T13M11.1 [imported] -
  misc_feature (232)..(379): Homolog of NCBI NO: 30696595 NR Description: expressed protein [Arabidopsis thaliana]
  misc_feature (56)..(427): Homolog of NCBI NO: 15232315 NR Description: bHLH transcription factor (bHLH123) -related
  misc_feature (56)..(427): Homolog of NCBI NO: 9294343 NR Description: gene_id:F3H11.2~unknown protein [Arabidopsis
  misc_feature (232)..(427): Homolog of NCBI NO: 21553730 NR Description: unknown [Arabidopsis thaliana]
  misc_feature (232)..(427): Homolog of NCBI NO: 18407276 NR Description: expressed protein [Arabidopsis thaliana]
MDLKATKCCAEETNNSLVSDTTYLGFVDAHKPHKSESAASGSGGMLTDSTLQMMGFGLTSSSENWNQPLLFRCNGRAESNFHSLIQEETGIDSSNSQIHRDWIPKSFSSDGGKQQIDDNNFKPLLLNQQEFSLDDHSLSSLTTAGLSSNRGFPNGSASSYGNPSTLQSLYDPNYNPHPQHSLFTNRPMSYSSKACYGTPCTELPTLSKASTFFKPTTTTIAKQQHPNIGLHFSNNTPFWNASAEALHDIRVGTFASTQSQYQRPTFDDEEKPNFPITLLNRLNSEEILELASMAKKNVCEPALKRPRIETPSPLPTFKVRKEKLGDRVTALQQLVSPFGKTDTASVLHEAIEYIKFLHDQVNVLSTSYMKNGAPTQQQQGCDDLKDSEGPQQDLKSKGLCLVPISSTFPVATGATSADQLWTPTFRGALLR

SEQ ID NO: 59706 - protein, 387 aa, Glycine max
  peptide (1)..(387): Ceres Seq. ID no. 15172277
  misc_feature (276)..(313): Pfam Name: Helix-loop-helix DNA-binding domain Pfam Description: Helix-loop-helix DNA-binding domain
  misc_feature (256)..(387): Homolog of NCBI NO: 22093671 NR Description: bHLH transcription factor-like protein
  misc_feature (233)..(336): Homolog of NCBI NO: 34910130 NR Description: B1070A12.8 [Oryza sativa (japonica
  misc_feature (217)..(377): Homolog of NCBI NO: 22328848 NR Description: expressed protein [Arabidopsis thaliana]
  misc_feature (259)..(376): Homolog of NCBI NO: 15234636 NR Description: hypothetical protein [Arabidopsis thaliana]
  misc_feature (188)..(372): Homolog of NCBI NO: 25404333 NR Description: hypothetical protein T13M11.1 [imported] -
  misc_feature (188)..(335): Homolog of NCBI NO: 30696595 NR Description: expressed protein [Arabidopsis thaliana]
  misc_feature (12)..(383): Homolog of NCBI NO: 15232315 NR Description: bHLH transcription factor (bHLH123) -related
  misc_feature (12)..(383): Homolog of NCBI NO: 9294343 NR Description: gene_id:F3H11.2~unknown protein [Arabidopsis
  misc_feature (188)..(383): Homolog of NCBI NO: 21553730 NR Description: unknown [Arabidopsis thaliana]
  misc_feature (188)..(383): Homolog of NCBI NO: 18407276 NR Description: expressed protein [Arabidopsis thaliana]
MLTDSTLQMMGFGLTSSSENWNQPLLFRCNGRAESNFHSLIQEETGIDSSNSQIHRDWIPKSFSSDGGKQQIDDNNFKPLLLNQQEFSLDDHSLSSLTTAGLSSNRGFPNGSASSYGNPSTLQSLYDPNYNPHPQHSLFTNRPMSYSSKACYGTPCTELPTLSKASTFFKPTTTTIAKQQHPNIGLHFSNNTPFWNASAEALHDIRVGTFASTQSQYQRPTFDDEEKPNFPITLLNRLNSEEILELASMAKKNVCEPALKRPRIETPSPLPTFKVRKEKLGDRVTALQQLVSPFGKTDTASVLHEAIEYIKFLHDQVNVLSTSYMKNGAPTQQQQGCDDLKDSEGPQQDLKSKGLCLVPISSTFPVATGATSADQLWTPTFRGALLR

SEQ ID NO: 59707 - DNA, 1392 bp, Glycine max
  misc_feature (1)..(1392): Ceres Seq. ID no. 14307131
aaacaatttggaactccatgttaatcttcactcaattagattcagaataactttctgtctctcctacatactagcacatctctcatatttgtatgttaactacattcagaaaccatgaaatgtagtttcctggaaggaaaaacaatggaaattttcttagattttgagttgcagacagaactggctgggattctaaaagattatgttggccgggagagtcctctttattttgctgaaaggttgacggagcattacaagaggcctaatggtgaaggacctcacatttatctgaagagggaagatctcaatcacactggggctcacaaaattaataatgctgttgctcaagctttgcttgctaagagattgggcaaaaaacgcattattgctgaaactggagcgggtcagcatggagttgccactgctactgtatgtgctcgatttggtttagaatgcattatttatatgggtgcgcaggatatggaaaggcaggctctcaatgttttcagaatgcgtcttctcggtgctgaggtgagaccagtccattctgggactgctacacttaaggatgcgacatcagaggctataagggactgggtgactaatgtggagacaactcattatattttggggtctgttgctgggccgcatccatatccaatgatggtaagagagtttcatgctgtgattggcaaggagaccagaaagcaagctttggagaagtggggagggaaaccagatgtcttgattgcatgtgttggtggaggttcaaatgccataggacttttcaatgaatttgttgatgacaaagatgtaaggctaattggtgtggaggctgctggatttggcctggacagcggcaagcatgctgcaaccttaacaaaaggagaagttggggttttgcatggagctatgagctatctgctgcaggatgatgatggacaaatagttgagcctcactctattagtgcaggcttggactaccctggtgtgggtccggaacatagctttttgaaagatttagggcgtgctgaatatcatagtatcacagatgaagaagcattggaagcttttaagagagtttcgcgacttgaaggcataattcctgcactggaaacatctcatgcattggcatatctagagaaagtgtgtccaacccttgctaatggagccaaggttgtggttaacttcagtggccggggtgataaggatgttcaaactgctatcaagtacttgaagctttgaaaggatcaaaacttgctgagtgagcttcattttcatacttagagacataattaatacaatttattattagaccaagttaaatagtcatgtatatttgcatcagagaactgttgctattcaatcctcaataaacttagtttatgttac

SEQ ID NO: 59708 - protein, 376 aa, Glycine max
  peptide (1)..(376): Ceres Seq. ID no. 14307132
  misc_feature (28)..(362): Pfam Name: Pyridoxal-phosphate dependent enzyme Pfam Description: Pyridoxal-phosphate dependent enzyme
  misc_feature (16)..(374): Homolog of NCBI NO: 17227906 NR Description: tryptophan synthase beta subunit [Nostoc sp. PCC
  misc_feature (20)..(374): Homolog of NCBI NO: 17231286 NR Description: tryptophan synthase beta subunit [Nostoc sp. PCC
  misc_feature (4)..(374): Homolog of NCBI NO: 7437014 NR Description: probable tryptophan synthase (EC 4.2.1.20) beta
  misc_feature (6)..(374): Homolog of NCBI NO: 1174778 NR Description: Tryptophan synthase beta chain 1 (Orange pericarp
  misc_feature (6)..(374): Homolog of NCBI NO: 1174780 NR Description: Tryptophan synthase beta chain 2, chloroplast
  misc_feature (6)..(374): Homolog of NCBI NO: 18481702 NR Description: tryptophan synthase beta-subunit [Sorghum bicolor]
  misc_feature (6)..(376): Homolog of NCBI NO: 3915165 NR Description: Tryptophan synthase beta chain 2, chloroplast
  misc_feature (4)..(376): Homolog of NCBI NO: 15236977 NR Description: tryptophan synthase, beta subunit 2 (TSB2)
  misc_feature (4)..(376): Homolog of NCBI NO: 81661 NR Description: tryptophan synthase (EC 4.2.1.20) beta-2 chain
  misc_feature (4)..(374): Homolog of NCBI NO: 15239755 NR Description: tryptophan synthase, beta subunit 1 (TSB1)
MKCSFLEGKTMEIFLDFELQTELAGILKDYVGRESPLYFAERLTEHYKRPNGEGPHIYLKREDLNHTGAHKINNAVAQALLAKRLGKKRIIAETGAGQHGVATATVCARFGLECIIYMGAQDMERQALNVFRMRLLGAEVRPVHSGTATLKDATSEAIRDWVTNVETTHYILGSVAGPHPYPMMVREFHAVIGKETRKQALEKWGGKPDVLIACVGGGSNAIGLFNEFVDDKDVRLIGVEAAGFGLDSGKHAATLTKGEVGVLHGAMSYLLQDDDGQIVEPHSISAGLDYPGVGPEHSFLKDLGRAEYHSITDEEALEAFKRVSRLEGIIPALETSHALAYLEKVCPTLANGAKVVVNFSGRGDKDVQTAIKYLKL

SEQ ID NO: 59709 - protein, 366 aa, Glycine max
  peptide (1)..(366): Ceres Seq. ID no. 14307133
  misc_feature (18)..(352): Pfam Name: Pyridoxal-phosphate dependent enzyme Pfam Description: Pyridoxal-phosphate dependent enzyme
  misc_feature (6)..(364): Homolog of NCBI NO: 17227906 NR Description: tryptophan synthase beta subunit [Nostoc sp. PCC
  misc_feature (10)..(364): Homolog of NCBI NO: 17231286 NR Description: tryptophan synthase beta subunit [Nostoc sp. PCC
  misc_feature (1)..(364): Homolog of NCBI NO: 7437014 NR Description: probable tryptophan synthase (EC 4.2.1.20) beta
  misc_feature (1)..(364): Homolog of NCBI NO: 1174778 NR Description: Tryptophan synthase beta chain 1 (Orange pericarp
  misc_feature (1)..(364): Homolog of NCBI NO: 1174780 NR Description: Tryptophan synthase beta chain 2, chloroplast
  misc_feature (1)..(364): Homolog of NCBI NO: 18481702 NR Description: tryptophan synthase beta-subunit [Sorghum bicolor]
  misc_feature (1)..(366): Homolog of NCBI NO: 3915165 NR Description: Tryptophan synthase beta chain 2, chloroplast
  misc_feature (1)..(366): Homolog of NCBI NO: 15236977 NR Description: tryptophan synthase, beta subunit 2 (TSB2)
  misc_feature (1)..(366): Homolog of NCBI NO: 81661 NR Description: tryptophan synthase (EC 4.2.1.20) beta-2 chain
  misc_feature (1)..(364): Homolog of NCBI NO: 15239755 NR Description: tryptophan synthase, beta subunit 1 (TSB1)
MEIFLDFELQTELAGILKDYVGRESPLYFAERLTEHYKRPNGEGPHIYLKREDLNHTGAHKINNAVAQALLAKRLGKKRIIAETGAGQHGVATATVCARFGLECIIYMGAQDMERQALNVFRMRLLGAEVRPVHSGTATLKDATSEAIRDWVTNVETTHYILGSVAGPHPYPMMVREFHAVIGKETRKQALEKWGGKPDVLIACVGGGSNAIGLFNEFVDDKDVRLIGVEAAGFGLDSGKHAATLTKGEVGVLHGAMSYLLQDDDGQIVEPHSISAGLDYPGVGPEHSFLKDLGRAEYHSITDEEALEAFKRVSRLEGIIPALETSHALAYLEKVCPTLANGAKVVVNFSGRGDKDVQTAIKYLKL

SEQ ID NO: 59710 - protein, 259 aa, Glycine max
  peptide (1)..(259): Ceres Seq. ID no. 14307134
  misc_feature (1)..(245): Pfam Name: Pyridoxal-phosphate dependent enzyme Pfam Description: Pyridoxal-phosphate dependent enzyme
  misc_feature (1)..(257): Homolog of NCBI NO: 17227906 NR Description: tryptophan synthase beta subunit [Nostoc sp. PCC
  misc_feature (1)..(257): Homolog of NCBI NO: 17231286 NR Description: tryptophan synthase beta subunit [Nostoc sp. PCC
  misc_feature (1)..(257): Homolog of NCBI NO: 7437014 NR Description: probable tryptophan synthase (EC 4.2.1.20) beta
  misc_feature (1)..(257): Homolog of NCBI NO: 1174778 NR Description: Tryptophan synthase beta chain 1 (Orange pericarp
  misc_feature (1)..(257): Homolog of NCBI NO: 1174780 NR Description: Tryptophan synthase beta chain 2, chloroplast
  misc_feature (1)..(257): Homolog of NCBI NO: 18481702 NR Description: tryptophan synthase beta-subunit [Sorghum bicolor]
  misc_feature (1)..(259): Homolog of NCBI NO: 3915165 NR Description: Tryptophan synthase beta chain 2, chloroplast
  misc_feature (1)..(259): Homolog of NCBI NO: 15236977 NR Description: tryptophan synthase, beta subunit 2 (TSB2)
  misc_feature (1)..(259): Homolog of NCBI NO: 81661 NR Description: tryptophan synthase (EC 4.2.1.20) beta-2 chain
  misc_feature (1)..(257): Homolog of NCBI NO: 15239755 NR Description: tryptophan synthase, beta subunit 1 (TSB1)
MGAQDMERQALNVFRMRLLGAEVRPVHSGTATLKDATSEAIRDWVTNVETTHYILGSVAGPHPYPMMVREFHAVIGKETRKQALEKWGGKPDVLIACVGGGSNAIGLFNEFVDDKDVRLIGVEAAGFGLDSGKHAATLTKGEVGVLHGAMSYLLQDDDGQIVEPHSISAGLDYPGVGPEHSFLKDLGRAEYHSITDEEALEAFKRVSRLEGIIPALETSHALAYLEKVCPTLANGAKVVVNFSGRGDKDVQTAIKYLKL

SEQ ID NO: 59711 - DNA, 965 bp, Glycine max
  misc_feature (1)..(965): Ceres Seq. ID no. 15169786
agtacagcaaatgccaaaagccaagttaattccctttctccactcttcacaaacacaaacacacgtattctcttgcaaaactaagaatgaaggaggagttggtggttgaagaagggtaccttttcaaagaagagactcacttcacagtgctcaaaacctctctcttcttcaacggtgatggcttcgctgtctacgattgcaaaggccaactcgttttccgcttcgactcctacggtccccgcgcgcgtgacaaggacgagctcgttctcatggatccccatggccgttctcttctcactctccgccgaaagaaaccgagtcttcatcaacgctgggaaggcttcaaaggggagagaacggagggtcataaacccattttcagcgtcaagagatcgtcgatcatcggacggtcgaggaccagcgtggcggtggaggtgtacgatagccccggtgtggagtacctcatcgaaggttgcttcccgcagcgctgctgcaaggttttcaatgccgctaaggaacttgtggctgagattcgtcgcaaagtggaccccaccaccagcgttatgctcgggaaggaagtcttttggctctgcgtgaagcctggtttcgatgcggcctttgccatgggattggtattggtacttgatcagatcaacggtgagaattactttgatgatagaatcttggagccctcggtgcaccctgctgcagaagatctgggatttgtttcaccggttccagtttgagattatcagatttgtcttgttttctgattctgacgttttactcactgatcgttggagtgttccctctcaaagggttttctttctctctgcccttttttttttatggctcatctcgttttttttttgtaaaaaaaaaaataatgatgatgttctggatcataatcactatgcgatcttgtacattctatatgcattgaaagttaaagataaacttatctt

SEQ ID NO: 59712 - protein, 219 aa, Glycine max
  peptide (1)..(219): Ceres Seq. ID no. 15169787
  misc_feature (5)..(185): Pfam Name: Protein of unknown function (DUF567) Pfam Description: Protein of unknown function (DUF567)
  misc_feature (11)..(172): Homolog of NCBI NO: 18404685 NR Description: hypothetical protein [Arabidopsis thaliana]
  misc_feature (14)..(191): Homolog of NCBI NO: 34909256 NR Description: B1148D12.16 [Oryza sativa (japonica
  misc_feature (17)..(189): Homolog of NCBI NO: 27542765 NR Description: hypothetical protein-like protein [Sorghum
  misc_feature (20)..(189): Homolog of NCBI NO: 27542769 NR Description: hypothetical protein-like protein [Sorghum
  misc_feature (1)..(189): Homolog of NCBI NO: 15224921 NR Description: expressed protein [Arabidopsis thaliana]
  misc_feature (127)..(192): Homolog of NCBI NO: 34909922 NR Description: P0665A11.21 [Oryza sativa (japonica
  misc_feature (6)..(138): Homolog of NCBI NO: 34909922 NR Description: P0665A11.21 [Oryza sativa (japonica
  misc_feature (1)..(211): Homolog of NCBI NO: 15220064 NR Description: expressed protein [Arabidopsis thaliana]
  misc_feature (1)..(210): Homolog of NCBI NO: 21554362 NR Description: unknown [Arabidopsis thaliana]
  misc_feature (1)..(210): Homolog of NCBI NO: 18400907 NR Description: expressed protein [Arabidopsis thaliana]
MKEELVVEEGYLFKEETHFTVLKTSLFFNGDGFAVYDCKGQLVFRFDSYGPRARDKDELVLMDPHGRSLLTLRRKKPSLHQRWEGFKGERTEGHKPIFSVKRSSIIGRSRTSVAVEVYDSPGVEYLIEGCFPQRCCKVFNAAKELVAEIRRKVDPTTSVMLGKEVFWLCVKPGFDAAFAMGLVLVLDQINGENYFDDRILEPSVHPAAEDLGFVSPVPV

SEQ ID NO: 59713 - protein, 158 aa, Glycine max
  peptide (1)..(158): Ceres Seq. ID no. 15169788
  misc_feature (1)..(124): Pfam Name: Protein of unknown function (DUF567) Pfam Description: Protein of unknown function (DUF567)
  misc_feature (1)..(111): Homolog of NCBI NO: 18404685 NR Description: hypothetical protein [Arabidopsis thaliana]
  misc_feature (1)..(130): Homolog of NCBI NO: 34909256 NR Description: B1148D12.16 [Oryza sativa (japonica
  misc_feature (1)..(128): Homolog of NCBI NO: 27542765 NR Description: hypothetical protein-like protein [Sorghum
  misc_feature (1)..(128): Homolog of NCBI NO: 27542769 NR Description: hypothetical protein-like protein [Sorghum
  misc_feature (1)..(128): Homolog of NCBI NO: 15224921 NR Description: expressed protein [Arabidopsis thaliana]
  misc_feature (66)..(131): Homolog of NCBI NO: 34909922 NR Description: P0665A11.21 [Oryza sativa (japonica
  misc_feature (1)..(77): Homolog of NCBI NO: 34909922 NR Description: P0665A11.21 [Oryza sativa (japonica
  misc_feature (1)..(150): Homolog of NCBI NO: 15220064 NR Description: expressed protein [Arabidopsis thaliana]
  misc_feature (1)..(149): Homolog of NCBI NO: 21554362 NR Description: unknown [Arabidopsis thaliana]
  misc_feature (1)..(149): Homolog of NCBI NO: 18400907 NR Description: expressed protein [Arabidopsis thaliana]
MDPHGRSLLTLRRKKPSLHQRWEGFKGERTEGHKPIFSVKRSSIIGRSRTSVAVEVYDSPGVEYLIEGCFPQRCCKVFNAAKELVAEIRRKVDPTTSVMLGKEVFWLCVKPGFDAAFAMGLVLVLDQINGENYFDDRILEPSVHPAAEDLGFVSPVPV

SEQ ID NO: 59714 - protein, 139 aa, Glycine max
  peptide (1)..(139): Ceres Seq. ID no. 15169789
MASLSTIAKANSFSASTPTVPARVTRTSSFSWIPMAVLFSLSAERNRVFINAGKASKGRERRVINPFSASRDRRSSDGRGPAWRWRCTIAPVWSTSSKVASRSAAARFSMPLRNLWLRFVAKWTPPPALCSGRKSFGSA

SEQ ID NO: 59715 - DNA, 1346 bp, Glycine max
  misc_feature (1)..(1346): Ceres Seq. ID no. 14310390
gaaatgagtttcttcgatttcatcgtgttgatgatagggtcgctctttctgttcaaagctttcgattttactttctgtgtctttcttctgcttcttttgattcccccaaatcttcagttttaaaaaccctaatctgctgccatgaggaagaagctcgatacccgtttccctgctgctcggataaagaagataatgcaggcagatgaggatgttggaaagatagcactggctgtgcctgttttagtttctaaagctctagaactatttttgcaagatctttgtgaccgcacttatgaaataactcttcaaagaggagcgaagaccatgaattcattgcatttaaaacattgtgtacaaagctataatgtctttgactttctgagggacgttgttagcagggttcctgactacggccatggccatggccatgctgaggctggtcctgatgatcgggtcattacaaaaagaaggaaagctattggtgatgatggtaatgacagcgatgaagaggctaagaggagcaagatgcttgagttgggccacactggcagtactggtaggggaagaggccgaggtagaggaagaggccgtggccgagggcgaccacctttaaatagagagacatatcatcaagatgctgaatctgagccttgcacttctgttcagccgagcaacccacaaaatacaaacacaagtatagcaatggataatggttctgagtcaaaggagataccaaaggaggagaatattgcagctcccgttgttcctgttgtaagcacggattccctccggaacattgatctgaatgccatcacgaatgaaaacgatgacaaaaaggctagtgcagaagctgatgcctccgcctcggtgcctgaacctgatgcctcattgcctgaacccccaacagagagcaagcatgaagaaattccggggtggtcactttctgatgtggacaagatggccattgattcactgcagcttgcacaacttggtaggccactagaagaggaggaggaagactatgatgaagaggaggggtaaatattattagtctttggtgattagattagtgaaaagttcatcatgataactgtagaataagtacatactagtgttatgattatgagtatccactagctgtcaatgcatgtaccatgttgttggctgaagaaagatctgaatgccccttttcattaatctggtttgtatgtggagctgatttatcttccccttgaccagtaatgttagcttcgtgtacttttaggcctacaatgtatatcacaattctagattgagttaaatttttgcatgcaaactttgtttaatattgctgcaaataactatac

SEQ ID NO: 59716 - protein, 299 aa, Glycine max
  peptide (1)..(299): Ceres Seq. ID no. 14310391
  misc_feature (7)..(71): Pfam Name: Histone-like transcription factor (CBF/NF-Y) and Pfam Description: Histone-like transcription factor (CBF/NF-Y)
  misc_feature (2)..(173): Homolog of NCBI NO: 10242351 NR Description: NC2alpha [Drosophila melanogaster]
  misc_feature (2)..(129): Homolog of NCBI NO: 28279647 NR Description: Similar to Dr1 associated protein 1 (negative
  misc_feature (2)..(137): Homolog of NCBI NO: 18426973 NR Description: DR1-associated protein 1
  misc_feature (2)..(179): Homolog of NCBI NO: 21313424 NR Description: Dr1 associated protein 1 (negative cofactor 2
  misc_feature (2)..(137): Homolog of NCBI NO: 27661225 NR Description: similar to RIKEN cDNA 2310074H19
  misc_feature (29)..(276): Homolog of NCBI NO: 15239766 NR Description: hypothetical protein [Arabidopsis thaliana]
  misc_feature (1)..(160): Homolog of NCBI NO: 18481624 NR Description: repressor protein [Oryza sativa]
  misc_feature (1)..(223): Homolog of NCBI NO: 18481626 NR Description: repressor protein [Zea mays]
  misc_feature (12)..(297): Homolog of NCBI NO: 12321975 NR Description: unknown protein; 69004-67516 [Arabidopsis
  misc_feature (1)..(297): Homolog of NCBI NO: 30682195 NR Description: transcription factor Hap5a, putative [Arabidopsis
MRKKLDTRFPAARIKKIMQADEDVGKIALAVPVLVSKALELFLQDLCDRTYEITLQRGAKTMNSLHLKHCVQSYNVFDFLRDVVSRVPDYGHGHGHAEAGPDDRVITKRRKAIGDDGNDSDEEAKRSKMLELGHTGSTGRGRGRGRGRGRGRGRPPLNRETYHQDAESEPCTSVQPSNPQNTNTSIAMDNGSESKEIPKEENIAAPVVPVVSTDSLRNIDLNAITNENDDKKASAEADASASVPEPDASLPEPPTESKHEEIPGWSLSDVDKMAIDSLQLAQLGRPLEEEEEDYDEEEG

SEQ ID NO: 59717 - protein, 282 aa, Glycine max
  peptide (1)..(282): Ceres Seq. ID no. 14310392
  misc_feature (1)..(54): Pfam Name: Histone-like transcription factor (CBF/NF-Y) and Pfam Description: Histone-like transcription factor (CBF/NF-Y)
  misc_feature (1)..(156): Homolog of NCBI NO: 10242351 NR Description: NC2alpha [Drosophila melanogaster]
  misc_feature (1)..(112): Homolog of NCBI NO: 28279647 NR Description: Similar to Dr1 associated protein 1 (negative
  misc_feature (1)..(120): Homolog of NCBI NO: 18426973 NR Description: DR1-associated protein 1
  misc_feature (1)..(162): Homolog of NCBI NO: 21313424 NR Description: Dr1 associated protein 1 (negative cofactor 2
  misc_feature (1)..(120): Homolog of NCBI NO: 27661225 NR Description: similar to RIKEN cDNA 2310074H19
  misc_feature (12)..(259): Homolog of NCBI NO: 15239766 NR Description: hypothetical protein [Arabidopsis thaliana]
  misc_feature (1)..(143): Homolog of NCBI NO: 18481624 NR Description: repressor protein [Oryza sativa]
  misc_feature (1)..(206): Homolog of NCBI NO: 18481626 NR Description: repressor protein [Zea mays]
  misc_feature (1)..(280): Homolog of NCBI NO: 12321975 NR Description: unknown protein; 69004-67516 [Arabidopsis
  misc_feature (1)..(280): Homolog of NCBI NO: 30682195 NR Description: transcription factor Hap5a, putative [Arabidopsis
MQADEDVGKIALAVPVLVSKALELFLQDLCDRTYEITLQRGAKTMNSLHLKHCVQSYNVFDFLRDVVSRVPDYGHGHGHAEAGPDDRVITKRRKAIGDDGNDSDEEAKRSKMLELGHTGSTGRGRGRGRGRGRGRGRPPLNRETYHQDAESEPCTSVQPSNPQNTNTSIAMDNGSESKEIPKEENIAAPVVPVVSTDSLRNIDLNAITNENDDKKASAEADASASVPEPDASLPEPPTESKHEEIPGWSLSDVDKMAIDSLQLAQLGRPLEEEEEDYDEEEG

SEQ ID NO: 59718 - protein, 238 aa, Glycine max
  peptide (1)..(238): Ceres Seq. ID no. 14310393
  misc_feature (1)..(112): Homolog of NCBI NO: 10242351 NR Description: NC2alpha [Drosophila melanogaster]
  misc_feature (1)..(68): Homolog of NCBI NO: 28279647 NR Description: Similar to Dr1 associated protein 1 (negative
  misc_feature (1)..(76): Homolog of NCBI NO: 18426973 NR Description: DR1-associated protein 1
  misc_feature (1)..(118): Homolog of NCBI NO: 21313424 NR Description: Dr1 associated protein 1 (negative cofactor 2
  misc_feature (1)..(76): Homolog of NCBI NO: 27661225 NR Description: similar to RIKEN cDNA 2310074H19
  misc_feature (1)..(215): Homolog of NCBI NO: 15239766 NR Description: hypothetical protein [Arabidopsis thaliana]
  misc_feature (1)..(99): Homolog of NCBI NO: 18481624 NR Description: repressor protein [Oryza sativa]
  misc_feature (1)..(162): Homolog of NCBI NO: 18481626 NR Description: repressor protein [Zea mays]
  misc_feature (1)..(236): Homolog of NCBI NO: 12321975 NR Description: unknown protein; 69004-67516 [Arabidopsis
  misc_feature (1)..(236): Homolog of NCBI NO: 30682195 NR Description: transcription factor Hap5a, putative [Arabidopsis
MNSLHLKHCVQSYNVFDFLRDVVSRVPDYGHGHGHAEAGPDDRVITKRRKAIGDDGNDSDEEAKRSKMLELGHTGSTGRGRGRGRGRGRGRGRPPLNRETYHQDAESEPCTSVQPSNPQNTNTSIAMDNGSESKEIPKEENIAAPVVPVVSTDSLRNIDLNAITNENDDKKASAEADASASVPEPDASLPEPPTESKHEEIPGWSLSDVDKMAIDSLQLAQLGRPLEEEEEDYDEEEG

SEQ ID NO: 59719 - DNA, 1407 bp, Glycine max
  misc_feature (1)..(1407): Ceres Seq. ID no. 15176751
aagacttgtatatgtctcccaggtaagtaagctcctcatcacatatctaaaacaaacccttccaaaaccaagacaatacttcaaaggttcattccaatggcatcctcgtcaagttttgttcatttggtaaatctaggtttagttttagtactacttggctttattgtccctagaagtgaagccaggccaagagcattctttgtgtttggagattcgcttgttgacaatggaaacaacaactatttgcaaaccattgctcgtgctaatgcccctccttatggaattgactacccaactcatagagcaactggacgcttctctaacggcttcaacattcctgattttatcagtcaggaacttggtgctgagtctacaatgccttacttgagcccggacttaacgagagagaatctcttagttggtgccaattttgcttccgctggcgttggaatccttaacgatacaggagatcagtttatgaacataattaaaatgcatcaacaactagaatattttaaagagtaccaacaacgactgagtgctctaattggtgtcccacgaactaaaagactcgtgaatcaagcgttgattctcatcaccgttggtggcaatgactttgtaaacaactacttcctagtggattctactgcaaggtctcgtcaatattcactcccggactatgtcaagtttctcatcactcgctatagcaagcacttgcagaggctatatgatctgggagctcggcgagttcttgtgacagggacagggccattgggttgtgcccctgcagaattggctatgcgaggcaaaaatggagaatgttctgctgatctacaacgtgctgcagcattgtacaaccctcaattagagcaaatgctacttgaactcaacaagaaacttggcagcgacgttttcattgctgcaaatacagcactcatgcacaatgactacatcaccaatcccaatgcttatggatttaatacatcaaaagtagcttgttgtggacaaggaccctacaatggtatggggctatgcttgccagtctccaacctatgccccaaccgagaattgcatgcattttgggatccattccatccaactgaaaaggcaaacaaacttgttgtagaacaaattatgtcaggttctacaaagtatatgaagcctatgaacctcagcacaattctggccttggatgctcgagcacattcgtgaagattaattacaaattaacctaataatgaatagtttgttatcactaacttggtcctcaatgccaatgcatgatagctcttactgtaattggatttgttgtttgtatggaatcaattaacttgtgtaattttcgtaatgtatccatgattggagcttgaaatctcatcaagctattacttaattgttttgactttc

SEQ ID NO: 59720 - protein, 371 aa, Glycine max
  peptide (1)..(371): Ceres Seq. ID no. 15176752
  misc_feature (34)..(346): Pfam Name: GDSL-like Lipase/Acylhydrolase Pfam Description: GDSL-like Lipase/Acylhydrolase
  misc_feature (33)..(347): Homolog of NCBI NO: 18394825 NR Description: lipase, putative [Arabidopsis thaliana]
  misc_feature (34)..(342): Homolog of NCBI NO: 7485419 NR Description: hypothetical protein F13C5.140 - Arabidopsis
  misc_feature (22)..(368): Homolog of NCBI NO: 15235421 NR Description: GDSL-motif lipase/hydrolase protein [Arabidopsis
  misc_feature (13)..(367): Homolog of NCBI NO: 37535146 NR Description: putative early nodulin gene (Enod) related
  misc_feature (13)..(367): Homolog of NCBI NO: 22758315 NR Description: putative early nodulin gene (Enod) related
  misc_feature (5)..(365): Homolog of NCBI NO: 15238814 NR Description: GDSL-motif lipase/hydrolase protein [Arabidopsis
  misc_feature (4)..(368): Homolog of NCBI NO: 32489520 NR Description: OSJNBa0043L24.11 [Oryza sativa (japonica
  misc_feature (15)..(367): Homolog of NCBI NO: 28071322 NR Description: P0705A05.30 [Oryza sativa (japonica
  misc_feature (13)..(367): Homolog of NCBI NO: 15229265 NR Description: GDSL-motif lipase/hydrolase protein [Arabidopsis
  misc_feature (4)..(367): Homolog of NCBI NO: 15242808 NR Description: GDSL-motif lipase/hydrolase protein [Arabidopsis
MASSSSFVHLVNLGLVLVLLGFIVPRSEARPRAFFVFGDSLVDNGNNNYLQTIARANAPPYGIDYPTHRATGRFSNGFNIPDFISQELGAESTMPYLSPDLTRENLLVGANFASAGVGILNDTGDQFMNIIKMHQQLEYFKEYQQRLSALIGVPRTKRLVNQALILITVGGNDFVNNYFLVDSTARSRQYSLPDYVKFLITRYSKHLQRLYDLGARRVLVTGTGPLGCAPAELAMRGKNGECSADLQRAAALYNPQLEQMLLELNKKLGSDVFIAANTALMHNDYITNPNAYGFNTSKVACCGQGPYNGMGLCLPVSNLCPNRELHAFWDPFHPTEKANKLVVEQIMSGSTKYMKPMNLSTILALDARAHS

SEQ ID NO: 59721 - protein, 278 aa, Glycine max
  peptide (1)..(278): Ceres Seq. ID no. 15176753
  misc_feature (1)..(253): Pfam Name: GDSL-like Lipase/Acylhydrolase Pfam Description: GDSL-like Lipase/Acylhydrolase
  misc_feature (1)..(254): Homolog of NCBI NO: 18394825 NR Description: lipase, putative [Arabidopsis thaliana]
  misc_feature (1)..(249): Homolog of NCBI NO: 7485419 NR Description: hypothetical protein F13C5.140 - Arabidopsis
  misc_feature (1)..(275): Homolog of NCBI NO: 15235421 NR Description: GDSL-motif lipase/hydrolase protein [Arabidopsis
  misc_feature (1)..(274): Homolog of NCBI NO: 37535146 NR Description: putative early nodulin gene (Enod) related
  misc_feature (1)..(274): Homolog of NCBI NO: 22758315 NR Description: putative early nodulin gene (Enod) related
  misc_feature (1)..(272): Homolog of NCBI NO: 15238814 NR Description: GDSL-motif lipase/hydrolase protein [Arabidopsis
  misc_feature (1)..(275): Homolog of NCBI NO: 32489520 NR Description: OSJNBa0043L24.11 [Oryza sativa (japonica
  misc_feature (1)..(274): Homolog of NCBI NO: 28071322 NR Description: P0705A05.30 [Oryza sativa (japonica
  misc_feature (1)..(274): Homolog of NCBI NO: 15229265 NR Description: GDSL-motif lipase/hydrolase protein [Arabidopsis
  misc_feature (1)..(274): Homolog of NCBI NO: 15242808 NR Description: GDSL-motif lipase/hydrolase protein [Arabidopsis
MPYLSPDLTRENLLVGANFASAGVGILNDTGDQFMNIIKMHQQLEYFKEYQQRLSALIGVPRTKRLVNQALILITVGGNDFVNNYFLVDSTARSRQYSLPDYVKFLITRYSKHLQRLYDLGARRVLVTGTGPLGCAPAELAMRGKNGECSADLQRAAALYNPQLEQMLLELNKKLGSDVFIAANTALMHNDYITNPNAYGFNTSKVACCGQGPYNGMGLCLPVSNLCPNRELHAFWDPFHPTEKANKLVVEQIMSGSTKYMKPMNLSTILALDARAHS

SEQ ID NO: 59722 - protein, 244 aa, Glycine max
  peptide (1)..(244): Ceres Seq. ID no. 15176754
  misc_feature (1)..(219): Pfam Name: GDSL-like Lipase/Acylhydrolase Pfam Description: GDSL-like Lipase/Acylhydrolase
  misc_feature (1)..(220): Homolog of NCBI NO: 18394825 NR Description: lipase, putative [Arabidopsis thaliana]
  misc_feature (1)..(215): Homolog of NCBI NO: 7485419 NR Description: hypothetical protein F13C5.140 - Arabidopsis
  misc_feature (1)..(241): Homolog of NCBI NO: 15235421 NR Description: GDSL-motif lipase/hydrolase protein [Arabidopsis
  misc_feature (1)..(240): Homolog of NCBI NO: 37535146 NR Description: putative early nodulin gene (Enod) related
  misc_feature (1)..(240): Homolog of NCBI NO: 22758315 NR Description: putative early nodulin gene (Enod) related
  misc_feature (1)..(238): Homolog of NCBI NO: 15238814 NR Description: GDSL-motif lipase/hydrolase protein [Arabidopsis
  misc_feature (1)..(241): Homolog of NCBI NO: 32489520 NR Description: OSJNBa0043L24.11 [Oryza sativa (japonica
  misc_feature (1)..(240): Homolog of NCBI NO: 28071322 NR Description: P0705A05.30 [Oryza sativa (japonica
  misc_feature (1)..(240): Homolog of NCBI NO: 15229265 NR Description: GDSL-motif lipase/hydrolase protein [Arabidopsis
  misc_feature (1)..(240): Homolog of NCBI NO: 15242808 NR Description: GDSL-motif lipase/hydrolase protein [Arabidopsis
MNIIKMHQQLEYFKEYQQRLSALIGVPRTKRLVNQALILITVGGNDFVNNYFLVDSTARSRQYSLPDYVKFLITRYSKHLQRLYDLGARRVLVTGTGPLGCAPAELAMRGKNGECSADLQRAAALYNPQLEQMLLELNKKLGSDVFIAANTALMHNDYITNPNAYGFNTSKVACCGQGPYNGMGLCLPVSNLCPNRELHAFWDPFHPTEKANKLVVEQIMSGSTKYMKPMNLSTILALDARAHS

SEQ ID NO: 59723 - DNA, 688 bp, Glycine max
  misc_feature (1)..(688): Ceres Seq. ID no. 15226533
ctcggggcccccctcgagtcacagctacgtaggccccccccccccgtccatgtttaacaactaatacaagtcactatgattttggtctgtacgtaatacaattgtgatatattacaaactccccatttgttgaggttatcctcgacaatcaagtctctctgctctctcttgctctatctatcttaggttyttgatctgdtattcactgtatcctaagtttttggacggtttttatttctctctatatgcattatcagatttttgaactgaggaagctaattccaacatctttggcatatgacttcaatatccacataatggattttcaacctggagaatttcttaatgtgaaggaggtccattataaccagcatggtttgctgctactggaagggcaaggcatttatcgtttgggtgatagttggtacccagttcaggctggtgatgtcatttggatggcaccattcgtcccacaatggtatgctgccctgggaaaaacaagaacacgttatcttatatacaaagacgcgaacagaagcccactgtaaccaacgttgatggacttcagatgaatgatatggatgatagtgacccccttctaatgatgtaatgatttaaataaagtgctaaatacatttagatggttgtattggactaagattttaaaagattatttttgtttattaac

SEQ ID NO: 59724 - protein, 100 aa, Glycine max
  peptide (1)..(100): Ceres Seq. ID no. 15226534
  misc_feature (4)..(100): Pfam Name: Protein of unknown function (DUF923) Pfam Description: Protein of unknown function (DUF923)
  misc_feature (13)..(97): Homolog of NCBI NO: 22958253 NR Description: COG3257: Uncharacterized protein, possibly
  misc_feature (9)..(97): Homolog of NCBI NO: 27375364 NR Description: blr0253 [Bradyrhizobium japonicum]
  misc_feature (8)..(99): Homolog of NCBI NO: 29377458 NR Description: conserved hypothetical protein [Enterococcus
  misc_feature (9)..(97): Homolog of NCBI NO: 17936916 NR Description: conserved hypothetical protein
  misc_feature (9)..(97): Homolog of NCBI NO: 15891725 NR Description: AGR_L_3212p [Agrobacterium tumefaciens]
  misc_feature (8)..(97): Homolog of NCBI NO: 23113628 NR Description: COG3257: Uncharacterized protein, possibly
  misc_feature (9)..(100): Homolog of NCBI NO: 15806172 NR Description: conserved hypothetical protein [Deinococcus
  misc_feature (4)..(94): Homolog of NCBI NO: 7485211 NR Description: hypothetical protein - Arabidopsis thaliana
  misc_feature (4)..(100): Homolog of NCBI NO: 22328740 NR Description: expressed protein [Arabidopsis thaliana]
  misc_feature (4)..(100): Homolog of NCBI NO: 34393580 NR Description: putative glyoxylate induced protein
MHYQIFELRKLIPTSLAYDFNIHIMDFQPGEFLNVKEVHYNQHGLLLLEGQGIYRLGDSWYPVQAGDVIWMAPFVPQWYAALGKTRTRYLIYKDANRSPL

SEQ ID NO: 59725 - protein, 76 aa, Glycine max
  peptide (1)..(76): Ceres Seq. ID no. 15226535
  misc_feature (1)..(76): Pfam Name: Protein of unknown function (DUF923) Pfam Description: Protein of unknown function (DUF923)
  misc_feature (1)..(73): Homolog of NCBI NO: 22958253 NR Description: COG3257: Uncharacterized protein, possibly
  misc_feature (1)..(73): Homolog of NCBI NO: 27375364 NR Description: blr0253 [Bradyrhizobium japonicum]
  misc_feature (1)..(75): Homolog of NCBI NO: 29377458 NR Description: conserved hypothetical protein [Enterococcus
  misc_feature (1)..(73): Homolog of NCBI NO: 17936916 NR Description: conserved hypothetical protein
  misc_feature (1)..(73): Homolog of NCBI NO: 15891725 NR Description: AGR_L_3212p [Agrobacterium tumefaciens]
  misc_feature (1)..(73): Homolog of NCBI NO: 23113628 NR Description: COG3257: Uncharacterized protein, possibly
  misc_feature (1)..(76): Homolog of NCBI NO: 15806172 NR Description: conserved hypothetical protein [Deinococcus
  misc_feature (1)..(70): Homolog of NCBI NO: 7485211 NR Description: hypothetical protein - Arabidopsis thaliana
  misc_feature (1)..(76): Homolog of NCBI NO: 22328740 NR Description: expressed protein [Arabidopsis thaliana]
  misc_feature (1)..(76): Homolog of NCBI NO: 34393580 NR Description: putative glyoxylate induced protein
MDFQPGEFLNVKEVHYNQHGLLLLEGQGIYRLGDSWYPVQAGDVIWMAPFVPQWYAALGKTRTRYLIYKDANRSPL

SEQ ID NO: 59726 - protein, 61 aa, Glycine max
  peptide (1)..(61): Ceres Seq. ID no. 15226536
  misc_feature (7)..(56): Homolog of NCBI NO: 34901774 NR Description: OJ1058_B11.16 [Oryza sativa (japonica
MVCCYWKGKAFIVWVIVGTQFRLVMSFGWHHSSHNGMLPWEKQEHVILYTKTRTEAHCNQR

SEQ ID NO: 59727 - DNA, 1337 bp, Glycine max
  misc_feature (1)..(1337): Ceres Seq. ID no. 14312357
ggcgaccacgtttgcaatttataaccttcctatccactctcttcaatttgttctgccatttggtaacactgttttcaccctttttctaatgctagtggttttctctctccctctctgcctctagtagttacaatttgcaaatagagtcatcatcatcatgtcacacccaaagggataaaaaaaaaaaaaaccaaaacttgtaacacatgggagttgttgaacaagaaatggaagaggaagagaaagaaaaacatacaaacaaccaagaccaaaacaaccataaccacccttcttctctccacccaattaaggaagagtgtgttagtgtgagaaaaccctttagtggtgatagagtgaagagagatgaatggagtgaaggggcagtgtcaaccctccttgaggcttatgaggccaaatgggtgctaagaaacagagccaaactcaagggccatgattgggaggatgtggcacggcacgtgtcggcacgtgccaactgcaccaaatcaccaaagacttcaacgcagtgtaagaacaaggttgagtccatgaagaagagatacagatcagaatcagcagcaacagcagatcatgcatcatcatcatggcctctttattcacggcttgatcttcttcttaggggaactggacccgtgttgtcgtcgccgccgccgccgccaccggcgatgatgccggcggcgatgccggttctgtctccggtggagccgtcgcaaccgccgcagctgtcgccgcctccggcggctccttcagggccacttgctaatgcacaaaactcgcatggatccaacggaattgatgagaagcttgctaaggaagatgggttaggaactaagtcatctgatcaagtatctagcaagaatccattggactcagatagcagcacgccagcactttatagcaagaaggacgggttaagatgcaacaagaggaagaagaaaacaattgacaacacagggcgaagaaggaaagagtgtgtggagatagcagaaagcttaagatggcttacagaagctatgataaggtctgaacaagcaagaatggacacaatgaaggagatagagaggatgagagttgaagctgaggccaaaagaggggaaatggaccttaagagaactgaaataattgccaatacacagttagagattgctaggatctttgcaagtgtcaacaataaaggtgttgattcatctctaagaattggaagaagttaagggtaggttatggaagataattaataaaaatgttattattgtatatgcacataaagttatcaaataatgctattaatataataaaatttgagtaaataacttatttcc

SEQ ID NO: 59728 - protein, 340 aa, Glycine max
  peptide (1)..(340): Ceres Seq. ID no. 14312358
  misc_feature (33)..(150): Homolog of NCBI NO: 18414919 NR Description: expressed protein [Arabidopsis thaliana]
  misc_feature (33)..(150): Homolog of NCBI NO: 10178132 NR Description: gb|AAF01512.1~gene_id:MOP10.9~similar to unknown
  misc_feature (49)..(149): Homolog of NCBI NO: 26451533 NR Description: unknown protein [Arabidopsis thaliana]
  misc_feature (187)..(312): Homolog of NCBI NO: 26451533 NR Description: unknown protein [Arabidopsis thaliana]
  misc_feature (43)..(334): Homolog of NCBI NO: 30694843 NR Description: expressed protein [Arabidopsis thaliana]
  misc_feature (46)..(317): Homolog of NCBI NO: 37536908 NR Description: hypothetical protein [Oryza sativa (japonica
  misc_feature (43)..(340): Homolog of NCBI NO: 11357442 NR Description: hypothetical protein F14P22.220 - Arabidopsis
  misc_feature (52)..(321): Homolog of NCBI NO: 18404771 NR Description: expressed protein [Arabidopsis thaliana]
  misc_feature (162)..(340): Homolog of NCBI NO: 15232501 NR Description: expressed protein [Arabidopsis thaliana]
  misc_feature (22)..(303): Homolog of NCBI NO: 15232501 NR Description: expressed protein [Arabidopsis thaliana]
MGVVEQEMEEEEKEKHTNNQDQNNHNHPSSLHPIKEECVSVRKPFSGDRVKRDEWSEGAVSTLLEAYEAKWVLRNRAKLKGHDWEDVARHVSARANCTKSPKTSTQCKNKVESMKKRYRSESAATADHASSSWPLYSRLDLLLRGTGPVLSSPPPPPPAMMPAAMPVLSPVEPSQPPQLSPPPAAPSGPLANAQNSHGSNGIDEKLAKEDGLGTKSSDQVSSKNPLDSDSSTPALYSKKDGLRCNKRKKKTIDNTGRRRKECVEIAESLRWLTEAMIRSEQARMDTMKEIERMRVEAEAKRGEMDLKRTEIIANTQLEIARIFASVNNKGVDSSLRIGRS

SEQ ID NO: 59729 - protein, 333 aa, Glycine max
  peptide (1)..(333): Ceres Seq. ID no. 14312359
  misc_feature (26)..(143): Homolog of NCBI NO: 18414919 NR Description: expressed protein [Arabidopsis thaliana]
  misc_feature (26)..(143): Homolog of NCBI NO: 10178132 NR Description: gb|AAF01512.1~gene_id:MOP10.9~similar to unknown
  misc_feature (42)..(142): Homolog of NCBI NO: 26451533 NR Description: unknown protein [Arabidopsis thaliana]
  misc_feature (180)..(305): Homolog of NCBI NO: 26451533 NR Description: unknown protein [Arabidopsis thaliana]
  misc_feature (36)..(327): Homolog of NCBI NO: 30694843 NR Description: expressed protein [Arabidopsis thaliana]
  misc_feature (39)..(310): Homolog of NCBI NO: 37536908 NR Description: hypothetical protein [Oryza sativa (japonica
  misc_feature (36)..(333): Homolog of NCBI NO: 11357442 NR Description: hypothetical protein F14P22.220 - Arabidopsis
  misc_feature (45)..(314): Homolog of NCBI NO: 18404771 NR Description: expressed protein [Arabidopsis thaliana]
  misc_feature (155)..(333): Homolog of NCBI NO: 15232501 NR Description: expressed protein [Arabidopsis thaliana]
  misc_feature (15)..(296): Homolog of NCBI NO: 15232501 NR Description: expressed protein [Arabidopsis thaliana]
MEEEEKEKHTNNQDQNNHNHPSSLHPIKEECVSVRKPFSGDRVKRDEWSEGAVSTLLEAYEAKWVLRNRAKLKGHDWEDVARHVSARANCTKSPKTSTQCKNKVESMKKRYRSESAATADHASSSWPLYSRLDLLLRGTGPVLSSPPPPPPAMMPAAMPVLSPVEPSQPPQLSPPPAAPSGPLANAQNSHGSNGIDEKLAKEDGLGTKSSDQVSSKNPLDSDSSTPALYSKKDGLRCNKRKKKTIDNTGRRRKECVEIAESLRWLTEAMIRSEQARMDTMKEIERMRVEAEAKRGEMDLKRTEIIANTQLEIARIFASVNNKGVDSSLRIGRS

SEQ ID NO: 59730 - protein, 227 aa, Glycine max
  peptide (1)..(227): Ceres Seq. ID no. 14312360
  misc_feature (1)..(37): Homolog of NCBI NO: 30680994 NR Description: expressed protein [Arabidopsis thaliana]
  misc_feature (1)..(37): Homolog of NCBI NO: 10178132 NR Description: gb|AAF01512.1~gene_id:MOP10.9~similar to unknown
  misc_feature (1)..(36): Homolog of NCBI NO: 26451533 NR Description: unknown protein [Arabidopsis thaliana]
  misc_feature (74)..(199): Homolog of NCBI NO: 26451533 NR Description: unknown protein [Arabidopsis thaliana]
  misc_feature (1)..(221): Homolog of NCBI NO: 30694843 NR Description: expressed protein [Arabidopsis thaliana]
  misc_feature (1)..(204): Homolog of NCBI NO: 37536908 NR Description: hypothetical protein [Oryza sativa (japonica
  misc_feature (1)..(227): Homolog of NCBI NO: 11357442 NR Description: hypothetical protein F14P22.220 - Arabidopsis
  misc_feature (1)..(208): Homolog of NCBI NO: 18404771 NR Description: expressed protein [Arabidopsis thaliana]
  misc_feature (49)..(227): Homolog of NCBI NO: 15232501 NR Description: expressed protein [Arabidopsis thaliana]
  misc_feature (1)..(190): Homolog of NCBI NO: 15232501 NR Description: expressed protein [Arabidopsis thaliana]
MKKRYRSESAATADHASSSWPLYSRLDLLLRGTGPVLSSPPPPPPAMMPAAMPVLSPVEPSQPPQLSPPPAAPSGPLANAQNSHGSNGIDEKLAKEDGLGTKSSDQVSSKNPLDSDSSTPALYSKKDGLRCNKRKKKTIDNTGRRRKECVEIAESLRWLTEAMIRSEQARMDTMKEIERMRVEAEAKRGEMDLKRTEIIANTQLEIARIFASVNNKGVDSSLRIGRS

SEQ ID NO: 59731 - DNA, 1261 bp, Glycine max
  misc_feature (1)..(1261): Ceres Seq. ID no. 15177596
gaagtgtcagctcttccatcctacttcaccctctcacaataaaatcattgcaatagagaagtcccttaaataaatctgaatttccctgctttgcttcaccaccccccttgcttgcgtgggtagaaatgcaagaagcagggctgggaatgggaatgggaatgatgagcggagaagtatccgccgccggggaccaccaccgtcaagtgaaggcggagatagccaaccacccactctatgaacagcttctatctgcacacgtgtcatgcctccgcgtcgccacacctatcgatcagttgccgctcatcgacggacagttatcgcagtcccaccatctcctccgctcttatgcctcacaccattcccattccctctcgccccatgaccgacaagaactcgacaacttcatggcacaatatttgattgtgttatgtacgttcaaagagcagcttcagcaacatgtgagggtgcatgccgtggaggctgtgatggcctgccgtgatattgaaagtaccttgcaagctctgacaggagtcagtttgggagaaggaacaggtgcaacaatgtcagatgatgaagatgatttgcagatggatggctctttagatcagtctagcgctgacgggcatgacatgatgggatttggtccattgcttcctacagaatctgaaaggtccctgatggaaagagttcgtcaggagcttaagattgagctcaagcagggttttaagtcaagaattgaagatgttagggaggaaatattaaggaagcggagagctgggaaattaccaggtgacacaacatcggttttaaaggcctggtggcagcaacatgctaagtggccctacccaactgaagatgacaaggcaaaacttgtggaggagacagggttgcagctgaagcaaatcaataattggttcatcaatcaaaggaaacgcaactggcacagcaactctcaatcggttaactctctgaagtccaagcgcaagagagagtatgcccactaaggattccagtctggtgcagaagataacaggtgatgcactacaacataagatggcttacaatagtgatggttgtaaattcttggaatacataacggatacaaactattcttgttgtgcacggtcgcctccatttctttcaagtgtttttttatttgtaaatttgtttgctatgatttgactggctgaagaagtatttttagcagctgaaagcctgaaagtgtttcctatacttgatatgtttgcatgtactattatgt

SEQ ID NO: 59732 - protein, 292 aa, Glycine max
  peptide (1)..(292): Ceres Seq. ID no. 15177597
  misc_feature (80)..(135): Pfam Name: KNOX2 domain Pfam Description: KNOX2 domain
  misc_feature (7)..(292): Homolog of NCBI NO: 21554222 NR Description: KNAT3 homeodomain protein [Arabidopsis thaliana]
  misc_feature (7)..(292): Homolog of NCBI NO: 15238743 NR Description: KNAT3 homeodomain protein [Arabidopsis thaliana]
  misc_feature (28)..(288): Homolog of NCBI NO: 3023961 NR Description: Homeobox protein knotted-1 like 3 (KNAP3)
  misc_feature (18)..(288): Homolog of NCBI NO: 14149141 NR Description: KNOX family class 2 homeodomain protein
  misc_feature (6)..(287): Homolog of NCBI NO: 21618231 NR Description: homeodomain-containing protein HD1, putative
  misc_feature (15)..(287): Homolog of NCBI NO: 26451690 NR Description: putative homeodomain transcription factor KNAT6
  misc_feature (15)..(287): Homolog of NCBI NO: 25386223 NR Description: hypothetical protein F16P17.16 [imported] -
  misc_feature (1)..(287): Homolog of NCBI NO: 18407708 NR Description: homeodomain-containing protein HD1 -related
  misc_feature (1)..(287): Homolog of NCBI NO: 1170191 NR Description: Homeobox protein HD1
  misc_feature (7)..(288): Homolog of NCBI NO: 4098246 NR Description: homeobox 2 protein [Lycopersicon esculentum]
MQEAGLGMGMGMMSGEVSAAGDHHRQVKAEIANHPLYEQLLSAHVSCLRVATPIDQLPLIDGQLSQSHHLLRSYASHHSHSLSPHDRQELDNFMAQYLIVLCTFKEQLQQHVRVHAVEAVMACRDIESTLQALTGVSLGEGTGATMSDDEDDLQMDGSLDQSSADGHDMMGFGPLLPTESERSLMERVRQELKIELKQGFKSRIEDVREEILRKRRAGKLPGDTTSVLKAWWQQHAKWPYPTEDDKAKLVEETGLQLKQINNWFINQRKRNWHSNSQSVNSLKSKRKREYAH

SEQ ID NO: 59733 - protein, 285 aa, Glycine max
  peptide (1)..(285): Ceres Seq. ID no. 15177598
  misc_feature (73)..(128): Pfam Name: KNOX2 domain Pfam Description: KNOX2 domain
  misc_feature (1)..(285): Homolog of NCBI NO: 21554222 NR Description: KNAT3 homeodomain protein [Arabidopsis thaliana]
  misc_feature (1)..(285): Homolog of NCBI NO: 15238743 NR Description: KNAT3 homeodomain protein [Arabidopsis thaliana]
  misc_feature (21)..(281): Homolog of NCBI NO: 3023961 NR Description: Homeobox protein knotted-1 like 3 (KNAP3)
  misc_feature (11)..(281): Homolog of NCBI NO: 14149141 NR Description: KNOX family class 2 homeodomain protein
  misc_feature (1)..(280): Homolog of NCBI NO: 21618231 NR Description: homeodomain-containing protein HD1, putative
  misc_feature (8)..(280): Homolog of NCBI NO: 26451690 NR Description: putative homeodomain transcription factor KNAT6
  misc_feature (8)..(280): Homolog of NCBI NO: 25386223 NR Description: hypothetical protein F16P17.16 [imported] -
  misc_feature (1)..(280): Homolog of NCBI NO: 18407708 NR Description: homeodomain-containing protein HD1 -related
  misc_feature (1)..(280): Homolog of NCBI NO: 1170191 NR Description: Homeobox protein HD1
  misc_feature (1)..(281): Homolog of NCBI NO: 4098246 NR Description: homeobox 2 protein [Lycopersicon esculentum]
MGMGMMSGEVSAAGDHHRQVKAEIANHPLYEQLLSAHVSCLRVATPIDQLPLIDGQLSQSHHLLRSYASHHSHSLSPHDRQELDNFMAQYLIVLCTFKEQLQQHVRVHAVEAVMACRDIESTLQALTGVSLGEGTGATMSDDEDDLQMDGSLDQSSADGHDMMGFGPLLPTESERSLMERVRQELKIELKQGFKSRIEDVREEILRKRRAGKLPGDTTSVLKAWWQQHAKWPYPTEDDKAKLVEETGLQLKQINNWFINQRKRNWHSNSQSVNSLKSKRKREYAH

SEQ ID NO: 59734 - protein, 283 aa, Glycine max
  peptide (1)..(283): Ceres Seq. ID no. 15177599
  misc_feature (71)..(126): Pfam Name: KNOX2 domain Pfam Description: KNOX2 domain
  misc_feature (1)..(283): Homolog of NCBI NO: 21554222 NR Description: KNAT3 homeodomain protein [Arabidopsis thaliana]
  misc_feature (1)..(283): Homolog of NCBI NO: 15238743 NR Description: KNAT3 homeodomain protein [Arabidopsis thaliana]
  misc_feature (19)..(279): Homolog of NCBI NO: 3023961 NR Description: Homeobox protein knotted-1 like 3 (KNAP3)
  misc_feature (9)..(279): Homolog of NCBI NO: 14149141 NR Description: KNOX family class 2 homeodomain protein
  misc_feature (1)..(278): Homolog of NCBI NO: 21618231 NR Description: homeodomain-containing protein HD1, putative
  misc_feature (6)..(278): Homolog of NCBI NO: 26451690 NR Description: putative homeodomain transcription factor KNAT6
  misc_feature (6)..(278): Homolog of NCBI NO: 25386223 NR Description: hypothetical protein F16P17.16 [imported] -
  misc_feature (1)..(278): Homolog of NCBI NO: 18407708 NR Description: homeodomain-containing protein HD1 -related
  misc_feature (1)..(278): Homolog of NCBI NO: 1170191 NR Description: Homeobox protein HD1
  misc_feature (1)..(279): Homolog of NCBI NO: 4098246 NR Description: homeobox 2 protein [Lycopersicon esculentum]
MGMMSGEVSAAGDHHRQVKAEIANHPLYEQLLSAHVSCLRVATPIDQLPLIDGQLSQSHHLLRSYASHHSHSLSPHDRQELDNFMAQYLIVLCTFKEQLQQHVRVHAVEAVMACRDIESTLQALTGVSLGEGTGATMSDDEDDLQMDGSLDQSSADGHDMMGFGPLLPTESERSLMERVRQELKIELKQGFKSRIEDVREEILRKRRAGKLPGDTTSVLKAWWQQHAKWPYPTEDDKAKLVEETGLQLKQINNWFINQRKRNWHSNSQSVNSLKSKRKREYAH

SEQ ID NO: 59735 - DNA, 1433 bp, Glycine max
  misc_feature (1)..(1433): Ceres Seq. ID no. 15176379
aaaaaataaggatgtaaatattttgttttgggtactgtgatatattgtctaatggataatttggttttatttacaaaaatattggcttatgccattaaaaattgtgcttatctattaggtgtactaaatgtctaaatcatattgaaattgatttttggatctttacttggatcaagaacattgaattatgaagtaatgacttaacttaatcaatagttgatgaccctaaggaataattttatgagtccttctgaagggtgtttaaagtgacttttcctcttagaattaagcggagtttattaaatgaatttctgtaaggaatcaaaagatgcatgtgcaatatcttttatgctagtatgtccctatagaattctaaggaaatgcaaagtagtgaatttaaatgttctatgttatagaaacaaagaaagagtgagaaaaactgcatttttatgctctttcatctcttgctccctatccttgccatctatgatcccaaaattctatacaatcttcgggaacgaatttcagtaagatagttcaactctactacatcttttgcacaatcgagcaacatatgcataattgcataactgaacaagcaaaatgagattgtcgtgcttgacactgttggcatttggcaccctgtaaatacaagaaagatgacaacaagatgggtgatattaatccaatggtgctattggcatttgagaatctttatcatgtgctgtaaatacctgcatgtgctttgaccagaataatatgatttgtgttgggaaagcaaaattggctaactagccaatgatcctgaaaaagacatacaatgtagtggaggaaaattgtgtgggtttttatcaatatattattggatgcagttaaatggtctaaatatctacagcactgtaggttgattatgtttgtccctgggtcatttatgttaactatttggtcttcttttcatccagattacttaagaaagatcatcgtgcagggaagatcatccaagtctactaaggttggagatattatgactgaagagaacaaacttatcacagtcacccctgataccaaagttctgcaggctatgcaactgatgactgacaatagaatcaggcacatccccgtgattgatgaaaaagggatgattggcatggtgtccattggagatgtggttcgtgctgtggtgcgtgagcaccgacaagaggtcgagcgcttgaatgctttcatacaaggtggttattagataatgatgatgaaaaattctcaagggcactcaagctaatttgaattatgtaataagcttgagtgcttgtaaatatgttatggccacagagccttcttgtttgctttcctgtaatttcagttttatgggcattaacccgatggagtagcagcatgttaataataacaactggatgcagtttgaatttgttttg

SEQ ID NO: 59736 - protein, 109 aa, Glycine max
  peptide (1)..(109): Ceres Seq. ID no. 15176380
  misc_feature (39)..(91): Pfam Name: CBS domain Pfam Description: CBS domain
  misc_feature (18)..(108): Homolog of NCBI NO: 16126862 NR Description: CBS domain protein [Caulobacter crescentus CB15]
  misc_feature (18)..(107): Homolog of NCBI NO: 22984734 NR Description: hypothetical protein [Burkholderia fungorum]
  misc_feature (1)..(105): Homolog of NCBI NO: 28850322 NR Description: similar to putative protein
  misc_feature (18)..(105): Homolog of NCBI NO: 21232293 NR Description: conserved hypothetical protein
  misc_feature (18)..(105): Homolog of NCBI NO: 21243772 NR Description: conserved hypothetical protein
  misc_feature (18)..(106): Homolog of NCBI NO: 34499375 NR Description: conserved hypothetical protein
  misc_feature (18)..(98): Homolog of NCBI NO: 9188545 NR Description: inosine-5'-monophosphate dehydrogenase [Chlorella
  misc_feature (18)..(109): Homolog of NCBI NO: 34913008 NR Description: P0663E10.18 [Oryza sativa (japonica
  misc_feature (1)..(109): Homolog of NCBI NO: 29788876 NR Description: unknown protein [Oryza sativa (japonica
  misc_feature (1)..(109): Homolog of NCBI NO: 15238284 NR Description: CBS domain containing protein [Arabidopsis
MFVPGSFMLTIWSSFHPDYLRKIIVQGRSSKSTKVGDIMTEENKLITVTPDTKVLQAMQLMTDNRIRHIPVIDEKGMIGMVSIGDVVRAVVREHRQEVERLNAFIQGGY

SEQ ID NO: 59737 - protein, 102 aa, Glycine max
  peptide (1)..(102): Ceres Seq. ID no. 15176381
  misc_feature (32)..(84): Pfam Name: CBS domain Pfam Description: CBS domain
  misc_feature (11)..(101): Homolog of NCBI NO: 16126862 NR Description: CBS domain protein [Caulobacter crescentus CB15]
  misc_feature (11)..(100): Homolog of NCBI NO: 22984734 NR Description: hypothetical protein [Burkholderia fungorum]
  misc_feature (1)..(98): Homolog of NCBI NO: 28850322 NR Description: similar to putative protein
  misc_feature (11)..(98): Homolog of NCBI NO: 21232293 NR Description: conserved hypothetical protein
  misc_feature (11)..(98): Homolog of NCBI NO: 21243772 NR Description: conserved hypothetical protein
  misc_feature (11)..(99): Homolog of NCBI NO: 34499375 NR Description: conserved hypothetical protein
  misc_feature (11)..(91): Homolog of NCBI NO: 9188545 NR Description: inosine-5'-monophosphate dehydrogenase [Chlorella
  misc_feature (11)..(102): Homolog of NCBI NO: 34913008 NR Description: P0663E10.18 [Oryza sativa (japonica
  misc_feature (1)..(102): Homolog of NCBI NO: 29788876 NR Description: unknown protein [Oryza sativa (japonica
  misc_feature (1)..(102): Homolog of NCBI NO: 15238284 NR Description: CBS domain containing protein [Arabidopsis
MLTIWSSFHPDYLRKIIVQGRSSKSTKVGDIMTEENKLITVTPDTKVLQAMQLMTDNRIRHIPVIDEKGMIGMVSIGDVVRAVVREHRQEVERLNAFIQGGY

SEQ ID NO: 59738 - protein, 75 aa, Glycine max
  peptide (1)..(75): Ceres Seq. ID no. 15176382
MNFCKESKDACAISFMLVCPYRILRKCKVVNLNVLCYRNKERVRKTAFLCSFISCSLSLPSMIPKFYTIFGNEFQ

SEQ ID NO: 59739 - DNA, 1761 bp, Glycine max
  misc_feature (1)..(1761): Ceres Seq. ID no. 15172020
gacagttctattgggaaagttttcaagttcacacatgttctggctgcctccttcgccggtttagttgccgccgccgccgcctcaagctaccggcgggcaccgtccacggtggtgggagagcagaagaaggttattcccgagctacgtaggacggaatctgggcgtctcggggagatcgaaaagttctcccactatgttgcaaggcaaatggggtttgaagatgctgatgaggttccagagctatgcatattggcccaagagtatttgaaaaaatccaaagggtgcgatgaaagcatctttgaatatatttccagtggcaatgtggagaacactgattctctatatgcgaaattagttgaggagttagagagatgcatcctcagttatttagcatttcactggaaccaagctacatctgtcattagtcaggttttgggtgtggagtctcagcagaaaaaaaagctgaagggaattctattggcagctacaagggaacagaggtttgatagagtaaccaagaatctgaaagtgacaagagtgatctctactttggtggaagagatgaaagcaataaatggtgactcgcaatgtacagaagtgatggtgcccatggcccacagtgagaggagtccagtcctgctgttcatggggggtggcatgggagctggaaagagcactgttcttaaagacattcttaaagaatcattttggtcaggagcagcttcaaatgctgtggtggttgaggcagatgctttcaaggagagtgacgtcatatatagagcccttagctccagaggtcaccatgatgacatgctccaaactgctgaattggtgcatcaatcttccactgatgctgcatcatctctgctggtgacagctctaaatgagggtcgagatgtgatcatggatggtaccttatcatgggaaccatttgtggagcaaactattgctatggcaagaaatgttcacaaacacaggtaccgaatgggggtagggtataaagtagctgaagatgggacaattactgaaaattactgggagcaagtaaatgatgcagaagagcatcaatcagaggaaatttctaatggagaagcacacacccaaaagccttacagaattgagctagttggtgtggtttgtgatggctatcttgctgttgttagaggcattaggagagctattatgacagggagggcagtgagagtgaattcacaactgaaatctcacaaaagatttgctaatgcatttccaagatattgcaaacttgttgataatgccagactctattgcacaaatgctgttggtggtccaccaaagcttatagggcggaaggatggtgatcacaatctactagtggatcgtgaagagatcaagtgcttggaaacgttaggcagtttgaatgctggagctgattccatctacgaacttcacaaagaacccagccccataatggaacctggttctgtttggaatgatatagttatgtcaccttcaaggccaagtgatcaaaaagaattgaaggaatctattcagaaaatagagaaatccatccgaaaaatgtaaccaatattgttgcctgatacgttggagcagtatttggctatctctggaatatatcgtgttttgttctatatctttaatcgtatgattttacttgacaaggaagattattgtgtcgttttcttggtatctatatgtaaagtgaaatgcttggaacatatattatgtaatatactcttgagttttgagcatatttttttt

SEQ ID NO: 59740 - protein, 520 aa, Glycine max
  peptide (1)..(520): Ceres Seq. ID no. 15172021
  misc_feature (244)..(515): Homolog of NCBI NO: 388260 NR Description: H1-1flk [Arabidopsis thaliana]
  misc_feature (243)..(515): Homolog of NCBI NO: 1076336 NR Description: hypothetical protein H1.1flk - Arabidopsis
  misc_feature (68)..(164): Homolog of NCBI NO: 34909990 NR Description: P0490D09.19 [Oryza sativa (japonica
  misc_feature (228)..(510): Homolog of NCBI NO: 34909990 NR Description: P0490D09.19 [Oryza sativa (japonica
  misc_feature (10)..(515): Homolog of NCBI NO: 28207052 NR Description: hypothetical protein [Arabidopsis thaliana]
  misc_feature (10)..(515): Homolog of NCBI NO: 28207050 NR Description: hypothetical protein [Arabidopsis thaliana]
  misc_feature (10)..(515): Homolog of NCBI NO: 15224537 NR Description: hypothetical protein [Arabidopsis thaliana]
  misc_feature (21)..(515): Homolog of NCBI NO: 15222183 NR Description: hypothetical protein [Arabidopsis thaliana]
  misc_feature (43)..(516): Homolog of NCBI NO: 15219698 NR Description: expressed protein [Arabidopsis thaliana]
  misc_feature (2)..(516): Homolog of NCBI NO: 99733 NR Description: hypothetical protein H1flk - Arabidopsis thaliana
DSSIGKVFKFTHVLAASFAGLVAAAAASSYRRAPSTVVGEQKKVIPELRRTESGRLGEIEKFSHYVARQMGFEDADEVPELCILAQEYLKKSKGCDESIFEYISSGNVENTDSLYAKLVEELERCILSYLAFHWNQATSVISQVLGVESQQKKKLKGILLAATREQRFDRVTKNLKVTRVISTLVEEMKAINGDSQCTEVMVPMAHSERSPVLLFMGGGMGAGKSTVLKDILKESFWSGAASNAVVVEADAFKESDVIYRALSSRGHHDDMLQTAELVHQSSTDAASSLLVTALNEGRDVIMDGTLSWEPFVEQTIAMARNVHKHRYRMGVGYKVAEDGTITENYWEQVNDAEEHQSEEISNGEAHTQKPYRIELVGVVCDGYLAVVRGIRRAIMTGRAVRVNSQLKSHKRFANAFPRYCKLVDNARLYCTNAVGGPPKLIGRKDGDHNLLVDREEIKCLETLGSLNAGADSIYELHKEPSPIMEPGSVWNDIVMSPSRPSDQKELKESIQKIEKSIRKM

SEQ ID NO: 59741 - protein, 451 aa, Glycine max
  peptide (1)..(451): Ceres Seq. ID no. 15172022
  misc_feature (175)..(446): Homolog of NCBI NO: 388260 NR Description: H1-1flk [Arabidopsis thaliana]
  misc_feature (174)..(446): Homolog of NCBI NO: 1076336 NR Description: hypothetical protein H1.1flk - Arabidopsis
  misc_feature (1)..(95): Homolog of NCBI NO: 34909990 NR Description: P0490D09.19 [Oryza sativa (japonica
  misc_feature (159)..(441): Homolog of NCBI NO: 34909990 NR Description: P0490D09.19 [Oryza sativa (japonica
  misc_feature (1)..(446): Homolog of NCBI NO: 28207052 NR Description: hypothetical protein [Arabidopsis thaliana]
  misc_feature (1)..(446): Homolog of NCBI NO: 28207050 NR Description: hypothetical protein [Arabidopsis thaliana]
  misc_feature (1)..(446): Homolog of NCBI NO: 15224537 NR Description: hypothetical protein [Arabidopsis thaliana]
  misc_feature (1)..(446): Homolog of NCBI NO: 15222183 NR Description: hypothetical protein [Arabidopsis thaliana]
  misc_feature (1)..(447): Homolog of NCBI NO: 15219698 NR Description: expressed protein [Arabidopsis thaliana]
  misc_feature (1)..(447): Homolog of NCBI NO: 99733 NR Description: hypothetical protein H1flk - Arabidopsis thaliana
MGFEDADEVPELCILAQEYLKKSKGCDESIFEYISSGNVENTDSLYAKLVEELERCILSYLAFHWNQATSVISQVLGVESQQKKKLKGILLAATREQRFDRVTKNLKVTRVISTLVEEMKAINGDSQCTEVMVPMAHSERSPVLLFMGGGMGAGKSTVLKDILKESFWSGAASNAVVVEADAFKESDVIYRALSSRGHHDDMLQTAELVHQSSTDAASSLLVTALNEGRDVIMDGTLSWEPFVEQTIAMARNVHKHRYRMGVGYKVAEDGTITENYWEQVNDAEEHQSEEISNGEAHTQKPYRIELVGVVCDGYLAVVRGIRRAIMTGRAVRVNSQLKSHKRFANAFPRYCKLVDNARLYCTNAVGGPPKLIGRKDGDHNLLVDREEIKCLETLGSLNAGADSIYELHKEPSPIMEPGSVWNDIVMSPSRPSDQKELKESIQKIEKSIRKM

SEQ ID NO: 59742 - protein, 333 aa, Glycine max
  peptide (1)..(333): Ceres Seq. ID no. 15172023
  misc_feature (57)..(328): Homolog of NCBI NO: 388260 NR Description: H1-1flk [Arabidopsis thaliana]
  misc_feature (56)..(328): Homolog of NCBI NO: 1076336 NR Description: hypothetical protein H1.1flk - Arabidopsis
  misc_feature (41)..(323): Homolog of NCBI NO: 34909990 NR Description: P0490D09.19 [Oryza sativa (japonica
  misc_feature (1)..(328): Homolog of NCBI NO: 28207052 NR Description: hypothetical protein [Arabidopsis thaliana]
  misc_feature (1)..(328): Homolog of NCBI NO: 28207050 NR Description: hypothetical protein [Arabidopsis thaliana]
  misc_feature (1)..(328): Homolog of NCBI NO: 15224537 NR Description: hypothetical protein [Arabidopsis thaliana]
  misc_feature (1)..(328): Homolog of NCBI NO: 15222183 NR Description: hypothetical protein [Arabidopsis thaliana]
  misc_feature (1)..(329): Homolog of NCBI NO: 15219698 NR Description: expressed protein [Arabidopsis thaliana]
  misc_feature (1)..(329): Homolog of NCBI NO: 99733 NR Description: hypothetical protein H1flk - Arabidopsis thaliana
MKAINGDSQCTEVMVPMAHSERSPVLLFMGGGMGAGKSTVLKDILKESFWSGAASNAVVVEADAFKESDVIYRALSSRGHHDDMLQTAELVHQSSTDAASSLLVTALNEGRDVIMDGTLSWEPFVEQTIAMARNVHKHRYRMGVGYKVAEDGTITENYWEQVNDAEEHQSEEISNGEAHTQKPYRIELVGVVCDGYLAVVRGIRRAIMTGRAVRVNSQLKSHKRFANAFPRYCKLVDNARLYCTNAVGGPPKLIGRKDGDHNLLVDREEIKCLETLGSLNAGADSIYELHKEPSPIMEPGSVWNDIVMSPSRPSDQKELKESIQKIEKSIRKM

SEQ ID NO: 59743 - DNA, 909 bp, Glycine max
  misc_feature (1)..(909): Ceres Seq. ID no. 15176678
gtgaaggaaacgtcgaaaccttaaagcgaaccatgccagaaggagaacccaccaatggttactgcagcagcagcagcggcgaagaagacggtgacgccgcttggagagcagccatcgattccattgctcaaaccaccacctatgtctcttccaccaccaaacacactcaccctaatcatgatgatgatgatgattacgatggccacaaacccaaaacacgacaacttaagcactaccaactcaaggcacaaaaccttctgaatgaaatattggaaaattcaatagagatagtgagaaaacctgtccctgtcgtggatgaggatcccgagagcaatgaatgcggcattcgcttgtttaaacatgctcagccaggaatagtgtttgatcacgtagatgaacctcaaccaccaaggaaacggcctagaatacttcctggaggggatattgatgagaaatcaaagaagcagtttagaaagcagattagatctgttgctgttaatggtatagaaataatagctgcagcaaacgatgcatacaagaagtcattagctagactagaagctaaagatgcagcagcaaaagctaaagccaagagagaagatgaaagagttgaaaatttgaaaaagattaggggagaaaagtggctaccttccatggcccaggagatgcaggttaaaattcgacactgatttttgtctttcattctcttaacttcaattctagttttatgtgtaactagatgattgattagctttgttgatttggtagtggagctggttgtaccctaaaaaatatagttatgggattatagtttagttgtgaaaagctttttttttttttttttttttcactattctgttacaacactcttcacaagttcacatattgaaatttccgaaaatgtaaatc

SEQ ID NO: 59744 - protein, 228 aa, Glycine max
  peptide (1)..(228): Ceres Seq. ID no. 15176679
  misc_feature (25)..(227): Homolog of NCBI NO: 21593080 NR Description: unknown [Arabidopsis thaliana]
  misc_feature (25)..(227): Homolog of NCBI NO: 15229629 NR Description: expressed protein [Arabidopsis thaliana]
EGNVETLKRTMPEGEPTNGYCSSSSGEEDGDAAWRAAIDSIAQTTTYVSSTTKHTHPNHDDDDDYDGHKPKTRQLKHYQLKAQNLLNEILENSIEIVRKPVPVVDEDPESNECGIRLFKHAQPGIVFDHVDEPQPPRKRPRILPGGDIDEKSKKQFRKQIRSVAVNGIEIIAAANDAYKKSLARLEAKDAAAKAKAKREDERVENLKKIRGEKWLPSMAQEMQVKIRH

SEQ ID NO: 59745 - protein, 218 aa, Glycine max
  peptide (1)..(218): Ceres Seq. ID no. 15176680
  misc_feature (15)..(217): Homolog of NCBI NO: 21593080 NR Description: unknown [Arabidopsis thaliana]
  misc_feature (15)..(217): Homolog of NCBI NO: 15229629 NR Description: expressed protein [Arabidopsis thaliana]
MPEGEPTNGYCSSSSGEEDGDAAWRAAIDSIAQTTTYVSSTTKHTHPNHDDDDDYDGHKPKTRQLKHYQLKAQNLLNEILENSIEIVRKPVPVVDEDPESNECGIRLFKHAQPGIVFDHVDEPQPPRKRPRILPGGDIDEKSKKQFRKQIRSVAVNGIEIIAAANDAYKKSLARLEAKDAAAKAKAKREDERVENLKKIRGEKWLPSMAQEMQVKIRH

SEQ ID NO: 59746 - DNA, 1243 bp, Glycine max
  misc_feature (1)..(1243): Ceres Seq. ID no. 14303355
gaggcaattatacatttaagttcatttcctcctctcctctctcttcattttatttttcttccatctgctaggaaaatgtctgtcagcgttgagggctctgcctttggggcactatttgaagaaaaaaatgtccattctgaagacagcaacgagcttgtgttgcatggtgcatttccattggctaaacatgagagacagaatggatttaatgccacagacatgaatgcatttggaaactccttcaggaactatgatgcagaaagtgaaaggcaaagaatggtggaggaattatataggatgcaacacatcaaccagacatatgactatgggaagagaatgagggaggagtatgggaaattggacaaattagaaatgggtatatgggagtgttgtgagctgctcaatgaagtgacggatgatagcgatcctgatttggatgaaccacaaatacaacatttgttgcagtccgctgaagccattagaaaagactatcctaatgaagattggttacatttaactgctcttattcatgatcttggaaagatccttatgcttccaagctttggtggccttcctcaatggtctgttgttggagatacatttcccctcggatgtgcttttgatgagtcaaatgttcaccacaagcatttcaaggacaatccggataacacaaatcctacttataacacgaaaaatggaatctacaaagaaggaattggactagacaatgttgtgatgtcatggggacatgatgagtatatgtatttggttgcaaaggaaaacggcaccactttgcctccagtagcattgttcattatcaaataccattctttttacgctttacatagggcaggagcatatacacatttgatgaatgaagaagatattgagaatttgaagtggctcaaaatatttagcaaatatgacctctacagcaagagtaaagttctagtagacatagaaaaagttaagccatactatatgtcgctcatcgagaagtatttcccagcaaagcttaggtggtgaaactcaaagacatacacatcgatatggaatcaaagtcatgggcaagctaaggatttaagtttatacttatgaattatgatcgttatgccgaacgtttaaggaattgtttttttcttttatcagattgaagttgttgcctaactttaaattattcttattaagctgtaccgaacgtttaccgtactagaagttgatgtatttacggtttggttgttcc

SEQ ID NO: 59747 - protein, 341 aa, Glycine max
  peptide (1)..(341): Ceres Seq. ID no. 14303356
  misc_feature (85)..(341): Pfam Name: Family of unknown function (DUF706) Pfam Description: Family of unknown function (DUF706)
  misc_feature (68)..(333): Homolog of NCBI NO: 7262695 NR Description: Strong similarity to an unknown protein from
  misc_feature (100)..(341): Homolog of NCBI NO: 13877657 NR Description: Unknown protein [Arabidopsis thaliana]
  misc_feature (68)..(341): Homolog of NCBI NO: 26451656 NR Description: unknown protein [Arabidopsis thaliana]
  misc_feature (68)..(341): Homolog of NCBI NO: 30683840 NR Description: expressed protein [Arabidopsis thaliana]
  misc_feature (26)..(341): Homolog of NCBI NO: 15241891 NR Description: expressed protein [Arabidopsis thaliana]
  misc_feature (26)..(341): Homolog of NCBI NO: 21536858 NR Description: unknown [Arabidopsis thaliana]
  misc_feature (26)..(341): Homolog of NCBI NO: 7487428 NR Description: hypothetical protein T25K17.70 - Arabidopsis
  misc_feature (26)..(341): Homolog of NCBI NO: 30687167 NR Description: expressed protein [Arabidopsis thaliana]
  misc_feature (26)..(341): Homolog of NCBI NO: 21554393 NR Description: unknown [Arabidopsis thaliana]
  misc_feature (26)..(341): Homolog of NCBI NO: 18399158 NR Description: expressed protein [Arabidopsis thaliana]
EAIIHLSSFPPLLSLHFIFLPSARKMSVSVEGSAFGALFEEKNVHSEDSNELVLHGAFPLAKHERQNGFNATDMNAFGNSFRNYDAESERQRMVEELYRMQHINQTYDYGKRMREEYGKLDKLEMGIWECCELLNEVTDDSDPDLDEPQIQHLLQSAEAIRKDYPNEDWLHLTALIHDLGKILMLPSFGGLPQWSVVGDTFPLGCAFDESNVHHKHFKDNPDNTNPTYNTKNGIYKEGIGLDNVVMSWGHDEYMYLVAKENGTTLPPVALFIIKYHSFYALHRAGAYTHLMNEEDIENLKWLKIFSKYDLYSKSKVLVDIEKVKPYYMSLIEKYFPAKLRW

SEQ ID NO: 59748 - protein, 316 aa, Glycine max
  peptide (1)..(316): Ceres Seq. ID no. 14303357
  misc_feature (60)..(316): Pfam Name: Family of unknown function (DUF706) Pfam Description: Family of unknown function (DUF706)
  misc_feature (43)..(308): Homolog of NCBI NO: 7262695 NR Description: Strong similarity to an unknown protein from
  misc_feature (75)..(316): Homolog of NCBI NO: 13877657 NR Description: Unknown protein [Arabidopsis thaliana]
  misc_feature (43)..(316): Homolog of NCBI NO: 26451656 NR Description: unknown protein [Arabidopsis thaliana]
  misc_feature (43)..(316): Homolog of NCBI NO: 30683840 NR Description: expressed protein [Arabidopsis thaliana]
  misc_feature (1)..(316): Homolog of NCBI NO: 15241891 NR Description: expressed protein [Arabidopsis thaliana]
  misc_feature (1)..(316): Homolog of NCBI NO: 21536858 NR Description: unknown [Arabidopsis thaliana]
  misc_feature (1)..(316): Homolog of NCBI NO: 7487428 NR Description: hypothetical protein T25K17.70 - Arabidopsis
  misc_feature (1)..(316): Homolog of NCBI NO: 30687167 NR Description: expressed protein [Arabidopsis thaliana]
  misc_feature (1)..(316): Homolog of NCBI NO: 21554393 NR Description: unknown [Arabidopsis thaliana]
  misc_feature (1)..(316): Homolog of NCBI NO: 18399158 NR Description: expressed protein [Arabidopsis thaliana]
MSVSVEGSAFGALFEEKNVHSEDSNELVLHGAFPLAKHERQNGFNATDMNAFGNSFRNYDAESERQRMVEELYRMQHINQTYDYGKRMREEYGKLDKLEMGIWECCELLNEVTDDSDPDLDEPQIQHLLQSAEAIRKDYPNEDWLHLTALIHDLGKILMLPSFGGLPQWSVVGDTFPLGCAFDESNVHHKHFKDNPDNTNPTYNTKNGIYKEGIGLDNVVMSWGHDEYMYLVAKENGTTLPPVALFIIKYHSFYALHRAGAYTHLMNEEDIENLKWLKIFSKYDLYSKSKVLVDIEKVKPYYMSLIEKYFPAKLRW

SEQ ID NO: 59749 - protein, 268 aa, Glycine max
  peptide (1)..(268): Ceres Seq. ID no. 14303358
  misc_feature (12)..(268): Pfam Name: Family of unknown function (DUF706) Pfam Description: Family of unknown function (DUF706)
  misc_feature (1)..(260): Homolog of NCBI NO: 7262695 NR Description: Strong similarity to an unknown protein from
  misc_feature (27)..(268): Homolog of NCBI NO: 13877657 NR Description: Unknown protein [Arabidopsis thaliana]
  misc_feature (1)..(268): Homolog of NCBI NO: 26451656 NR Description: unknown protein [Arabidopsis thaliana]
  misc_feature (1)..(268): Homolog of NCBI NO: 30683840 NR Description: expressed protein [Arabidopsis thaliana]
  misc_feature (1)..(268): Homolog of NCBI NO: 15241891 NR Description: expressed protein [Arabidopsis thaliana]
  misc_feature (1)..(268): Homolog of NCBI NO: 21536858 NR Description: unknown [Arabidopsis thaliana]
  misc_feature (1)..(268): Homolog of NCBI NO: 7487428 NR Description: hypothetical protein T25K17.70 - Arabidopsis
  misc_feature (1)..(268): Homolog of NCBI NO: 30687167 NR Description: expressed protein [Arabidopsis thaliana]
  misc_feature (1)..(268): Homolog of NCBI NO: 21554393 NR Description: unknown [Arabidopsis thaliana]
  misc_feature (1)..(268): Homolog of NCBI NO: 18399158 NR Description: expressed protein [Arabidopsis thaliana]
MNAFGNSFRNYDAESERQRMVEELYRMQHINQTYDYGKRMREEYGKLDKLEMGIWECCELLNEVTDDSDPDLDEPQIQHLLQSAEAIRKDYPNEDWLHLTALIHDLGKILMLPSFGGLPQWSVVGDTFPLGCAFDESNVHHKHFKDNPDNTNPTYNTKNGIYKEGIGLDNVVMSWGHDEYMYLVAKENGTTLPPVALFIIKYHSFYALHRAGAYTHLMNEEDIENLKWLKIFSKYDLYSKSKVLVDIEKVKPYYMSLIEKYFPAKLRW

SEQ ID NO: 59750 - DNA, 1715 bp, Glycine max
  misc_feature (1)..(1715): Ceres Seq. ID no. 14304838
actttcctctttctttcccttttcctcgtttccacaaccctcccgaattcttgagacgcttcccgaatcctttcacacacacgttgctgaatctatatatctaaatcccttcacttcccattcctaaatcctcttacaaaaactatacaacgttgcttttgttttgttttgttttgtctctctctaatcattccaatggccaaagaaggacccaactgggacgggttgctcaaatggagcattcctcattccgatgggactcgccccactcgcaatttaagtgaggaggatcggagatggtttatggaagcgatgcagtcacagaccattgatgttgtaaaacgtatgaaagagatcacacttgtgatgcaaactccagaacaagtcttgaaagaccaaggagttacccctgcagacattgaagatatgttggatgagttgcaagagcatgttgagtcaattgacatggccaatgatctccattcaattggtggcttggttcctcttcttggttacctaaagagttctcatgccaatattcgagcaaaggctgctgatgttgtgaccacaatagtccagaataatcctcgaagtcagcaacttgttatggaagcaaatggctttgaacctcttatttctaatttcagttcagatcctgatgtgactgttagaactaaagcactgggtgcaatatcttcactaatccggcacaacaaacaaggcattactgtatttcgtttggcaaatgggtatgctgctttgaaagatgcactagcctctgaaaatgtgagatttcaaaggaaagctctcaacttgacccattacctgttgcatgagaataattcagactgcaacatcgtgaatgagcttgggtttcctcgactgttgatgcaccttgcctcaagtgaagattcagatgtcagagaagctgcccttcggggccttcttgagcttgcttgcaatactcaagatggcaaggatggcaatgaggaagacagtgagaagatgaagcaacttcttcaagaacgaataaacaatatcagtttaatgtcagctgaggaccttggtgtagtcagggaggagaggcaacttgtggactccctgtggagcacttgcttcaacgagccatcttctcttcgagagaaagggtcttcttgtgcttccaggtgaagatgcaccccctccagatgttgctagccaatattttgaggcctcctctaagatattcgagtgtgaatccatcttccaagaaagactcaaacaatgaaaagaaagagatccctttgcttttagggtcagggccttctcttgcagacactaacaaccaaggttcaaatagagaaaatgctaatagctgaaagcttggatgctttctgctctgttttttttttgccgtgctttctttctatcttatcatacaagtaatttcatataggctctttttttcccctttcttttctcaccttagattggtcttccattgtatttcaagaatgatctcatggtatgtgacactataactagccttccattgcagcggtgaatgccttcaattttttgcacttgatatttttaaatacttgtttagatgttacagtcccactcttacatgtataaaaggatctacttgtccacattatccttcaattttgggtttgggcagtgtgtttctagtgaataaaaagagagaatgatagttatgatagttatgatag

SEQ ID NO: 59751 - protein, 324 aa, Glycine max
  peptide (1)..(324): Ceres Seq. ID no. 14304839
  misc_feature (130)..(171): Pfam Name: Armadillo/beta-catenin-like repeat Pfam Description: Armadillo/beta-catenin-like repeat
  misc_feature (7)..(316): Homolog of NCBI NO: 29436427 NR Description: Similar to RIKEN cDNA 1500019G21 gene [Danio
  misc_feature (7)..(285): Homolog of NCBI NO: 23489828 NR Description: hypothetical protein [Plasmodium yoelii yoelii]
  misc_feature (1)..(314): Homolog of NCBI NO: 15241689 NR Description: expressed protein [Arabidopsis thaliana]
  misc_feature (1)..(318): Homolog of NCBI NO: 26449490 NR Description: unknown protein [Arabidopsis thaliana]
  misc_feature (1)..(318): Homolog of NCBI NO: 15232329 NR Description: expressed protein [Arabidopsis thaliana]
  misc_feature (1)..(318): Homolog of NCBI NO: 34897412 NR Description: putative Hsp70 binding protein
  misc_feature (1)..(29): Homolog of NCBI NO: 6478927 NR Description: hypothetical protein [Arabidopsis thaliana]
  misc_feature (30)..(318): Homolog of NCBI NO: 6478927 NR Description: hypothetical protein [Arabidopsis thaliana]
  misc_feature (1)..(318): Homolog of NCBI NO: 21553998 NR Description: unknown [Arabidopsis thaliana]
  misc_feature (1)..(318): Homolog of NCBI NO: 18398480 NR Description: expressed protein [Arabidopsis thaliana]
MAKEGPNWDGLLKWSIPHSDGTRPTRNLSEEDRRWFMEAMQSQTIDVVKRMKEITLVMQTPEQVLKDQGVTPADIEDMLDELQEHVESIDMANDLHSIGGLVPLLGYLKSSHANIRAKAADVVTTIVQNNPRSQQLVMEANGFEPLISNFSSDPDVTVRTKALGAISSLIRHNKQGITVFRLANGYAALKDALASENVRFQRKALNLTHYLLHENNSDCNIVNELGFPRLLMHLASSEDSDVREAALRGLLELACNTQDGKDGNEEDSEKMKQLLQERINNISLMSAEDLGVVREERQLVDSLWSTCFNEPSSLREKGSSCASR

SEQ ID NO: 59752 - protein, 288 aa, Glycine max
  peptide (1)..(288): Ceres Seq. ID no. 14304840
  misc_feature (94)..(135): Pfam Name: Armadillo/beta-catenin-like repeat Pfam Description: Armadillo/beta-catenin-like repeat
  misc_feature (1)..(276): Homolog of NCBI NO: 3928869 NR Description: Hsp70 binding protein HspBP1 [Homo sapiens]
  misc_feature (1)..(280): Homolog of NCBI NO: 29436427 NR Description: Similar to RIKEN cDNA 1500019G21 gene [Danio
  misc_feature (1)..(249): Homolog of NCBI NO: 23489828 NR Description: hypothetical protein [Plasmodium yoelii yoelii]
  misc_feature (1)..(278): Homolog of NCBI NO: 15241689 NR Description: expressed protein [Arabidopsis thaliana]
  misc_feature (1)..(282): Homolog of NCBI NO: 26449490 NR Description: unknown protein [Arabidopsis thaliana]
  misc_feature (1)..(282): Homolog of NCBI NO: 15232329 NR Description: expressed protein [Arabidopsis thaliana]
  misc_feature (1)..(282): Homolog of NCBI NO: 34897412 NR Description: putative Hsp70 binding protein
  misc_feature (1)..(282): Homolog of NCBI NO: 6478927 NR Description: hypothetical protein [Arabidopsis thaliana]
  misc_feature (1)..(282): Homolog of NCBI NO: 21553998 NR Description: unknown [Arabidopsis thaliana]
  misc_feature (1)..(282): Homolog of NCBI NO: 18398480 NR Description: expressed protein [Arabidopsis thaliana]
MEAMQSQTIDVVKRMKEITLVMQTPEQVLKDQGVTPADIEDMLDELQEHVESIDMANDLHSIGGLVPLLGYLKSSHANIRAKAADVVTTIVQNNPRSQQLVMEANGFEPLISNFSSDPDVTVRTKALGAISSLIRHNKQGITVFRLANGYAALKDALASENVRFQRKALNLTHYLLHENNSDCNIVNELGFPRLLMHLASSEDSDVREAALRGLLELACNTQDGKDGNEEDSEKMKQLLQERINNISLMSAEDLGVVREERQLVDSLWSTCFNEPSSLREKGSSCASR

SEQ ID NO: 59753 - protein, 285 aa, Glycine max
  peptide (1)..(285): Ceres Seq. ID no. 14304841
  misc_feature (91)..(132): Pfam Name: Armadillo/beta-catenin-like repeat Pfam Description: Armadillo/beta-catenin-like repeat
  misc_feature (1)..(273): Homolog of NCBI NO: 3928869 NR Description: Hsp70 binding protein HspBP1 [Homo sapiens]
  misc_feature (1)..(277): Homolog of NCBI NO: 29436427 NR Description: Similar to RIKEN cDNA 1500019G21 gene [Danio
  misc_feature (1)..(246): Homolog of NCBI NO: 23489828 NR Description: hypothetical protein [Plasmodium yoelii yoelii]
  misc_feature (1)..(275): Homolog of NCBI NO: 15241689 NR Description: expressed protein [Arabidopsis thaliana]
  misc_feature (1)..(279): Homolog of NCBI NO: 26449490 NR Description: unknown protein [Arabidopsis thaliana]
  misc_feature (1)..(279): Homolog of NCBI NO: 15232329 NR Description: expressed protein [Arabidopsis thaliana]
  misc_feature (1)..(279): Homolog of NCBI NO: 34897412 NR Description: putative Hsp70 binding protein
  misc_feature (1)..(279): Homolog of NCBI NO: 6478927 NR Description: hypothetical protein [Arabidopsis thaliana]
  misc_feature (1)..(279): Homolog of NCBI NO: 21553998 NR Description: unknown [Arabidopsis thaliana]
  misc_feature (1)..(279): Homolog of NCBI NO: 18398480 NR Description: expressed protein [Arabidopsis thaliana]
MQSQTIDVVKRMKEITLVMQTPEQVLKDQGVTPADIEDMLDELQEHVESIDMANDLHSIGGLVPLLGYLKSSHANIRAKAADVVTTIVQNNPRSQQLVMEANGFEPLISNFSSDPDVTVRTKALGAISSLIRHNKQGITVFRLANGYAALKDALASENVRFQRKALNLTHYLLHENNSDCNIVNELGFPRLLMHLASSEDSDVREAALRGLLELACNTQDGKDGNEEDSEKMKQLLQERINNISLMSAEDLGVVREERQLVDSLWSTCFNEPSSLREKGSSCASR

SEQ ID NO: 59754 - DNA, 1619 bp, Glycine max
  misc_feature (1)..(1619): Ceres Seq. ID no. 15172124
gatccatcttcaactttcctttctttcctttcctcttctttttctccctccaagaacacatttttctttgacccttttgttccctctccacccacttcccctttaagacaatttcatgcttctctgtctcggatcctagatcttgctgtcggtgggttgatcggagtagatgtcgccgtcaaacgggttgcataacggcggcggaggcggcagcggtggtggcggaggtaatggggtgagttatatagagcaccaggtttcaaaacttgacactcttgctggtgtggcaatcaagtatggtgttgaggtagctgacataaaaaggatgaatgggttggccacagatcttcaaatgttcgcactgaagacattgaaaattccattaccaggacgtcatccaccatctcctgctcctggtccacatgatgaacctgcaaagtcaggagaagctagtattgagaggaaacccctacgcataggtcaatctgccatgaaggaacctctccagtccttagaactgaaaccacctcaaccgaatatttctccagctatgagcattttacagaaattctatggcctcaaatcttcaaattcaagagatacattgaatggaacagaaatggcagtttatttgtcctcaaattctgatcattctagtggggaatggcttcccaaagcctcacccattttagacctaccatcagcatcaaatgattaccccaggtcaacaaatttagtgtatgatctactgaccggggatgatgaatatgtgcctcttgcggaaattggggacacaggagttgagaagtctgatgagaaatctgtccgaagacgtcagaaagctgaagttgataacggaaccagtaccccagaaaagattatgaaagaaggaaatggtaatggatcaaatggtctttcttcaaatggaaaaacattagccatgaggccgaaatcggctagtcgagcagcgctgttccctgagtcagaatcaggatggttagattcaattccagtggggttgggagaatctatatttactgatggcttttccggagtgcgcaaatcgtcaagtgcatcaagcctcagagagcaggaaaaaaacaattcagcagcagcctggccgcctgcaatatggagcttgaaacctgacttgcaagcagccatttcgaaacctatctttgatggtctacctatcccaatatctggccgcagaagcaaagctgcccttgattagtgtaaaattgttccccatttgagcaaaatactttttgactttacacaaatataaattgcaacaagatgcaattatttgggttagtaagccttgcaaagaaggaaaagaaaaaagaagagagaaaaatacaaaattaggatatttgttccaggcctagcaaggggtagatgacctcctaagaggaaaagcttcagcagttgcaactgaggaaaaggtgcatgaaaatggtaagcagctggtttttcaattgtaccaataatgtaatggtgttcgaccccacctggatgataaagagttatttacatattgattatttcctttgttaaatgaacgagtgaagtgaaagtcattctgttcagtggttaatcatgtgattattattatt

SEQ ID NO: 59755 - protein, 354 aa, Glycine max
  peptide (1)..(354): Ceres Seq. ID no. 15172125
  misc_feature (28)..(71): Pfam Name: LysM domain Pfam Description: LysM domain
  misc_feature (20)..(133): Homolog of NCBI NO: 23503313 NR Description: hypothetical protein MGC35274 [Homo sapiens]
  misc_feature (25)..(73): Homolog of NCBI NO: 24431595 NR Description: Hypothetical protein [Oryza sativa (japonica
  misc_feature (25)..(199): Homolog of NCBI NO: 37535512 NR Description: unknown protein [Oryza sativa (japonica
  misc_feature (25)..(354): Homolog of NCBI NO: 9759371 NR Description: gene_id:MYJ24.12~unknown protein [Arabidopsis
  misc_feature (25)..(354): Homolog of NCBI NO: 22327003 NR Description: expressed protein [Arabidopsis thaliana]
  misc_feature (25)..(354): Homolog of NCBI NO: 30682281 NR Description: expressed protein [Arabidopsis thaliana]
  misc_feature (25)..(354): Homolog of NCBI NO: 11291586 NR Description: hypothetical protein T22D6.140 - Arabidopsis
MSPSNGLHNGGGGGSGGGGGNGVSYIEHQVSKLDTLAGVAIKYGVEVADIKRMNGLATDLQMFALKTLKIPLPGRHPPSPAPGPHDEPAKSGEASIERKPLRIGQSAMKEPLQSLELKPPQPNISPAMSILQKFYGLKSSNSRDTLNGTEMAVYLSSNSDHSSGEWLPKASPILDLPSASNDYPRSTNLVYDLLTGDDEYVPLAEIGDTGVEKSDEKSVRRRQKAEVDNGTSTPEKIMKEGNGNGSNGLSSNGKTLAMRPKSASRAALFPESESGWLDSIPVGLGESIFTDGFSGVRKSSSASSLREQEKNNSAAAWPPAIWSLKPDLQAAISKPIFDGLPIPISGRRSKAALD

SEQ ID NO: 59756 - protein, 302 aa, Glycine max
  peptide (1)..(302): Ceres Seq. ID no. 15172126
  misc_feature (1)..(81): Homolog of NCBI NO: 23503313 NR Description: hypothetical protein MGC35274 [Homo sapiens]
  misc_feature (1)..(21): Homolog of NCBI NO: 24431595 NR Description: Hypothetical protein [Oryza sativa (japonica
  misc_feature (1)..(147): Homolog of NCBI NO: 37535512 NR Description: unknown protein [Oryza sativa (japonica
  misc_feature (1)..(302): Homolog of NCBI NO: 9759371 NR Description: gene_id:MYJ24.12~unknown protein [Arabidopsis
  misc_feature (1)..(302): Homolog of NCBI NO: 22327003 NR Description: expressed protein [Arabidopsis thaliana]
  misc_feature (1)..(302): Homolog of NCBI NO: 30682281 NR Description: expressed protein [Arabidopsis thaliana]
  misc_feature (1)..(302): Homolog of NCBI NO: 11291586 NR Description: hypothetical protein T22D6.140 - Arabidopsis
MNGLATDLQMFALKTLKIPLPGRHPPSPAPGPHDEPAKSGEASIERKPLRIGQSAMKEPLQSLELKPPQPNISPAMSILQKFYGLKSSNSRDTLNGTEMAVYLSSNSDHSSGEWLPKASPILDLPSASNDYPRSTNLVYDLLTGDDEYVPLAEIGDTGVEKSDEKSVRRRQKAEVDNGTSTPEKIMKEGNGNGSNGLSSNGKTLAMRPKSASRAALFPESESGWLDSIPVGLGESIFTDGFSGVRKSSSASSLREQEKNNSAAAWPPAIWSLKPDLQAAISKPIFDGLPIPISGRRSKAALD

SEQ ID NO: 59757 - protein, 293 aa, Glycine max
  peptide (1)..(293): Ceres Seq. ID no. 15172127
  misc_feature (1)..(72): Homolog of NCBI NO: 23503313 NR Description: hypothetical protein MGC35274 [Homo sapiens]
  misc_feature (1)..(12): Homolog of NCBI NO: 24431595 NR Description: Hypothetical protein [Oryza sativa (japonica
  misc_feature (1)..(138): Homolog of NCBI NO: 37535512 NR Description: unknown protein [Oryza sativa (japonica
  misc_feature (1)..(293): Homolog of NCBI NO: 9759371 NR Description: gene_id:MYJ24.12~unknown protein [Arabidopsis
  misc_feature (1)..(293): Homolog of NCBI NO: 22327003 NR Description: expressed protein [Arabidopsis thaliana]
  misc_feature (1)..(293): Homolog of NCBI NO: 30682281 NR Description: expressed protein [Arabidopsis thaliana]
  misc_feature (1)..(293): Homolog of NCBI NO: 11291586 NR Description: hypothetical protein T22D6.140 - Arabidopsis
MFALKTLKIPLPGRHPPSPAPGPHDEPAKSGEASIERKPLRIGQSAMKEPLQSLELKPPQPNISPAMSILQKFYGLKSSNSRDTLNGTEMAVYLSSNSDHSSGEWLPKASPILDLPSASNDYPRSTNLVYDLLTGDDEYVPLAEIGDTGVEKSDEKSVRRRQKAEVDNGTSTPEKIMKEGNGNGSNGLSSNGKTLAMRPKSASRAALFPESESGWLDSIPVGLGESIFTDGFSGVRKSSSASSLREQEKNNSAAAWPPAIWSLKPDLQAAISKPIFDGLPIPISGRRSKAALD

SEQ ID NO: 59758 - DNA, 1448 bp, Glycine max
  misc_feature (1)..(1448): Ceres Seq. ID no. 14304859
attgacaacgactcctttagaagacagaaaattcttgaagagtgaaatgaccaatgatgcaaatttatcccgagttaagcctttggcatctgaaatccctcacaaagattatgcggatagatttgatagaaaaatctcgcaagtcggagaaatcaagtatcatgaagaaccagatgaggaacttgtcagacattacaagcgtcttccaaatagtatccttacagagcaatctcttaaagatatgctttctgattccctcacttcactgaatctagctaacctcaagtgggtgaaaaacgaacatttgaataagcttggttttgttgctccaaacttagtggagcttaatatttcaggtaccgttgctaatgacaccacccttgaagaaattggcaagacatgcttgaatcttaagtcaattgacatttctcattgtccggagcttactgagaaaggagtccgagcatttttcgagaactgtccccctattcaaaaattctgggcatcaacttgtcccaattctgtaacagatgagtcattggcctatttcacaaatgctgaagaattaactacattcaatatcgaattttgttctaaggtcagtgacgtatccctccaggtcattgtcgaagctgctcctccactcaaagagttatacgtttcaggctgtactaaaattaccggaaagattgtaaccgctttaatacagataggaaattaccaattagaaattgccgaaatctcaaacttaagccaagctgagtttgataacgagaccatgaaagcggtcggaacatgttcaaagttaagaagattaaacatttcaggggatagtaatattggagatgaaggtgtacacaacttgatctcaggatataaggaagcagatgattcattggtgaagaaagatgaagggttcaagcacttagttgagtttagaatgagttcaaccaagatcaattctgaaggcgctgtgataaaattctgcaatgcttgtccaaacttggagatcttggacatgaatggttttgtgcctgtaggagagactggaataaatatgatctgcaaatcattatctaagcttaagatctgcttgataaactttacggataagatatcagatccttacctagttgagcttcgtcagacttatcctgatgtgaagtttgtccgcacaataattgcgcctagtaatccagctgataatgaattgagagtgccattcccaaggattcaacaaggaaagaagaaaaagaagaagggtaagaagaagaagtaaaaaggcatagtttagcagttgatattgtaataatataaatatttctatattaaagagctttttttttgttgctgcctcagaacctttattttagtttatttttgctgatatatgacttaatttaaggagatatattccatatatactaaaaacactcttagcttaattc

SEQ ID NO: 59759 - protein, 425 aa, Glycine max
  peptide (1)..(425): Ceres Seq. ID no. 14304860
  misc_feature (89)..(399): Homolog of NCBI NO: 27734755 NR Description: F-box protein FBL2 [Homo sapiens]
  misc_feature (106)..(410): Homolog of NCBI NO: 15237286 NR Description: expressed protein [Arabidopsis thaliana]
  misc_feature (75)..(399): Homolog of NCBI NO: 6164721 NR Description: F-box protein Fbl2 [Homo sapiens]
  misc_feature (75)..(399): Homolog of NCBI NO: 16306582 NR Description: F-box and leucine-rich repeat protein 2
  misc_feature (75)..(399): Homolog of NCBI NO: 7022695 NR Description: unnamed protein product [Homo sapiens]
  misc_feature (75)..(399): Homolog of NCBI NO: 6063090 NR Description: F-box protein FBL2 [Homo sapiens]
  misc_feature (75)..(399): Homolog of NCBI NO: 5919219 NR Description: leucine-rich repeats containing F-box protein
  misc_feature (75)..(399): Homolog of NCBI NO: 30519963 NR Description: F-box and leucine-rich repeat protein 2 [Mus
  misc_feature (75)..(399): Homolog of NCBI NO: 26336707 NR Description: unnamed protein product [Mus musculus]
  misc_feature (85)..(410): Homolog of NCBI NO: 31226369 NR Description: ENSANGP00000010053 [Anopheles gambiae]
LTTTPLEDRKFLKSEMTNDANLSRVKPLASEIPHKDYADRFDRKISQVGEIKYHEEPDEELVRHYKRLPNSILTEQSLKDMLSDSLTSLNLANLKWVKNEHLNKLGFVAPNLVELNISGTVANDTTLEEIGKTCLNLKSIDISHCPELTEKGVRAFFENCPPIQKFWASTCPNSVTDESLAYFTNAEELTTFNIEFCSKVSDVSLQVIVEAAPPLKELYVSGCTKITGKIVTALIQIGNYQLEIAEISNLSQAEFDNETMKAVGTCSKLRRLNISGDSNIGDEGVHNLISGYKEADDSLVKKDEGFKHLVEFRMSSTKINSEGAVIKFCNACPNLEILDMNGFVPVGETGINMICKSLSKLKICLINFTDKISDPYLVELRQTYPDVKFVRTIIAPSNPADNELRVPFPRIQQGKKKKKKGKKKK

SEQ ID NO: 59760 - protein, 410 aa, Glycine max
  peptide (1)..(410): Ceres Seq. ID no. 14304861
  misc_feature (74)..(384): Homolog of NCBI NO: 27734755 NR Description: F-box protein FBL2 [Homo sapiens]
  misc_feature (91)..(395): Homolog of NCBI NO: 15237286 NR Description: expressed protein [Arabidopsis thaliana]
  misc_feature (60)..(384): Homolog of NCBI NO: 6164721 NR Description: F-box protein Fbl2 [Homo sapiens]
  misc_feature (60)..(384): Homolog of NCBI NO: 7022695 NR Description: unnamed protein product [Homo sapiens]
  misc_feature (60)..(384): Homolog of NCBI NO: 16306582 NR Description: F-box and leucine-rich repeat protein 2
  misc_feature (60)..(384): Homolog of NCBI NO: 6063090 NR Description: F-box protein FBL2 [Homo sapiens]
  misc_feature (60)..(384): Homolog of NCBI NO: 5919219 NR Description: leucine-rich repeats containing F-box protein
  misc_feature (60)..(384): Homolog of NCBI NO: 30519963 NR Description: F-box and leucine-rich repeat protein 2 [Mus
  misc_feature (60)..(384): Homolog of NCBI NO: 26336707 NR Description: unnamed protein product [Mus musculus]
  misc_feature (70)..(395): Homolog of NCBI NO: 31226369 NR Description: ENSANGP00000010053 [Anopheles gambiae]
MTNDANLSRVKPLASEIPHKDYADRFDRKISQVGEIKYHEEPDEELVRHYKRLPNSILTEQSLKDMLSDSLTSLNLANLKWVKNEHLNKLGFVAPNLVELNISGTVANDTTLEEIGKTCLNLKSIDISHCPELTEKGVRAFFENCPPIQKFWASTCPNSVTDESLAYFTNAEELTTFNIEFCSKVSDVSLQVIVEAAPPLKELYVSGCTKITGKIVTALIQIGNYQLEIAEISNLSQAEFDNETMKAVGTCSKLRRLNISGDSNIGDEGVHNLISGYKEADDSLVKKDEGFKHLVEFRMSSTKINSEGAVIKFCNACPNLEILDMNGFVPVGETGINMICKSLSKLKICLINFTDKISDPYLVELRQTYPDVKFVRTIIAPSNPADNELRVPFPRIQQGKKKKKKGKKKK

SEQ ID NO: 59761 - protein, 345 aa, Glycine max
  peptide (1)..(345): Ceres Seq. ID no. 14304862
  misc_feature (9)..(319): Homolog of NCBI NO: 27734755 NR Description: F-box protein FBL2 [Homo sapiens]
  misc_feature (26)..(330): Homolog of NCBI NO: 15237286 NR Description: expressed protein [Arabidopsis thaliana]
  misc_feature (1)..(319): Homolog of NCBI NO: 6164721 NR Description: F-box protein Fbl2 [Homo sapiens]
  misc_feature (1)..(319): Homolog of NCBI NO: 16306582 NR Description: F-box and leucine-rich repeat protein 2
  misc_feature (1)..(319): Homolog of NCBI NO: 7022695 NR Description: unnamed protein product [Homo sapiens]
  misc_feature (1)..(319): Homolog of NCBI NO: 6063090 NR Description: F-box protein FBL2 [Homo sapiens]
  misc_feature (1)..(319): Homolog of NCBI NO: 5919219 NR Description: leucine-rich repeats containing F-box protein
  misc_feature (1)..(319): Homolog of NCBI NO: 30519963 NR Description: F-box and leucine-rich repeat protein 2 [Mus
  misc_feature (1)..(319): Homolog of NCBI NO: 26336707 NR Description: unnamed protein product [Mus musculus]
  misc_feature (5)..(330): Homolog of NCBI NO: 31226369 NR Description: ENSANGP00000010053 [Anopheles gambiae]
MLSDSLTSLNLANLKWVKNEHLNKLGFVAPNLVELNISGTVANDTTLEEIGKTCLNLKSIDISHCPELTEKGVRAFFENCPPIQKFWASTCPNSVTDESLAYFTNAEELTTFNIEFCSKVSDVSLQVIVEAAPPLKELYVSGCTKITGKIVTALIQIGNYQLEIAEISNLSQAEFDNETMKAVGTCSKLRRLNISGDSNIGDEGVHNLISGYKEADDSLVKKDEGFKHLVEFRMSSTKINSEGAVIKFCNACPNLEILDMNGFVPVGETGINMICKSLSKLKICLINFTDKISDPYLVELRQTYPDVKFVRTIIAPSNPADNELRVPFPRIQQGKKKKKKGKKKK

SEQ ID NO: 59762 - DNA, 1496 bp, Glycine max
  misc_feature (1)..(1496): Ceres Seq. ID no. 15177818
acaaaatcgcccgcagtttcatcttcttcttcactctcttgctctcagtctcagactatttttctgaaagcatttcaaatggttgatagcaatccttcctctggatcacccgaagaaacacaaaatcccaacccagatgggaatgcacctgttgaaagtgatcttgcattggagaatctagcccaaaaagttcaagaatctctctctctggaaaaaagacataaattttgggaaacccaacctgttgggcagttcaaggatgtaggggactccagtttgccagaaggcccgattgaacttccaacccccttatctgaggtcaaacaagaaccatacaaccttcctgaccactatgaatgggttacttgtgacataaactctgaggagacgtgtgatgaggtatacaaccttcttgctcataattatgttgaggatgatgagaatatgtttcgatttaactactcaaaggaatttctgcgctgggctctgcaacctccgggttatttcaagagttggcatattggtgtccgtgttaaaagttccaagaagatggttgcctttataacaggtattcctgctagaatccgagttcgtgatgaggttgttcatatggcagagatcaattttctgtgtgtccataagaagcttcgaacaaagaggcttgctcctgtcatgatcaaagaggtcaccaggagggtgcatctggaaaatatgtggcaggcagcctacactgctggagtagttctccctacaccaataacaacttgtcaatactggcacagatctttgaatcccaagaagctaattgatgttggtttttctcggcttggtgcacgaatgacaatgagtcgaaccatcaagctttacaagctaccagaatcaacaatcaccccagggtttaggaagatggaaattcatgacgttcctgcagttaccaggctaattagaaattatttgagtcattttgttgttgcacctgattttgatgaaaacgatgtggagcattggcttcttccaagggatggtgttattgacagttatctggttgaaagtccggaaactcacgaggtcacggacttttgtagtttttacacacttccttcttctatccttggccacctaaattataaaattttgaaagcagcatattcattttataatgtttccacagtaactcctttgcttcagctgataaatgatgctctcattgtcgcaaaacacaaggattatgatgttttcaatgcattagatgtcatgcagaatgagaccttcttgagggaactgaagtttggaccaggtgatgggaaacttcattattatctttacaactaccgaataaggcatgcattgaagccatcagagcttgggcttgtgcttctgtagtctaaattttggaaatttgtcttgctatattgggatttataatggttttgctgtagacattgtatggttgcaaattatgtggtgatcaacgattagaccttaaattttgcttc

SEQ ID NO: 59763 - protein, 460 aa, Glycine max
  peptide (1)..(460): Ceres Seq. ID no. 15177819
  misc_feature (270)..(459): Pfam Name: Myristoyl-CoA:protein N-myristoyltransferase, Pfam Description: Myristoyl-CoA:protein N-myristoyltransferase,
  misc_feature (56)..(459): Homolog of NCBI NO: 6679084 NR Description: N-myristoyltransferase 2 [Mus musculus]
  misc_feature (22)..(459): Homolog of NCBI NO: 22902271 NR Description: Nmt2 protein [Mus musculus]
  misc_feature (2)..(459): Homolog of NCBI NO: 4758816 NR Description: glycylpeptide N-tetradecanoyltransferase 2 [Homo
  misc_feature (2)..(459): Homolog of NCBI NO: 30584349 NR Description: Homo sapiens N-myristoyltransferase 2 [synthetic
  misc_feature (2)..(459): Homolog of NCBI NO: 13623535 NR Description: N-myristoyltransferase 2 [Homo sapiens]
  misc_feature (72)..(459): Homolog of NCBI NO: 13924516 NR Description: N-myristoyltransferase-like protein 2
  misc_feature (27)..(106): Homolog of NCBI NO: 8777442 NR Description: N-myristoyl transferase [Arabidopsis thaliana]
  misc_feature (170)..(460): Homolog of NCBI NO: 8777442 NR Description: N-myristoyl transferase [Arabidopsis thaliana]
  misc_feature (50)..(460): Homolog of NCBI NO: 34910442 NR Description: putative N-myristoyl transferase
  misc_feature (27)..(460): Homolog of NCBI NO: 18423927 NR Description: N-myristoyl transferase [Arabidopsis thaliana]
TKSPAVSSSSSLSCSQSQTIFLKAFQMVDSNPSSGSPEETQNPNPDGNAPVESDLALENLAQKVQESLSLEKRHKFWETQPVGQFKDVGDSSLPEGPIELPTPLSEVKQEPYNLPDHYEWVTCDINSEETCDEVYNLLAHNYVEDDENMFRFNYSKEFLRWALQPPGYFKSWHIGVRVKSSKKMVAFITGIPARIRVRDEVVHMAEINFLCVHKKLRTKRLAPVMIKEVTRRVHLENMWQAAYTAGVVLPTPITTCQYWHRSLNPKKLIDVGFSRLGARMTMSRTIKLYKLPESTITPGFRKMEIHDVPAVTRLIRNYLSHFVVAPDFDENDVEHWLLPRDGVIDSYLVESPETHEVTDFCSFYTLPSSILGHLNYKILKAAYSFYNVSTVTPLLQLINDALIVAKHKDYDVFNALDVMQNETFLRELKFGPGDGKLHYYLYNYRIRHALKPSELGLVLL

SEQ ID NO: 59764 - protein, 434 aa, Glycine max
  peptide (1)..(434): Ceres Seq. ID no. 15177820
  misc_feature (244)..(433): Pfam Name: Myristoyl-CoA:protein N-myristoyltransferase, Pfam Description: Myristoyl-CoA:protein N-myristoyltransferase,
  misc_feature (30)..(433): Homolog of NCBI NO: 6679084 NR Description: N-myristoyltransferase 2 [Mus musculus]
  misc_feature (1)..(433): Homolog of NCBI NO: 22902271 NR Description: Nmt2 protein [Mus musculus]
  misc_feature (1)..(433): Homolog of NCBI NO: 4758816 NR Description: glycylpeptide N-tetradecanoyltransferase 2 [Homo
  misc_feature (1)..(433): Homolog of NCBI NO: 30584349 NR Description: Homo sapiens N-myristoyltransferase 2 [synthetic
  misc_feature (1)..(433): Homolog of NCBI NO: 13623535 NR Description: N-myristoyltransferase 2 [Homo sapiens]
  misc_feature (46)..(433): Homolog of NCBI NO: 13924516 NR Description: N-myristoyltransferase-like protein 2
  misc_feature (1)..(80): Homolog of NCBI NO: 8777442 NR Description: N-myristoyl transferase [Arabidopsis thaliana]
  misc_feature (144)..(434): Homolog of NCBI NO: 8777442 NR Description: N-myristoyl transferase [Arabidopsis thaliana]
  misc_feature (24)..(434): Homolog of NCBI NO: 34910442 NR Description: putative N-myristoyl transferase
  misc_feature (1)..(434): Homolog of NCBI NO: 18423927 NR Description: N-myristoyl transferase [Arabidopsis thaliana]
MVDSNPSSGSPEETQNPNPDGNAPVESDLALENLAQKVQESLSLEKRHKFWETQPVGQFKDVGDSSLPEGPIELPTPLSEVKQEPYNLPDHYEWVTCDINSEETCDEVYNLLAHNYVEDDENMFRFNYSKEFLRWALQPPGYFKSWHIGVRVKSSKKMVAFITGIPARIRVRDEVVHMAEINFLCVHKKLRTKRLAPVMIKEVTRRVHLENMWQAAYTAGVVLPTPITTCQYWHRSLNPKKLIDVGFSRLGARMTMSRTIKLYKLPESTITPGFRKMEIHDVPAVTRLIRNYLSHFVVAPDFDENDVEHWLLPRDGVIDSYLVESPETHEVTDFCSFYTLPSSILGHLNYKILKAAYSFYNVSTVTPLLQLINDALIVAKHKDYDVFNALDVMQNETFLRELKFGPGDGKLHYYLYNYRIRHALKPSELGLVLL

SEQ ID NO: 59765 - protein, 312 aa, Glycine max
  peptide (1)..(312): Ceres Seq. ID no. 15177821
  misc_feature (122)..(311): Pfam Name: Myristoyl-CoA:protein N-myristoyltransferase, Pfam Description: Myristoyl-CoA:protein N-myristoyltransferase,
  misc_feature (1)..(311): Homolog of NCBI NO: 34877234 NR Description: similar to N-myristoyltransferase 2 [Rattus
  misc_feature (1)..(311): Homolog of NCBI NO: 6679084 NR Description: N-myristoyltransferase 2 [Mus musculus]
  misc_feature (1)..(311): Homolog of NCBI NO: 22902271 NR Description: Nmt2 protein [Mus musculus]
  misc_feature (1)..(311): Homolog of NCBI NO: 4758816 NR Description: glycylpeptide N-tetradecanoyltransferase 2 [Homo
  misc_feature (1)..(311): Homolog of NCBI NO: 30584349 NR Description: Homo sapiens N-myristoyltransferase 2 [synthetic
  misc_feature (1)..(311): Homolog of NCBI NO: 13623535 NR Description: N-myristoyltransferase 2 [Homo sapiens]
  misc_feature (1)..(311): Homolog of NCBI NO: 13924516 NR Description: N-myristoyltransferase-like protein 2
  misc_feature (22)..(312): Homolog of NCBI NO: 8777442 NR Description: N-myristoyl transferase [Arabidopsis thaliana]
  misc_feature (1)..(312): Homolog of NCBI NO: 34910442 NR Description: putative N-myristoyl transferase
  misc_feature (1)..(312): Homolog of NCBI NO: 18423927 NR Description: N-myristoyl transferase [Arabidopsis thaliana]
MFRFNYSKEFLRWALQPPGYFKSWHIGVRVKSSKKMVAFITGIPARIRVRDEVVHMAEINFLCVHKKLRTKRLAPVMIKEVTRRVHLENMWQAAYTAGVVLPTPITTCQYWHRSLNPKKLIDVGFSRLGARMTMSRTIKLYKLPESTITPGFRKMEIHDVPAVTRLIRNYLSHFVVAPDFDENDVEHWLLPRDGVIDSYLVESPETHEVTDFCSFYTLPSSILGHLNYKILKAAYSFYNVSTVTPLLQLINDALIVAKHKDYDVFNALDVMQNETFLRELKFGPGDGKLHYYLYNYRIRHALKPSELGLVLL

SEQ ID NO: 59766 - DNA, 1026 bp, Glycine max
  misc_feature (1)..(1026): Ceres Seq. ID no. 14306375
aagatgcatttttctttttctattcaacatggattgttgaaggtagctgaaagagctcttttcttatggaacaatgaccacatcgtcaacttgattgcgcataaccgacaagtgatcctgcccatcatatttccagctttagacaggaatgttcaaagccattggaaccctgctgtcgtcaacctaactcacaatattagaaagatgttcttggagatggatgagaagctcttcatttcttgtcataatcactttaaggaggaagaagcaatcttgatctcaacagcggagaagcggaaggaggcatggaaacaactagagcatgcagccagtctcaggcccgtaattggaaatactgcagttttagtgtcctgacttgcattgcgggctggatcctcaatccttgttaacctcatgttatggtggaaaatctcaagatatgtggaatagctggttattgggagtggcattttgtatttgaatcctatgttcttagccttaattgcaaaaatattcctcctatttttttcaacttactaaattggtcctcttatattttaattcactgtcagagtctttttttttttttttaaatggctatttgtgttcttagagtagaaattgaacattgatggttaaggggaaatgttactaatacgtgttattatctaattggtaagtaaaatggtaaataaaaattaatgattaataagacaatgacacttgggagtaaatgttctttattaacagtccacgttcaattttagatatgggaatttaaatagtcaattttagatatgggaatttaaatagtcaattaaaatatagaagattgattttttgagtttgagtttgaataaataggaggattattttttgcaattaagccatgtacttatgatgcttttgaagtgagagggttttgattgctactgtgtggtacatcatgatgaagaccatgcagtgaatgaaaccattttctgtgcaactttatttccaaaatcttccgtgtatgttcttttactc

SEQ ID NO: 59767 - protein, 124 aa, Glycine max
  peptide (1)..(124): Ceres Seq. ID no. 14306376
  misc_feature (14)..(111): Pfam Name: Protein phosphatase 2A regulatory B subunit (B56 Pfam Description: Protein phosphatase 2A regulatory B subunit
  misc_feature (14)..(124): Homolog of NCBI NO: 21530784 NR Description: putative protein phosphatase 2A B'zeta subunit
  misc_feature (14)..(107): Homolog of NCBI NO: 15230961 NR Description: B regulatory subunit of protein phosphatase 2A
  misc_feature (14)..(123): Homolog of NCBI NO: 15233119 NR Description: B regulatory subunit of PP2A -related
  misc_feature (14)..(123): Homolog of NCBI NO: 11994401 NR Description: protein phosphatase 2A B' regulatory subunit
  misc_feature (14)..(112): Homolog of NCBI NO: 15233133 NR Description: protein phosphatase 2A regulatory subunit
  misc_feature (14)..(113): Homolog of NCBI NO: 15232782 NR Description: B' regulatory subunit of PP2A (AtB'beta)
  misc_feature (14)..(124): Homolog of NCBI NO: 31712071 NR Description: putative protein phosphatase 2A regulatory
  misc_feature (8)..(123): Homolog of NCBI NO: 21530782 NR Description: protein phosphatase 2A B'kappa subunit
  misc_feature (8)..(123): Homolog of NCBI NO: 7160008 NR Description: putative B' regulatory subunit of PP2A [Oryza
  misc_feature (14)..(124): Homolog of NCBI NO: 15239451 NR Description: AtBgamma - like protein [Arabidopsis thaliana]
KMHFSFSIQHGLLKVAERALFLWNNDHIVNLIAHNRQVILPIIFPALDRNVQSHWNPAVVNLTHNIRKMFLEMDEKLFISCHNHFKEEEAILISTAEKRKEAWKQLEHAASLRPVIGNTAVLVS

SEQ ID NO: 59768 - protein, 123 aa, Glycine max
  peptide (1)..(123): Ceres Seq. ID no. 14306377
  misc_feature (13)..(110): Pfam Name: Protein phosphatase 2A regulatory B subunit (B56 Pfam Description: Protein phosphatase 2A regulatory B subunit
  misc_feature (13)..(123): Homolog of NCBI NO: 21530784 NR Description: putative protein phosphatase 2A B'zeta subunit
  misc_feature (13)..(106): Homolog of NCBI NO: 15230961 NR Description: B regulatory subunit of protein phosphatase 2A
  misc_feature (13)..(122): Homolog of NCBI NO: 15233119 NR Description: B regulatory subunit of PP2A -related
  misc_feature (13)..(122): Homolog of NCBI NO: 11994401 NR Description: protein phosphatase 2A B' regulatory subunit
  misc_feature (13)..(111): Homolog of NCBI NO: 15233133 NR Description: protein phosphatase 2A regulatory subunit
  misc_feature (13)..(112): Homolog of NCBI NO: 15232782 NR Description: B' regulatory subunit of PP2A (AtB'beta)
  misc_feature (13)..(123): Homolog of NCBI NO: 31712071 NR Description: putative protein phosphatase 2A regulatory
  misc_feature (7)..(122): Homolog of NCBI NO: 21530782 NR Description: protein phosphatase 2A B'kappa subunit
  misc_feature (7)..(122): Homolog of NCBI NO: 7160008 NR Description: putative B' regulatory subunit of PP2A [Oryza
  misc_feature (13)..(123): Homolog of NCBI NO: 15239451 NR Description: AtBgamma - like protein [Arabidopsis thaliana]
MHFSFSIQHGLLKVAERALFLWNNDHIVNLIAHNRQVILPIIFPALDRNVQSHWNPAVVNLTHNIRKMFLEMDEKLFISCHNHFKEEEAILISTAEKRKEAWKQLEHAASLRPVIGNTAVLVS

SEQ ID NO: 59769 - DNA, 1325 bp, Glycine max
  misc_feature (1)..(1325): Ceres Seq. ID no. 14303413
agggcaaaaacagaacagaaacagagatgggttgcaatagctccaaggctgagccaccaccgttggaaaacaccatgcatcatcatcatcatgcagacgttgcagagttccaaaaacccaaaaccctaaaagaagaagtagtgctacagattccaggatgcaaagttcatctgatggaccaaggcgaggccctcgaactcgcacaaggtcacttcacgatcatgaagatcatggagcagaacgtggcactagcaaccattataaaagttggaaacagtgttcaatggcctctaacgaaagacgagccggtggtgaaggtggatgctcttcactacctgttctctctgcctgtgaaagatggtggggagcctcttagctatggtgtcacctttccagaacagtgctatgggaacatggagatgttggattcttttctcaaggatcactcttgcttttctggtttggaaaggaataagaagagtgatcttaaatgggaggagtttgctccaagggttgaagattacaatcattttctggcaagggcaattgcaggagggactggccagattgttaagggtatcttcttgtgcagcaatgcttacaccaaccaggtccaaaaaggaggggaaacgatcctaaatactgctgcagaaaagaacaatggtggcatggtcacagaaagtatgaaccacaggagtgatgccacaaagaataatgcaacgaacgataacctcaaacgtgtgagaaagctgacaaatatgacagaaaggttaaccaaatctttgcttgatggtgttggaataatgagtggatcagtgatgactcctgtgctgaaatcccaaccaggacaggcattcctaaatatgctccctggagaggtgctgttggcttcccttgatgccgtcaatagagtttttgaagcagctgaagctgctgaaaaacaaaccttttctgccacctctcaagctgcaaccagaatggtttctaacaggtttggggaagaagcaggagaggctactgagcatgtgtttgcaactgcaggacatgctgttaacactgcttggaatgtctctaagatacggaaggccatcaatccagcctcttcagcaaatgctgcaggagcactgagaaattctgccaaaaatagaaatgttatatattaaattcctatcatgtactgctttatgtttgacaatggtgaaggcataaaattttgcctatacatattgcaatatcattttggttgttatatgtaagtattaatgtgtgtattggtcatcccaaagcagaccttagaagaaacaaactataaaaagtgtccacat

SEQ ID NO: 59770 - protein, 386 aa, Glycine max
  peptide (1)..(386): Ceres Seq. ID no. 14303414
  misc_feature (158)..(368): Homolog of NCBI NO: 7486396 NR Description: hypothetical protein F4B14.250 - Arabidopsis
  misc_feature (39)..(162): Homolog of NCBI NO: 18419759 NR Description: hypothetical protein [Arabidopsis thaliana]
  misc_feature (158)..(382): Homolog of NCBI NO: 18419759 NR Description: hypothetical protein [Arabidopsis thaliana]
  misc_feature (39)..(152): Homolog of NCBI NO: 34910728 NR Description: P0690B02.29 [Oryza sativa (japonica
  misc_feature (160)..(382): Homolog of NCBI NO: 34910728 NR Description: P0690B02.29 [Oryza sativa (japonica
  misc_feature (41)..(322): Homolog of NCBI NO: 30683270 NR Description: expressed protein [Arabidopsis thaliana]
  misc_feature (41)..(380): Homolog of NCBI NO: 25407536 NR Description: hypothetical protein AT4g15450 [imported] -
  misc_feature (41)..(380): Homolog of NCBI NO: 7488048 NR Description: probable allene oxide synthase - Arabidopsis
  misc_feature (9)..(380): Homolog of NCBI NO: 15233098 NR Description: expressed protein [Arabidopsis thaliana]
  misc_feature (41)..(380): Homolog of NCBI NO: 26450712 NR Description: unknown protein [Arabidopsis thaliana]
GKNRTETEMGCNSSKAEPPPLENTMHHHHHADVAEFQKPKTLKEEVVLQIPGCKVHLMDQGEALELAQGHFTIMKIMEQNVALATIIKVGNSVQWPLTKDEPVVKVDALHYLFSLPVKDGGEPLSYGVTFPEQCYGNMEMLDSFLKDHSCFSGLERNKKSDLKWEEFAPRVEDYNHFLARAIAGGTGQIVKGIFLCSNAYTNQVQKGGETILNTAAEKNNGGMVTESMNHRSDATKNNATNDNLKRVRKLTNMTERLTKSLLDGVGIMSGSVMTPVLKSQPGQAFLNMLPGEVLLASLDAVNRVFEAAEAAEKQTFSATSQAATRMVSNRFGEEAGEATEHVFATAGHAVNTAWNVSKIRKAINPASSANAAGALRNSAKNRNVIY

SEQ ID NO: 59771 - protein, 378 aa, Glycine max
  peptide (1)..(378): Ceres Seq. ID no. 14303415
  misc_feature (150)..(360): Homolog of NCBI NO: 7486396 NR Description: hypothetical protein F4B14.250 - Arabidopsis
  misc_feature (31)..(154): Homolog of NCBI NO: 18419759 NR Description: hypothetical protein [Arabidopsis thaliana]
  misc_feature (150)..(374): Homolog of NCBI NO: 18419759 NR Description: hypothetical protein [Arabidopsis thaliana]
  misc_feature (31)..(144): Homolog of NCBI NO: 34910728 NR Description: P0690B02.29 [Oryza sativa (japonica
  misc_feature (152)..(374): Homolog of NCBI NO: 34910728 NR Description: P0690B02.29 [Oryza sativa (japonica
  misc_feature (33)..(314): Homolog of NCBI NO: 30683270 NR Description: expressed protein [Arabidopsis thaliana]
  misc_feature (33)..(372): Homolog of NCBI NO: 25407536 NR Description: hypothetical protein AT4g15450 [imported] -
  misc_feature (33)..(372): Homolog of NCBI NO: 7488048 NR Description: probable allene oxide synthase - Arabidopsis
  misc_feature (1)..(372): Homolog of NCBI NO: 15233098 NR Description: expressed protein [Arabidopsis thaliana]
  misc_feature (33)..(372): Homolog of NCBI NO: 26450712 NR Description: unknown protein [Arabidopsis thaliana]
MGCNSSKAEPPPLENTMHHHHHADVAEFQKPKTLKEEVVLQIPGCKVHLMDQGEALELAQGHFTIMKIMEQNVALATIIKVGNSVQWPLTKDEPVVKVDALHYLFSLPVKDGGEPLSYGVTFPEQCYGNMEMLDSFLKDHSCFSGLERNKKSDLKWEEFAPRVEDYNHFLARAIAGGTGQIVKGIFLCSNAYTNQVQKGGETILNTAAEKNNGGMVTESMNHRSDATKNNATNDNLKRVRKLTNMTERLTKSLLDGVGIMSGSVMTPVLKSQPGQAFLNMLPGEVLLASLDAVNRVFEAAEAAEKQTFSATSQAATRMVSNRFGEEAGEATEHVFATAGHAVNTAWNVSKIRKAINPASSANAAGALRNSAKNRNVIY

SEQ ID NO: 59772 - protein, 362 aa, Glycine max
  peptide (1)..(362): Ceres Seq. ID no. 14303416
  misc_feature (134)..(344): Homolog of NCBI NO: 7486396 NR Description: hypothetical protein F4B14.250 - Arabidopsis
  misc_feature (15)..(138): Homolog of NCBI NO: 18419759 NR Description: hypothetical protein [Arabidopsis thaliana]
  misc_feature (134)..(358): Homolog of NCBI NO: 18419759 NR Description: hypothetical protein [Arabidopsis thaliana]
  misc_feature (15)..(128): Homolog of NCBI NO: 34910728 NR Description: P0690B02.29 [Oryza sativa (japonica
  misc_feature (136)..(358): Homolog of NCBI NO: 34910728 NR Description: P0690B02.29 [Oryza sativa (japonica
  misc_feature (17)..(298): Homolog of NCBI NO: 30683270 NR Description: expressed protein [Arabidopsis thaliana]
  misc_feature (17)..(356): Homolog of NCBI NO: 25407536 NR Description: hypothetical protein AT4g15450 [imported] -
  misc_feature (17)..(356): Homolog of NCBI NO: 7488048 NR Description: probable allene oxide synthase - Arabidopsis
  misc_feature (1)..(356): Homolog of NCBI NO: 15233098 NR Description: expressed protein [Arabidopsis thaliana]
  misc_feature (17)..(356): Homolog of NCBI NO: 26450712 NR Description: unknown protein [Arabidopsis thaliana]
MHHHHHADVAEFQKPKTLKEEVVLQIPGCKVHLMDQGEALELAQGHFTIMKIMEQNVALATIIKVGNSVQWPLTKDEPVVKVDALHYLFSLPVKDGGEPLSYGVTFPEQCYGNMEMLDSFLKDHSCFSGLERNKKSDLKWEEFAPRVEDYNHFLARAIAGGTGQIVKGIFLCSNAYTNQVQKGGETILNTAAEKNNGGMVTESMNHRSDATKNNATNDNLKRVRKLTNMTERLTKSLLDGVGIMSGSVMTPVLKSQPGQAFLNMLPGEVLLASLDAVNRVFEAAEAAEKQTFSATSQAATRMVSNRFGEEAGEATEHVFATAGHAVNTAWNVSKIRKAINPASSANAAGALRNSAKNRNVIY

SEQ ID NO: 59773 - DNA, 1458 bp, Glycine max
  misc_feature (1)..(1458): Ceres Seq. ID no. 15172096
atatccgaagctactcacgagtctatgagtgtgaaggaaccagcctcacaagggagtgctcagcaggttgaggaagaagtgcagcaaaagttggttcctactgaggctggaaagaaaaagaaaaagaagaaagttcgtttgcccccaaatgatttgcagtggaaaaccccacatgactttggggctgagaactatatgatgaataatatgatgccaatggttccacctcctggctataattcgtactggaatggcatgcaacctatggatggatttatggcaccgtatggtaatccaatgcaaatgatgggttatggtctgggccccttggacatgccatttggtggtatgccacaagacccatttggcatgcaaggttacatgatgcctggtttcccgcctcatagggatcttgctgacttcagtatgggaatgaatgttccacctcctgtaatgagtagagaggagtttgaagcccggaaagctgatatgaggaggaagcgtgaaaatgatagacgtcctgaaagggacttctctaaagatcgagactttggtagggaagtgagcagtgttggggatgtttcttcaatgaaatcaaaaactaggtcaattccaccgtcctcgggtagcgattaccatcagccccgtttccgttcagagcgacactcacctgataggtctccgcgcgatgtggaacctccacctccacgcccaaccaagagaaagttagagcaccactccgatcgcgaacgcgaagacagggatcgcgactatgagcacgagcgccaccaccgccgtcaccgatcggaatcctcatccagaaggtcatcggaaccagtcgccaaaccttcatccaatgccgctgctgctgctgctgcagcagcagcagcagcagcggcagcagccgcggatcgcaagcagaaggccagcgtgttctcccgcataagctttcctgctgaagaggaacctcctaagaagagaaaagtcaccgcttcttccacaacggaaccagccgctaccgccgccgcacccagtgcctcttcggcacacctaaagacagtgtcgaacggttactacgaagggaggaagagtagcggcgtggcggactacgaatccagtgacgacgagcggcactttaaacggaggccgtcgaggtacgagccgtcgcctccgccgcagccggcggagtgggaggaggaagggaggcattcgagaggaacgagggagcgcaagcataggtgagtggcaattttgataggcagccaaggacgaaggaaacggacaccgagagacgaccagactcaacttgtctcttccgaaccttgaaataaacttcttgttctttgaaggaagggaatttcaatgtaactttgctgctgtgactgaatcccgtcaattttcaataatttctccatgtaaaattataactgttttattcaaatctaattaattgctacc

SEQ ID NO: 59774 - protein, 413 aa, Glycine max
  peptide (1)..(413): Ceres Seq. ID no. 15172097
  misc_feature (1)..(410): Homolog of NCBI NO: 15238091 NR Description: DNA-binding protein-related [Arabidopsis thaliana]
  misc_feature (8)..(350): Homolog of NCBI NO: 15236068 NR Description: glycine-rich protein [Arabidopsis thaliana]
  misc_feature (8)..(350): Homolog of NCBI NO: 7488095 NR Description: probable DNA-binding protein - Arabidopsis
  misc_feature (1)..(405): Homolog of NCBI NO: 37534622 NR Description: putative DNA-binding protein
ISEATHESMSVKEPASQGSAQQVEEEVQQKLVPTEAGKKKKKKKVRLPPNDLQWKTPHDFGAENYMMNNMMPMVPPPGYNSYWNGMQPMDGFMAPYGNPMQMMGYGLGPLDMPFGGMPQDPFGMQGYMMPGFPPHRDLADFSMGMNVPPPVMSREEFEARKADMRRKRENDRRPERDFSKDRDFGREVSSVGDVSSMKSKTRSIPPSSGSDYHQPRFRSERHSPDRSPRDVEPPPPRPTKRKLEHHSDREREDRDRDYEHERHHRRHRSESSSRRSSEPVAKPSSNAAAAAAAAAAAAAAAAADRKQKASVFSRISFPAEEEPPKKRKVTASSTTEPAATAAAPSASSAHLKTVSNGYYEGRKSSGVADYESSDDERHFKRRPSRYEPSPPPQPAEWEEEGRHSRGTRERKHR

SEQ ID NO: 59775 - protein, 405 aa, Glycine max
  peptide (1)..(405): Ceres Seq. ID no. 15172098
  misc_feature (1)..(402): Homolog of NCBI NO: 15238091 NR Description: DNA-binding protein-related [Arabidopsis thaliana]
  misc_feature (1)..(342): Homolog of NCBI NO: 15236068 NR Description: glycine-rich protein [Arabidopsis thaliana]
  misc_feature (1)..(342): Homolog of NCBI NO: 7488095 NR Description: probable DNA-binding protein - Arabidopsis
  misc_feature (1)..(397): Homolog of NCBI NO: 37534622 NR Description: putative DNA-binding protein
MSVKEPASQGSAQQVEEEVQQKLVPTEAGKKKKKKKVRLPPNDLQWKTPHDFGAENYMMNNMMPMVPPPGYNSYWNGMQPMDGFMAPYGNPMQMMGYGLGPLDMPFGGMPQDPFGMQGYMMPGFPPHRDLADFSMGMNVPPPVMSREEFEARKADMRRKRENDRRPERDFSKDRDFGREVSSVGDVSSMKSKTRSIPPSSGSDYHQPRFRSERHSPDRSPRDVEPPPPRPTKRKLEHHSDREREDRDRDYEHERHHRRHRSESSSRRSSEPVAKPSSNAAAAAAAAAAAAAAAAADRKQKASVFSRISFPAEEEPPKKRKVTASSTTEPAATAAAPSASSAHLKTVSNGYYEGRKSSGVADYESSDDERHFKRRPSRYEPSPPPQPAEWEEEGRHSRGTRERKHR

SEQ ID NO: 59776 - protein, 348 aa, Glycine max
  peptide (1)..(348): Ceres Seq. ID no. 15172099
  misc_feature (1)..(345): Homolog of NCBI NO: 15238091 NR Description: DNA-binding protein-related [Arabidopsis thaliana]
  misc_feature (1)..(285): Homolog of NCBI NO: 15236068 NR Description: glycine-rich protein [Arabidopsis thaliana]
  misc_feature (1)..(285): Homolog of NCBI NO: 7488095 NR Description: probable DNA-binding protein - Arabidopsis
  misc_feature (1)..(340): Homolog of NCBI NO: 37534622 NR Description: putative DNA-binding protein
MMNNMMPMVPPPGYNSYWNGMQPMDGFMAPYGNPMQMMGYGLGPLDMPFGGMPQDPFGMQGYMMPGFPPHRDLADFSMGMNVPPPVMSREEFEARKADMRRKRENDRRPERDFSKDRDFGREVSSVGDVSSMKSKTRSIPPSSGSDYHQPRFRSERHSPDRSPRDVEPPPPRPTKRKLEHHSDREREDRDRDYEHERHHRRHRSESSSRRSSEPVAKPSSNAAAAAAAAAAAAAAAAADRKQKASVFSRISFPAEEEPPKKRKVTASSTTEPAATAAAPSASSAHLKTVSNGYYEGRKSSGVADYESSDDERHFKRRPSRYEPSPPPQPAEWEEEGRHSRGTRERKHR

SEQ ID NO: 59777 - DNA, 904 bp, Glycine max
  misc_feature (1)..(904): Ceres Seq. ID no. 13639267
attctctgttttcttttaacatccgataaggatcggatctagctctcttcttattcgattcctctgtctcgtcgatcgaggaactaagcagtgatgggtgctggccggagatgggccgtcgatttctccgatcaatctaccgtcccatcttcccgggacatcctagatccacctggcttctctcgtgtttctcccgagcaggatgactcagcaacgagccgccaaaagaaagacgctgaagctaactggaaacttcagaaagcgtgggaagtagcgcagtcaccatttaagaatttgatgatgatgggtttcatgatgtggatggctggaaacactgttcatctctttagcattggtatcactttctctgctctttggcagcctctcagcgccctccagagcgttggaaaggtttttgagccattcaaggataacaaggtggaactacttatgcccaagctggtgtttcttgcccttaaccttggagggttagctttgggtatttggaagctcaacactttggggcttcttccaactcatgcatcagattgggtttcatctctaccccctcctcaggaggttgaacactctggcggaggatttgctttccactgatgagcatgtgtctctttgagataattacgaaagatacttaagtgatttgttcaatcctatatcatgaggggaagattcatgtggaccttctcatctcgtgatcttcttgtagcattttcaaaactctgaaaccatagcttttttcacttatggtgtgatgttcattgctcatcataactttgaattgtattattggcactgaaggaactttcccagcttttttatagacaggaatggataatgttacagactgaagtttggttcttaatttgcttgaaccatgactctg

SEQ ID NO: 59778 - protein, 173 aa, Glycine max
  peptide (1)..(173): Ceres Seq. ID no. 13639268
  misc_feature (7)..(166): Homolog of NCBI NO: 17544614 NR Description: Putative protein of eukaryotic origin
  misc_feature (6)..(171): Homolog of NCBI NO: 31211131 NR Description: ENSANGP00000016305 [Anopheles gambiae]
  misc_feature (5)..(168): Homolog of NCBI NO: 28829924 NR Description: similar to ZK616.6.p
  misc_feature (6)..(166): Homolog of NCBI NO: 39588364 NR Description: Hypothetical protein CBG19952 [Caenorhabditis
  misc_feature (1)..(169): Homolog of NCBI NO: 13386014 NR Description: RIKEN cDNA 2610318K02 [Mus musculus]
  misc_feature (1)..(169): Homolog of NCBI NO: 12834476 NR Description: unnamed protein product [Mus musculus]
  misc_feature (1)..(169): Homolog of NCBI NO: 7705997 NR Description: hypothetical protein LOC51234 [Homo sapiens]
  misc_feature (1)..(169): Homolog of NCBI NO: 37590930 NR Description: Unknown (protein for MGC:75691) [Silurana
  misc_feature (1)..(161): Homolog of NCBI NO: 11358300 NR Description: hypothetical protein T30N20_50 - Arabidopsis
  misc_feature (1)..(173): Homolog of NCBI NO: 18416375 NR Description: expressed protein [Arabidopsis thaliana]
MGAGRRWAVDFSDQSTVPSSRDILDPPGFSRVSPEQDDSATSRQKKDAEANWKLQKAWEVAQSPFKNLMMMGFMMWMAGNTVHLFSIGITFSALWQPLSALQSVGKVFEPFKDNKVELLMPKLVFLALNLGGLALGIWKLNTLGLLPTHASDWVSSLPPPQEVEHSGGGFAFH

SEQ ID NO: 59779 - protein, 105 aa, Glycine max
  peptide (1)..(105): Ceres Seq. ID no. 13639269
  misc_feature (1)..(98): Homolog of NCBI NO: 17544614 NR Description: Putative protein of eukaryotic origin
  misc_feature (1)..(103): Homolog of NCBI NO: 31211131 NR Description: ENSANGP00000016305 [Anopheles gambiae]
  misc_feature (1)..(100): Homolog of NCBI NO: 28829924 NR Description: similar to ZK616.6.p
  misc_feature (1)..(98): Homolog of NCBI NO: 39588364 NR Description: Hypothetical protein CBG19952 [Caenorhabditis
  misc_feature (1)..(101): Homolog of NCBI NO: 13386014 NR Description: RIKEN cDNA 2610318K02 [Mus musculus]
  misc_feature (1)..(101): Homolog of NCBI NO: 12834476 NR Description: unnamed protein product [Mus musculus]
  misc_feature (1)..(101): Homolog of NCBI NO: 7705997 NR Description: hypothetical protein LOC51234 [Homo sapiens]
  misc_feature (1)..(101): Homolog of NCBI NO: 37590930 NR Description: Unknown (protein for MGC:75691) [Silurana
  misc_feature (1)..(93): Homolog of NCBI NO: 11358300 NR Description: hypothetical protein T30N20_50 - Arabidopsis
  misc_feature (1)..(105): Homolog of NCBI NO: 18416375 NR Description: expressed protein [Arabidopsis thaliana]
MMMGFMMWMAGNTVHLFSIGITFSALWQPLSALQSVGKVFEPFKDNKVELLMPKLVFLALNLGGLALGIWKLNTLGLLPTHASDWVSSLPPPQEVEHSGGGFAFH

SEQ ID NO: 59780 - protein, 104 aa, Glycine max
  peptide (1)..(104): Ceres Seq. ID no. 13639270
  misc_feature (1)..(97): Homolog of NCBI NO: 17544614 NR Description: Putative protein of eukaryotic origin
  misc_feature (1)..(102): Homolog of NCBI NO: 31211131 NR Description: ENSANGP00000016305 [Anopheles gambiae]
  misc_feature (1)..(99): Homolog of NCBI NO: 28829924 NR Description: similar to ZK616.6.p
  misc_feature (1)..(97): Homolog of NCBI NO: 39588364 NR Description: Hypothetical protein CBG19952 [Caenorhabditis
  misc_feature (1)..(100): Homolog of NCBI NO: 12834476 NR Description: unnamed protein product [Mus musculus]
  misc_feature (1)..(100): Homolog of NCBI NO: 13386014 NR Description: RIKEN cDNA 2610318K02 [Mus musculus]
  misc_feature (1)..(100): Homolog of NCBI NO: 7705997 NR Description: hypothetical protein LOC51234 [Homo sapiens]
  misc_feature (1)..(100): Homolog of NCBI NO: 37590930 NR Description: Unknown (protein for MGC:75691) [Silurana
  misc_feature (1)..(92): Homolog of NCBI NO: 11358300 NR Description: hypothetical protein T30N20_50 - Arabidopsis
  misc_feature (1)..(104): Homolog of NCBI NO: 18416375 NR Description: expressed protein [Arabidopsis thaliana]
MMGFMMWMAGNTVHLFSIGITFSALWQPLSALQSVGKVFEPFKDNKVELLMPKLVFLALNLGGLALGIWKLNTLGLLPTHASDWVSSLPPPQEVEHSGGGFAFH

SEQ ID NO: 59781 - DNA, 1032 bp, Glycine max
  misc_feature (1)..(1032): Ceres Seq. ID no. 13639317
taaccgcatcattcctcctcatccgtcggcgatcggcataaggcagcgctccaccccgttggcatacccagactaactcatcgcgtgccggatcagctccagccatggcgtcgatgcaggctcccgcgccggggccgtcagggtacccgccgcacggcggccaggccgcgcgcccgcagtccacggccgtcgccgtcacggcggccagcaacggcgccggaaacccctacgtgcaggtcaccccggccagcgcgtccccctccacctgccagtccatcatgaaggcgctggggcggtacggcaagctgctggaggacggcacccgcaaggccgccgacaccaccggcaacatctggaaccacctccggacggcgccgaacatggcggacgcggcggtggcgcggctggcgcaggggaccaaggtgtacgcggagggcgggcacgagagggtgttccatcaggtgttcggcgccgtgcccggggagcagctccgcaaggcctacgcctgctacctctccacctcatccggccccgtcatcggcacgctctacctctccacggggcgcctcgccttctgcagcgactcccccgtctcctaccacgccccctccggcagccagccgccggagcccatgtactacaaggtggtgcttccgctgaaccaggtgaggacggtgagcccgtccgccagcatgtggaggccgtcggagcggtacatccaggtggccaccaccgacaaccacgagttctggttcatgggcttcgtctcctacgacaaggcgctcaagcacctctccgacgccctgcagcgccgtccctgaccgatccccgtccgtccgtccgtctgcaccatcgcagctgctaggagtataagctccagttcttcggcagtggcactatcctgtcactgactgatcagtgtttgtactcttcattcctgtaccgcaactcgccccatcagcagttcttgctctggaataatttataagacaccaataaagctccgttgcctgccgtcggtatcaccaacct

SEQ ID NO: 59782 - protein, 238 aa, Glycine max
  peptide (1)..(238): Ceres Seq. ID no. 13639318
  misc_feature (98)..(235): Homolog of NCBI NO: 33146631 NR Description: putative FH protein interacting protein FIP1
  misc_feature (22)..(230): Homolog of NCBI NO: 15240044 NR Description: GRAM domain-containing protein [Arabidopsis
  misc_feature (26)..(234): Homolog of NCBI NO: 15234255 NR Description: ABA-repsonsiveprotein -related [Arabidopsis
  misc_feature (56)..(235): Homolog of NCBI NO: 34906818 NR Description: contains EST C91668(E31216)~similar to FH protein
  misc_feature (33)..(235): Homolog of NCBI NO: 26452129 NR Description: unknown protein [Arabidopsis thaliana]
  misc_feature (33)..(235): Homolog of NCBI NO: 21592789 NR Description: unknown [Arabidopsis thaliana]
  misc_feature (33)..(235): Homolog of NCBI NO: 18399985 NR Description: GRAM domain-containing protein [Arabidopsis
  misc_feature (1)..(235): Homolog of NCBI NO: 34902414 NR Description: Putative FH protein interacting protein FIP1
  misc_feature (1)..(235): Homolog of NCBI NO: 15217869 NR Description: GRAM domain-containing protein [Arabidopsis
  misc_feature (1)..(237): Homolog of NCBI NO: 29788871 NR Description: putative ABA-responsive protein
MASMQAPAPGPSGYPPHGGQAARPQSTAVAVTAASNGAGNPYVQVTPASASPSTCQSIMKALGRYGKLLEDGTRKAADTTGNIWNHLRTAPNMADAAVARLAQGTKVYAEGGHERVFHQVFGAVPGEQLRKAYACYLSTSSGPVIGTLYLSTGRLAFCSDSPVSYHAPSGSQPPEPMYYKVVLPLNQVRTVSPSASMWRPSERYIQVATTDNHEFWFMGFVSYDKALKHLSDALQRRP

SEQ ID NO: 59783 - protein, 235 aa, Glycine max
  peptide (1)..(235): Ceres Seq. ID no. 13639319
  misc_feature (95)..(232): Homolog of NCBI NO: 33146631 NR Description: putative FH protein interacting protein FIP1
  misc_feature (19)..(227): Homolog of NCBI NO: 15240044 NR Description: GRAM domain-containing protein [Arabidopsis
  misc_feature (23)..(231): Homolog of NCBI NO: 15234255 NR Description: ABA-repsonsiveprotein -related [Arabidopsis
  misc_feature (53)..(232): Homolog of NCBI NO: 34906818 NR Description: contains EST C91668(E31216)~similar to FH protein
  misc_feature (30)..(232): Homolog of NCBI NO: 26452129 NR Description: unknown protein [Arabidopsis thaliana]
  misc_feature (30)..(232): Homolog of NCBI NO: 21592789 NR Description: unknown [Arabidopsis thaliana]
  misc_feature (30)..(232): Homolog of NCBI NO: 18399985 NR Description: GRAM domain-containing protein [Arabidopsis
  misc_feature (1)..(232): Homolog of NCBI NO: 34902414 NR Description: Putative FH protein interacting protein FIP1
  misc_feature (1)..(232): Homolog of NCBI NO: 15217869 NR Description: GRAM domain-containing protein [Arabidopsis
  misc_feature (1)..(234): Homolog of NCBI NO: 29788871 NR Description: putative ABA-responsive protein
MQAPAPGPSGYPPHGGQAARPQSTAVAVTAASNGAGNPYVQVTPASASPSTCQSIMKALGRYGKLLEDGTRKAADTTGNIWNHLRTAPNMADAAVARLAQGTKVYAEGGHERVFHQVFGAVPGEQLRKAYACYLSTSSGPVIGTLYLSTGRLAFCSDSPVSYHAPSGSQPPEPMYYKVVLPLNQVRTVSPSASMWRPSERYIQVATTDNHEFWFMGFVSYDKALKHLSDALQRRP

SEQ ID NO: 59784 - protein, 180 aa, Glycine max
  peptide (1)..(180): Ceres Seq. ID no. 13639320
  misc_feature (40)..(177): Homolog of NCBI NO: 33146631 NR Description: putative FH protein interacting protein FIP1
  misc_feature (1)..(172): Homolog of NCBI NO: 15240044 NR Description: GRAM domain-containing protein [Arabidopsis
  misc_feature (1)..(176): Homolog of NCBI NO: 15234255 NR Description: ABA-repsonsiveprotein -related [Arabidopsis
  misc_feature (1)..(177): Homolog of NCBI NO: 34906818 NR Description: contains EST C91668(E31216)~similar to FH protein
  misc_feature (1)..(177): Homolog of NCBI NO: 26452129 NR Description: unknown protein [Arabidopsis thaliana]
  misc_feature (1)..(177): Homolog of NCBI NO: 21592789 NR Description: unknown [Arabidopsis thaliana]
  misc_feature (1)..(177): Homolog of NCBI NO: 18399985 NR Description: GRAM domain-containing protein [Arabidopsis
  misc_feature (1)..(177): Homolog of NCBI NO: 34902414 NR Description: Putative FH protein interacting protein FIP1
  misc_feature (1)..(177): Homolog of NCBI NO: 15217869 NR Description: GRAM domain-containing protein [Arabidopsis
  misc_feature (1)..(179): Homolog of NCBI NO: 29788871 NR Description: putative ABA-responsive protein
MKALGRYGKLLEDGTRKAADTTGNIWNHLRTAPNMADAAVARLAQGTKVYAEGGHERVFHQVFGAVPGEQLRKAYACYLSTSSGPVIGTLYLSTGRLAFCSDSPVSYHAPSGSQPPEPMYYKVVLPLNQVRTVSPSASMWRPSERYIQVATTDNHEFWFMGFVSYDKALKHLSDALQRRP

SEQ ID NO: 59785 - DNA, 551 bp, Glycine max
  misc_feature (1)..(551): Ceres Seq. ID no. 13595787
acacaaacacaaaacccacaagaccagaaaaaaaaaaacagagagtaaacatgagatctctcttcttactagccttgttcctagttcttgcttttcaccatggtgaagcagccgtgacttgcaacaacgtggttggtgatctttacccttgcctctcctacgtgatgcaaggcggaaacgctccatcaactaactgctgcaacggtgtcagaacgctcaacagtcaggctcaaaccactgcggatcgtcagagtgtttgtcgttgcatcaaaaatgctattggaggagcctcttactcttcaagcaaccttaacaatgctctgtctttgcctgctaagtgtggtgttaatctccctttcagtatcagcccttccaccaactgcaacagtatccactgaaataagcagaagatcctgaaggaagctactactactactacactactacaagaacttaggacatggcctggtagtagtaactacgttgttcagtgatgtatcttcatctctatgttcttcaaggttctaataaaaattacaacatgctatgag

SEQ ID NO: 59786 - protein, 131 aa, Glycine max
  peptide (1)..(131): Ceres Seq. ID no. 13595788
  misc_feature (40)..(127): Pfam Name: Protease inhibitor/seed storage/LTP family Pfam Description: Protease inhibitor/seed storage/LTP family
  misc_feature (14)..(130): Homolog of NCBI NO: 6782436 NR Description: lipid-transfer protein [Nicotiana glauca]
  misc_feature (11)..(131): Homolog of NCBI NO: 128388 NR Description: Nonspecific lipid-transfer protein precursor
  misc_feature (23)..(130): Homolog of NCBI NO: 14423814 NR Description: Nonspecific lipid-transfer protein precursor
  misc_feature (14)..(131): Homolog of NCBI NO: 7438275 NR Description: lipid transfer protein LPT II - rice
  misc_feature (15)..(130): Homolog of NCBI NO: 16930759 NR Description: lipid transfer protein-like protein [Retama
  misc_feature (14)..(131): Homolog of NCBI NO: 2497746 NR Description: NONSPECIFIC LIPID-TRANSFER PROTEIN 2 PRECURSOR
  misc_feature (27)..(130): Homolog of NCBI NO: 16903206 NR Description: lipid transfer protein precursor [Davidia
  misc_feature (36)..(130): Homolog of NCBI NO: 2497753 NR Description: NONSPECIFIC LIPID-TRANSFER PROTEIN 3 PRECURSOR
  misc_feature (17)..(130): Homolog of NCBI NO: 15241086 NR Description: lipid transfer protein, putative [Arabidopsis
  misc_feature (17)..(130): Homolog of NCBI NO: 15231964 NR Description: lipid transfer protein 6 (ltp6) [Arabidopsis
TNTKPTRPEKKKQRVNMRSLFLLALFLVLAFHHGEAAVTCNNVVGDLYPCLSYVMQGGNAPSTNCCNGVRTLNSQAQTTADRQSVCRCIKNAIGGASYSSSNLNNALSLPAKCGVNLPFSISPSTNCNSIH

SEQ ID NO: 59787 - protein, 115 aa, Glycine max
  peptide (1)..(115): Ceres Seq. ID no. 13595789
  misc_feature (24)..(111): Pfam Name: Protease inhibitor/seed storage/LTP family Pfam Description: Protease inhibitor/seed storage/LTP family
  misc_feature (1)..(114): Homolog of NCBI NO: 6782436 NR Description: lipid-transfer protein [Nicotiana glauca]
  misc_feature (1)..(115): Homolog of NCBI NO: 128388 NR Description: Nonspecific lipid-transfer protein precursor
  misc_feature (7)..(114): Homolog of NCBI NO: 14423814 NR Description: Nonspecific lipid-transfer protein precursor
  misc_feature (1)..(115): Homolog of NCBI NO: 7438275 NR Description: lipid transfer protein LPT II - rice
  misc_feature (1)..(114): Homolog of NCBI NO: 16930759 NR Description: lipid transfer protein-like protein [Retama
  misc_feature (1)..(115): Homolog of NCBI NO: 2497746 NR Description: NONSPECIFIC LIPID-TRANSFER PROTEIN 2 PRECURSOR
  misc_feature (11)..(114): Homolog of NCBI NO: 16903206 NR Description: lipid transfer protein precursor [Davidia
  misc_feature (20)..(114): Homolog of NCBI NO: 2497753 NR Description: NONSPECIFIC LIPID-TRANSFER PROTEIN 3 PRECURSOR
  misc_feature (1)..(114): Homolog of NCBI NO: 15241086 NR Description: lipid transfer protein, putative [Arabidopsis
  misc_feature (1)..(114): Homolog of NCBI NO: 15231964 NR Description: lipid transfer protein 6 (ltp6) [Arabidopsis
MRSLFLLALFLVLAFHHGEAAVTCNNVVGDLYPCLSYVMQGGNAPSTNCCNGVRTLNSQAQTTADRQSVCRCIKNAIGGASYSSSNLNNALSLPAKCGVNLPFSISPSTNCNSIH

SEQ ID NO: 59788 - protein, 77 aa, Glycine max
  peptide (1)..(77): Ceres Seq. ID no. 13595790
  misc_feature (1)..(73): Pfam Name: Protease inhibitor/seed storage/LTP family Pfam Description: Protease inhibitor/seed storage/LTP family
  misc_feature (1)..(76): Homolog of NCBI NO: 6782436 NR Description: lipid-transfer protein [Nicotiana glauca]
  misc_feature (1)..(77): Homolog of NCBI NO: 128388 NR Description: Nonspecific lipid-transfer protein precursor
  misc_feature (1)..(76): Homolog of NCBI NO: 14423814 NR Description: Nonspecific lipid-transfer protein precursor
  misc_feature (1)..(77): Homolog of NCBI NO: 7438275 NR Description: lipid transfer protein LPT II - rice
  misc_feature (1)..(76): Homolog of NCBI NO: 16930759 NR Description: lipid transfer protein-like protein [Retama
  misc_feature (1)..(77): Homolog of NCBI NO: 2497746 NR Description: NONSPECIFIC LIPID-TRANSFER PROTEIN 2 PRECURSOR
  misc_feature (1)..(76): Homolog of NCBI NO: 16903206 NR Description: lipid transfer protein precursor [Davidia
  misc_feature (1)..(76): Homolog of NCBI NO: 2497753 NR Description: NONSPECIFIC LIPID-TRANSFER PROTEIN 3 PRECURSOR
  misc_feature (1)..(76): Homolog of NCBI NO: 15241086 NR Description: lipid transfer protein, putative [Arabidopsis
  misc_feature (1)..(76): Homolog of NCBI NO: 15231964 NR Description: lipid transfer protein 6 (ltp6) [Arabidopsis
MQGGNAPSTNCCNGVRTLNSQAQTTADRQSVCRCIKNAIGGASYSSSNLNNALSLPAKCGVNLPFSISPSTNCNSIH

SEQ ID NO: 59789 - DNA, 972 bp, Glycine max
  misc_feature (1)..(972): Ceres Seq. ID no. 14302529
accctctcggtctctagggttttgggactttagcctcctgcgccgccgccgccgccgcccagcgaattcgacaagcccccgagctcgccggatccgatggccgtcacgttctccgacctccacaccgccgacgggctcaaggccctcgaggcgcacctcgccggcaagacctacatctccggcgatgggatcaccaaggacgacgtcaaggtgttcgcggcggtgcccgtgaagcccagcgccgagttcccgaacgctgcccgctggtacgacaccgtcgccgcggctgttgcttcaaggttccctggccagtcctctggggtgagtgcatcatcggctcctgctgcagctgctcctgccgcttccaaggatgaagatgacgatgatgacatggatctgtttggcgatgagaccgaggaggacaagaaagctgcagctgagcgtgaggctgccaagcctgcaaagaagaaagaaagtggcaaatcctccgtcctcatggacatcaagccatgggacgatgagactgacatgaagaagttggaggaggctgtccgcagtgttcaaatggagggtctcacctggggtgcatataagcttatgcctgtgggttatggcatcaagaagctccagatcatgctgacgatcatcgatgaccttgtgtccgtcgacactcttattgaggaagtgctttgcgaggcgcccatcaacgaatatgtccagtcgtgtgacatcgttgccttcaacaagatctagaatctttgttctcccacctgctggattcttggtactgggattggtcgatctggaaaacattatgtcgtcccatttagttacccctcttacagaaatgctactggttttgtttttgagtgatgccctggtcttgaatgtctgctacctttaaatagttgaactgctgagcggtttgtaatggcgaaacatctatcatgtggagtaaaatcagtctttgat

SEQ ID NO: 59790 - protein, 218 aa, Glycine max
  peptide (1)..(218): Ceres Seq. ID no. 14302530
  misc_feature (129)..(218): Pfam Name: EF-1 guanine nucleotide exchange domain Pfam Description: EF-1 guanine nucleotide exchange domain
  misc_feature (1)..(218): Homolog of NCBI NO: 3894214 NR Description: elongation factor 1 beta 2
  misc_feature (1)..(218): Homolog of NCBI NO: 38232568 NR Description: translational elongation factor 1 subunit Bbeta
  misc_feature (20)..(218): Homolog of NCBI NO: 27754711 NR Description: putative elongation factor 1B alpha-subunit
  misc_feature (1)..(218): Homolog of NCBI NO: 6015063 NR Description: ELONGATION FACTOR 1-BETA (EF-1-BETA)
  misc_feature (1)..(218): Homolog of NCBI NO: 15239877 NR Description: elongation factor 1B alpha-subunit
  misc_feature (1)..(218): Homolog of NCBI NO: 30687350 NR Description: elongation factor 1B alpha-subunit [Arabidopsis
  misc_feature (1)..(218): Homolog of NCBI NO: 34899162 NR Description: putative translation elongation factor eEF-1
  misc_feature (1)..(218): Homolog of NCBI NO: 232031 NR Description: ELONGATION FACTOR 1-BETA' (EF-1-BETA')
  misc_feature (1)..(218): Homolog of NCBI NO: 38175744 NR Description: putative translation elongation factor eEF-1
  misc_feature (1)..(218): Homolog of NCBI NO: 232033 NR Description: ELONGATION FACTOR 1-BETA' (EF-1-BETA')
MAVTFSDLHTADGLKALEAHLAGKTYISGDGITKDDVKVFAAVPVKPSAEFPNAARWYDTVAAAVASRFPGQSSGVSASSAPAAAAPAASKDEDDDDDMDLFGDETEEDKKAAAEREAAKPAKKKESGKSSVLMDIKPWDDETDMKKLEEAVRSVQMEGLTWGAYKLMPVGYGIKKLQIMLTIIDDLVSVDTLIEEVLCEAPINEYVQSCDIVAFNKI

SEQ ID NO: 59791 - protein, 120 aa, Glycine max
  peptide (1)..(120): Ceres Seq. ID no. 14302531
  misc_feature (31)..(120): Pfam Name: EF-1 guanine nucleotide exchange domain Pfam Description: EF-1 guanine nucleotide exchange domain
  misc_feature (1)..(120): Homolog of NCBI NO: 3894214 NR Description: elongation factor 1 beta 2
  misc_feature (1)..(120): Homolog of NCBI NO: 38232568 NR Description: translational elongation factor 1 subunit Bbeta
  misc_feature (1)..(120): Homolog of NCBI NO: 27754711 NR Description: putative elongation factor 1B alpha-subunit
  misc_feature (1)..(120): Homolog of NCBI NO: 6015063 NR Description: ELONGATION FACTOR 1-BETA (EF-1-BETA)
  misc_feature (1)..(120): Homolog of NCBI NO: 15239877 NR Description: elongation factor 1B alpha-subunit
  misc_feature (1)..(120): Homolog of NCBI NO: 30687350 NR Description: elongation factor 1B alpha-subunit [Arabidopsis
  misc_feature (1)..(120): Homolog of NCBI NO: 34899162 NR Description: putative translation elongation factor eEF-1
  misc_feature (1)..(120): Homolog of NCBI NO: 232031 NR Description: ELONGATION FACTOR 1-BETA' (EF-1-BETA')
  misc_feature (1)..(120): Homolog of NCBI NO: 38175744 NR Description: putative translation elongation factor eEF-1
  misc_feature (1)..(120): Homolog of NCBI NO: 232033 NR Description: ELONGATION FACTOR 1-BETA' (EF-1-BETA')
MDLFGDETEEDKKAAAEREAAKPAKKKESGKSSVLMDIKPWDDETDMKKLEEAVRSVQMEGLTWGAYKLMPVGYGIKKLQIMLTIIDDLVSVDTLIEEVLCEAPINEYVQSCDIVAFNKI

SEQ ID NO: 59792 - DNA, 1000 bp, Glycine max
  misc_feature (1)..(1000): Ceres Seq. ID no. 13595464
agttttaccgttgttgttggcaatgaaaaaatcatcatcagcttcaaaaggtgcagcagccaatgatggagttattaagggaggaagcatagattgggagctaagacctggtggcatgcttgttcagaagagacaaccccttgattcctcttctagttccatgatcaaaatcaaggtctctcatggttcttaccaccatgaggtcactgttcctgcacaatccacttttgggcatctaaaaatggtgcttacatccgagactggtcttgagcctaaagagcaaaggttactatttagagggaaagagaaagaggatgaggaatgcttgcatatggtgggagtgaaagacatgtctaaggttatattgctagaggatccagccagcaaagagagaaagcttgaggagatgcataagagtgaagatatctcaaaggcatgtgaagccatctccaaagtcagaacagaagttgacaagctatatcaaaaggtggttgctttggagacaactgtttgtggtggtgctaaggttgaagacaaagaatttgctatcttgacagaattgctaatggttcaattgcttaaactggattccattgctgctgagggagaagccaaagggcagagaagagttgaggttcgtcgtgtacagagttatgtggacacaattgacaacctgaaggcaagaaattttgctgcatttagcaatgctggtaacaatgcagtccctgtgatttgggaggccttggaatccggagttggaagcttgaagtcaccaacttcatttccaacatctacagtgattactcaaaactgggagcactttgaataaatacaagttaatccttccactttatttatagaagaggcttctatgatgacacttggttttttgtaatgacaagctgtttttggtagggaagggttatgcttgtacaaaattaatacatgtacatgttacttctctatgtccaaataaacactgattttgccttgtgtgttc

SEQ ID NO: 59793 - protein, 275 aa, Glycine max
  peptide (1)..(275): Ceres Seq. ID no. 13595465
  misc_feature (145)..(226): Pfam Name: BAG domain Pfam Description: BAG domain
  misc_feature (24)..(231): Homolog of NCBI NO: 15240726 NR Description: BAG domain containing protein [Arabidopsis
  misc_feature (24)..(231): Homolog of NCBI NO: 21537107 NR Description: unknown [Arabidopsis thaliana]
  misc_feature (8)..(232): Homolog of NCBI NO: 15242267 NR Description: BAG domain containing protein [Arabidopsis
  misc_feature (12)..(237): Homolog of NCBI NO: 34898024 NR Description: ESTs AU082174(S13676),AU032395(R3986) correspond a region of the predicted gene.~Similar to Arabidopsis thaliana
  misc_feature (12)..(237): Homolog of NCBI NO: 25553557 NR Description: OSJNBa0038F22.4 [Oryza sativa (japonica
  misc_feature (31)..(275): Homolog of NCBI NO: 21554254 NR Description: unknown [Arabidopsis thaliana]
  misc_feature (31)..(275): Homolog of NCBI NO: 19699283 NR Description: At3g51780/ORF3 [Arabidopsis thaliana]
  misc_feature (31)..(275): Homolog of NCBI NO: 15231035 NR Description: expressed protein [Arabidopsis thaliana]
  misc_feature (31)..(85): Homolog of NCBI NO: 34907972 NR Description: P0446G04.18 [Oryza sativa (japonica
  misc_feature (77)..(275): Homolog of NCBI NO: 34907972 NR Description: P0446G04.18 [Oryza sativa (japonica
VLPLLLAMKKSSSASKGAAANDGVIKGGSIDWELRPGGMLVQKRQPLDSSSSSMIKIKVSHGSYHHEVTVPAQSTFGHLKMVLTSETGLEPKEQRLLFRGKEKEDEECLHMVGVKDMSKVILLEDPASKERKLEEMHKSEDISKACEAISKVRTEVDKLYQKVVALETTVCGGAKVEDKEFAILTELLMVQLLKLDSIAAEGEAKGQRRVEVRRVQSYVDTIDNLKARNFAAFSNAGNNAVPVIWEALESGVGSLKSPTSFPTSTVITQNWEHFE

SEQ ID NO: 59794 - protein, 268 aa, Glycine max
  peptide (1)..(268): Ceres Seq. ID no. 13595466
  misc_feature (138)..(219): Pfam Name: BAG domain Pfam Description: BAG domain
  misc_feature (17)..(224): Homolog of NCBI NO: 15240726 NR Description: BAG domain containing protein [Arabidopsis
  misc_feature (17)..(224): Homolog of NCBI NO: 21537107 NR Description: unknown [Arabidopsis thaliana]
  misc_feature (1)..(225): Homolog of NCBI NO: 15242267 NR Description: BAG domain containing protein [Arabidopsis
  misc_feature (5)..(230): Homolog of NCBI NO: 34898024 NR Description: ESTs AU082174(S13676),AU032395(R3986) correspond a region of the predicted gene.~Similar to Arabidopsis thaliana
  misc_feature (5)..(230): Homolog of NCBI NO: 25553557 NR Description: OSJNBa0038F22.4 [Oryza sativa (japonica
  misc_feature (24)..(268): Homolog of NCBI NO: 19699283 NR Description: At3g51780/ORF3 [Arabidopsis thaliana]
  misc_feature (24)..(268): Homolog of NCBI NO: 21554254 NR Description: unknown [Arabidopsis thaliana]
  misc_feature (24)..(268): Homolog of NCBI NO: 15231035 NR Description: expressed protein [Arabidopsis thaliana]
  misc_feature (24)..(78): Homolog of NCBI NO: 34907972 NR Description: P0446G04.18 [Oryza sativa (japonica
  misc_feature (70)..(268): Homolog of NCBI NO: 34907972 NR Description: P0446G04.18 [Oryza sativa (japonica
MKKSSSASKGAAANDGVIKGGSIDWELRPGGMLVQKRQPLDSSSSSMIKIKVSHGSYHHEVTVPAQSTFGHLKMVLTSETGLEPKEQRLLFRGKEKEDEECLHMVGVKDMSKVILLEDPASKERKLEEMHKSEDISKACEAISKVRTEVDKLYQKVVALETTVCGGAKVEDKEFAILTELLMVQLLKLDSIAAEGEAKGQRRVEVRRVQSYVDTIDNLKARNFAAFSNAGNNAVPVIWEALESGVGSLKSPTSFPTSTVITQNWEHFE

SEQ ID NO: 59795 - protein, 237 aa, Glycine max
  peptide (1)..(237): Ceres Seq. ID no. 13595467
  misc_feature (107)..(188): Pfam Name: BAG domain Pfam Description: BAG domain
  misc_feature (1)..(193): Homolog of NCBI NO: 15240726 NR Description: BAG domain containing protein [Arabidopsis
  misc_feature (1)..(193): Homolog of NCBI NO: 21537107 NR Description: unknown [Arabidopsis thaliana]
  misc_feature (1)..(194): Homolog of NCBI NO: 15242267 NR Description: BAG domain containing protein [Arabidopsis
  misc_feature (1)..(199): Homolog of NCBI NO: 34898024 NR Description: ESTs AU082174(S13676),AU032395(R3986) correspond a region of the predicted gene.~Similar to Arabidopsis thaliana
  misc_feature (1)..(199): Homolog of NCBI NO: 25553557 NR Description: OSJNBa0038F22.4 [Oryza sativa (japonica
  misc_feature (1)..(237): Homolog of NCBI NO: 21554254 NR Description: unknown [Arabidopsis thaliana]
  misc_feature (1)..(237): Homolog of NCBI NO: 19699283 NR Description: At3g51780/ORF3 [Arabidopsis thaliana]
  misc_feature (1)..(237): Homolog of NCBI NO: 15231035 NR Description: expressed protein [Arabidopsis thaliana]
  misc_feature (1)..(47): Homolog of NCBI NO: 34907972 NR Description: P0446G04.18 [Oryza sativa (japonica
  misc_feature (39)..(237): Homolog of NCBI NO: 34907972 NR Description: P0446G04.18 [Oryza sativa (japonica
MLVQKRQPLDSSSSSMIKIKVSHGSYHHEVTVPAQSTFGHLKMVLTSETGLEPKEQRLLFRGKEKEDEECLHMVGVKDMSKVILLEDPASKERKLEEMHKSEDISKACEAISKVRTEVDKLYQKVVALETTVCGGAKVEDKEFAILTELLMVQLLKLDSIAAEGEAKGQRRVEVRRVQSYVDTIDNLKARNFAAFSNAGNNAVPVIWEALESGVGSLKSPTSFPTSTVITQNWEHFE

SEQ ID NO: 59796 - DNA, 1153 bp, Glycine max
  misc_feature (1)..(1153): Ceres Seq. ID no. 13595812
cattacctagaacatcctaatcvaaaaaagtcaatcvagtcaatcctaaaatcacaatacccgaccacaaggtcttttttttctctgtggcggcatcattggcaatggttaaaagttaaaacttcaacacacagaatccagattcgtcgagaaagagaaaagagaaaagaagaatgggcgattaccatttcgtgtacaaggatttagaaggggcttctactcaatgggacgatattcaaagaaagctcggaaatttgcctccaaaggcacccgctttcaagcccccacctttcacccctgcctctgatgatcaacccaaagacaaaacatggatcgattccaaaacctccgaggaactcgaagacctcgaagacaacctcgatgatgatcgcttcctccaagaatacaggaagaagaggctggctgagatgcaagaggcagcaaaagtattgaggtttggatctgtgattcccatttcgggatctgatttcgttcgagaggtgtcacaagctccatctgatgtttgggtggttgtcatcctatacaaagaagggattcctgaatgtgggttgttgatgcaaagcattgaagaattggcactaagatatccttcaacaaaatttgtgaagataatatctactgattgcataccgaactacccggatcggaatcttcccactttgttggtgtacaacaatggagcagtcaaaggaaattatgtgggtttgcatagtttcgggcgaagatgcactcctgaaggtgttgcattagtgttgtgccaatcagatcctgtacttaatgatggccataatggaaatgaggctatcattgaaggagtccgcaaacggtttatagagaaagttgttgctgatcatgaagagggtggtgatgatgattactctagcgattaacattttttcttgtatttgttgtgttgctttctttggagggggtatgcttttctaactttcttttggtctcacttttataattttgcctaaaaaaaagagtaacggatctgttattaaatacttaaattatgcgtgtgtgtttmwacacaataaaggcttttcnngttcctagtaattagatggttttatcaggtattatgtktawacamartgattttattgtttaaacacaataaagtggg

SEQ ID NO: 59797 - protein, 245 aa, Glycine max
  peptide (1)..(245): Ceres Seq. ID no. 15221665
  misc_feature (14)..(189): Homolog of NCBI NO: 31560120 NR Description: IAP-associated factor VIAF1 [Mus musculus]
  misc_feature (14)..(241): Homolog of NCBI NO: 34875632 NR Description: similar to IAP-associated factor VIAF1 [Rattus
  misc_feature (14)..(240): Homolog of NCBI NO: 40555753 NR Description: Unknown (protein for MGC:73170) [Danio rerio]
  misc_feature (14)..(240): Homolog of NCBI NO: 9957067 NR Description: IAP-associated factor Viaf1 [Danio rerio]
  misc_feature (16)..(242): Homolog of NCBI NO: 10716148 NR Description: IAP-associated factor VIAF1 [Drosophila
  misc_feature (16)..(242): Homolog of NCBI NO: 28574924 NR Description: viral iap associated factor CG18593-PA
  misc_feature (14)..(239): Homolog of NCBI NO: 13129044 NR Description: IAP-associated factor VIAF1; phosducin-like 2
  misc_feature (1)..(245): Homolog of NCBI NO: 15241349 NR Description: expressed protein [Arabidopsis thaliana]
  misc_feature (1)..(245): Homolog of NCBI NO: 21593265 NR Description: unknown [Arabidopsis thaliana]
  misc_feature (1)..(243): Homolog of NCBI NO: 34906294 NR Description: unnamed protein product [Oryza sativa (japonica
MGDYHFVYKDLEGASTQWDDIQRKLGNLPPKAPAFKPPPFTPASDDQPKDKTWIDSKTSEELEDLEDNLDDDRFLQEYRKKRLAEMQEAAKVLRFGSVIPISGSDFVREVSQAPSDVWVVVILYKEGIPECGLLMQSIEELALRYPSTKFVKIISTDCIPNYPDRNLPTLLVYNNGAVKGNYVGLHSFGRRCTPEGVALVLCQSDPVLNDGHNGNEAIIEGVRKRFIEKVVADHEEGGDDDYSSD

SEQ ID NO: 59798 - protein, 160 aa, Glycine max
  peptide (1)..(160): Ceres Seq. ID no. 15221666
  misc_feature (1)..(104): Homolog of NCBI NO: 31560120 NR Description: IAP-associated factor VIAF1 [Mus musculus]
  misc_feature (1)..(156): Homolog of NCBI NO: 34875632 NR Description: similar to IAP-associated factor VIAF1 [Rattus
  misc_feature (1)..(155): Homolog of NCBI NO: 40555753 NR Description: Unknown (protein for MGC:73170) [Danio rerio]
  misc_feature (1)..(155): Homolog of NCBI NO: 9957067 NR Description: IAP-associated factor Viaf1 [Danio rerio]
  misc_feature (1)..(157): Homolog of NCBI NO: 10716148 NR Description: IAP-associated factor VIAF1 [Drosophila
  misc_feature (1)..(157): Homolog of NCBI NO: 28574924 NR Description: viral iap associated factor CG18593-PA
  misc_feature (1)..(154): Homolog of NCBI NO: 13129044 NR Description: IAP-associated factor VIAF1; phosducin-like 2
  misc_feature (1)..(160): Homolog of NCBI NO: 15241349 NR Description: expressed protein [Arabidopsis thaliana]
  misc_feature (1)..(160): Homolog of NCBI NO: 21593265 NR Description: unknown [Arabidopsis thaliana]
  misc_feature (1)..(158): Homolog of NCBI NO: 34906294 NR Description: unnamed protein product [Oryza sativa (japonica
MQEAAKVLRFGSVIPISGSDFVREVSQAPSDVWVVVILYKEGIPECGLLMQSIEELALRYPSTKFVKIISTDCIPNYPDRNLPTLLVYNNGAVKGNYVGLHSFGRRCTPEGVALVLCQSDPVLNDGHNGNEAIIEGVRKRFIEKVVADHEEGGDDDYSSD

SEQ ID NO: 59799 - DNA, 742 bp, Glycine max
  misc_feature (1)..(742): Ceres Seq. ID no. 13582260
agcttgggaggaaataatatcatttccgttctcaaaatcataacagtacttcgcgtgccctagctcactccgtcgctcctcacccttccggcagtgcttggtcgtggccgtcacggttcaaacttcaaaagcatttgttgtgttggagtaggctatggatgacttgtttgattcttcgctgaacttggaggacacccattacaaggaaggctatgacgaaggctacagccatggccttgtcactggcaaggaagaagctaggcaggttggcctcaaggttggctttgaggttggcgaggagcttggtttctataggggttgtgtcgaaatctggacttctgcgatccggctcgacccaacctgtttctctccacgggctaaaacatttatttgccagatggaggagttgatccagaaataccctctcatggatccagaaaatgcacaagtgcaagagatcatggatagcctcaggctcaagttcaagatggtttgttcttccttgcatgtcaaacttgagtataatgggtatcccaaatcttctacggaggtcaatgatattcaattctgagctagttatgatattttcagtctttagggatatccatgtgtagggaacctctgagttgggttagttgatgaacaaattacgtgttatcattttacaaacatttgtgcaagtcaatgtatcgaataattattttatattaaaaatgatgatatatacattgtttatgaacgt

SEQ ID NO: 59800 - protein, 138 aa, Glycine max
  peptide (1)..(138): Ceres Seq. ID no. 13582261
  misc_feature (1)..(135): Homolog of NCBI NO: 38106997 NR Description: hypothetical protein MG07505.4 [Magnaporthe
  misc_feature (5)..(124): Homolog of NCBI NO: 28829147 NR Description: hypothetical protein [Dictyostelium discoideum]
  misc_feature (1)..(123): Homolog of NCBI NO: 27661646 NR Description: similar to RIKEN cDNA 2210010N10 gene
  misc_feature (3)..(130): Homolog of NCBI NO: 27448229 NR Description: hypothetical protein [Mus musculus]
  misc_feature (3)..(130): Homolog of NCBI NO: 13905220 NR Description: 2210010N10Rik protein [Mus musculus]
  misc_feature (3)..(138): Homolog of NCBI NO: 23943892 NR Description: oral cancer overexpressed 1 [Homo sapiens]
  misc_feature (2)..(119): Homolog of NCBI NO: 25411995 NR Description: hypothetical protein At2g20830 [imported] -
  misc_feature (3)..(136): Homolog of NCBI NO: 27261030 NR Description: P0681F05.15 [Oryza sativa (japonica
MDDLFDSSLNLEDTHYKEGYDEGYSHGLVTGKEEARQVGLKVGFEVGEELGFYRGCVEIWTSAIRLDPTCFSPRAKTFICQMEELIQKYPLMDPENAQVQEIMDSLRLKFKMVCSSLHVKLEYNGYPKSSTEVNDIQF

SEQ ID NO: 59801 - DNA, 840 bp, Glycine max
  misc_feature (1)..(840): Ceres Seq. ID no. 13639278
acaattcccaggaagaacgtttcaattctaatcagtagttaaacttttccctacaccaaaatcatctcttcactaatggaaggtggactaaagggaagctcattacaagatatgaagcttttgtttgttgaaatgggtgttggctatgaccttcatggtcaggacataacagctgccgcaatgagagcatgcagagatgcaatttctgccaattcaattccagctttccgtaaaggtagcatccctggtgttacatctgatcacatgaaattacatgtcaaactgggggtgcctcatcctctgcaacaaaacttgaacaaggataaaattaagtctgtgtttccatacggacaaatcatgaactttgaagtagtggatggtggacttgtgtgctcaactgaagaaatggccgaaaagaacgatgactgctacattgttaatgctgctgtatatgttggctactaggcttttggtatcttagatccctctggaatcttaatttccatggggaacttgcatgtgtgttggagttttgttgcttcagtaaagctgcaatgagggcaaagtttgcattttagcttttttatatgtattttaattaagagtagttgtgttatcctttcattgtttctgcacgaatgtacctagtacttttgtcagttaggttgaatttactatgtttgtttgtaataatggatcaaagatcatctgaagttcatttttgaactgcatacttctcaaccattgatgtatactttaccttaaacaaaatattaatagaaaaataaaataaattaatgtagggtgaaagcttaaactgcacccctgctgttagttttc

SEQ ID NO: 59802 - protein, 129 aa, Glycine max
  peptide (1)..(129): Ceres Seq. ID no. 13639279
  misc_feature (19)..(129): Homolog of NCBI NO: 27379135 NR Description: blr4024 [Bradyrhizobium japonicum]
  misc_feature (14)..(129): Homolog of NCBI NO: 16799587 NR Description: lin0512 [Listeria innocua]
  misc_feature (14)..(129): Homolog of NCBI NO: 16802555 NR Description: lmo0512 [Listeria monocytogenes EGD-e]
  misc_feature (14)..(129): Homolog of NCBI NO: 23098421 NR Description: hypothetical protein [Oceanobacillus iheyensis
  misc_feature (15)..(129): Homolog of NCBI NO: 23098097 NR Description: hypothetical protein [Oceanobacillus iheyensis
  misc_feature (13)..(129): Homolog of NCBI NO: 37520060 NR Description: hypothetical protein glr0491 [Gloeobacter
  misc_feature (3)..(90): Homolog of NCBI NO: 34912624 NR Description: P0410E01.16 [Oryza sativa (japonica
  misc_feature (13)..(129): Homolog of NCBI NO: 30690579 NR Description: expressed protein [Arabidopsis thaliana]
  misc_feature (3)..(129): Homolog of NCBI NO: 21954066 NR Description: unknown protein [Arabidopsis thaliana]
  misc_feature (3)..(129): Homolog of NCBI NO: 18396927 NR Description: expressed protein [Arabidopsis thaliana]
MEGGLKGSSLQDMKLLFVEMGVGYDLHGQDITAAAMRACRDAISANSIPAFRKGSIPGVTSDHMKLHVKLGVPHPLQQNLNKDKIKSVFPYGQIMNFEVVDGGLVCSTEEMAEKNDDCYIVNAAVYVGY

SEQ ID NO: 59803 - protein, 117 aa, Glycine max
  peptide (1)..(117): Ceres Seq. ID no. 13639280
  misc_feature (7)..(117): Homolog of NCBI NO: 27379135 NR Description: blr4024 [Bradyrhizobium japonicum]
  misc_feature (2)..(117): Homolog of NCBI NO: 16799587 NR Description: lin0512 [Listeria innocua]
  misc_feature (2)..(117): Homolog of NCBI NO: 16802555 NR Description: lmo0512 [Listeria monocytogenes EGD-e]
  misc_feature (2)..(117): Homolog of NCBI NO: 23098421 NR Description: hypothetical protein [Oceanobacillus iheyensis
  misc_feature (3)..(117): Homolog of NCBI NO: 23098097 NR Description: hypothetical protein [Oceanobacillus iheyensis
  misc_feature (1)..(117): Homolog of NCBI NO: 37520060 NR Description: hypothetical protein glr0491 [Gloeobacter
  misc_feature (1)..(78): Homolog of NCBI NO: 34912624 NR Description: P0410E01.16 [Oryza sativa (japonica
  misc_feature (1)..(117): Homolog of NCBI NO: 30690579 NR Description: expressed protein [Arabidopsis thaliana]
  misc_feature (1)..(117): Homolog of NCBI NO: 21954066 NR Description: unknown protein [Arabidopsis thaliana]
  misc_feature (1)..(117): Homolog of NCBI NO: 18396927 NR Description: expressed protein [Arabidopsis thaliana]
MKLLFVEMGVGYDLHGQDITAAAMRACRDAISANSIPAFRKGSIPGVTSDHMKLHVKLGVPHPLQQNLNKDKIKSVFPYGQIMNFEVVDGGLVCSTEEMAEKNDDCYIVNAAVYVGY

SEQ ID NO: 59804 - protein, 110 aa, Glycine max
  peptide (1)..(110): Ceres Seq. ID no. 13639281
  misc_feature (1)..(110): Homolog of NCBI NO: 27379135 NR Description: blr4024 [Bradyrhizobium japonicum]
  misc_feature (1)..(110): Homolog of NCBI NO: 16799587 NR Description: lin0512 [Listeria innocua]
  misc_feature (1)..(110): Homolog of NCBI NO: 16802555 NR Description: lmo0512 [Listeria monocytogenes EGD-e]
  misc_feature (1)..(110): Homolog of NCBI NO: 23098421 NR Description: hypothetical protein [Oceanobacillus iheyensis
  misc_feature (1)..(110): Homolog of NCBI NO: 23098097 NR Description: hypothetical protein [Oceanobacillus iheyensis
  misc_feature (1)..(110): Homolog of NCBI NO: 37520060 NR Description: hypothetical protein glr0491 [Gloeobacter
  misc_feature (1)..(71): Homolog of NCBI NO: 34912624 NR Description: P0410E01.16 [Oryza sativa (japonica
  misc_feature (1)..(110): Homolog of NCBI NO: 30690579 NR Description: expressed protein [Arabidopsis thaliana]
  misc_feature (1)..(110): Homolog of NCBI NO: 21954066 NR Description: unknown protein [Arabidopsis thaliana]
  misc_feature (1)..(110): Homolog of NCBI NO: 18396927 NR Description: expressed protein [Arabidopsis thaliana]
MGVGYDLHGQDITAAAMRACRDAISANSIPAFRKGSIPGVTSDHMKLHVKLGVPHPLQQNLNKDKIKSVFPYGQIMNFEVVDGGLVCSTEEMAEKNDDCYIVNAAVYVGY

SEQ ID NO: 59805 - DNA, 755 bp, Glycine max
  misc_feature (1)..(755): Ceres Seq. ID no. 12610554
aagttctatagtgttcaaaaagtgtaacaatggctcctagttccacattgcaattcccaattctcttgggtcttctcttaatttcatttctgggtgttgaaggggtacttcccccatcatgcaatcgctatgagtgccccaactataatgtcaaatatgtaggcaaaaactttgaaatccgtcgttataattcacctgtgtggatttcaaatctggctgttcaagacccttctttggttggagctacaagatctggcttcaaaagactatttagttatatttatggtaacaacaactataagaaggaaatgaacatgacaacgcctgtgatcagtgaagtatcaattaatggtggaaattcctcaattgttgtgagcttctatgtgccgaaagtgaaccaagcagacccacctttggcaaatggtctctatgttcagagatggaaaactatagatgtagcagtaagacaatttggtggatttgtcaaagattctaatattgggttgcaagtgtcggccttgaacgatagtcttaccggcactacatggtccgctattgttaagaataagtacattgtggcacagtacaattccccttttgaattgtacaatagagtgaatgagatatggtttttttatgaatgataatgatatgcaagtggaatatgctagacaagattgactcatcttgttatcaacttaaatcagtgaattatatcatatataaatgaacaaattgttgcaataaaaaaaaaa

SEQ ID NO: 59806 - protein, 204 aa, Glycine max
  peptide (1)..(204): Ceres Seq. ID no. 12610555
  misc_feature (33)..(204): Pfam Name: SOUL heme-binding protein Pfam Description: SOUL heme-binding protein
  misc_feature (94)..(199): Homolog of NCBI NO: 16323115 NR Description: At1g78460/F3F9_3 [Arabidopsis thaliana]
  misc_feature (47)..(200): Homolog of NCBI NO: 15778345 NR Description: C6ORF34B [Homo sapiens]
  misc_feature (47)..(200): Homolog of NCBI NO: 7657603 NR Description: heme binding protein 2
  misc_feature (37)..(200): Homolog of NCBI NO: 28278449 NR Description: Similar to heme binding protein 2 [Danio rerio]
  misc_feature (13)..(201): Homolog of NCBI NO: 34904402 NR Description: unnamed protein product [Oryza sativa (japonica
  misc_feature (25)..(199): Homolog of NCBI NO: 15218357 NR Description: hypothetical protein; protein id: At1g78460.1
  misc_feature (27)..(204): Homolog of NCBI NO: 21593898 NR Description: SOUL-like protein [Arabidopsis thaliana]
  misc_feature (27)..(204): Homolog of NCBI NO: 18411970 NR Description: expressed protein
  misc_feature (13)..(204): Homolog of NCBI NO: 34903864 NR Description: unnamed protein product [Oryza sativa (japonica
  misc_feature (25)..(204): Homolog of NCBI NO: 15220033 NR Description: SOUL-like protein
MAPSSTLQFPILLGLLLISFLGVEGVLPPSCNRYECPNYNVKYVGKNFEIRRYNSPVWISNLAVQDPSLVGATRSGFKRLFSYIYGNNNYKKEMNMTTPVISEVSINGGNSSIVVSFYVPKVNQADPPLANGLYVQRWKTIDVAVRQFGGFVKDSNIGLQVSALNDSLTGTTWSAIVKNKYIVAQYNSPFELYNRVNEIWFFYE

SEQ ID NO: 59807 - protein, 111 aa, Glycine max
  peptide (1)..(111): Ceres Seq. ID no. 12610556
  misc_feature (1)..(111): Pfam Name: SOUL heme-binding protein Pfam Description: SOUL heme-binding protein
  misc_feature (1)..(106): Homolog of NCBI NO: 16323115 NR Description: At1g78460/F3F9_3 [Arabidopsis thaliana]
  misc_feature (1)..(107): Homolog of NCBI NO: 15778345 NR Description: C6ORF34B [Homo sapiens]
  misc_feature (1)..(107): Homolog of NCBI NO: 7657603 NR Description: heme binding protein 2
  misc_feature (1)..(107): Homolog of NCBI NO: 28278449 NR Description: Similar to heme binding protein 2 [Danio rerio]
  misc_feature (1)..(108): Homolog of NCBI NO: 34904402 NR Description: unnamed protein product [Oryza sativa (japonica
  misc_feature (1)..(106): Homolog of NCBI NO: 15218357 NR Description: hypothetical protein; protein id: At1g78460.1
  misc_feature (1)..(111): Homolog of NCBI NO: 21593898 NR Description: SOUL-like protein [Arabidopsis thaliana]
  misc_feature (1)..(111): Homolog of NCBI NO: 18411970 NR Description: expressed protein
  misc_feature (1)..(111): Homolog of NCBI NO: 34903864 NR Description: unnamed protein product [Oryza sativa (japonica
  misc_feature (1)..(111): Homolog of NCBI NO: 15220033 NR Description: SOUL-like protein
MNMTTPVISEVSINGGNSSIVVSFYVPKVNQADPPLANGLYVQRWKTIDVAVRQFGGFVKDSNIGLQVSALNDSLTGTTWSAIVKNKYIVAQYNSPFELYNRVNEIWFFYE

SEQ ID NO: 59808 - protein, 109 aa, Glycine max
  peptide (1)..(109): Ceres Seq. ID no. 12610557
  misc_feature (1)..(109): Pfam Name: SOUL heme-binding protein Pfam Description: SOUL heme-binding protein
  misc_feature (1)..(104): Homolog of NCBI NO: 16323115 NR Description: At1g78460/F3F9_3 [Arabidopsis thaliana]
  misc_feature (1)..(105): Homolog of NCBI NO: 15778345 NR Description: C6ORF34B [Homo sapiens]
  misc_feature (1)..(105): Homolog of NCBI NO: 7657603 NR Description: heme binding protein 2
  misc_feature (1)..(105): Homolog of NCBI NO: 28278449 NR Description: Similar to heme binding protein 2 [Danio rerio]
  misc_feature (1)..(106): Homolog of NCBI NO: 34904402 NR Description: unnamed protein product [Oryza sativa (japonica
  misc_feature (1)..(104): Homolog of NCBI NO: 15218357 NR Description: hypothetical protein; protein id: At1g78460.1
  misc_feature (1)..(109): Homolog of NCBI NO: 21593898 NR Description: SOUL-like protein [Arabidopsis thaliana]
  misc_feature (1)..(109): Homolog of NCBI NO: 18411970 NR Description: expressed protein
  misc_feature (1)..(109): Homolog of NCBI NO: 34903864 NR Description: unnamed protein product [Oryza sativa (japonica
  misc_feature (1)..(109): Homolog of NCBI NO: 15220033 NR Description: SOUL-like protein
MTTPVISEVSINGGNSSIVVSFYVPKVNQADPPLANGLYVQRWKTIDVAVRQFGGFVKDSNIGLQVSALNDSLTGTTWSAIVKNKYIVAQYNSPFELYNRVNEIWFFYE

SEQ ID NO: 59809 - DNA, 778 bp, Glycine max
  misc_feature (1)..(778): Ceres Seq. ID no. 12611396
cccctcgtcgctgcgtctctctcccgcaaccttatagattcgtttttattcccatcgatcggagagagagagaataattcaataagcgaccatgttggtgtacactgatcttctcaccggtgatgagcttctctctgactctttcccttacaaggagattgagaatggtattctttgggaagttgaaggaaagtggactacccagggatgtgtagaggttaacattggtgccaacccctctgctgaagaaggtggtgaggacgagggtgttgacgactctgttcaaaaggttgttgacattgtcgacaccttcaggctccaggagcaaccgacctacgacaagaaggggttcatcgcctatatcaaaaagtacatcaagcttttgacccccaagctcaacgccgaagatcaagaagctttcaagaagggtattgagggagctaccaagtacttgctccctaagctcaaggacttccaattctttgttggggagagcatgcacgatgacagcactgtggtctttgcttactacaaggagggtgctactaacccaacatttttgtacttcggacatggtttgaaggaggtcaagtgctgattgagagaagctctcgtgtggtcggtcgcagcgactctattaagtctatgtctctttatattgttatgtgtttcttccccaccattttacttttctttctacttctcatctctgttgcaaaattctcaagttattaatccgaaaacaatggtttgttagttgaattttggttcgtccttt

SEQ ID NO: 59810 - protein, 168 aa, Glycine max
  peptide (1)..(168): Ceres Seq. ID no. 12611397
  misc_feature (1)..(165): Pfam Name: Translationally controlled tumour protein Pfam Description: Translationally controlled tumour protein
  misc_feature (1)..(168): Homolog of NCBI NO: 1174626 NR Description: TRANSLATIONALLY CONTROLLED TUMOR PROTEIN HOMOLOG
  misc_feature (1)..(168): Homolog of NCBI NO: 9979196 NR Description: Translationally controlled tumor protein homolog
  misc_feature (1)..(168): Homolog of NCBI NO: 20140865 NR Description: Translationally controlled tumor protein homolog
  misc_feature (1)..(168): Homolog of NCBI NO: 2507442 NR Description: TRANSLATIONALLY CONTROLLED TUMOR PROTEIN HOMOLOG
  misc_feature (1)..(168): Homolog of NCBI NO: 2507443 NR Description: Translationally controlled tumor protein homolog
  misc_feature (1)..(168): Homolog of NCBI NO: 549063 NR Description: Translationally controlled tumor protein homolog
  misc_feature (1)..(168): Homolog of NCBI NO: 21595816 NR Description: translationally controlled tumor protein-like
  misc_feature (1)..(168): Homolog of NCBI NO: 15228276 NR Description: translationally controlled tumor protein-like
  misc_feature (1)..(168): Homolog of NCBI NO: 20140684 NR Description: Translationally controlled tumor protein homolog
MLVYTDLLTGDELLSDSFPYKEIENGILWEVEGKWTTQGCVEVNIGANPSAEEGGEDEGVDDSVQKVVDIVDTFRLQEQPTYDKKGFIAYIKKYIKLLTPKLNAEDQEAFKKGIEGATKYLLPKLKDFQFFVGESMHDDSTVVFAYYKEGATNPTFLYFGHGLKEVKC

SEQ ID NO: 59811 - DNA, 1645 bp, Glycine max
  misc_feature (1)..(1645): Ceres Seq. ID no. 13639022
aaaatagaagaaaggattatcagagtcgcattgtcgattcagagaaaaaaaaattgaattcaatctgatagatcctatcacagcaaaaaaaattggattgaataaggtgtttccgatttcaaaaacaatcacacaaatggttaataaaagttaggtttcttaatttctgcttcttattacatcatcttaaatctttggttttggatccatccaataatcatggagagcataataagcaagctccgcaacctagacgcctaccctaaaatcaacgaggatttctacagccgcacgctctccggcggtgtcatcactctcgcttcctccattctcatgctcttgctcttctactccgagctccggttgtatcttcacgctgtcaccgagaccaagcttgtcgtcgacacttccagagccgaaacgctgcgtatcaattttgatgttacgtttcctgcgcttccatgttccatactcagtcttgatgccatggacatcagcggagagcagcgtctagatgttaaacacgatataatcaagaagagattagactctcgtggcaatgtgatagaaacaaggcaagaaggaattggtgctcccaagattgaaaagccattgcagaggcatggaggcaggctcgagcacaatgagacttattgtggttcctgttatggttctgaagtgtcagatgatgattgttgtaattcctgtgaggatgttcgtgaagcataccgtaagaaaggttgggcactttcaaatcctgatttaattgaccagtgcaaaagagaaggattcttacaaagaatcaaggatgaagaaggtgaaggatgcaatgtgtatggtttcttggaagtaaataaggttgcagggaattttcattttgcacctgggaaaagctttcagcaatctggtgtacatgtacatgacctgctggcttttcaaaaggattcttttaatttaagtcaccacatcaacagattaactttcggagagtatttccctggtgttgttaatcctcttgacaacgtgcattggacacaagaaacaccaagtgggatgtaccagtattttattaaggttgtgcctacagtatacactgatgtgagtgggcatactatccagtcaaaccagttctctgttacagaacacttcaggactggagacatgggccgtctgcagtcccttcccggagttttctttttctatgacctctctccaattaaggttacttttacggaagaaaatgtctcattcttacattttcttactaatgtttgtgccatagttggaggtattttcaccgtttctggaatactagattcattcatctatcacggtcaaagggctatcaagaagaagatggaacttggtaaatttaactgatgggtgctatttgagtaatttcgagcgaatggctctccagagacaatctattcaagagaaggtcaactactgattgaaattccccttggggttctgagttcttcggttacaacaaaaggattttgcccttagatcaaggttgaaatgcctagatatcatgtgcaacaaatgctactttgccttgattcatatcttttctgacagctctgatgttgtgaatgttatgtgttttatggaaagtagaggggcttttccttgcagaagc

SEQ ID NO: 59812 - protein, 386 aa, Glycine max
  peptide (1)..(386): Ceres Seq. ID no. 13639023
  misc_feature (5)..(384): Homolog of NCBI NO: 28278376 NR Description: Similar to serologically defined breast cancer
  misc_feature (1)..(384): Homolog of NCBI NO: 7706278 NR Description: serologically defined breast cancer antigen 84
  misc_feature (1)..(384): Homolog of NCBI NO: 13384938 NR Description: serologically defined breast cancer antigen 84
  misc_feature (1)..(384): Homolog of NCBI NO: 34860248 NR Description: similar to serologically defined breast cancer
  misc_feature (358)..(386): Homolog of NCBI NO: 6598578 NR Description: F5J5.4 [Arabidopsis thaliana]
  misc_feature (1)..(153): Homolog of NCBI NO: 6598578 NR Description: F5J5.4 [Arabidopsis thaliana]
  misc_feature (149)..(362): Homolog of NCBI NO: 6598578 NR Description: F5J5.4 [Arabidopsis thaliana]
  misc_feature (1)..(386): Homolog of NCBI NO: 18395087 NR Description: expressed protein [Arabidopsis thaliana]
  misc_feature (1)..(386): Homolog of NCBI NO: 38347102 NR Description: OSJNBa0006M15.17 [Oryza sativa (japonica
  misc_feature (1)..(386): Homolog of NCBI NO: 30693281 NR Description: expressed protein [Arabidopsis thaliana]
MESIISKLRNLDAYPKINEDFYSRTLSGGVITLASSILMLLLFYSELRLYLHAVTETKLVVDTSRAETLRINFDVTFPALPCSILSLDAMDISGEQRLDVKHDIIKKRLDSRGNVIETRQEGIGAPKIEKPLQRHGGRLEHNETYCGSCYGSEVSDDDCCNSCEDVREAYRKKGWALSNPDLIDQCKREGFLQRIKDEEGEGCNVYGFLEVNKVAGNFHFAPGKSFQQSGVHVHDLLAFQKDSFNLSHHINRLTFGEYFPGVVNPLDNVHWTQETPSGMYQYFIKVVPTVYTDVSGHTIQSNQFSVTEHFRTGDMGRLQSLPGVFFFYDLSPIKVTFTEENVSFLHFLTNVCAIVGGIFTVSGILDSFIYHGQRAIKKKMELGKFN

SEQ ID NO: 59813 - protein, 348 aa, Glycine max
  peptide (1)..(348): Ceres Seq. ID no. 13639024
  misc_feature (1)..(346): Homolog of NCBI NO: 28278376 NR Description: Similar to serologically defined breast cancer
  misc_feature (1)..(346): Homolog of NCBI NO: 7706278 NR Description: serologically defined breast cancer antigen 84
  misc_feature (1)..(346): Homolog of NCBI NO: 13384938 NR Description: serologically defined breast cancer antigen 84
  misc_feature (1)..(346): Homolog of NCBI NO: 34860248 NR Description: similar to serologically defined breast cancer
  misc_feature (320)..(348): Homolog of NCBI NO: 6598578 NR Description: F5J5.4 [Arabidopsis thaliana]
  misc_feature (1)..(115): Homolog of NCBI NO: 6598578 NR Description: F5J5.4 [Arabidopsis thaliana]
  misc_feature (111)..(324): Homolog of NCBI NO: 6598578 NR Description: F5J5.4 [Arabidopsis thaliana]
  misc_feature (1)..(348): Homolog of NCBI NO: 18395087 NR Description: expressed protein [Arabidopsis thaliana]
  misc_feature (1)..(348): Homolog of NCBI NO: 38347102 NR Description: OSJNBa0006M15.17 [Oryza sativa (japonica
  misc_feature (1)..(348): Homolog of NCBI NO: 30693281 NR Description: expressed protein [Arabidopsis thaliana]
MLLLFYSELRLYLHAVTETKLVVDTSRAETLRINFDVTFPALPCSILSLDAMDISGEQRLDVKHDIIKKRLDSRGNVIETRQEGIGAPKIEKPLQRHGGRLEHNETYCGSCYGSEVSDDDCCNSCEDVREAYRKKGWALSNPDLIDQCKREGFLQRIKDEEGEGCNVYGFLEVNKVAGNFHFAPGKSFQQSGVHVHDLLAFQKDSFNLSHHINRLTFGEYFPGVVNPLDNVHWTQETPSGMYQYFIKVVPTVYTDVSGHTIQSNQFSVTEHFRTGDMGRLQSLPGVFFFYDLSPIKVTFTEENVSFLHFLTNVCAIVGGIFTVSGILDSFIYHGQRAIKKKMELGKFN

SEQ ID NO: 59814 - protein, 297 aa, Glycine max
  peptide (1)..(297): Ceres Seq. ID no. 13639025
  misc_feature (1)..(295): Homolog of NCBI NO: 28278376 NR Description: Similar to serologically defined breast cancer
  misc_feature (1)..(295): Homolog of NCBI NO: 7706278 NR Description: serologically defined breast cancer antigen 84
  misc_feature (1)..(295): Homolog of NCBI NO: 13384938 NR Description: serologically defined breast cancer antigen 84
  misc_feature (1)..(295): Homolog of NCBI NO: 34860248 NR Description: similar to serologically defined breast cancer
  misc_feature (269)..(297): Homolog of NCBI NO: 6598578 NR Description: F5J5.4 [Arabidopsis thaliana]
  misc_feature (1)..(64): Homolog of NCBI NO: 6598578 NR Description: F5J5.4 [Arabidopsis thaliana]
  misc_feature (60)..(273): Homolog of NCBI NO: 6598578 NR Description: F5J5.4 [Arabidopsis thaliana]
  misc_feature (1)..(297): Homolog of NCBI NO: 18395087 NR Description: expressed protein [Arabidopsis thaliana]
  misc_feature (1)..(297): Homolog of NCBI NO: 38347102 NR Description: OSJNBa0006M15.17 [Oryza sativa (japonica
  misc_feature (1)..(297): Homolog of NCBI NO: 30693281 NR Description: expressed protein [Arabidopsis thaliana]
MDISGEQRLDVKHDIIKKRLDSRGNVIETRQEGIGAPKIEKPLQRHGGRLEHNETYCGSCYGSEVSDDDCCNSCEDVREAYRKKGWALSNPDLIDQCKREGFLQRIKDEEGEGCNVYGFLEVNKVAGNFHFAPGKSFQQSGVHVHDLLAFQKDSFNLSHHINRLTFGEYFPGVVNPLDNVHWTQETPSGMYQYFIKVVPTVYTDVSGHTIQSNQFSVTEHFRTGDMGRLQSLPGVFFFYDLSPIKVTFTEENVSFLHFLTNVCAIVGGIFTVSGILDSFIYHGQRAIKKKMELGKFN

SEQ ID NO: 59815 - DNA, 1503 bp, Glycine max
  misc_feature (1)..(1503): Ceres Seq. ID no. 13595199
ctccattcgatccgaacccatccgattcggaagagaggtactcacttgccccaaccaatcgaagcagggcgagctcgactttgcggcgctaattcgtcggcagctagtatcccgcgctgtgtgtttccctcgttcgtgttcaggtggtgatgccgcttgtggaatcgcctcaatggcgccggaaggccaccgatttcttctcttcatctagcttcaagctgaagcaggcagggcaatctgcaggggataatatagctgatgttgccgggaaggttggaacagtggtgaagagtcggtgggctatcttccaggatgctagacagcgaccgccaccaccaggagatactgtgcaggagcgcttcatctctgctgctgccaacactggagtgattctgaggaagggcatttcagagacaaaggagaaggtcgcggtgggaaaggtcaaagttgaagaggctgccaaaaaaactgcggacaaaagcaaaactattttgaacaatattgaacgctggcagaagggagttgcgagcaatgacgtttttggtgttcctgttgaagccactgtacaacgggagcaatatggtaaagctgtgcctctgatactggtgaggtgtgcagaccacttggttatatcaggcttgagtaatgagtgcttgttcaaatctgaaggtgacagaaaagttcttcagcaactagtttcactttacaatgaggattcgggtgcatctttgcctgatggtgttagccctcttgatgtagctgcactgatcaagtgctaccttgccagcatccccgaaccgcttacaacatttgctctttatgatgagcttaaagacgcgagggttagcattgatgatcttaagaacatactgaagaagcttccaaatgtgaactacatgacactagaatttgttacagcattgctactgagagtaagccgtaaatcagcactcaacaagatggactctcgtacccttgctgtggagttcgcacctttgatcatatggcagcaaggggattctggaacagatttacggaatcatctcagattcacactgaaaccacctccaaaaattgtggacgcgacgacaagtaccactacatgggacttgctagatgaggatgatgtggatgcttcgtcgcaaatccccttggacgatggttcgcctctagactatggtgctattgaggtgattcaatgcttaattgagcatcacaatcccatattcacggatgcaaacgagactgtatggagatgacctgacctggccggctcctctttagatttctgtggtatttagctcgtgctatgtacaagttccaggtagtaggatggagtggagtgccgcgaataagtctagtcttggggaagcattttggtccaaacttttttttgtgggagtaaaagttggaactgtatatattaattgtccacatgacagagttgtcttgtgggatttgcctcgacatggctcgtcaataatgtaccatgattcttgtgct

SEQ ID NO: 59816 - protein, 369 aa, Glycine max
  peptide (1)..(369): Ceres Seq. ID no. 13595200
  misc_feature (149)..(288): Pfam Name: RhoGAP domain Pfam Description: RhoGAP domain
  misc_feature (99)..(291): Homolog of NCBI NO: 21358061 NR Description: CG6811-PA [Drosophila melanogaster]
  misc_feature (128)..(296): Homolog of NCBI NO: 4139447 NR Description: Chain B, Transition State Complex For Gtp By Cdc42: Comparisons Of The High Resolution Structures For Cdc42 To The Active And Catalytically Compromised Forms Of The
  misc_feature (128)..(296): Homolog of NCBI NO: 6730013 NR Description: Chain B, Crystal Structure Of The
  misc_feature (128)..(296): Homolog of NCBI NO: 3660275 NR Description: Chain A, RhoRHOGAPGDP(DOT)ALF4 COMPLEX
  misc_feature (128)..(296): Homolog of NCBI NO: 3402094 NR Description: Chain A, Complex Between Cdc42hs.Gmppnp And P50
  misc_feature (128)..(296): Homolog of NCBI NO: 2624718 NR Description: Gtpase-Activation Domain From Rhogap
  misc_feature (112)..(285): Homolog of NCBI NO: 26333369 NR Description: unnamed protein product [Mus musculus]
  misc_feature (1)..(369): Homolog of NCBI NO: 21553593 NR Description: unknown [Arabidopsis thaliana]
  misc_feature (1)..(369): Homolog of NCBI NO: 18424478 NR Description: auxin-regulated protein [Arabidopsis thaliana]
  misc_feature (1)..(369): Homolog of NCBI NO: 28564771 NR Description: putative auxin-regulated protein
MPLVESPQWRRKATDFFSSSSFKLKQAGQSAGDNIADVAGKVGTVVKSRWAIFQDARQRPPPPGDTVQERFISAAANTGVILRKGISETKEKVAVGKVKVEEAAKKTADKSKTILNNIERWQKGVASNDVFGVPVEATVQREQYGKAVPLILVRCADHLVISGLSNECLFKSEGDRKVLQQLVSLYNEDSGASLPDGVSPLDVAALIKCYLASIPEPLTTFALYDELKDARVSIDDLKNILKKLPNVNYMTLEFVTALLLRVSRKSALNKMDSRTLAVEFAPLIIWQQGDSGTDLRNHLRFTLKPPPKIVDATTSTTTWDLLDEDDVDASSQIPLDDGSPLDYGAIEVIQCLIEHHNPIFTDANETVWR

SEQ ID NO: 59817 - DNA, 1699 bp, Glycine max
  misc_feature (1)..(1699): Ceres Seq. ID no. 13582285
acttttgttgtctaacatggctttggtgaatccgtttctgtgtaccactcgaacgtccctccctctgcgagtttcaggtccaccaaaccaagtcctaccacgttggactctctgctcccaatattcattcaaaacatcatcactaagatcgaagcaactcaggtgtggcgccactgcagacatcaaagcagatcacgcggttcttgtgggccccaccagcgaggaggagagaaaaggggactatgactggacacaggaatggtaccctttgtatctcactcagaatgtgcccgaagatgcacctttgggtctcagagtgtttgataaacagctcgtgttgttcaaggatggcaatggccagtttcgctgttacgaagatcgctgcccccacaggttagcgaaactatctgagggacagttgattgatggaaggctcgagtgtctataccatggatggcaatttgaaggggagggaaaatgtgtgaagatacctcagcttccagctgatgccaaaatcccaagggctgcttgtgttaaaacatatgaagtgagggactctcaaggtgttatttgggtatggatgtccctcaagacacctccaaatgtcagtaaattaccttggtttgagaacttcgcaaggccggggtttcaagatgtttcgacaattcacgaactcccttatgatcactctattcttctggagaacctgatggatcctgctcatatcccaatctcccatgacagaacagattggactgcgaaaagggaggatgctcagccgctgtgttttgaggtgaccgaacgaacagatagagggtttgcaggttggtggggcagagagaaagatggatccatgcctaacttcttgcggtttgaggctccttgtgttctacaaaacaacagggaaattgttgataagaatggtgaaataaactacttcagtggcctgttcctttgtagaccaaccgggcaagggaaatccatgctgatagttaggtttggaggaacaaaaagatctccactagcaaaagtgtttcctaagtggtacttccatcagaatgcaagcaaggtgtttgagcaagacatgggattcttgtcatcacaaaatgaaattcttctgagagaaaaggttccaacaaaggaactatacctgaatctgaaatcatcagacacatgggttgctgaatacaggaagtggatggacaaagcggggcatggaatgccatatcattttggtcacagcactatctctttgcctaaagagcctgctgtggttgaacacgcacctgctggactagtcgcaggacaatcagcttcctcaccaaccaaggggggcattggaacaatgcatgcccctaattttgccaacagatattttaggcatgtgattcattgcaaaggatgtagaaccgtcgtcaaagctttcgaagcttggaaaaatgctctttcagctgtggcaattgcattaactgcgttggcaattctgctttctgggagacaatggaaggtccttctcttggcatctgcagctctctgctctgttggagtctatgcttgctcaaccgccattgcaatgaatacaacaaattttattaggacacataggagattgtgagtgactggttgtaaaaatagttgttcaaatgaatactaaacagtttgtctaatgactaattagttgttacagattgtgtttggc

SEQ ID NO: 59818 - protein, 537 aa, Glycine max
  peptide (1)..(537): Ceres Seq. ID no. 13582286
  misc_feature (86)..(188): Pfam Name: Rieske [2Fe-2S] domain Pfam Description: Rieske [2Fe-2S] domain
  misc_feature (11)..(385): Homolog of NCBI NO: 15230543 NR Description: Rieske [2Fe-2S] domain-containing protein
  misc_feature (49)..(381): Homolog of NCBI NO: 7489721 NR Description: cell death suppressor protein lls1 - maize
  misc_feature (49)..(381): Homolog of NCBI NO: 1935912 NR Description: lethal leaf-spot 1 [Zea mays]
  misc_feature (62)..(402): Homolog of NCBI NO: 23040568 NR Description: hypothetical protein [Trichodesmium erythraeum
  misc_feature (73)..(381): Homolog of NCBI NO: 30088964 NR Description: lethal leaf spot 1-like protein [Vigna
  misc_feature (80)..(409): Homolog of NCBI NO: 23041088 NR Description: hypothetical protein [Trichodesmium erythraeum
  misc_feature (72)..(425): Homolog of NCBI NO: 17232499 NR Description: similar to cell death suppressor protein Lls1
  misc_feature (76)..(415): Homolog of NCBI NO: 23125858 NR Description: hypothetical protein [Nostoc punctiforme]
  misc_feature (67)..(537): Homolog of NCBI NO: 15224625 NR Description: Rieske [2Fe-2S] domain-containing protein
  misc_feature (39)..(537): Homolog of NCBI NO: 7488843 NR Description: Rieske [2Fe-2S] iron-sulfur protein tic55 -
LLLSNMALVNPFLCTTRTSLPLRVSGPPNQVLPRWTLCSQYSFKTSSLRSKQLRCGATADIKADHAVLVGPTSEEERKGDYDWTQEWYPLYLTQNVPEDAPLGLRVFDKQLVLFKDGNGQFRCYEDRCPHRLAKLSEGQLIDGRLECLYHGWQFEGEGKCVKIPQLPADAKIPRAACVKTYEVRDSQGVIWVWMSLKTPPNVSKLPWFENFARPGFQDVSTIHELPYDHSILLENLMDPAHIPISHDRTDWTAKREDAQPLCFEVTERTDRGFAGWWGREKDGSMPNFLRFEAPCVLQNNREIVDKNGEINYFSGLFLCRPTGQGKSMLIVRFGGTKRSPLAKVFPKWYFHQNASKVFEQDMGFLSSQNEILLREKVPTKELYLNLKSSDTWVAEYRKWMDKAGHGMPYHFGHSTISLPKEPAVVEHAPAGLVAGQSASSPTKGGIGTMHAPNFANRYFRHVIHCKGCRTVVKAFEAWKNALSAVAIALTALAILLSGRQWKVLLLASAALCSVGVYACSTAIAMNTTNFIRTHRRL

SEQ ID NO: 59819 - protein, 532 aa, Glycine max
  peptide (1)..(532): Ceres Seq. ID no. 13582287
  misc_feature (81)..(183): Pfam Name: Rieske [2Fe-2S] domain Pfam Description: Rieske [2Fe-2S] domain
  misc_feature (6)..(380): Homolog of NCBI NO: 15230543 NR Description: Rieske [2Fe-2S] domain-containing protein
  misc_feature (44)..(376): Homolog of NCBI NO: 7489721 NR Description: cell death suppressor protein lls1 - maize
  misc_feature (44)..(376): Homolog of NCBI NO: 1935912 NR Description: lethal leaf-spot 1 [Zea mays]
  misc_feature (57)..(397): Homolog of NCBI NO: 23040568 NR Description: hypothetical protein [Trichodesmium erythraeum
  misc_feature (68)..(376): Homolog of NCBI NO: 30088964 NR Description: lethal leaf spot 1-like protein [Vigna
  misc_feature (75)..(404): Homolog of NCBI NO: 23041088 NR Description: hypothetical protein [Trichodesmium erythraeum
  misc_feature (67)..(420): Homolog of NCBI NO: 17232499 NR Description: similar to cell death suppressor protein Lls1
  misc_feature (71)..(410): Homolog of NCBI NO: 23125858 NR Description: hypothetical protein [Nostoc punctiforme]
  misc_feature (62)..(532): Homolog of NCBI NO: 15224625 NR Description: Rieske [2Fe-2S] domain-containing protein
  misc_feature (34)..(532): Homolog of NCBI NO: 7488843 NR Description: Rieske [2Fe-2S] iron-sulfur protein tic55 -
MALVNPFLCTTRTSLPLRVSGPPNQVLPRWTLCSQYSFKTSSLRSKQLRCGATADIKADHAVLVGPTSEEERKGDYDWTQEWYPLYLTQNVPEDAPLGLRVFDKQLVLFKDGNGQFRCYEDRCPHRLAKLSEGQLIDGRLECLYHGWQFEGEGKCVKIPQLPADAKIPRAACVKTYEVRDSQGVIWVWMSLKTPPNVSKLPWFENFARPGFQDVSTIHELPYDHSILLENLMDPAHIPISHDRTDWTAKREDAQPLCFEVTERTDRGFAGWWGREKDGSMPNFLRFEAPCVLQNNREIVDKNGEINYFSGLFLCRPTGQGKSMLIVRFGGTKRSPLAKVFPKWYFHQNASKVFEQDMGFLSSQNEILLREKVPTKELYLNLKSSDTWVAEYRKWMDKAGHGMPYHFGHSTISLPKEPAVVEHAPAGLVAGQSASSPTKGGIGTMHAPNFANRYFRHVIHCKGCRTVVKAFEAWKNALSAVAIALTALAILLSGRQWKVLLLASAALCSVGVYACSTAIAMNTTNFIRTHRRL

SEQ ID NO: 59820 - protein, 344 aa, Glycine max
  peptide (1)..(344): Ceres Seq. ID no. 13582288
  misc_feature (1)..(192): Homolog of NCBI NO: 15230543 NR Description: Rieske [2Fe-2S] domain-containing protein
  misc_feature (1)..(188): Homolog of NCBI NO: 7489721 NR Description: cell death suppressor protein lls1 - maize
  misc_feature (1)..(188): Homolog of NCBI NO: 1935912 NR Description: lethal leaf-spot 1 [Zea mays]
  misc_feature (1)..(209): Homolog of NCBI NO: 23040568 NR Description: hypothetical protein [Trichodesmium erythraeum
  misc_feature (1)..(188): Homolog of NCBI NO: 30088964 NR Description: lethal leaf spot 1-like protein [Vigna
  misc_feature (1)..(216): Homolog of NCBI NO: 23041088 NR Description: hypothetical protein [Trichodesmium erythraeum
  misc_feature (1)..(232): Homolog of NCBI NO: 17232499 NR Description: similar to cell death suppressor protein Lls1
  misc_feature (1)..(222): Homolog of NCBI NO: 23125858 NR Description: hypothetical protein [Nostoc punctiforme]
  misc_feature (1)..(344): Homolog of NCBI NO: 15224625 NR Description: Rieske [2Fe-2S] domain-containing protein
  misc_feature (1)..(344): Homolog of NCBI NO: 7488843 NR Description: Rieske [2Fe-2S] iron-sulfur protein tic55 -
MSLKTPPNVSKLPWFENFARPGFQDVSTIHELPYDHSILLENLMDPAHIPISHDRTDWTAKREDAQPLCFEVTERTDRGFAGWWGREKDGSMPNFLRFEAPCVLQNNREIVDKNGEINYFSGLFLCRPTGQGKSMLIVRFGGTKRSPLAKVFPKWYFHQNASKVFEQDMGFLSSQNEILLREKVPTKELYLNLKSSDTWVAEYRKWMDKAGHGMPYHFGHSTISLPKEPAVVEHAPAGLVAGQSASSPTKGGIGTMHAPNFANRYFRHVIHCKGCRTVVKAFEAWKNALSAVAIALTALAILLSGRQWKVLLLASAALCSVGVYACSTAIAMNTTNFIRTHRRL

SEQ ID NO: 59821 - DNA, 1089 bp, Glycine max
  misc_feature (1)..(1089): Ceres Seq. ID no. 12611159
ctcccattcttctcgtgtgtcctcctccatatcgctctttttttttctttatttctttttactctttctctaacacttgcttattatatatatcatccccacctaggttcttccgtttttgtagctggggtttataccctttgaggtttgaaaggaaatccaagcaaaggtagaaagaatgaggaagcctagttgtgatatcaaagaattgaacaaaggagcttggtccaaacaagaagaccagaaactcgtagattatatcaagaaacatggtgaagtttgttggcgtacactcccccaggctgcaggtttacatcggtgtggtaaaagttgtaggctgagatggataaactatctacgtccagacctcaaaagaggcaactttgctgaagatgaagaagatctcatcatcaagcttcatgccctgctaggcaaccggtggtcactaatagctgggagattgcctggacgtacagataatgaagtgaagaattattggaattctcatataagaaaaaagcttattagcaatggcattgacccaaataatcatagattaaaccatacaatcccttccgtttatcagaatccacctatgtctgatgatagttcaaaacactttggcatgaaagacaataatagcaagaacgagacaagcaaatcacctcgtgtttacaaccatggtgaagtctcagatgctgcgagtggtgaggctgagtcatcatgtgcattgccagatttaaaccttgatctctctatttgcgaaaaaaatctaaaaccatttcacgaatctaagttgtcgaggaaagtgccatttgattccccttctacacttcttctgtttcagtaattaatcaatcaacatcgaccttggcttgaatatggtgattcagcaaatcgtcatgtggagacgcatgcaagtgtgttgtgatatatagtatattgagatcttaattatcgacatggaaaaggacttagcttgtgtttcattttgaagaatgaaagccctcaactagctagaaagaatgttggcttatgctttgttacaaccttgcaatggcatacaattggcaaacattaattgctgct

SEQ ID NO: 59822 - protein, 223 aa, Glycine max
  peptide (1)..(223): Ceres Seq. ID no. 12611160
  misc_feature (13)..(60): Pfam Name: Myb-like DNA-binding domain Pfam Description: Myb-like DNA-binding domain
  misc_feature (2)..(194): Homolog of NCBI NO: 15233894 NR Description: myb family transcription factor
  misc_feature (11)..(194): Homolog of NCBI NO: 11273984 NR Description: probable transcription factor MYB3
  misc_feature (2)..(194): Homolog of NCBI NO: 39725415 NR Description: MYB transcription factor [Eucalyptus gunnii]
  misc_feature (2)..(207): Homolog of NCBI NO: 82308 NR Description: myb-related protein 308 - garden snapdragon
  misc_feature (2)..(194): Homolog of NCBI NO: 30687964 NR Description: myb family transcription factor [Arabidopsis
  misc_feature (2)..(194): Homolog of NCBI NO: 2129933 NR Description: myb-related protein TMH27 - tomato
  misc_feature (12)..(223): Homolog of NCBI NO: 23476317 NR Description: myb-like transcription factor 6 [Gossypioides
  misc_feature (1)..(194): Homolog of NCBI NO: 7446161 NR Description: myb-related protein - upland cotton
  misc_feature (1)..(194): Homolog of NCBI NO: 23476313 NR Description: myb-like transcription factor 6 [Gossypium
  misc_feature (1)..(194): Homolog of NCBI NO: 23476311 NR Description: myb-like transcription factor 6 [Gossypium
MRKPSCDIKELNKGAWSKQEDQKLVDYIKKHGEVCWRTLPQAAGLHRCGKSCRLRWINYLRPDLKRGNFAEDEEDLIIKLHALLGNRWSLIAGRLPGRTDNEVKNYWNSHIRKKLISNGIDPNNHRLNHTIPSVYQNPPMSDDSSKHFGMKDNNSKNETSKSPRVYNHGEVSDAASGEAESSCALPDLNLDLSICEKNLKPFHESKLSRKVPFDSPSTLLLFQ

SEQ ID NO: 59823 - DNA, 961 bp, Glycine max
  misc_feature (1)..(961): Ceres Seq. ID no. 13582052
acaaaatagatttggctgtcgtttcgtccctccctcttccgttgaacgaacatcggcgttttcaccgacgaatccaactttctttccatttctctctacgattcaggtctttcacttggattcagaatagtacttttgtttcttctagattattagcgacagagatggatgattgggaagctgaagactttcaaccaactcctgctaaagttgaactgaaaagtaactgggatgatgaggatgttgatgagaatgacatcaaggactcttgggaggaagaggatgatgatgagcctactccggcagctgtagtaaagcctgctccaaagaaagcagcaaaagttgttgaaaagaaggctaaatctgttgaagaaccatcaaaggaagagccttttgatcctattgctgacaaacttcgcatgcagaggctagtggaggaagctgattaccaggcaactgctgaactctttggagcaaagactgaagcaaaaagcgttgatattttcattcccaagtctgaaagcgatttcttggaatatgctgagatgatatctcgtaagcttgtaccttatgagaaaagctttcactatattgggctgctcaaagcagtgatgagactttctgtggccaatatgaaagcagctgatgttaaagacgttgcttcctccatttcggcaataggaaacgaaaaactcaaggctgagaaagatgctgctgccggcaaaaagaagtcaggtaagaagaaacaactgcacgtggataagcctgatgatgatcttgtttcgggtccttatggcgccatggacgacgatgatttcatgtaaaagaaaatggcttggagattgcacttactacctatgtaggatattgcaactaagaagaggtttaaatcattttacgtttttttttaaattatctattgaagcaacacaaattagtaaaacagaattgcctttttctc

SEQ ID NO: 59824 - protein, 273 aa, Glycine max
  peptide (1)..(273): Ceres Seq. ID no. 13582053
  misc_feature (56)..(273): Homolog of NCBI NO: 32766433 NR Description: Unknown (protein for MGC:63801) [Danio rerio]
  misc_feature (56)..(273): Homolog of NCBI NO: 23503065 NR Description: Eukaryotic translation initiation factor 3
  misc_feature (56)..(273): Homolog of NCBI NO: 10435304 NR Description: unnamed protein product [Homo sapiens]
  misc_feature (56)..(273): Homolog of NCBI NO: 34856798 NR Description: similar to Eukaryotic translation initiation
  misc_feature (56)..(273): Homolog of NCBI NO: 26349519 NR Description: unnamed protein product [Mus musculus]
  misc_feature (56)..(273): Homolog of NCBI NO: 27374365 NR Description: Adam-PA [Drosophila willistoni]
  misc_feature (56)..(273): Homolog of NCBI NO: 19921950 NR Description: CG12131-PA [Drosophila melanogaster]
  misc_feature (56)..(273): Homolog of NCBI NO: 27374242 NR Description: CG12131-PA [Drosophila erecta]
  misc_feature (55)..(273): Homolog of NCBI NO: 18408426 NR Description: expressed protein [Arabidopsis thaliana]
  misc_feature (55)..(273): Homolog of NCBI NO: 30693092 NR Description: expressed protein [Arabidopsis thaliana]
KIDLAVVSSLPLPLNEHRRFHRRIQLSFHFSLRFRSFTWIQNSTFVSSRLLATEMDDWEAEDFQPTPAKVELKSNWDDEDVDENDIKDSWEEEDDDEPTPAAVVKPAPKKAAKVVEKKAKSVEEPSKEEPFDPIADKLRMQRLVEEADYQATAELFGAKTEAKSVDIFIPKSESDFLEYAEMISRKLVPYEKSFHYIGLLKAVMRLSVANMKAADVKDVASSISAIGNEKLKAEKDAAAGKKKSGKKKQLHVDKPDDDLVSGPYGAMDDDDFM

SEQ ID NO: 59825 - protein, 219 aa, Glycine max
  peptide (1)..(219): Ceres Seq. ID no. 13582054
  misc_feature (2)..(219): Homolog of NCBI NO: 32766433 NR Description: Unknown (protein for MGC:63801) [Danio rerio]
  misc_feature (2)..(219): Homolog of NCBI NO: 23503065 NR Description: Eukaryotic translation initiation factor 3
  misc_feature (2)..(219): Homolog of NCBI NO: 10435304 NR Description: unnamed protein product [Homo sapiens]
  misc_feature (2)..(219): Homolog of NCBI NO: 34856798 NR Description: similar to Eukaryotic translation initiation
  misc_feature (2)..(219): Homolog of NCBI NO: 26349519 NR Description: unnamed protein product [Mus musculus]
  misc_feature (2)..(219): Homolog of NCBI NO: 27374365 NR Description: Adam-PA [Drosophila willistoni]
  misc_feature (2)..(219): Homolog of NCBI NO: 19921950 NR Description: CG12131-PA [Drosophila melanogaster]
  misc_feature (2)..(219): Homolog of NCBI NO: 27374242 NR Description: CG12131-PA [Drosophila erecta]
  misc_feature (1)..(219): Homolog of NCBI NO: 18408426 NR Description: expressed protein [Arabidopsis thaliana]
  misc_feature (1)..(219): Homolog of NCBI NO: 30693092 NR Description: expressed protein [Arabidopsis thaliana]
MDDWEAEDFQPTPAKVELKSNWDDEDVDENDIKDSWEEEDDDEPTPAAVVKPAPKKAAKVVEKKAKSVEEPSKEEPFDPIADKLRMQRLVEEADYQATAELFGAKTEAKSVDIFIPKSESDFLEYAEMISRKLVPYEKSFHYIGLLKAVMRLSVANMKAADVKDVASSISAIGNEKLKAEKDAAAGKKKSGKKKQLHVDKPDDDLVSGPYGAMDDDDFM

SEQ ID NO: 59826 - DNA, 881 bp, Glycine max
  misc_feature (1)..(881): Ceres Seq. ID no. 13595627
atcgaaaaacaccaaacaacacactaacatacacatcatctcctctctcttctcttatcttctccgctatgaagctcgccactagcctcagctccaagttcctccgcctcagccctaaacgtatcttccgcgccaagtccaagtcctcctccgtctccagatccgaaccttcttccttcagctccggtgcttcatccgacggctcctacagcgacctcaagccaggtcccgccgccactcccgtcagtgtcctccccggagaacaagatttttactccgagctgatacaggcctttaagctcatagaccgcgacgacgacggtgtggtttcaagaaaagaactagctgcgctgcttagcgggctcagtcctgagcctccgagtcaagaagaggttactctgatgcttcaagaagtcgatggaggaggagacggttgtatcagcctcgaggagcttgctagccgcgtggcgggatcctcctctgactctgatgaaagctcggtcgagatgagagaggtgtttgagttttttgacgtggatcacgacgggaggatatcggcggaggagcttcatagagtttttggagttatcggagacgagcggtgcacgttagaggagtgtgtgcgtatgatagcgacggttgatgggaacggtgacggttttgtttgctttgatgacttttgccgcatgatggaagcttcaggctccagcgatgagtgatcatcattgagtcatgtttgtatgattgatgataatgacatcgttatgctctcctttgtttacacattattttttactattactgtaatttgggtataattttgtcacggcaaagcacttcaaatttttaccgtcaagaatcaatcaatcactataccagtg

SEQ ID NO: 59827 - protein, 238 aa, Glycine max
  peptide (1)..(238): Ceres Seq. ID no. 13595628
  misc_feature (64)..(235): Homolog of NCBI NO: 15221781 NR Description: polcalcin (calcium-binding pollen allergen),
  misc_feature (67)..(235): Homolog of NCBI NO: 19386815 NR Description: B1147A04.10 [Oryza sativa (japonica
  misc_feature (80)..(238): Homolog of NCBI NO: 34895640 NR Description: OSJNBa0083M16.33 [Oryza sativa (japonica
  misc_feature (15)..(236): Homolog of NCBI NO: 28301674 NR Description: calcium-binding protein [Lotus japonicus]
  misc_feature (93)..(236): Homolog of NCBI NO: 18408502 NR Description: calmodulin-related protein, putative [Arabidopsis
  misc_feature (93)..(236): Homolog of NCBI NO: 21618074 NR Description: calmodulin-related protein [Arabidopsis thaliana]
  misc_feature (32)..(231): Homolog of NCBI NO: 15228219 NR Description: calmodulin, putative [Arabidopsis thaliana]
  misc_feature (23)..(230): Homolog of NCBI NO: 322474 NR Description: calmodulin-related protein (clone PM129) -
  misc_feature (23)..(230): Homolog of NCBI NO: 21536925 NR Description: calmodulin-like protein [Arabidopsis thaliana]
  misc_feature (23)..(230): Homolog of NCBI NO: 15227349 NR Description: calmodulin, putative [Arabidopsis thaliana]
RKTPNNTLTYTSSPLSSLIFSAMKLATSLSSKFLRLSPKRIFRAKSKSSSVSRSEPSSFSSGASSDGSYSDLKPGPAATPVSVLPGEQDFYSELIQAFKLIDRDDDGVVSRKELAALLSGLSPEPPSQEEVTLMLQEVDGGGDGCISLEELASRVAGSSSDSDESSVEMREVFEFFDVDHDGRISAEELHRVFGVIGDERCTLEECVRMIATVDGNGDGFVCFDDFCRMMEASGSSDE

SEQ ID NO: 59828 - protein, 216 aa, Glycine max
  peptide (1)..(216): Ceres Seq. ID no. 13595629
  misc_feature (42)..(213): Homolog of NCBI NO: 15221781 NR Description: polcalcin (calcium-binding pollen allergen),
  misc_feature (45)..(213): Homolog of NCBI NO: 19386815 NR Description: B1147A04.10 [Oryza sativa (japonica
  misc_feature (58)..(216): Homolog of NCBI NO: 34895640 NR Description: OSJNBa0083M16.33 [Oryza sativa (japonica
  misc_feature (1)..(214): Homolog of NCBI NO: 28301674 NR Description: calcium-binding protein [Lotus japonicus]
  misc_feature (71)..(214): Homolog of NCBI NO: 18408502 NR Description: calmodulin-related protein, putative [Arabidopsis
  misc_feature (71)..(214): Homolog of NCBI NO: 21618074 NR Description: calmodulin-related protein [Arabidopsis thaliana]
  misc_feature (10)..(209): Homolog of NCBI NO: 15228219 NR Description: calmodulin, putative [Arabidopsis thaliana]
  misc_feature (1)..(208): Homolog of NCBI NO: 322474 NR Description: calmodulin-related protein (clone PM129) -
  misc_feature (1)..(208): Homolog of NCBI NO: 21536925 NR Description: calmodulin-like protein [Arabidopsis thaliana]
  misc_feature (1)..(208): Homolog of NCBI NO: 15227349 NR Description: calmodulin, putative [Arabidopsis thaliana]
MKLATSLSSKFLRLSPKRIFRAKSKSSSVSRSEPSSFSSGASSDGSYSDLKPGPAATPVSVLPGEQDFYSELIQAFKLIDRDDDGVVSRKELAALLSGLSPEPPSQEEVTLMLQEVDGGGDGCISLEELASRVAGSSSDSDESSVEMREVFEFFDVDHDGRISAEELHRVFGVIGDERCTLEECVRMIATVDGNGDGFVCFDDFCRMMEASGSSDE

SEQ ID NO: 59829 - DNA, 788 bp, Glycine max
  misc_feature (1)..(788): Ceres Seq. ID no. 15224680
cacgagacccagacccgcagaccgccttcccccccactcctctccgcttccagactcctcttcgccgccgattcgtcccgccgccccatccgctccgtcgcgacgccatgtcggtgacgctgcacacgaacctgggggacatcaaggtggaggttttctgcgaccaggtgccgcggacggcggagaactttttagccctgtgcgcgagcggctactacgacggcaccgtcttccaccgcaacatcaaggggttcatggtgcagggcggcgacccgacgggcaccggcaagggcggcgcctcgatctggggcggcaagttcgcggacgagttccgggaggcgctcaagcacggcgcccggggcaccctgtccatggccaactccgggcccaacaccaacggcagccagttcttcatcacctacgccaagcagccccacctcaacggccactacaccgtgttcgccaaggtcatccacggcttcgacgtgcttgacctcatggagaagacccccaccggccccgccgaccgccccctcgccgagatcaggctcaaccgcgtcaccgtccacgccaaccccctcgccgggtaggcctttcttctctcctggatggctggcctggcctggcctggcctctgctgctaatctaggaaccggaaccaaatttggctctgtaatatcatcatcgtctggttacctgaattctacctacctgcctacccgcaagaacatgatgctgctagtatactggtgtgttgaatgatgatactgcaatgcaagcgtttggct

SEQ ID NO: 59830 - protein, 195 aa, Glycine max
  peptide (1)..(195): Ceres Seq. ID no. 15224681
  misc_feature (36)..(194): Homolog of NCBI NO: 24652460 NR Description: CG11777-PA [Drosophila melanogaster]
  misc_feature (36)..(194): Homolog of NCBI NO: 23508361 NR Description: cyclophilin, putative [Plasmodium falciparum 3D7]
  misc_feature (36)..(194): Homolog of NCBI NO: 29028318 NR Description: cyclophilin [Homo sapiens]
  misc_feature (36)..(194): Homolog of NCBI NO: 28190012 NR Description: CYP10L [Mus musculus]
  misc_feature (36)..(194): Homolog of NCBI NO: 21746159 NR Description: peptidylprolyl isomerase-like 3; cyclophilin-like
  misc_feature (36)..(194): Homolog of NCBI NO: 19557636 NR Description: peptidylprolyl isomerase-like protein 3 isoform
  misc_feature (36)..(194): Homolog of NCBI NO: 14043400 NR Description: PPIL3 protein [Homo sapiens]
  misc_feature (36)..(194): Homolog of NCBI NO: 28316722 NR Description: peptidylprolyl cis-trans isomerase-like protein 3
  misc_feature (36)..(195): Homolog of NCBI NO: 30678211 NR Description: expressed protein [Arabidopsis thaliana]
  misc_feature (36)..(194): Homolog of NCBI NO: 6006361 NR Description: ESTs AU030008(E50477),AU078239(E50477) correspond a region of the predicted gene.~Similar to peptidyl-prolyl
RDPDPQTAFPPTPLRFQTPLRRRFVPPPHPLRRDAMSVTLHTNLGDIKVEVFCDQVPRTAENFLALCASGYYDGTVFHRNIKGFMVQGGDPTGTGKGGASIWGGKFADEFREALKHGARGTLSMANSGPNTNGSQFFITYAKQPHLNGHYTVFAKVIHGFDVLDLMEKTPTGPADRPLAEIRLNRVTVHANPLAG

SEQ ID NO: 59831 - protein, 163 aa, Glycine max
  peptide (1)..(163): Ceres Seq. ID no. 15224682
TRPRPADRLPPHSSPLPDSSSPPIRPAAPSAPSRRHVGDAAHEPGGHQGGGFLRPGAADGGELFSPVRERLLRRHRLPPQHQGVHGAGRRPDGHRQGRRLDLGRQVRGRVPGGAQARRPGHPVHGQLRAQHQRQPVLHHLRQAAPPQRPLHRVRQGHPRLRRA

SEQ ID NO: 59832 - protein, 160 aa, Glycine max
  peptide (1)..(160): Ceres Seq. ID no. 15224683
  misc_feature (1)..(159): Homolog of NCBI NO: 24652460 NR Description: CG11777-PA [Drosophila melanogaster]
  misc_feature (1)..(159): Homolog of NCBI NO: 23508361 NR Description: cyclophilin, putative [Plasmodium falciparum 3D7]
  misc_feature (1)..(159): Homolog of NCBI NO: 29028318 NR Description: cyclophilin [Homo sapiens]
  misc_feature (1)..(159): Homolog of NCBI NO: 28190012 NR Description: CYP10L [Mus musculus]
  misc_feature (1)..(159): Homolog of NCBI NO: 21746159 NR Description: peptidylprolyl isomerase-like 3; cyclophilin-like
  misc_feature (1)..(159): Homolog of NCBI NO: 19557636 NR Description: peptidylprolyl isomerase-like protein 3 isoform
  misc_feature (1)..(159): Homolog of NCBI NO: 14043400 NR Description: PPIL3 protein [Homo sapiens]
  misc_feature (1)..(159): Homolog of NCBI NO: 28316722 NR Description: peptidylprolyl cis-trans isomerase-like protein 3
  misc_feature (1)..(160): Homolog of NCBI NO: 30678211 NR Description: expressed protein [Arabidopsis thaliana]
  misc_feature (1)..(159): Homolog of NCBI NO: 6006361 NR Description: ESTs AU030008(E50477),AU078239(E50477) correspond a region of the predicted gene.~Similar to peptidyl-prolyl
MSVTLHTNLGDIKVEVFCDQVPRTAENFLALCASGYYDGTVFHRNIKGFMVQGGDPTGTGKGGASIWGGKFADEFREALKHGARGTLSMANSGPNTNGSQFFITYAKQPHLNGHYTVFAKVIHGFDVLDLMEKTPTGPADRPLAEIRLNRVTVHANPLAG

SEQ ID NO: 59833 - DNA, 1183 bp, Glycine max
  misc_feature (1)..(1183): Ceres Seq. ID no. 13595509
cttcctctcctcagatcgttcctcttcgtctccttcaatcactcgtaagactcttccgagacggtgtgttcgctctttgattgaatggaaagtgaagacatgcattcgaaacctgacggtgggaatcagatcgtttcagagtcggttcatcatcactccataaatagtttaaacccttggcaacgtgctgctgctgcctgcaatgcaagttctttagtggaggaagctggagataagtctatagctttggagaaccaaaacaattgggaatcaactaatggttccaagtcaccatctcataaagatgaaaatggtaacaaggaatcaccacaagtcacatcctctccccaacaatcagctggagattacagtgaaaaaagtcaagaacttgtgcatgttggcgtcacaggacctcctcaccctcaacttgttagccacacaggatgggcatcctcaaatccataccaggatccttattatgctggaatgatgggagcctatcccatggcttatgttccatatggtgggatgcctcattcaagaatgccactgcctcctgaggtggcacaggaaccagtttatgtgaatgctaaacagtaccaggcgatacttaggcgaaggcaggcacgcgccaaggcagagcttgaaatgaagctaatcaaatccagaaagccttatctccatgaatctcggcatcagcatgctatgaggaggcctaggggcactggaggccggtttgcaaagaaaacaaacaccgaagtttcacagccgaaacctggagaaaagaacaatgctactcagtccccgacgtcatctcactctgaccaacctgaagcctggaatgatgagtgtagaaaacagtctgaagagatgcaaagctcagcttctaagagaagggaagaagcagactgttcagggcaacaatggaacagcatttcctcaaaccatacttctgaagctcgtctagccatcaaatgacatctccactggcaactcattcttggctctctctttgttggcttatttggtagcagccattgaagagtcccctgtacaaatacttctgtgtttttcttcttttgtgatatgtcaaatgttactgctttcttttgtcaactctctttagcacatttttgaatcaaaaactatgtgtttaaaattaaattccaaagtgtgcaaactg

SEQ ID NO: 59834 - protein, 297 aa, Glycine max
  peptide (1)..(297): Ceres Seq. ID no. 13595510
  misc_feature (162)..(218): Pfam Name: CCAAT-binding transcription factor (CBF-B/NF-YA) Pfam Description: CCAAT-binding transcription factor
  misc_feature (62)..(242): Homolog of NCBI NO: 28209479 NR Description: putative CCAAT-binding transcription factor
  misc_feature (74)..(249): Homolog of NCBI NO: 38640734 NR Description: transcription factor WAPB [Triticum aestivum]
  misc_feature (6)..(236): Homolog of NCBI NO: 27552556 NR Description: putative CCAAT-binding transcription factor
  misc_feature (6)..(260): Homolog of NCBI NO: 18416875 NR Description: CCAAT box binding factor/ transcription factor
  misc_feature (6)..(260): Homolog of NCBI NO: 30684143 NR Description: CCAAT box binding factor/ transcription factor
  misc_feature (6)..(297): Homolog of NCBI NO: 9293997 NR Description: CCAAT-binding transcription factor B subunit
  misc_feature (1)..(297): Homolog of NCBI NO: 18402799 NR Description: CCAAT-binding factor B chain -related
  misc_feature (2)..(297): Homolog of NCBI NO: 7488444 NR Description: CCAAT-binding factor B chain homolog (clone
  misc_feature (1)..(297): Homolog of NCBI NO: 1586551 NR Description: CCAAT-binding factor:SUBUNIT=B
  misc_feature (1)..(297): Homolog of NCBI NO: 1173618 NR Description: CCAAT-binding factor B subunit homolog
MESEDMHSKPDGGNQIVSESVHHHSINSLNPWQRAAAACNASSLVEEAGDKSIALENQNNWESTNGSKSPSHKDENGNKESPQVTSSPQQSAGDYSEKSQELVHVGVTGPPHPQLVSHTGWASSNPYQDPYYAGMMGAYPMAYVPYGGMPHSRMPLPPEVAQEPVYVNAKQYQAILRRRQARAKAELEMKLIKSRKPYLHESRHQHAMRRPRGTGGRFAKKTNTEVSQPKPGEKNNATQSPTSSHSDQPEAWNDECRKQSEEMQSSASKRREEADCSGQQWNSISSNHTSEARLAIK

SEQ ID NO: 59835 - protein, 292 aa, Glycine max
  peptide (1)..(292): Ceres Seq. ID no. 13595511
  misc_feature (157)..(213): Pfam Name: CCAAT-binding transcription factor (CBF-B/NF-YA) Pfam Description: CCAAT-binding transcription factor
  misc_feature (57)..(237): Homolog of NCBI NO: 28209479 NR Description: putative CCAAT-binding transcription factor
  misc_feature (69)..(244): Homolog of NCBI NO: 38640734 NR Description: transcription factor WAPB [Triticum aestivum]
  misc_feature (1)..(231): Homolog of NCBI NO: 27552556 NR Description: putative CCAAT-binding transcription factor
  misc_feature (1)..(255): Homolog of NCBI NO: 18416875 NR Description: CCAAT box binding factor/ transcription factor
  misc_feature (1)..(255): Homolog of NCBI NO: 30684143 NR Description: CCAAT box binding factor/ transcription factor
  misc_feature (1)..(292): Homolog of NCBI NO: 9293997 NR Description: CCAAT-binding transcription factor B subunit
  misc_feature (1)..(292): Homolog of NCBI NO: 18402799 NR Description: CCAAT-binding factor B chain -related
  misc_feature (1)..(292): Homolog of NCBI NO: 7488444 NR Description: CCAAT-binding factor B chain homolog (clone
  misc_feature (1)..(292): Homolog of NCBI NO: 1586551 NR Description: CCAAT-binding factor:SUBUNIT=B
  misc_feature (1)..(292): Homolog of NCBI NO: 1173618 NR Description: CCAAT-binding factor B subunit homolog
MHSKPDGGNQIVSESVHHHSINSLNPWQRAAAACNASSLVEEAGDKSIALENQNNWESTNGSKSPSHKDENGNKESPQVTSSPQQSAGDYSEKSQELVHVGVTGPPHPQLVSHTGWASSNPYQDPYYAGMMGAYPMAYVPYGGMPHSRMPLPPEVAQEPVYVNAKQYQAILRRRQARAKAELEMKLIKSRKPYLHESRHQHAMRRPRGTGGRFAKKTNTEVSQPKPGEKNNATQSPTSSHSDQPEAWNDECRKQSEEMQSSASKRREEADCSGQQWNSISSNHTSEARLAIK

SEQ ID NO: 59836 - protein, 163 aa, Glycine max
  peptide (1)..(163): Ceres Seq. ID no. 13595512
  misc_feature (28)..(84): Pfam Name: CCAAT-binding transcription factor (CBF-B/NF-YA) Pfam Description: CCAAT-binding transcription factor
  misc_feature (1)..(108): Homolog of NCBI NO: 28209479 NR Description: putative CCAAT-binding transcription factor
  misc_feature (1)..(115): Homolog of NCBI NO: 38640734 NR Description: transcription factor WAPB [Triticum aestivum]
  misc_feature (1)..(102): Homolog of NCBI NO: 27552556 NR Description: putative CCAAT-binding transcription factor
  misc_feature (1)..(126): Homolog of NCBI NO: 18416875 NR Description: CCAAT box binding factor/ transcription factor
  misc_feature (1)..(126): Homolog of NCBI NO: 30684143 NR Description: CCAAT box binding factor/ transcription factor
  misc_feature (1)..(163): Homolog of NCBI NO: 9293997 NR Description: CCAAT-binding transcription factor B subunit
  misc_feature (1)..(163): Homolog of NCBI NO: 18402799 NR Description: CCAAT-binding factor B chain -related
  misc_feature (1)..(163): Homolog of NCBI NO: 7488444 NR Description: CCAAT-binding factor B chain homolog (clone
  misc_feature (1)..(163): Homolog of NCBI NO: 1586551 NR Description: CCAAT-binding factor:SUBUNIT=B
  misc_feature (1)..(163): Homolog of NCBI NO: 1173618 NR Description: CCAAT-binding factor B subunit homolog
MMGAYPMAYVPYGGMPHSRMPLPPEVAQEPVYVNAKQYQAILRRRQARAKAELEMKLIKSRKPYLHESRHQHAMRRPRGTGGRFAKKTNTEVSQPKPGEKNNATQSPTSSHSDQPEAWNDECRKQSEEMQSSASKRREEADCSGQQWNSISSNHTSEARLAIK

SEQ ID NO: 59837 - DNA, 809 bp, Glycine max
  misc_feature (1)..(809): Ceres Seq. ID no. 15227150
actgcccttccgaagcctctcccaaaccctcccgccgccgccgccgccgcccgccaccgaacagcagccatgccgcccaagctcgacccgtcgcaggtggtggaggtctacgtccgggtgaccggaggcgaggtcggcgcggcgtcttcgcttgcccccaagatcggccccctcggtctctcccccaagaagatcggtgaggacatcgccaaggagacggccaaggactggaagggcctccgcgtcaccgtcaagctcaccgtccagaaccgtcaggccaaggtctccgtcgtcccttccgccgcggcgctcgtcatcaagtccctcaaggagcccgagagggacaggaagaaggtgaagaacatcaagcacaacggcaacatcagcctcgacgacgtcatcgagatcgccaagatcatgaagcccaggtccatggccaaggagatggccgggactgtcaaggagatcctcggcacctgcgtcagcgtcggctgcaccgtcgacgggaaggaccccaaggacctgcagacggagatcgacgacggcgaggtcgagatcccctccgcttaaaggccgatgtcgaggtgattatcatctgatgatatggaagtcataccctgttgcaaatgttgcctatgtacctcccaaacgatgtgatccctcctctttttgtcatgttttagcagtaatcctgtgagacctcattgttactactgcatatttggtctttgcaatgtagtttgtgcacttcagttaacttaatctataccattcagtggtgagaagtttgttcaaaaaaaaaaaaaaaa

SEQ ID NO: 59838 - protein, 189 aa, Glycine max
  peptide (1)..(189): Ceres Seq. ID no. 15227151
  misc_feature (99)..(167): Pfam Name: Ribosomal protein L11, RNA binding domain Pfam Description: Ribosomal protein L11, RNA binding domain
  misc_feature (24)..(188): Homolog of NCBI NO: 31235341 NR Description: ENSANGP00000019214 [Anopheles gambiae]
  misc_feature (24)..(187): Homolog of NCBI NO: 19075397 NR Description: 60s ribosomal protein l12 [Schizosaccharomyces
  misc_feature (33)..(189): Homolog of NCBI NO: 1710485 NR Description: 60S RIBOSOMAL PROTEIN L12
  misc_feature (24)..(165): Homolog of NCBI NO: 3986695 NR Description: ribosomal protein L12 [Cichorium intybus]
  misc_feature (24)..(187): Homolog of NCBI NO: 6094002 NR Description: 60S RIBOSOMAL PROTEIN L12
  misc_feature (24)..(187): Homolog of NCBI NO: 15231814 NR Description: 60S ribosomal protein L12 (RPL12B) [Arabidopsis
  misc_feature (24)..(187): Homolog of NCBI NO: 15228098 NR Description: 60S ribosomal protein L12 (RPL12A) [Arabidopsis
  misc_feature (24)..(188): Homolog of NCBI NO: 15239409 NR Description: 60S ribosomal protein L12 (RPL12C) [Arabidopsis
  misc_feature (24)..(187): Homolog of NCBI NO: 40287508 NR Description: 60S ribosomal protein L12 [Capsicum annuum]
  misc_feature (24)..(189): Homolog of NCBI NO: 38567975 NR Description: OSJNBa0093F12.16 [Oryza sativa (japonica
TALPKPLPNPPAAAAAARHRTAAMPPKLDPSQVVEVYVRVTGGEVGAASSLAPKIGPLGLSPKKIGEDIAKETAKDWKGLRVTVKLTVQNRQAKVSVVPSAAALVIKSLKEPERDRKKVKNIKHNGNISLDDVIEIAKIMKPRSMAKEMAGTVKEILGTCVSVGCTVDGKDPKDLQTEIDDGEVEIPSA

SEQ ID NO: 59839 - protein, 166 aa, Glycine max
  peptide (1)..(166): Ceres Seq. ID no. 15227152
  misc_feature (76)..(144): Pfam Name: Ribosomal protein L11, RNA binding domain Pfam Description: Ribosomal protein L11, RNA binding domain
  misc_feature (1)..(165): Homolog of NCBI NO: 31235341 NR Description: ENSANGP00000019214 [Anopheles gambiae]
  misc_feature (1)..(164): Homolog of NCBI NO: 19075397 NR Description: 60s ribosomal protein l12 [Schizosaccharomyces
  misc_feature (10)..(166): Homolog of NCBI NO: 1710485 NR Description: 60S RIBOSOMAL PROTEIN L12
  misc_feature (1)..(142): Homolog of NCBI NO: 3986695 NR Description: ribosomal protein L12 [Cichorium intybus]
  misc_feature (1)..(164): Homolog of NCBI NO: 6094002 NR Description: 60S RIBOSOMAL PROTEIN L12
  misc_feature (1)..(164): Homolog of NCBI NO: 15231814 NR Description: 60S ribosomal protein L12 (RPL12B) [Arabidopsis
  misc_feature (1)..(164): Homolog of NCBI NO: 15228098 NR Description: 60S ribosomal protein L12 (RPL12A) [Arabidopsis
  misc_feature (1)..(165): Homolog of NCBI NO: 15239409 NR Description: 60S ribosomal protein L12 (RPL12C) [Arabidopsis
  misc_feature (1)..(164): Homolog of NCBI NO: 40287508 NR Description: 60S ribosomal protein L12 [Capsicum annuum]
  misc_feature (1)..(166): Homolog of NCBI NO: 38567975 NR Description: OSJNBa0093F12.16 [Oryza sativa (japonica
MPPKLDPSQVVEVYVRVTGGEVGAASSLAPKIGPLGLSPKKIGEDIAKETAKDWKGLRVTVKLTVQNRQAKVSVVPSAAALVIKSLKEPERDRKKVKNIKHNGNISLDDVIEIAKIMKPRSMAKEMAGTVKEILGTCVSVGCTVDGKDPKDLQTEIDDGEVEIPSA

SEQ ID NO: 59840 - DNA, 1759 bp, Glycine max
  misc_feature (1)..(1759): Ceres Seq. ID no. 13595521
aacggttccctttgttttctttttttctctgctagttgagcaaaaatggaggaagcgagtcctaaaattttcattccaaacacgatccagggagtgagtgagcacgtgacggggcagattgaactgctctgggagttagtgaaagtgccattgatagtgcctctgctgaagcttggagtgtacatttgtttagcaatgtcacttatgcttttcatggagaggctctacatgggcatcgtcatcattctagtgaaactcttctggaaaaaacccgaacagcgttacaactacaagcccctccaagacgacgtcgaattgggctccttcatcttccccacggtcctaatacaaatcccaatgttcaacgaaaaagaggtttacaaggtgtccatcggagcagcttgtgggctttcatggcccagtgaccgtctcgttatccaagtcctggacgattcaactgacactgtcattaaggaaatggtggagcaagaatgtttgagatgggcaagtaaaggcatcaacataacgtaccaaataagggagaacagaacgggttacaaagctggtgcgttgaaagaaggcctcaagcgaagctatgtggagcattgcgagtacgtggcaatattcgacgcggatttcaggccagagccagactttctcaggcgagcgattccattcttggtggggaaccctgagattgccctggttcaagctcgttggaggtttgtgaatgcgaatgagtgcttgttgacaagaatgcaagagatgtcactggattatcatttcacagtagagcaagaagttgggtcagccactcatgctttctttggtttcaatgggacagcgggtatatggagaattgctgctatcaatgaagctggagggtggaaagacagaacaacggtggaggacatggatcttgctgttcgtgccagccttaggggctggaagtttttgtacctcggagaccttcaggcgaaaagtgagcttccaagtactcttagagccttccgcttccagcagcatcgatggtcttgtggtcctgctaatctattccgcaaaatggtgatggagatagtaaggaacaagaaagtaaaattctggaagaaagtgtacgttatatacagcttcttctttgttcgtaaaatcatagctcacatggtcacattcttcttctactgtgtggtgcttcccttgacaattttggtccctgaagttcgtgttccaatttggggagctgtttatattccttccatcatcaccaccctcaactcagtaggcacaccaaggtccattcatctgttgttctactggatcctttttgagaatgcgatgtcattgcaccgtacgaaggcgaccttcataggcctgctagaggccgggagagccaatgagtgggtcgttactgaaaaacttggtgactctgtcaataataagaacaaaagcaatgtcaccaaagcaatcagaaaatctcgattcaaatttggtgaaagacttcatttattggagcttggattcgctgccttcctcttcctttgtggatgctatgactatgtgcacggcaagaactactactttttgtacctcttccttcagaccataaccttctcaatcgtaggatttggctatgttggcaccattgtttagtacttgttaagctaaaatcttcagtgacttaagtttcagagtcactagtgttcatgtcttactagtttctctcctcaataaaatgcaaaaggtagggctgatttctcaagct

SEQ ID NO: 59841 - protein, 533 aa, Glycine max
  peptide (1)..(533): Ceres Seq. ID no. 13595522
  misc_feature (100)..(278): Pfam Name: Glycosyl transferase Pfam Description: Glycosyl transferase
  misc_feature (18)..(533): Homolog of NCBI NO: 21536839 NR Description: putative glucosyltransferase [Arabidopsis
  misc_feature (18)..(533): Homolog of NCBI NO: 18403914 NR Description: glycosyltransferase family 2 [Arabidopsis
  misc_feature (51)..(533): Homolog of NCBI NO: 30688416 NR Description: glycosyltransferase family 2 [Arabidopsis
  misc_feature (12)..(533): Homolog of NCBI NO: 30688411 NR Description: glycosyltransferase family 2 [Arabidopsis
  misc_feature (24)..(533): Homolog of NCBI NO: 16519223 NR Description: cellulose synthase-like protein OsCslA9 [Oryza
  misc_feature (1)..(533): Homolog of NCBI NO: 15237519 NR Description: glycosyltransferase family 2 [Arabidopsis
  misc_feature (27)..(533): Homolog of NCBI NO: 34148023 NR Description: glycosyltransferase 5 [Ipomoea trifida]
  misc_feature (7)..(533): Homolog of NCBI NO: 34148021 NR Description: glycosyltransferase 1 [Ipomoea trifida]
  misc_feature (7)..(533): Homolog of NCBI NO: 34148025 NR Description: glycosyltransferase 10 [Ipomoea trifida]
  misc_feature (1)..(533): Homolog of NCBI NO: 15242959 NR Description: glycosyltransferase family 2 [Arabidopsis
MEEASPKIFIPNTIQGVSEHVTGQIELLWELVKVPLIVPLLKLGVYICLAMSLMLFMERLYMGIVIILVKLFWKKPEQRYNYKPLQDDVELGSFIFPTVLIQIPMFNEKEVYKVSIGAACGLSWPSDRLVIQVLDDSTDTVIKEMVEQECLRWASKGINITYQIRENRTGYKAGALKEGLKRSYVEHCEYVAIFDADFRPEPDFLRRAIPFLVGNPEIALVQARWRFVNANECLLTRMQEMSLDYHFTVEQEVGSATHAFFGFNGTAGIWRIAAINEAGGWKDRTTVEDMDLAVRASLRGWKFLYLGDLQAKSELPSTLRAFRFQQHRWSCGPANLFRKMVMEIVRNKKVKFWKKVYVIYSFFFVRKIIAHMVTFFFYCVVLPLTILVPEVRVPIWGAVYIPSIITTLNSVGTPRSIHLLFYWILFENAMSLHRTKATFIGLLEAGRANEWVVTEKLGDSVNNKNKSNVTKAIRKSRFKFGERLHLLELGFAAFLFLCGCYDYVHGKNYYFLYLFLQTITFSIVGFGYVGTIV

SEQ ID NO: 59842 - protein, 483 aa, Glycine max
  peptide (1)..(483): Ceres Seq. ID no. 13595523
  misc_feature (50)..(228): Pfam Name: Glycosyl transferase Pfam Description: Glycosyl transferase
  misc_feature (1)..(483): Homolog of NCBI NO: 21536839 NR Description: putative glucosyltransferase [Arabidopsis
  misc_feature (1)..(483): Homolog of NCBI NO: 18403914 NR Description: glycosyltransferase family 2 [Arabidopsis
  misc_feature (1)..(483): Homolog of NCBI NO: 30688416 NR Description: glycosyltransferase family 2 [Arabidopsis
  misc_feature (1)..(483): Homolog of NCBI NO: 30688411 NR Description: glycosyltransferase family 2 [Arabidopsis
  misc_feature (1)..(483): Homolog of NCBI NO: 16519223 NR Description: cellulose synthase-like protein OsCslA9 [Oryza
  misc_feature (1)..(483): Homolog of NCBI NO: 15237519 NR Description: glycosyltransferase family 2 [Arabidopsis
  misc_feature (1)..(483): Homolog of NCBI NO: 34148023 NR Description: glycosyltransferase 5 [Ipomoea trifida]
  misc_feature (1)..(483): Homolog of NCBI NO: 34148021 NR Description: glycosyltransferase 1 [Ipomoea trifida]
  misc_feature (1)..(483): Homolog of NCBI NO: 34148025 NR Description: glycosyltransferase 10 [Ipomoea trifida]
  misc_feature (1)..(483): Homolog of NCBI NO: 15242959 NR Description: glycosyltransferase family 2 [Arabidopsis
MSLMLFMERLYMGIVIILVKLFWKKPEQRYNYKPLQDDVELGSFIFPTVLIQIPMFNEKEVYKVSIGAACGLSWPSDRLVIQVLDDSTDTVIKEMVEQECLRWASKGINITYQIRENRTGYKAGALKEGLKRSYVEHCEYVAIFDADFRPEPDFLRRAIPFLVGNPEIALVQARWRFVNANECLLTRMQEMSLDYHFTVEQEVGSATHAFFGFNGTAGIWRIAAINEAGGWKDRTTVEDMDLAVRASLRGWKFLYLGDLQAKSELPSTLRAFRFQQHRWSCGPANLFRKMVMEIVRNKKVKFWKKVYVIYSFFFVRKIIAHMVTFFFYCVVLPLTILVPEVRVPIWGAVYIPSIITTLNSVGTPRSIHLLFYWILFENAMSLHRTKATFIGLLEAGRANEWVVTEKLGDSVNNKNKSNVTKAIRKSRFKFGERLHLLELGFAAFLFLCGCYDYVHGKNYYFLYLFLQTITFSIVGFGYVGTIV

SEQ ID NO: 59843 - protein, 480 aa, Glycine max
  peptide (1)..(480): Ceres Seq. ID no. 13595524
  misc_feature (47)..(225): Pfam Name: Glycosyl transferase Pfam Description: Glycosyl transferase
  misc_feature (1)..(480): Homolog of NCBI NO: 21536839 NR Description: putative glucosyltransferase [Arabidopsis
  misc_feature (1)..(480): Homolog of NCBI NO: 18403914 NR Description: glycosyltransferase family 2 [Arabidopsis
  misc_feature (1)..(480): Homolog of NCBI NO: 30688416 NR Description: glycosyltransferase family 2 [Arabidopsis
  misc_feature (1)..(480): Homolog of NCBI NO: 30688411 NR Description: glycosyltransferase family 2 [Arabidopsis
  misc_feature (1)..(480): Homolog of NCBI NO: 16519223 NR Description: cellulose synthase-like protein OsCslA9 [Oryza
  misc_feature (1)..(480): Homolog of NCBI NO: 15237519 NR Description: glycosyltransferase family 2 [Arabidopsis
  misc_feature (1)..(480): Homolog of NCBI NO: 34148023 NR Description: glycosyltransferase 5 [Ipomoea trifida]
  misc_feature (1)..(480): Homolog of NCBI NO: 34148021 NR Description: glycosyltransferase 1 [Ipomoea trifida]
  misc_feature (1)..(480): Homolog of NCBI NO: 34148025 NR Description: glycosyltransferase 10 [Ipomoea trifida]
  misc_feature (1)..(480): Homolog of NCBI NO: 15242959 NR Description: glycosyltransferase family 2 [Arabidopsis
MLFMERLYMGIVIILVKLFWKKPEQRYNYKPLQDDVELGSFIFPTVLIQIPMFNEKEVYKVSIGAACGLSWPSDRLVIQVLDDSTDTVIKEMVEQECLRWASKGINITYQIRENRTGYKAGALKEGLKRSYVEHCEYVAIFDADFRPEPDFLRRAIPFLVGNPEIALVQARWRFVNANECLLTRMQEMSLDYHFTVEQEVGSATHAFFGFNGTAGIWRIAAINEAGGWKDRTTVEDMDLAVRASLRGWKFLYLGDLQAKSELPSTLRAFRFQQHRWSCGPANLFRKMVMEIVRNKKVKFWKKVYVIYSFFFVRKIIAHMVTFFFYCVVLPLTILVPEVRVPIWGAVYIPSIITTLNSVGTPRSIHLLFYWILFENAMSLHRTKATFIGLLEAGRANEWVVTEKLGDSVNNKNKSNVTKAIRKSRFKFGERLHLLELGFAAFLFLCGCYDYVHGKNYYFLYLFLQTITFSIVGFGYVGTIV

SEQ ID NO: 59844 - DNA, 663 bp, Glycine max
  misc_feature (1)..(663): Ceres Seq. ID no. 13595251
atgcaaattcaccaccaccaccaaagcctaaactttaagcaaccaaaatccccctcttctctctatcctcccatccatcttccccatcaacaaaaatagtaacaaatcccatttccctctctctcccccaaaataaaacaaaaaaaaaatccattctttctccattttcaaccccatttccccccaaaaatccaatctttccccatacccacctcccaaaatctcttctttctccaaacccaaatccccaattcccccaaatccaaccaaagagaatcaaacacacaaaaaagaaaacaaatttgtagcttcccaccttcaatgtggcgaccgtggggcaaatcaactgttcgaattcacagcgcgtcttcatcaccctcttccacattctcttgttcttccttcaaagacattcaaaccctttgcctcgacgaacccccacaacaaaaccagcatcatcaacaattaccctctccttcccccacaagaaaaccctccgttttccaccgagtccgactcgccaactcgctcctccgaacctggtcaactcacctccacccccaaccccaacctcccaaactccccgaaccccccgaatccgaacctgatgttgtcgtctcgaaacccgaaccacaacaacctgcgatttattatttcccgggc

SEQ ID NO: 59845 - protein, 114 aa, Glycine max
  peptide (1)..(114): Ceres Seq. ID no. 13595252
  misc_feature (1)..(112): Homolog of NCBI NO: 15237686 NR Description: expressed protein [Arabidopsis thaliana]
MWRPWGKSTVRIHSASSSPSSTFSCSSFKDIQTLCLDEPPQQNQHHQQLPSPSPTRKPSVFHRVRLANSLLRTWSTHLHPQPQPPKLPEPPESEPDVVVSKPEPQQPAIYYFPG

SEQ ID NO: 59846 - DNA, 1058 bp, Glycine max
  misc_feature (1)..(1058): Ceres Seq. ID no. 12782188
aaacttcaaagccctcctttgcctctctctcttcgcttattgttgcaccttcctcgtaaaagataactcccggtcggcgtgcatagccgccgattgaggcaaaaaaaaaacacaaaacacactgtagctcatcacagccaaacgcggcgtcaacgatgacgagcttctgaaattccaacttcgcccttcttctctgtgtatattcttttttatttatttattattatttctattattttttcggtgaggttagctccatgcctagtcccaagagcagccgcagcggccagatcgagagtcaccggaggggaaggtcgtcgtccttccacggccagtgcgcgatgtctgtcggtcagctccaccgtccgaagacggtttccgacctcccgtcgctcagaagcctcgccggaacggcgccggcgcctatgccggagggattgcctagacagccgccgaagatgctgctgaaggtgacggtgctgagaagcctcgcgcccgtgcaggtgctgatgacgccgggatccaccgtccgcgacctgatagcggcggcggtgcggcagtacgtgaaggaaggtcgccggccaatcttgccgtccagcgaagtctccgaattcgacctccattattcgcagtttagcctagaaagtttggataggaaggagaagctgctagagcttggatctaggaacttttttctatgtccgagaaagccagctacaacagtggaagatggcgtaacgacgtcgtttgcgtcttgtgcgaaagaggcagagaaagagagggagggatatggtggtggtggtggtgggtttgcttggttcaaactcatgcagttcatgatgtgattggttggttgattagtcattattgttattttatttcaattgaaatgtctttttatttgtcccagaatgaatggccggttacttgtaaaaaataataggttggcttggcaattaggtacagggtttgagatttgtgtgtaagcaaagcaaaattgtaaaatagcatgtatgatttttaaacacatacatggtaatgttaaagctttcaattgc

SEQ ID NO: 59847 - protein, 195 aa, Glycine max
  peptide (1)..(195): Ceres Seq. ID no. 12782189
  misc_feature (67)..(187): Homolog of NCBI NO: 15220659 NR Description: unknown protein; protein id: At1g23150.1
  misc_feature (67)..(152): Homolog of NCBI NO: 18409673 NR Description: expressed protein
  misc_feature (67)..(152): Homolog of NCBI NO: 16226338 NR Description: At1g70780/F5A18_4 [Arabidopsis thaliana]
  misc_feature (1)..(154): Homolog of NCBI NO: 15235787 NR Description: similar to selenium-binding protein-like; protein
  misc_feature (19)..(193): Homolog of NCBI NO: 38347592 NR Description: OSJNBa0042I15.5 [Oryza sativa (japonica
  misc_feature (1)..(194): Homolog of NCBI NO: 10279678 NR Description: hypothetical protein [Catharanthus roseus]
  misc_feature (13)..(193): Homolog of NCBI NO: 18401542 NR Description: expressed protein
MPSPKSSRSGQIESHRRGRSSSFHGQCAMSVGQLHRPKTVSDLPSLRSLAGTAPAPMPEGLPRQPPKMLLKVTVLRSLAPVQVLMTPGSTVRDLIAAAVRQYVKEGRRPILPSSEVSEFDLHYSQFSLESLDRKEKLLELGSRNFFLCPRKPATTVEDGVTTSFASCAKEAEKEREGYGGGGGGFAWFKLMQFMM

SEQ ID NO: 59848 - protein, 167 aa, Glycine max
  peptide (1)..(167): Ceres Seq. ID no. 12782190
  misc_feature (39)..(159): Homolog of NCBI NO: 15220659 NR Description: unknown protein; protein id: At1g23150.1
  misc_feature (39)..(124): Homolog of NCBI NO: 18409673 NR Description: expressed protein
  misc_feature (39)..(124): Homolog of NCBI NO: 16226338 NR Description: At1g70780/F5A18_4 [Arabidopsis thaliana]
  misc_feature (1)..(126): Homolog of NCBI NO: 15235787 NR Description: similar to selenium-binding protein-like; protein
  misc_feature (1)..(165): Homolog of NCBI NO: 38347592 NR Description: OSJNBa0042I15.5 [Oryza sativa (japonica
  misc_feature (1)..(166): Homolog of NCBI NO: 10279678 NR Description: hypothetical protein [Catharanthus roseus]
  misc_feature (1)..(165): Homolog of NCBI NO: 18401542 NR Description: expressed protein
MSVGQLHRPKTVSDLPSLRSLAGTAPAPMPEGLPRQPPKMLLKVTVLRSLAPVQVLMTPGSTVRDLIAAAVRQYVKEGRRPILPSSEVSEFDLHYSQFSLESLDRKEKLLELGSRNFFLCPRKPATTVEDGVTTSFASCAKEAEKEREGYGGGGGGFAWFKLMQFMM

SEQ ID NO: 59849 - protein, 139 aa, Glycine max
  peptide (1)..(139): Ceres Seq. ID no. 12782191
  misc_feature (11)..(131): Homolog of NCBI NO: 15220659 NR Description: unknown protein; protein id: At1g23150.1
  misc_feature (11)..(96): Homolog of NCBI NO: 18409673 NR Description: expressed protein
  misc_feature (11)..(96): Homolog of NCBI NO: 16226338 NR Description: At1g70780/F5A18_4 [Arabidopsis thaliana]
  misc_feature (1)..(98): Homolog of NCBI NO: 15235787 NR Description: similar to selenium-binding protein-like; protein
  misc_feature (1)..(137): Homolog of NCBI NO: 38347592 NR Description: OSJNBa0042I15.5 [Oryza sativa (japonica
  misc_feature (1)..(138): Homolog of NCBI NO: 10279678 NR Description: hypothetical protein [Catharanthus roseus]
  misc_feature (1)..(137): Homolog of NCBI NO: 18401542 NR Description: expressed protein
MPEGLPRQPPKMLLKVTVLRSLAPVQVLMTPGSTVRDLIAAAVRQYVKEGRRPILPSSEVSEFDLHYSQFSLESLDRKEKLLELGSRNFFLCPRKPATTVEDGVTTSFASCAKEAEKEREGYGGGGGGFAWFKLMQFMM

SEQ ID NO: 59850 - DNA, 1847 bp, Glycine max
  misc_feature (1)..(1847): Ceres Seq. ID no. 13504578
actaatcgaaaaaagatttattgttaagtccaaagagtgtctttagttttctgtcccatgtacatatatatatatatattagccacccttatcggtggtactatgtgcaagctcaaaactttaccaaatctataatcttccccttctctctcctctccccatctccctgatggggttctcatgaattcaagtagtgaaatcaagctatgatcaagccttttggggcttcgatttaccatctttttgtgctaattaaacacttgaaaattaccaccatgtccaccatgaagaacaatttcaaagaccaagaccatctctactcttcatggagcttctcaaagctcatggctttcttcttcctcttaatctccatctcctacctcttctactccctaaggttcgttagccactccttcgattgtgatcaaacccctcacattcccaccatcactcatcatatttcttccaacaccccatctgaagaagagtccacaccccccytttgaagaagttaccaacatttcccacatagtctttggcataggagcctcagcaaagctttggaagcagagaaaagagtacatcaagctatggtggaggcctaatgagatgcgtggggttgtgtggttggagcaaaaggtgaaaactgagcctcaagatgagaatttcttgcccccgttgaggatctctagtgacacttcaaggttcaagtataagaacccaaaggggcatagatcagctattagaatctcacgcatagtgtctgagacacttaggcttgggatggaggatgtgaggtggtttgtgatgnggggatgatgacacggwttttgtggcagaaaatttggtgaaarmrwtgcaaaaatatgaccacaatcagttttattacattgggagttcctcggagagtcacttgcaaaacatttatttttcttataatatggcttatgggggtggtggttttgccattagttatcccttggctgtggcattggagaagatgcaagataggtgcattcagaggtatccagggttgtatggctctgatgataggattcagrcttgtatggcagaattgggagttccactcaccaaggaaaaagggttccatcagtttgatgygtacggcaatctccttgrgcttctggcgscccatccagttacgccactggwatccctccatcacttggacgtggtagagcccatatttccaaacgtgagccgggtccaggccctgaagaggctgaaagggcccatgaaacttgacccagccgggctcatccaacaatccatttgctacgacaaagcccggacctggaccatatccgtttcatggggctatgcggttcaaattttccggggcatcttctcagcccgggaaatggagatgccagcaaggacattcctgaactggtacaagcgggcggattacacggcgtatccgttcaacacgcggccggtcagccgccatgtttgtcagaaaccgtttgtttattacttgtctagggcagtgtatgatgagggtgctaatgaaactgcaagtcaatatgtacgggttcagcaaaacccggaatgcaattggaaaatggaggatccaacccaaatcaaagtggtgcatgtttataagaaacccgacccgcatttgtgggacaaggctccaagaagaaattgttgtagggttcgacgtacaaagaagcaaggaactatggtgattgatgtgggggaatgcaaggaagatgaacttgttgaattgtagttagaggtcctacacatcaattgataattcttaactcaatcgtttgctatatgtattttcttcttytatayatatatgatttactttgagg

SEQ ID NO: 59851 - protein, 271 aa, Glycine max
  peptide (1)..(271): Ceres Seq. ID no. 15222815
  misc_feature (1)..(246): Pfam Name: Protein of unknown function, DUF604 Pfam Description: Protein of unknown function, DUF604
  misc_feature (1)..(238): Homolog of NCBI NO: 18411279 NR Description: fringe-related protein [Arabidopsis thaliana]
  misc_feature (1)..(271): Homolog of NCBI NO: 37536418 NR Description: hypothetical protein [Oryza sativa (japonica
  misc_feature (1)..(238): Homolog of NCBI NO: 15223021 NR Description: fringe-related protein [Arabidopsis thaliana]
  misc_feature (1)..(241): Homolog of NCBI NO: 7485555 NR Description: hypothetical protein F16G20.190 - Arabidopsis
  misc_feature (1)..(271): Homolog of NCBI NO: 15233347 NR Description: fringe-related protein [Arabidopsis thaliana]
  misc_feature (1)..(270): Homolog of NCBI NO: 25336194 NR Description: F22L4.11 protein - Arabidopsis thaliana
  misc_feature (1)..(270): Homolog of NCBI NO: 15223433 NR Description: fringe-related protein [Arabidopsis thaliana]
  misc_feature (1)..(271): Homolog of NCBI NO: 15529153 NR Description: AT4g23490/F16G20_190 [Arabidopsis thaliana]
  misc_feature (1)..(271): Homolog of NCBI NO: 18416156 NR Description: fringe-related protein [Arabidopsis thaliana]
  misc_feature (1)..(271): Homolog of NCBI NO: 15238082 NR Description: fringe-related protein [Arabidopsis thaliana]
  misc_feature (41)..(41): Xaa is any aa, unknown or other
  misc_feature (61)..(61): Xaa is any aa, unknown or other
  misc_feature (67)..(67): Xaa is any aa, unknown or other
  misc_feature (71)..(71): Xaa is any aa, unknown or other
  misc_feature (78)..(78): Xaa is any aa, unknown or other
MAYGGGGFAISYPLAVALEKMQDRCIQRYPGLYGSDDRIQXCMAELGVPLTKEKGFHQFDXYGNLLXLLAXHPVTPLXSLHHLDVVEPIFPNVSRVQALKRLKGPMKLDPAGLIQQSICYDKARTWTISVSWGYAVQIFRGIFSAREMEMPARTFLNWYKRADYTAYPFNTRPVSRHVCQKPFVYYLSRAVYDEGANETASQYVRVQQNPECNWKMEDPTQIKVVHVYKKPDPHLWDKAPRRNCCRVRRTKKQGTMVIDVGECKEDELVEL

SEQ ID NO: 59852 - protein, 251 aa, Glycine max
  peptide (1)..(251): Ceres Seq. ID no. 15222816
  misc_feature (1)..(226): Pfam Name: Protein of unknown function, DUF604 Pfam Description: Protein of unknown function, DUF604
  misc_feature (1)..(218): Homolog of NCBI NO: 18411279 NR Description: fringe-related protein [Arabidopsis thaliana]
  misc_feature (1)..(251): Homolog of NCBI NO: 37536418 NR Description: hypothetical protein [Oryza sativa (japonica
  misc_feature (1)..(218): Homolog of NCBI NO: 15223021 NR Description: fringe-related protein [Arabidopsis thaliana]
  misc_feature (1)..(221): Homolog of NCBI NO: 7485555 NR Description: hypothetical protein F16G20.190 - Arabidopsis
  misc_feature (1)..(251): Homolog of NCBI NO: 15233347 NR Description: fringe-related protein [Arabidopsis thaliana]
  misc_feature (1)..(250): Homolog of NCBI NO: 25336194 NR Description: F22L4.11 protein - Arabidopsis thaliana
  misc_feature (1)..(250): Homolog of NCBI NO: 15223433 NR Description: fringe-related protein [Arabidopsis thaliana]
  misc_feature (1)..(251): Homolog of NCBI NO: 15529153 NR Description: AT4g23490/F16G20_190 [Arabidopsis thaliana]
  misc_feature (1)..(251): Homolog of NCBI NO: 18416156 NR Description: fringe-related protein [Arabidopsis thaliana]
  misc_feature (1)..(251): Homolog of NCBI NO: 15238082 NR Description: fringe-related protein [Arabidopsis thaliana]
  misc_feature (21)..(21): Xaa is any aa, unknown or other
  misc_feature (41)..(41): Xaa is any aa, unknown or other
  misc_feature (47)..(47): Xaa is any aa, unknown or other
  misc_feature (51)..(51): Xaa is any aa, unknown or other
  misc_feature (58)..(58): Xaa is any aa, unknown or other
MQDRCIQRYPGLYGSDDRIQXCMAELGVPLTKEKGFHQFDXYGNLLXLLAXHPVTPLXSLHHLDVVEPIFPNVSRVQALKRLKGPMKLDPAGLIQQSICYDKARTWTISVSWGYAVQIFRGIFSAREMEMPARTFLNWYKRADYTAYPFNTRPVSRHVCQKPFVYYLSRAVYDEGANETASQYVRVQQNPECNWKMEDPTQIKVVHVYKKPDPHLWDKAPRRNCCRVRRTKKQGTMVIDVGECKEDELVEL

SEQ ID NO: 59853 - protein, 229 aa, Glycine max
  peptide (1)..(229): Ceres Seq. ID no. 15222817
  misc_feature (1)..(204): Pfam Name: Protein of unknown function, DUF604 Pfam Description: Protein of unknown function, DUF604
  misc_feature (1)..(196): Homolog of NCBI NO: 18411279 NR Description: fringe-related protein [Arabidopsis thaliana]
  misc_feature (1)..(229): Homolog of NCBI NO: 37536418 NR Description: hypothetical protein [Oryza sativa (japonica
  misc_feature (1)..(196): Homolog of NCBI NO: 15223021 NR Description: fringe-related protein [Arabidopsis thaliana]
  misc_feature (1)..(199): Homolog of NCBI NO: 7485555 NR Description: hypothetical protein F16G20.190 - Arabidopsis
  misc_feature (1)..(229): Homolog of NCBI NO: 15233347 NR Description: fringe-related protein [Arabidopsis thaliana]
  misc_feature (1)..(228): Homolog of NCBI NO: 25336194 NR Description: F22L4.11 protein - Arabidopsis thaliana
  misc_feature (1)..(228): Homolog of NCBI NO: 15223433 NR Description: fringe-related protein [Arabidopsis thaliana]
  misc_feature (1)..(229): Homolog of NCBI NO: 15529153 NR Description: AT4g23490/F16G20_190 [Arabidopsis thaliana]
  misc_feature (1)..(229): Homolog of NCBI NO: 18416156 NR Description: fringe-related protein [Arabidopsis thaliana]
  misc_feature (1)..(229): Homolog of NCBI NO: 15238082 NR Description: fringe-related protein [Arabidopsis thaliana]
  misc_feature (19)..(19): Xaa is any aa, unknown or other
  misc_feature (25)..(25): Xaa is any aa, unknown or other
  misc_feature (29)..(29): Xaa is any aa, unknown or other
  misc_feature (36)..(36): Xaa is any aa, unknown or other
MAELGVPLTKEKGFHQFDXYGNLLXLLAXHPVTPLXSLHHLDVVEPIFPNVSRVQALKRLKGPMKLDPAGLIQQSICYDKARTWTISVSWGYAVQIFRGIFSAREMEMPARTFLNWYKRADYTAYPFNTRPVSRHVCQKPFVYYLSRAVYDEGANETASQYVRVQQNPECNWKMEDPTQIKVVHVYKKPDPHLWDKAPRRNCCRVRRTKKQGTMVIDVGECKEDELVEL

SEQ ID NO: 59854 - DNA, 1428 bp, Glycine max
  misc_feature (1)..(1428): Ceres Seq. ID no. 13595616
gaacatcctaatcgaaaaattttttttcccttatttttcttaaatatttttatggctccggagtcaaaagttcctggagcaagtagaaagaagaaagcgagtgacgagggaaacgtttaaaccatatatgttttgttgtttctagctccattctatagcaatggccacgtctgttcttagtcctcctttctttcatcctctgcatcaacttcaattctcgaaatgcccccgcctttcttctaaatcccactttcgccctcgcctcctccgctccatatcccaaagaaccattcgcgctatctccgcagttgccgcagaatcagagttaggtacacagcaggatcatgcaattgaagcagacatctttgcttgccctgtatgttatgaaccattgataagaaaaggtccttctggccttaacttgtctggtttcatgtgtaagagatgtaagaagacatattctagcaaagataggtatctggatctgactgtaactgctggattgagagactacactgaaattcaacctgctcggactgagcttttcaggagtcccctggtttcattcttgtatgaaagaggttggcgtcagaatttcaggcaaagtggctttcctggtcctgatgaagagttcaaaatggctcaagagtactttgaatctgctgaaggtggacttcttgttgatgttagctgtggtagtggtttattttcccgaaaattcgccaaatctggaacatattcgggagtcatagcactagatttttctgagaatatgcttcgtcaatgttatgatttcattgagaaagataacacactttcaacaaataatattgctcttgtaagggcagatgtttctagacttcccttctcatcaggttcggttgatgctgttcatgctggtgcagctttgcattgctggccatctccctccaatgctgttgctgaaatcacccggacactaaaaaatggtggagtatttgttgggagcacttttctgcgttatagttcaaaaactccctggtttttacgccctttcagggagaggactccacaaggctatggctatctaacagaggaagagatcaaagacctttgcacctcatgtggtcttaccaattactcaagcaaaattcagcaggcttttattatgttcacagctcagaagccataaaactgggtctgatctatttataacattgattctccactgcattttatcaattccttctgtatgtatgtattgtatcacttgtttcatctgtaaagaagaaattgtaaataaatgagaaatgaaaaggtcaaaacctgagtccggtgtgttcgcaggttgtaaaatgcatcgtgtatcagtgcctaataatatatccaaattctgacaatttttgtaaagaatatatattttgttggcttaaatatatttttggttct

SEQ ID NO: 59855 - protein, 336 aa, Glycine max
  peptide (1)..(336): Ceres Seq. ID no. 13595617
  misc_feature (172)..(323): Homolog of NCBI NO: 18309157 NR Description: hypothetical protein [Clostridium perfringens]
  misc_feature (173)..(329): Homolog of NCBI NO: 23039720 NR Description: hypothetical protein [Trichodesmium erythraeum
  misc_feature (169)..(279): Homolog of NCBI NO: 20093135 NR Description: menaquinone biosynthesis methyltransferase
  misc_feature (171)..(336): Homolog of NCBI NO: 34541479 NR Description: methlytransferase, UbiE/COQ5 family
  misc_feature (145)..(271): Homolog of NCBI NO: 23048342 NR Description: hypothetical protein [Methanosarcina barkeri]
  misc_feature (221)..(336): Homolog of NCBI NO: 25406543 NR Description: hypothetical protein T11I11.8 [imported] -
  misc_feature (1)..(186): Homolog of NCBI NO: 25406543 NR Description: hypothetical protein T11I11.8 [imported] -
  misc_feature (1)..(336): Homolog of NCBI NO: 18411840 NR Description: expressed protein [Arabidopsis thaliana]
  misc_feature (1)..(261): Homolog of NCBI NO: 7487623 NR Description: hypothetical protein At2g41040 [imported] -
  misc_feature (1)..(336): Homolog of NCBI NO: 30688506 NR Description: expressed protein [Arabidopsis thaliana]
MATSVLSPPFFHPLHQLQFSKCPRLSSKSHFRPRLLRSISQRTIRAISAVAAESELGTQQDHAIEADIFACPVCYEPLIRKGPSGLNLSGFMCKRCKKTYSSKDRYLDLTVTAGLRDYTEIQPARTELFRSPLVSFLYERGWRQNFRQSGFPGPDEEFKMAQEYFESAEGGLLVDVSCGSGLFSRKFAKSGTYSGVIALDFSENMLRQCYDFIEKDNTLSTNNIALVRADVSRLPFSSGSVDAVHAGAALHCWPSPSNAVAEITRTLKNGGVFVGSTFLRYSSKTPWFLRPFRERTPQGYGYLTEEEIKDLCTSCGLTNYSSKIQQAFIMFTAQKP

SEQ ID NO: 59856 - protein, 245 aa, Glycine max
  peptide (1)..(245): Ceres Seq. ID no. 13595618
  misc_feature (81)..(232): Homolog of NCBI NO: 18309157 NR Description: hypothetical protein [Clostridium perfringens]
  misc_feature (82)..(238): Homolog of NCBI NO: 23039720 NR Description: hypothetical protein [Trichodesmium erythraeum
  misc_feature (78)..(188): Homolog of NCBI NO: 20093135 NR Description: menaquinone biosynthesis methyltransferase
  misc_feature (80)..(245): Homolog of NCBI NO: 34541479 NR Description: methlytransferase, UbiE/COQ5 family
  misc_feature (54)..(180): Homolog of NCBI NO: 23048342 NR Description: hypothetical protein [Methanosarcina barkeri]
  misc_feature (130)..(245): Homolog of NCBI NO: 25406543 NR Description: hypothetical protein T11I11.8 [imported] -
  misc_feature (1)..(95): Homolog of NCBI NO: 25406543 NR Description: hypothetical protein T11I11.8 [imported] -
  misc_feature (1)..(245): Homolog of NCBI NO: 18411840 NR Description: expressed protein [Arabidopsis thaliana]
  misc_feature (1)..(170): Homolog of NCBI NO: 7487623 NR Description: hypothetical protein At2g41040 [imported] -
  misc_feature (1)..(245): Homolog of NCBI NO: 30688506 NR Description: expressed protein [Arabidopsis thaliana]
MCKRCKKTYSSKDRYLDLTVTAGLRDYTEIQPARTELFRSPLVSFLYERGWRQNFRQSGFPGPDEEFKMAQEYFESAEGGLLVDVSCGSGLFSRKFAKSGTYSGVIALDFSENMLRQCYDFIEKDNTLSTNNIALVRADVSRLPFSSGSVDAVHAGAALHCWPSPSNAVAEITRTLKNGGVFVGSTFLRYSSKTPWFLRPFRERTPQGYGYLTEEEIKDLCTSCGLTNYSSKIQQAFIMFTAQKP

SEQ ID NO: 59857 - protein, 177 aa, Glycine max
  peptide (1)..(177): Ceres Seq. ID no. 13595619
  misc_feature (13)..(164): Homolog of NCBI NO: 18309157 NR Description: hypothetical protein [Clostridium perfringens]
  misc_feature (14)..(170): Homolog of NCBI NO: 23039720 NR Description: hypothetical protein [Trichodesmium erythraeum
  misc_feature (10)..(120): Homolog of NCBI NO: 20093135 NR Description: menaquinone biosynthesis methyltransferase
  misc_feature (12)..(177): Homolog of NCBI NO: 34541479 NR Description: methlytransferase, UbiE/COQ5 family
  misc_feature (1)..(112): Homolog of NCBI NO: 23048342 NR Description: hypothetical protein [Methanosarcina barkeri]
  misc_feature (62)..(177): Homolog of NCBI NO: 25406543 NR Description: hypothetical protein T11I11.8 [imported] -
  misc_feature (1)..(27): Homolog of NCBI NO: 25406543 NR Description: hypothetical protein T11I11.8 [imported] -
  misc_feature (1)..(177): Homolog of NCBI NO: 18411840 NR Description: expressed protein [Arabidopsis thaliana]
  misc_feature (1)..(102): Homolog of NCBI NO: 7487623 NR Description: hypothetical protein At2g41040 [imported] -
  misc_feature (1)..(177): Homolog of NCBI NO: 30688506 NR Description: expressed protein [Arabidopsis thaliana]
MAQEYFESAEGGLLVDVSCGSGLFSRKFAKSGTYSGVIALDFSENMLRQCYDFIEKDNTLSTNNIALVRADVSRLPFSSGSVDAVHAGAALHCWPSPSNAVAEITRTLKNGGVFVGSTFLRYSSKTPWFLRPFRERTPQGYGYLTEEEIKDLCTSCGLTNYSSKIQQAFIMFTAQKP

SEQ ID NO: 59858 - DNA, 860 bp, Glycine max
  misc_feature (1)..(860): Ceres Seq. ID no. 13595538
ctgttccaattcgttccgaaacaatcttctcaattcctttcggttattataatctgagttaaaaagaaaataggaggaggtaaagacaagcatcatgacgagcaagacaaagggtttcatgggttcccaggaggtggacatcattacccacccgctggataccctccacaacaagggtatcctccagctgggggctatccaccagctggttacccacccggtgcttaccctcctggacctggaggttatcctcctgctccgggtcacggtggctatcctcctgcaggctatcctgctcctcaccactcaggacactctagtggtggactcggaggtatgatcgctggtgcagctggtgcagccgcagcagcctatggaactcaccacgttggtcatgcatcacacaacccttacggtcatgcaggccacggaggatttggccacggaggatttggccacgttggccatgcctctcatgggtatggtggtcatggtcatggcaaattcaagcacggaaagcatggaggcaagcatggaggcaagttcaagcatggaaagcatgggaaacatggtatgtttggaggaggaggaggcaaattcaagaagtggaagtaatctaaagaaaccaccctttcattctctcctccggtagtctcatttacctgaccgatgttttctaataatcccctccaaacacattatattttaactatatcggtttagagattactggttcagaggaaataaatggagagtggtagtataatgtaaacaaaccttatggtatctgcagaagaggtttcttcaatctcttaatagcagatgccctgaaacttatctataatttggttttataatcg

SEQ ID NO: 59859 - protein, 92 aa, Glycine max
  peptide (1)..(92): Ceres Seq. ID no. 13595539
MELTTLVMHHTTLTVMQATEDLATEDLATLAMPLMGMVVMVMANSSTESMEASMEASSSMESMGNMVCLEEEEANSRSGSNLKKPPFHSLLR

SEQ ID NO: 59860 - protein, 92 aa, Glycine max
  peptide (1)..(92): Ceres Seq. ID no. 13595540
  misc_feature (1)..(85): Pfam Name: Dehydrin Pfam Description: Dehydrin
  misc_feature (1)..(70): Homolog of NCBI NO: 15238005 NR Description: glycine/proline-rich protein [Arabidopsis
  misc_feature (1)..(92): Homolog of NCBI NO: 13543234 NR Description: Unknown (protein for MGC:12025) [Mus musculus]
  misc_feature (1)..(92): Homolog of NCBI NO: 13543234 NR Description: Unknown (protein for MGC:12025) [Mus musculus]
  misc_feature (1)..(92): Homolog of NCBI NO: 21553447 NR Description: putative glycine and proline-rich protein
  misc_feature (1)..(92): Homolog of NCBI NO: 18398103 NR Description: proline-rich protein family [Arabidopsis
  misc_feature (1)..(92): Homolog of NCBI NO: 6478148 NR Description: putative glycine and proline-rich protein
  misc_feature (1)..(92): Homolog of NCBI NO: 33668156 NR Description: GPRP [Oryza sativa (indica cultivar-group)]
  misc_feature (1)..(92): Homolog of NCBI NO: 18422542 NR Description: proline-rich protein family [Arabidopsis
  misc_feature (1)..(61): Homolog of NCBI NO: 7487135 NR Description: hypothetical protein T18B16.170 - Arabidopsis
  misc_feature (1)..(92): Homolog of NCBI NO: 15234178 NR Description: glycine/proline-rich protein [Arabidopsis
MIAGAAGAAAAAYGTHHVGHASHNPYGHAGHGGFGHGGFGHVGHASHGYGGHGHGKFKHGKHGGKHGGKFKHGKHGKHGMFGGGGGKFKKWK

SEQ ID NO: 59861 - protein, 85 aa, Glycine max
  peptide (1)..(85): Ceres Seq. ID no. 13595541
MHHTTLTVMQATEDLATEDLATLAMPLMGMVVMVMANSSTESMEASMEASSSMESMGNMVCLEEEEANSRSGSNLKKPPFHSLLR

SEQ ID NO: 59862 - DNA, 1268 bp, Glycine max
  misc_feature (1)..(1268): Ceres Seq. ID no. 13595542
gaacatcctaatcgaaaaagacgtttcgatccctctctgactctctcctcccccctgccccctcctcggcgcccgcctcgcgaatccgtcggaaacccctcgccgctcccggttctagcgcagcgcagagatggtagccgcgcgcctcctcgcgcgggccacgaggcaatgcgccgccgcggtggtggcgtccgctactaggcggccgctcggcggcgtggcggcggtggccgctcgcccgctcgcctcttccttcggccccgccagggttccatatatgttgaatcagcccttgagatactcaagcaacatctttcaaaggtttggcttttcatcttctactcctcaacaaaatgataaggaggtacacgaacccaaagaccaggaaagtactgcacatgaatcgaatggtgaagcttcaaaggaagacagtggttcgcctggaagtacagaagatcttgatctgtcaaaggaggatctagtgaagctagtttttgagaaggatgaattattaacctcgaaagatgaagagatcaaagatatgaaggacaaggttttgcgcagctatgcagaaatggaaaatgtcattgcccggacaaagcgtgaatctgaaaattcaaaaaaatatgcagtacagaacttctctaagagcttgttagatgttgctgacaatttggctagagcttcatctgttgtaaaggaaagcttctcaaaattagatacatccgaagattctagtggagctgtaccgttactaaaaaccctactggagggtgttgacatgactgataagcaacttggagaggtttttaagaagttcggagtcgaaaggtttgatccgttgaatgagaaattcgatcctgataagcattttgcacttttccaaattcctgatccttcaaaaccatccggaactgttgcttctgttgtgaaggtggggtacatgttacatgatcgcgtgctccgtcctgcggaagttggtgttactgagggaggtccgtccgaagagcctgaggagaaatcaggtggagattagattaaaattggaatctagaagacgtagctgttcctgcttgacgacaaccggtacctcatcagcgaaggagcttggcgatggcagtgtttcggattgatttttaatggtaaaacacaaggttggcttgttgaaatcccatttgtatgggtgcacgtcacaccattccttagcagtacaacgtttcggagaattttgcgagggctttgagaccttaataagagtatttcttttc

SEQ ID NO: 59863 - protein, 301 aa, Glycine max
  peptide (1)..(301): Ceres Seq. ID no. 15221605
  misc_feature (96)..(287): Pfam Name: GrpE Pfam Description: GrpE
  misc_feature (126)..(301): Homolog of NCBI NO: 23012592 NR Description: hypothetical protein [Magnetospirillum
  misc_feature (134)..(301): Homolog of NCBI NO: 22962327 NR Description: hypothetical protein [Rhodopseudomonas palustris]
  misc_feature (81)..(298): Homolog of NCBI NO: 1669597 NR Description: AR192 [Arabidopsis thaliana]
  misc_feature (1)..(298): Homolog of NCBI NO: 21554173 NR Description: chaperone GrpE-like protein [Arabidopsis thaliana]
  misc_feature (1)..(298): Homolog of NCBI NO: 15240475 NR Description: chaperone GrpE-related protein [Arabidopsis
  misc_feature (63)..(286): Homolog of NCBI NO: 3851638 NR Description: chaperone GrpE type 1 [Nicotiana tabacum]
  misc_feature (57)..(298): Homolog of NCBI NO: 3851640 NR Description: chaperone GrpE type 2 [Nicotiana tabacum]
  misc_feature (81)..(298): Homolog of NCBI NO: 18416821 NR Description: grpE like protein [Arabidopsis thaliana]
  misc_feature (1)..(298): Homolog of NCBI NO: 7485329 NR Description: hypothetical protein F10M23.120 - Arabidopsis
  misc_feature (3)..(298): Homolog of NCBI NO: 38636943 NR Description: putative chaperone GrpE [Oryza sativa (japonica
MVAARLLARATRQCAAAVVASATRRPLGGVAAVAARPLASSFGPARVPYMLNQPLRYSSNIFQRFGFSSSTPQQNDKEVHEPKDQESTAHESNGEASKEDSGSPGSTEDLDLSKEDLVKLVFEKDELLTSKDEEIKDMKDKVLRSYAEMENVIARTKRESENSKKYAVQNFSKSLLDVADNLARASSVVKESFSKLDTSEDSSGAVPLLKTLLEGVDMTDKQLGEVFKKFGVERFDPLNEKFDPDKHFALFQIPDPSKPSGTVASVVKVGYMLHDRVLRPAEVGVTEGGPSEEPEEKSGGD

SEQ ID NO: 59864 - protein, 252 aa, Glycine max
  peptide (1)..(252): Ceres Seq. ID no. 15221606
  misc_feature (47)..(238): Pfam Name: GrpE Pfam Description: GrpE
  misc_feature (77)..(252): Homolog of NCBI NO: 23012592 NR Description: hypothetical protein [Magnetospirillum
  misc_feature (85)..(252): Homolog of NCBI NO: 22962327 NR Description: hypothetical protein [Rhodopseudomonas palustris]
  misc_feature (32)..(249): Homolog of NCBI NO: 1669597 NR Description: AR192 [Arabidopsis thaliana]
  misc_feature (1)..(249): Homolog of NCBI NO: 21554173 NR Description: chaperone GrpE-like protein [Arabidopsis thaliana]
  misc_feature (1)..(249): Homolog of NCBI NO: 15240475 NR Description: chaperone GrpE-related protein [Arabidopsis
  misc_feature (14)..(237): Homolog of NCBI NO: 3851638 NR Description: chaperone GrpE type 1 [Nicotiana tabacum]
  misc_feature (8)..(249): Homolog of NCBI NO: 3851640 NR Description: chaperone GrpE type 2 [Nicotiana tabacum]
  misc_feature (32)..(249): Homolog of NCBI NO: 18416821 NR Description: grpE like protein [Arabidopsis thaliana]
  misc_feature (1)..(249): Homolog of NCBI NO: 7485329 NR Description: hypothetical protein F10M23.120 - Arabidopsis
  misc_feature (1)..(249): Homolog of NCBI NO: 38636943 NR Description: putative chaperone GrpE [Oryza sativa (japonica
MLNQPLRYSSNIFQRFGFSSSTPQQNDKEVHEPKDQESTAHESNGEASKEDSGSPGSTEDLDLSKEDLVKLVFEKDELLTSKDEEIKDMKDKVLRSYAEMENVIARTKRESENSKKYAVQNFSKSLLDVADNLARASSVVKESFSKLDTSEDSSGAVPLLKTLLEGVDMTDKQLGEVFKKFGVERFDPLNEKFDPDKHFALFQIPDPSKPSGTVASVVKVGYMLHDRVLRPAEVGVTEGGPSEEPEEKSGGD

SEQ ID NO: 59865 - protein, 164 aa, Glycine max
  peptide (1)..(164): Ceres Seq. ID no. 15221607
  misc_feature (1)..(150): Pfam Name: GrpE Pfam Description: GrpE
  misc_feature (1)..(164): Homolog of NCBI NO: 23012592 NR Description: hypothetical protein [Magnetospirillum
  misc_feature (1)..(164): Homolog of NCBI NO: 22962327 NR Description: hypothetical protein [Rhodopseudomonas palustris]
  misc_feature (1)..(161): Homolog of NCBI NO: 1669597 NR Description: AR192 [Arabidopsis thaliana]
  misc_feature (1)..(161): Homolog of NCBI NO: 21554173 NR Description: chaperone GrpE-like protein [Arabidopsis thaliana]
  misc_feature (1)..(161): Homolog of NCBI NO: 15240475 NR Description: chaperone GrpE-related protein [Arabidopsis
  misc_feature (1)..(149): Homolog of NCBI NO: 3851638 NR Description: chaperone GrpE type 1 [Nicotiana tabacum]
  misc_feature (1)..(161): Homolog of NCBI NO: 3851640 NR Description: chaperone GrpE type 2 [Nicotiana tabacum]
  misc_feature (1)..(161): Homolog of NCBI NO: 18416821 NR Description: grpE like protein [Arabidopsis thaliana]
  misc_feature (1)..(161): Homolog of NCBI NO: 7485329 NR Description: hypothetical protein F10M23.120 - Arabidopsis
  misc_feature (1)..(161): Homolog of NCBI NO: 38636943 NR Description: putative chaperone GrpE [Oryza sativa (japonica
MKDKVLRSYAEMENVIARTKRESENSKKYAVQNFSKSLLDVADNLARASSVVKESFSKLDTSEDSSGAVPLLKTLLEGVDMTDKQLGEVFKKFGVERFDPLNEKFDPDKHFALFQIPDPSKPSGTVASVVKVGYMLHDRVLRPAEVGVTEGGPSEEPEEKSGGD

SEQ ID NO: 59866 - DNA, 1007 bp, Glycine max
  misc_feature (1)..(1007): Ceres Seq. ID no. 13595613
cctttcccccctcccgttccaactttattgtgtttaacaacctagaacatcctaatcgaaaaacaacccaccccacgtattccccgcacctttcccccctcccccggcctcggcaagaccgcgcgcggcgcgccatgacgagctccgcctcctcctccccttcccgcaaggtgctgagcaagatcgcgtgcctccggctgcagaaggagctcggggagtggcaggccagccctcccggcggcttcacctacaaggtctccgacaacctccagcggtgggtcatcgaggtgtccggggcggaggggacgctctacgccggcgagacgtaccggctgcaggttgacttcccggagcagtaccccatggaggctccacaggttatatttatgcatccggcgccgatgcatccgcacatttacagcaatgggcacatctgtctagatatattgtacgactcgtggtcaccagcaatgacggtcagttccgtgtgcatcagcatcttgtccatgttgtcaagttcaccagcgaaggaacgcccatccgataacgatcgctatgtcaggaactgccgcaacgggaggtctccgaaggagacgaggtggtggtttcatgatgacaaagtgtgatgcgctccagctggtttcttcttccggcatcagcagctcttacacatcatcctgcctaccgtagtatggcgtgcgtcgttcatgaaaagattatttaggcaaatatttcaagccatctatttggcggcaaattgacatgcccatgtatgtggttttgtacatgatgaatctgcacctgtatcaactcccgtgcttaccaactcttatcccttttgatatgatgaaagtagtaatcgagtgttttatcttaacaaaaaaaaaaaaaaaaaaaaaaaaaaaaaaaaaaaaaaaaaaaaaaaaaaaaaaaaaaaaaaaaaaaaaagaaaaaaaaaaaaaaaaaggtttatcgatcccgccaacctcaagggggggcccggaacc

SEQ ID NO: 59867 - protein, 207 aa, Glycine max
  peptide (1)..(207): Ceres Seq. ID no. 13595614
  misc_feature (58)..(207): Homolog of NCBI NO: 17510293 NR Description: Ubiquitin conjugating enzyme UBC-16 (16.9 kD)
  misc_feature (111)..(207): Homolog of NCBI NO: 25293670 NR Description: ubiquitin-conjugating enzyme 18
  misc_feature (45)..(176): Homolog of NCBI NO: 34897008 NR Description: putative ubiquitin-conjugating enzyme E2 [Oryza
  misc_feature (45)..(207): Homolog of NCBI NO: 18419831 NR Description: ubiquitin-conjugating enzyme 17 (UBC17)
  misc_feature (48)..(207): Homolog of NCBI NO: 2801444 NR Description: ubiquitin-conjugating enzyme 16 [Arabidopsis
  misc_feature (48)..(207): Homolog of NCBI NO: 4090259 NR Description: ubiquitin-conjugating enzyme E2 [Pseudotsuga
  misc_feature (48)..(207): Homolog of NCBI NO: 18410856 NR Description: ubiquitin-conjugating enzyme 16 (UBC16)
  misc_feature (45)..(207): Homolog of NCBI NO: 18401461 NR Description: ubiquitin-conjugating enzyme 15 (UBC15)
  misc_feature (45)..(207): Homolog of NCBI NO: 481811 NR Description: ubiquitin-conjugating enzyme UBC2-1 - Arabidopsis
  misc_feature (45)..(207): Homolog of NCBI NO: 18422281 NR Description: ubiquitin-conjugating enzyme 18 (UBC18)
FPPSRSNFIVFNNLEHPNRKTTHPTYSPHLSPLPRPRQDRARRAMTSSASSSPSRKVLSKIACLRLQKELGEWQASPPGGFTYKVSDNLQRWVIEVSGAEGTLYAGETYRLQVDFPEQYPMEAPQVIFMHPAPMHPHIYSNGHICLDILYDSWSPAMTVSSVCISILSMLSSSPAKERPSDNDRYVRNCRNGRSPKETRWWFHDDKV

SEQ ID NO: 59868 - protein, 163 aa, Glycine max
  peptide (1)..(163): Ceres Seq. ID no. 13595615
  misc_feature (14)..(163): Homolog of NCBI NO: 17510293 NR Description: Ubiquitin conjugating enzyme UBC-16 (16.9 kD)
  misc_feature (67)..(163): Homolog of NCBI NO: 25293670 NR Description: ubiquitin-conjugating enzyme 18
  misc_feature (1)..(132): Homolog of NCBI NO: 34897008 NR Description: putative ubiquitin-conjugating enzyme E2 [Oryza
  misc_feature (1)..(163): Homolog of NCBI NO: 18419831 NR Description: ubiquitin-conjugating enzyme 17 (UBC17)
  misc_feature (4)..(163): Homolog of NCBI NO: 2801444 NR Description: ubiquitin-conjugating enzyme 16 [Arabidopsis
  misc_feature (4)..(163): Homolog of NCBI NO: 4090259 NR Description: ubiquitin-conjugating enzyme E2 [Pseudotsuga
  misc_feature (4)..(163): Homolog of NCBI NO: 18410856 NR Description: ubiquitin-conjugating enzyme 16 (UBC16)
  misc_feature (1)..(163): Homolog of NCBI NO: 18401461 NR Description: ubiquitin-conjugating enzyme 15 (UBC15)
  misc_feature (1)..(163): Homolog of NCBI NO: 481811 NR Description: ubiquitin-conjugating enzyme UBC2-1 - Arabidopsis
  misc_feature (1)..(163): Homolog of NCBI NO: 18422281 NR Description: ubiquitin-conjugating enzyme 18 (UBC18)
MTSSASSSPSRKVLSKIACLRLQKELGEWQASPPGGFTYKVSDNLQRWVIEVSGAEGTLYAGETYRLQVDFPEQYPMEAPQVIFMHPAPMHPHIYSNGHICLDILYDSWSPAMTVSSVCISILSMLSSSPAKERPSDNDRYVRNCRNGRSPKETRWWFHDDKV

SEQ ID NO: 59869 - DNA, 1016 bp, Glycine max
  misc_feature (1)..(1016): Ceres Seq. ID no. 13595561
aatcaaatccatgttctagctctgctgtacagttaaccttaagaaacgatgaatcagtgggcgattcagccaaaggctttcgctgcgggaggagagcagagtgttgtagtttgcccaaaaccccgtcgtattggtctcggtaaccatctccaccatccctcctcccgctctctgcgatgttacttcagccagcaagttgaatccaaggctgagactgatatcttagatatcatactcaccaaggaacaagttaatcactcgcaggtattagactcgccgtccccgtttttatgtgggtcgccgccgagtagagtcgctaacccattaacacaggatgctcgtttcagagatgaaatcaagctggtctcttcttccccgatcacgactccgctgggccaacctccgtcgtccccttcttcctctgggaggaaaggaggatgtgttagaggcaattttggtaacagcccagcggttaggatcgaagggtttgattgccttgacagggacagtagaaactgcagcatccctgccttggcttagaaaccaaaccaacctcgaaaacgcatccactctgttgaattatctcatgaaaaccaatttagtgcgtcgtacatatatgagtttaaggatatggaaatgtgtggaatataatctttgagggaagtgaaagagcatgtgagatcaatcttttggragtttggttgttttgtttttaaagagtgtaaataggtgacggagtaaaaccgattttctgggttaagtttttagtattcgtggtcattttgtaagtataagtatcaagtctaaagatgaatcgttgaggataaggaagaataacatttgaaggtcaggttttcttgtgtaaagagagatcgagatagaaaagtgcattttgggtattttctacttttgtttttgtttctattatgtgttcatgttggttatgaagatgagaaagaagaatttgtacaaaaggaaagaaatttaaatgatgtaaattttacttttgaattccg

SEQ ID NO: 59870 - protein, 163 aa, Glycine max
  peptide (1)..(163): Ceres Seq. ID no. 15221612
  misc_feature (20)..(163): Homolog of NCBI NO: 18396232 NR Description: expressed protein [Arabidopsis thaliana]
  misc_feature (1)..(163): Homolog of NCBI NO: 15222278 NR Description: expressed protein [Arabidopsis thaliana]
  misc_feature (1)..(163): Homolog of NCBI NO: 30685676 NR Description: expressed protein [Arabidopsis thaliana]
  misc_feature (1)..(163): Homolog of NCBI NO: 11762168 NR Description: AT5g16110 [Arabidopsis thaliana]
  misc_feature (16)..(163): Homolog of NCBI NO: 18409044 NR Description: expressed protein [Arabidopsis thaliana]
MNQWAIQPKAFAAGGEQSVVVCPKPRRIGLGNHLHHPSSRSLRCYFSQQVESKAETDILDIILTKEQVNHSQVLDSPSPFLCGSPPSRVANPLTQDARFRDEIKLVSSSPITTPLGQPPSSPSSSGRKGGCVRGNFGNSPAVRIEGFDCLDRDSRNCSIPALA

SEQ ID NO: 59871 - protein, 107 aa, Glycine max
  peptide (1)..(107): Ceres Seq. ID no. 15221613
MLVSEMKSSWSLLPRSRLRWANLRRPLLPLGGKEDVLEAILVTAQRLGSKGLIALTGTVETAASLPWLRNQTNLENASTLLNYLMKTNLVRRTYMSLRIWKCVEYNL

SEQ ID NO: 59872 - protein, 102 aa, Glycine max
  peptide (1)..(102): Ceres Seq. ID no. 15221614
MKSSWSLLPRSRLRWANLRRPLLPLGGKEDVLEAILVTAQRLGSKGLIALTGTVETAASLPWLRNQTNLENASTLLNYLMKTNLVRRTYMSLRIWKCVEYNL

SEQ ID NO: 59873 - DNA, 1666 bp, Glycine max
  misc_feature (1)..(1666): Ceres Seq. ID no. 13595562
catcaaggatattagagtgtgaaaaaggtgaagaacaaaccaaatctttatcatagtcataaatggtaggataggaatgtacatggaaactaggaaaagattgagtaaatatcaaatgtaatataccctttttagtgtgaggcttgaagcccaaaaaaatggaagcagaggctctaagatcaagttttttttttgttattagtgagagtgttgatgtagcataagcaaccaaagactttcaaagaagaaatgtcatatgcagtaccatataatttttcaaaaggagacttattattaagaaatggagttggcaaacaattgatgagtaaaacagcatgttgtaaagcaaaagaccaaaagattggtggtaacttggactgaaaaagaagggctcgagtaacatttaataaatgttgatgctttctttccacaattccattttgttgtagggtttcaacacaggaagtctggtgtatgataccagtattatgataaaactatttcataataaattctggaccattgtctgatcggatagctttcacttttgtattgaattgcctctcaacataggaaacaaaggcttgtaaatgagtttgagtctcagcttttgaagtcattataaaaatccaaacaaatctagtatgatcatccacaattctcgtgcaaaaataatgctagaaaaggttgcaaggtgaaggggtaggtgctcaaaaggggactctgtctgggaaggaagatcttagtggcttctttcgtagcttctgctgccccggttgttgttccacctcttgttgttgcttctgctattggcatggctctttctatgccttgtgttattttcttggctagccatgtttgcactctgagtttaatgagtaagttgctccctaggcctactcctcaggatactttgttgcatgaagagatgtgttttcggccaggtaatgatgttattcacacatataaagaggttgctccctaggcctattacattgcccaatgagaagttagataataacaattttgactttgaaaatcaagaatcacagttgcatgaattaaatgaagggatgtacccgttagatgcagaagctagagaaattgctaatgaaagtgcacttgatttgtttgatggaaaccaaatagaccatgacgagtatgcatacacaattgatttaaatgaaggctcttcaaatgttgtaaggcatacaaattctatgcaggttcttgtttcgtctgttgaaaaagagtcaaggccatctaaatgttcctctgcagaaaaccatgtttgcccttctcaagagctattgcaggttgtattgggtgaagagaacatatggaaaaagatgaatatgatacggaagatagtaggatatgaaggtagaatgcaagcatcatgttcagatgaattaaaagctctctacatgttcactggagttgagcccccaacttgttctctcgctgaaatcaaggagaagctcccwctccttatgtccatccttggaattaaatmgaatgatgctyagacakgtcacacatctttgtactgttttttacatatttccgttaacatgtaatgwgtgttctttttattctccgyggayttccctgggcgatatggagacccaagaaaaggaaaggaaaattattcaamactttcttc

SEQ ID NO: 59874 - protein, 219 aa, Glycine max
  peptide (1)..(219): Ceres Seq. ID no. 15221615
  misc_feature (134)..(197): Homolog of NCBI NO: 25404523 NR Description: hypothetical protein F16G16.9 [imported] -
  misc_feature (134)..(180): Homolog of NCBI NO: 4646194 NR Description: T23K8.1 [Arabidopsis thaliana]
  misc_feature (42)..(197): Homolog of NCBI NO: 15220925 NR Description: hypothetical protein [Arabidopsis thaliana]
  misc_feature (189)..(189): Xaa is any aa, unknown or other
  misc_feature (199)..(199): Xaa is any aa, unknown or other
  misc_feature (203)..(203): Xaa is any aa, unknown or other
  misc_feature (205)..(205): Xaa is any aa, unknown or other
MKRCVFGQVMMLFTHIKRLLPRPITLPNEKLDNNNFDFENQESQLHELNEGMYPLDAEAREIANESALDLFDGNQIDHDEYAYTIDLNEGSSNVVRHTNSMQVLVSSVEKESRPSKCSSAENHVCPSQELLQVVLGEENIWKKMNMIRKIVGYEGRMQASCSDELKALYMFTGVEPPTCSLAEIKEKLXLLMSILGIKXNDAXTXHTSLYCFLHISVNM

SEQ ID NO: 59875 - protein, 210 aa, Glycine max
  peptide (1)..(210): Ceres Seq. ID no. 15221616
  misc_feature (125)..(188): Homolog of NCBI NO: 25404523 NR Description: hypothetical protein F16G16.9 [imported] -
  misc_feature (125)..(171): Homolog of NCBI NO: 4646194 NR Description: T23K8.1 [Arabidopsis thaliana]
  misc_feature (33)..(188): Homolog of NCBI NO: 15220925 NR Description: hypothetical protein [Arabidopsis thaliana]
  misc_feature (180)..(180): Xaa is any aa, unknown or other
  misc_feature (190)..(190): Xaa is any aa, unknown or other
  misc_feature (194)..(194): Xaa is any aa, unknown or other
  misc_feature (196)..(196): Xaa is any aa, unknown or other
MMLFTHIKRLLPRPITLPNEKLDNNNFDFENQESQLHELNEGMYPLDAEAREIANESALDLFDGNQIDHDEYAYTIDLNEGSSNVVRHTNSMQVLVSSVEKESRPSKCSSAENHVCPSQELLQVVLGEENIWKKMNMIRKIVGYEGRMQASCSDELKALYMFTGVEPPTCSLAEIKEKLXLLMSILGIKXNDAXTXHTSLYCFLHISVNM

SEQ ID NO: 59876 - protein, 209 aa, Glycine max
  peptide (1)..(209): Ceres Seq. ID no. 15221617
  misc_feature (124)..(187): Homolog of NCBI NO: 25404523 NR Description: hypothetical protein F16G16.9 [imported] -
  misc_feature (124)..(170): Homolog of NCBI NO: 4646194 NR Description: T23K8.1 [Arabidopsis thaliana]
  misc_feature (32)..(187): Homolog of NCBI NO: 15220925 NR Description: hypothetical protein [Arabidopsis thaliana]
  misc_feature (179)..(179): Xaa is any aa, unknown or other
  misc_feature (189)..(189): Xaa is any aa, unknown or other
  misc_feature (193)..(193): Xaa is any aa, unknown or other
  misc_feature (195)..(195): Xaa is any aa, unknown or other
MLFTHIKRLLPRPITLPNEKLDNNNFDFENQESQLHELNEGMYPLDAEAREIANESALDLFDGNQIDHDEYAYTIDLNEGSSNVVRHTNSMQVLVSSVEKESRPSKCSSAENHVCPSQELLQVVLGEENIWKKMNMIRKIVGYEGRMQASCSDELKALYMFTGVEPPTCSLAEIKEKLXLLMSILGIKXNDAXTXHTSLYCFLHISVNM

SEQ ID NO: 59877 - DNA, 1945 bp, Glycine max
  misc_feature (1)..(1945): Ceres Seq. ID no. 13595833
atattttcgtttttgccgagatagggttttcggttttcttcactgctctctcaccaggggcgagttgtgaatggaagcacaaggcataaagtataaagcataaagcatagttagttgagtcaatggaaggtgttgatcaaagaaatagttctgcatttggtgttccagttccaagaccaccaaaccagaaatctcgtatgccaccatctcaccctagtatcaatgtttcaccttcagcaactccttattcccaataccctcagcgattgcgttctccgggttcctcccattcgaggtctttgtctcaacctcccattttctcgttggattcattgcccccattgagtccttcccctgctgctgttacctccatgtttgactcaatctcaacaactgatatgtctgtggaggaaagtaatgtttcctctcaggtgcccctcaatagagggcatgcccttcttcctcctaggaagggacacaggcgctctagtagtgattcccctttgggaatctctggttttatgcagtcttctccagttccctccggaggagagagctcggggttcgagaagccgattcagttggtcttgaaggcgtcctttagggacagcctggatgggggccatgctaatgagcctgttaatgggaggaaggaggaggctgcggatgatttgttcagggaatacatgaatttggacaactttgataatctgaactttcctggcatggaagataaggacttggatagcaggaccagtggttccaagacagttgagagcagcgataatgaagttgagagtcatgtcaatgggaaggcgagtggggctcagggggcaagttcaagctgctcggaggaaaggagggaaggagtcaagaggagttcaaatggggaggttgcaccgggttcccggcatcggaggagtttttcgttggatagttccatagggaactttaacattgaagatggattgcctaagcttcctccttcgaaaaatcaaatgggtcagcactcacctagcaattcgatggacggcaaaatgtcagaaacctccacggagtttggaaatggcgaatttagtgcagaggaggtaaagaaaataatggaaagtgataaactagctgaaattgcttcgactgatcccaaacgtgcaaaaaggattttggctaatcgtcaatcagctgctcgttcaaaggagaggaagatgcgatacattgctgaattggaacacaaagtgcaaactcttcagacagaaacaaccacattgtctactcagtttaccaaattacagagggataactctgaccttaaaagtgagaacaacgagtgcaaattaaggcttcaagccatggaacaacagtctctattgaaagatgctctgaacgagactttggatgctgaagtccggcgtttgaggcgtgctgttgcagaacttggcggtgaatccctcacaagttgcatggctcgacagcttgctattaaccaacaaatgttcgagttacagcatcagcagcccagccaacagagacattttctactgcaaaatcaccatactcaggaagagatagagtctcgatcacagcagattcaaggcaatgaattgcatccccaggcacagattcagtcacagcagattcaacgcaatgaattgcatccccagccttaaattgcagagaaatatgttgcctattaatggtgccaaatagtggaagcaaaatacttttggacgtggagctggtgaggtataagtataatctcaatcgtacataagcagtgatctagcattagtttgcttgaagtttcataagatcggttcatcatctttatttaatttattattttgactgttttacctgcatacaaactcggactatcctattcatgtagtaaaccttattgtcatgaatacaacccacctttctctattgagaggggtcatgttgttgc

SEQ ID NO: 59878 - protein, 513 aa, Glycine max
  peptide (1)..(513): Ceres Seq. ID no. 13595834
  misc_feature (339)..(401): Pfam Name: bZIP transcription factor Pfam Description: bZIP transcription factor
  misc_feature (299)..(467): Homolog of NCBI NO: 37536376 NR Description: putative transcription factor
  misc_feature (258)..(413): Homolog of NCBI NO: 4586586 NR Description: bZIP DNA binding protein [Cicer arietinum]
  misc_feature (167)..(473): Homolog of NCBI NO: 34902256 NR Description: Putative bZIP transcription factor
  misc_feature (14)..(478): Homolog of NCBI NO: 15234865 NR Description: bZIP protein [Arabidopsis thaliana]
  misc_feature (37)..(480): Homolog of NCBI NO: 15226487 NR Description: bZIP family transcription factor [Arabidopsis
  misc_feature (19)..(478): Homolog of NCBI NO: 19423874 NR Description: unknown protein [Arabidopsis thaliana]
  misc_feature (19)..(478): Homolog of NCBI NO: 30692108 NR Description: bZIP protein [Arabidopsis thaliana]
  misc_feature (55)..(468): Homolog of NCBI NO: 3425907 NR Description: transcription factor VSF-1 [Lycopersicon
  misc_feature (55)..(468): Homolog of NCBI NO: 1838976 NR Description: vsf-1 [Lycopersicon esculentum]
  misc_feature (55)..(468): Homolog of NCBI NO: 1076603 NR Description: vsf-1 protein - tomato
MEGVDQRNSSAFGVPVPRPPNQKSRMPPSHPSINVSPSATPYSQYPQRLRSPGSSHSRSLSQPPIFSLDSLPPLSPSPAAVTSMFDSISTTDMSVEESNVSSQVPLNRGHALLPPRKGHRRSSSDSPLGISGFMQSSPVPSGGESSGFEKPIQLVLKASFRDSLDGGHANEPVNGRKEEAADDLFREYMNLDNFDNLNFPGMEDKDLDSRTSGSKTVESSDNEVESHVNGKASGAQGASSSCSEERREGVKRSSNGEVAPGSRHRRSFSLDSSIGNFNIEDGLPKLPPSKNQMGQHSPSNSMDGKMSETSTEFGNGEFSAEEVKKIMESDKLAEIASTDPKRAKRILANRQSAARSKERKMRYIAELEHKVQTLQTETTTLSTQFTKLQRDNSDLKSENNECKLRLQAMEQQSLLKDALNETLDAEVRRLRRAVAELGGESLTSCMARQLAINQQMFELQHQQPSQQRHFLLQNHHTQEEIESRSQQIQGNELHPQAQIQSQQIQRNELHPQP

SEQ ID NO: 59879 - protein, 488 aa, Glycine max
  peptide (1)..(488): Ceres Seq. ID no. 13595835
  misc_feature (314)..(376): Pfam Name: bZIP transcription factor Pfam Description: bZIP transcription factor
  misc_feature (274)..(442): Homolog of NCBI NO: 37536376 NR Description: putative transcription factor
  misc_feature (233)..(388): Homolog of NCBI NO: 4586586 NR Description: bZIP DNA binding protein [Cicer arietinum]
  misc_feature (142)..(448): Homolog of NCBI NO: 34902256 NR Description: Putative bZIP transcription factor
  misc_feature (1)..(453): Homolog of NCBI NO: 15234865 NR Description: bZIP protein [Arabidopsis thaliana]
  misc_feature (12)..(455): Homolog of NCBI NO: 15226487 NR Description: bZIP family transcription factor [Arabidopsis
  misc_feature (1)..(453): Homolog of NCBI NO: 19423874 NR Description: unknown protein [Arabidopsis thaliana]
  misc_feature (1)..(453): Homolog of NCBI NO: 30692108 NR Description: bZIP protein [Arabidopsis thaliana]
  misc_feature (30)..(443): Homolog of NCBI NO: 3425907 NR Description: transcription factor VSF-1 [Lycopersicon
  misc_feature (30)..(443): Homolog of NCBI NO: 1838976 NR Description: vsf-1 [Lycopersicon esculentum]
  misc_feature (30)..(443): Homolog of NCBI NO: 1076603 NR Description: vsf-1 protein - tomato
MPPSHPSINVSPSATPYSQYPQRLRSPGSSHSRSLSQPPIFSLDSLPPLSPSPAAVTSMFDSISTTDMSVEESNVSSQVPLNRGHALLPPRKGHRRSSSDSPLGISGFMQSSPVPSGGESSGFEKPIQLVLKASFRDSLDGGHANEPVNGRKEEAADDLFREYMNLDNFDNLNFPGMEDKDLDSRTSGSKTVESSDNEVESHVNGKASGAQGASSSCSEERREGVKRSSNGEVAPGSRHRRSFSLDSSIGNFNIEDGLPKLPPSKNQMGQHSPSNSMDGKMSETSTEFGNGEFSAEEVKKIMESDKLAEIASTDPKRAKRILANRQSAARSKERKMRYIAELEHKVQTLQTETTTLSTQFTKLQRDNSDLKSENNECKLRLQAMEQQSLLKDALNETLDAEVRRLRRAVAELGGESLTSCMARQLAINQQMFELQHQQPSQQRHFLLQNHHTQEEIESRSQQIQGNELHPQAQIQSQQIQRNELHPQP

SEQ ID NO: 59880 - protein, 430 aa, Glycine max
  peptide (1)..(430): Ceres Seq. ID no. 13595836
  misc_feature (256)..(318): Pfam Name: bZIP transcription factor Pfam Description: bZIP transcription factor
  misc_feature (216)..(384): Homolog of NCBI NO: 37536376 NR Description: putative transcription factor
  misc_feature (175)..(330): Homolog of NCBI NO: 4586586 NR Description: bZIP DNA binding protein [Cicer arietinum]
  misc_feature (84)..(390): Homolog of NCBI NO: 34902256 NR Description: Putative bZIP transcription factor
  misc_feature (1)..(395): Homolog of NCBI NO: 15234865 NR Description: bZIP protein [Arabidopsis thaliana]
  misc_feature (1)..(397): Homolog of NCBI NO: 15226487 NR Description: bZIP family transcription factor [Arabidopsis
  misc_feature (1)..(395): Homolog of NCBI NO: 19423874 NR Description: unknown protein [Arabidopsis thaliana]
  misc_feature (1)..(395): Homolog of NCBI NO: 30692108 NR Description: bZIP protein [Arabidopsis thaliana]
  misc_feature (1)..(385): Homolog of NCBI NO: 3425907 NR Description: transcription factor VSF-1 [Lycopersicon
  misc_feature (1)..(385): Homolog of NCBI NO: 1838976 NR Description: vsf-1 [Lycopersicon esculentum]
  misc_feature (1)..(385): Homolog of NCBI NO: 1076603 NR Description: vsf-1 protein - tomato
MFDSISTTDMSVEESNVSSQVPLNRGHALLPPRKGHRRSSSDSPLGISGFMQSSPVPSGGESSGFEKPIQLVLKASFRDSLDGGHANEPVNGRKEEAADDLFREYMNLDNFDNLNFPGMEDKDLDSRTSGSKTVESSDNEVESHVNGKASGAQGASSSCSEERREGVKRSSNGEVAPGSRHRRSFSLDSSIGNFNIEDGLPKLPPSKNQMGQHSPSNSMDGKMSETSTEFGNGEFSAEEVKKIMESDKLAEIASTDPKRAKRILANRQSAARSKERKMRYIAELEHKVQTLQTETTTLSTQFTKLQRDNSDLKSENNECKLRLQAMEQQSLLKDALNETLDAEVRRLRRAVAELGGESLTSCMARQLAINQQMFELQHQQPSQQRHFLLQNHHTQEEIESRSQQIQGNELHPQAQIQSQQIQRNELHPQP

SEQ ID NO: 59881 - DNA, 858 bp, Glycine max
  misc_feature (1)..(858): Ceres Seq. ID no. 12611801
gcaggccacataaaaccaaaggaagaagagaacgtctgtcatctgcttaattcctctgtgccgaggtagctgccaattccaaagactctgagtaagaggagaacgtggttagctaggaaatgtgcggcggagctgttatcgccgacttcgtcccggccggggcccgccgcccggatggctcctccgccgacgtccccggctccatcctcgccggtggggaggtgaaggagaaaccgctggcgccggggcggaagacggcgtaccgtgggatcaggcgccggccatggggccgctgggctgcggagatccgggaccccacgaagggcgcgcgcgtctggctgggcacgtacgccaccgcggaggaggccgcgcgcgcctacgacgtcgcggcgcgcgatatccgcgggccgaaggccaagctcaacttcccgcccgcggtgggcgcgccgcaggcggccgcggccgtggaggggccgggggcgcccaagaagcgtcggtgggtcgctgccgaggagagttcggcatcttcgtctccccttccggtcacagctgccggcggcacggagagcctgcgggagcgcatgtccgggctggaggcgttcctggggctggaggacgacgacgtggaggcctggggggccgtcgatctcatcttggattaggcgtgtgccgtcgccacgtgcggcgtccatggggtacatttaccgataaataaataagcagattggtcgaagtcttttgatttgattagctaaagtatcgattggctttcctgggcttttgccagcatatccaggtcctttgtagtgggatgctatgtaattcgagcatgacgatcagaaaaaatgtggttccgag

SEQ ID NO: 59882 - protein, 180 aa, Glycine max
  peptide (1)..(180): Ceres Seq. ID no. 12611802
  misc_feature (45)..(109): Pfam Name: AP2 domain Pfam Description: AP2 domain
  misc_feature (36)..(146): Homolog of NCBI NO: 15228312 NR Description: AP2 domain protein RAP2.3
  misc_feature (34)..(167): Homolog of NCBI NO: 10798644 NR Description: AP2 domain-containing transcription factor
  misc_feature (12)..(119): Homolog of NCBI NO: 24940524 NR Description: ethylene response element binding protein
  misc_feature (1)..(104): Homolog of NCBI NO: 15226619 NR Description: putative AP2 domain transcription factor
  misc_feature (8)..(151): Homolog of NCBI NO: 34393859 NR Description: AP2 domain transcription factor EREBP
  misc_feature (8)..(151): Homolog of NCBI NO: 31745667 NR Description: AP2 domain transcription factor EREBP
  misc_feature (36)..(159): Homolog of NCBI NO: 2467088 NR Description: putative Ckc2 [Arabidopsis thaliana]
  misc_feature (19)..(156): Homolog of NCBI NO: 34906702 NR Description: EREBP(Ethylene-responsive element-binding
  misc_feature (19)..(156): Homolog of NCBI NO: 33146866 NR Description: EREB-like protein [Oryza sativa (japonica
  misc_feature (1)..(123): Homolog of NCBI NO: 34894554 NR Description: B1011A07.25 [Oryza sativa (japonica
MCGGAVIADFVPAGARRPDGSSADVPGSILAGGEVKEKPLAPGRKTAYRGIRRRPWGRWAAEIRDPTKGARVWLGTYATAEEAARAYDVAARDIRGPKAKLNFPPAVGAPQAAAAVEGPGAPKKRRWVAAEESSASSSPLPVTAAGGTESLRERMSGLEAFLGLEDDDVEAWGAVDLILD

SEQ ID NO: 59883 - protein, 143 aa, Glycine max
  peptide (1)..(143): Ceres Seq. ID no. 12611803
  misc_feature (1)..(130): Homolog of NCBI NO: 38175548 NR Description: unknown protein [Oryza sativa (japonica
MGPLGCGDPGPHEGRARLAGHVRHRGGGRARLRRRGARYPRAEGQAQLPARGGRAAGGRGRGGAGGAQEASVGRCRGEFGIFVSPSGHSCRRHGEPAGAHVRAGGVPGAGGRRRGGLGGRRSHLGLGVCRRHVRRPWGTFTDK

SEQ ID NO: 59884 - DNA, 1104 bp, Glycine max
  misc_feature (1)..(1104): Ceres Seq. ID no. 13595647
aaaaaggacctatatgttaggccataactagcctgcactttgaaatctatttcagtttgaattttgaaagtgagtgtggcgtaccgtgtacgtatctgcagaaagtgaatgaatggtaatgggggaagaagggtgcaaggtatgtgttacaggaggcagtggttacattggttcctggctcatcaagaagctactggccaagggctacacagttcatgcaactctcagagacttgaagaatgagtcaaaggttggcctcttaaagagccttccacaatcagaaggaaaactggtgctgtttgaagctgatatttacaacccaaatgattttgaccttgcaattgaaggctgcaagtttgtgtttcatgttgctactcccatgatccatgaacctggctcccagggctatacttattcaaagacactgtcggagagacatgtgctgagctacgggaacgaagaaaatggtggaggaatggaggtggtaacactcacttgtggactagtgggaggtgacacccttctatcttctacacccgctagcggagtagtttgtatcgctcagatcatgcagaatgaaagggcgtacatatcactcaagttcctaaaggaattgttggggaaaattcctcttgtacacgttgatgatgtctgtgaagctcatattttctgcatggaaagcacctcgatcagtggaagattcttgtgtgcaagttcatatatttcattagaagagatggctaatcattacgctcttcattatccagaattcaatgtgaaacaagaatatgaagatgggctgaagaaggatatcaagtgggcctcaacaaagctgtgtgacaaaggctttgtatacaaatatgacgccaagatgctattggatgattgtatcaaatgtgcaagaaggatgggtgatatctagtctccatctacacccttgattgctatatctgcttgtaatacaatatgcaccaggcgtctgcctcatttcttcttgctccctatcttactgttgttactattgttttcgcaattatgattaaaaaataaactcggcttcaaatcaattagaaaagtgaattgactgcgactatgagagtttcc

SEQ ID NO: 59885 - protein, 269 aa, Glycine max
  peptide (1)..(269): Ceres Seq. ID no. 13595648
  misc_feature (10)..(87): Pfam Name: NAD dependent epimerase/dehydratase family Pfam Description: NAD dependent epimerase/dehydratase family
  misc_feature (3)..(93): Homolog of NCBI NO: 1888485 NR Description: dihydroflavonol 4-reductase [Vitis vinifera]
  misc_feature (99)..(267): Homolog of NCBI NO: 1888485 NR Description: dihydroflavonol 4-reductase [Vitis vinifera]
  misc_feature (10)..(111): Homolog of NCBI NO: 33146536 NR Description: putative NADPH HC toxin reductase
  misc_feature (99)..(267): Homolog of NCBI NO: 33146536 NR Description: putative NADPH HC toxin reductase
  misc_feature (8)..(97): Homolog of NCBI NO: 34393584 NR Description: putative NADPH HC toxin reductase
  misc_feature (96)..(267): Homolog of NCBI NO: 34393584 NR Description: putative NADPH HC toxin reductase
  misc_feature (9)..(99): Homolog of NCBI NO: 33146535 NR Description: putative NADPH HC toxin reductase
  misc_feature (9)..(99): Homolog of NCBI NO: 33146534 NR Description: putative NADPH HC toxin reductase
  misc_feature (98)..(269): Homolog of NCBI NO: 33146535 NR Description: putative NADPH HC toxin reductase
  misc_feature (98)..(269): Homolog of NCBI NO: 33146534 NR Description: putative NADPH HC toxin reductase
MVMGEEGCKVCVTGGSGYIGSWLIKKLLAKGYTVHATLRDLKNESKVGLLKSLPQSEGKLVLFEADIYNPNDFDLAIEGCKFVFHVATPMIHEPGSQGYTYSKTLSERHVLSYGNEENGGGMEVVTLTCGLVGGDTLLSSTPASGVVCIAQIMQNERAYISLKFLKELLGKIPLVHVDDVCEAHIFCMESTSISGRFLCASSYISLEEMANHYALHYPEFNVKQEYEDGLKKDIKWASTKLCDKGFVYKYDAKMLLDDCIKCARRMGDI

SEQ ID NO: 59886 - protein, 267 aa, Glycine max
  peptide (1)..(267): Ceres Seq. ID no. 13595649
  misc_feature (8)..(85): Pfam Name: NAD dependent epimerase/dehydratase family Pfam Description: NAD dependent epimerase/dehydratase family
  misc_feature (1)..(91): Homolog of NCBI NO: 1888485 NR Description: dihydroflavonol 4-reductase [Vitis vinifera]
  misc_feature (97)..(265): Homolog of NCBI NO: 1888485 NR Description: dihydroflavonol 4-reductase [Vitis vinifera]
  misc_feature (8)..(109): Homolog of NCBI NO: 33146536 NR Description: putative NADPH HC toxin reductase
  misc_feature (97)..(265): Homolog of NCBI NO: 33146536 NR Description: putative NADPH HC toxin reductase
  misc_feature (6)..(95): Homolog of NCBI NO: 34393584 NR Description: putative NADPH HC toxin reductase
  misc_feature (94)..(265): Homolog of NCBI NO: 34393584 NR Description: putative NADPH HC toxin reductase
  misc_feature (7)..(97): Homolog of NCBI NO: 33146535 NR Description: putative NADPH HC toxin reductase
  misc_feature (7)..(97): Homolog of NCBI NO: 33146534 NR Description: putative NADPH HC toxin reductase
  misc_feature (96)..(267): Homolog of NCBI NO: 33146535 NR Description: putative NADPH HC toxin reductase
  misc_feature (96)..(267): Homolog of NCBI NO: 33146534 NR Description: putative NADPH HC toxin reductase
MGEEGCKVCVTGGSGYIGSWLIKKLLAKGYTVHATLRDLKNESKVGLLKSLPQSEGKLVLFEADIYNPNDFDLAIEGCKFVFHVATPMIHEPGSQGYTYSKTLSERHVLSYGNEENGGGMEVVTLTCGLVGGDTLLSSTPASGVVCIAQIMQNERAYISLKFLKELLGKIPLVHVDDVCEAHIFCMESTSISGRFLCASSYISLEEMANHYALHYPEFNVKQEYEDGLKKDIKWASTKLCDKGFVYKYDAKMLLDDCIKCARRMGDI

SEQ ID NO: 59887 - protein, 180 aa, Glycine max
  peptide (1)..(180): Ceres Seq. ID no. 13595650
  misc_feature (10)..(180): Homolog of NCBI NO: 4588781 NR Description: dihydroflavonol reductase [Malus x domestica]
  misc_feature (4)..(172): Homolog of NCBI NO: 6689826 NR Description: DFR-like protein [Arabidopsis thaliana]
  misc_feature (10)..(180): Homolog of NCBI NO: 28629488 NR Description: putative dihydroflavonol 4-reductase [Pyrus
  misc_feature (10)..(180): Homolog of NCBI NO: 28629484 NR Description: dihydroflavonol 4-reductase [Pyrus communis]
  misc_feature (10)..(178): Homolog of NCBI NO: 1888485 NR Description: dihydroflavonol 4-reductase [Vitis vinifera]
  misc_feature (1)..(22): Homolog of NCBI NO: 33146536 NR Description: putative NADPH HC toxin reductase
  misc_feature (10)..(178): Homolog of NCBI NO: 33146536 NR Description: putative NADPH HC toxin reductase
  misc_feature (7)..(178): Homolog of NCBI NO: 34393584 NR Description: putative NADPH HC toxin reductase
  misc_feature (9)..(180): Homolog of NCBI NO: 33146535 NR Description: putative NADPH HC toxin reductase
  misc_feature (9)..(180): Homolog of NCBI NO: 33146534 NR Description: putative NADPH HC toxin reductase
MIHEPGSQGYTYSKTLSERHVLSYGNEENGGGMEVVTLTCGLVGGDTLLSSTPASGVVCIAQIMQNERAYISLKFLKELLGKIPLVHVDDVCEAHIFCMESTSISGRFLCASSYISLEEMANHYALHYPEFNVKQEYEDGLKKDIKWASTKLCDKGFVYKYDAKMLLDDCIKCARRMGDI

SEQ ID NO: 59888 - DNA, 992 bp, Glycine max
  misc_feature (1)..(992): Ceres Seq. ID no. 13595658
agaacatcctaatcgaaaaaccaagctcctcctcctccacaggaaaagcaacagcgcagcgcggcttcactggtttcgccctcaatttcgagagcgagtcttggaaggccttccatggctcagccgtcgctgctcctcggctctccggcatcgatcgtcctcctccttctctccttcttccaagggccggtagtgagcgccatcacgttcaccttcgccaaccggtgcacggacacggtgtggcccgggctgctctcgggctccacctcgccgccgctggaaaccaccggcttcgcgctctcgccgggccagtcgcgctcaatctacgggcccaccgggtggtcgggccgcttctgggcgcgctctggctgtaatttcaacggcggcaagggcacctgcgtcacgggggactgcggctccggcgagatagagtgccgcggcgccggggccaccccgcccgccacgctcgcggagttcaccctcgacggcgacggcgggaaggacttctacgacgtcagcctcgtcgacggctacaacctgcccatgctggtgcagccgtccgcgcctgggtgccccgacaccgggtgcctcgtcgacctcaacgagcgctgcccctcggagctccgctccggcggcggcctcgcctgccgcagcgcctgcgaggccttcggcaagcccgagttctgctgcaacggcgcctacgggaaccctgacacgtgccacccctcccagtactcgcagctcttcaagtcggcgtgccccaagtcctacagctacgcctacgacgacgccacctccaccttcacctgcaaccacaccgattacaccattaccttctgcccgcagtccaatccttacaggtacctacctctgaatagtttctgatgctatgacagtgcaatctagttgaaatcatagtgttgcagatctgaatctgattcaactcaacaatgatattttctctgggctagaaatataatgagattttgatt

SEQ ID NO: 59889 - protein, 256 aa, Glycine max
  peptide (1)..(256): Ceres Seq. ID no. 13595659
  misc_feature (36)..(243): Pfam Name: Thaumatin family Pfam Description: Thaumatin family
  misc_feature (11)..(246): Homolog of NCBI NO: 4105697 NR Description: thaumatin-like protein [Arabidopsis thaliana]
  misc_feature (11)..(246): Homolog of NCBI NO: 15222875 NR Description: thaumatin family [Arabidopsis thaliana]
  misc_feature (18)..(246): Homolog of NCBI NO: 25296204 NR Description: hypothetical protein T20H2.19 [imported] -
  misc_feature (15)..(247): Homolog of NCBI NO: 15233437 NR Description: thaumatin family [Arabidopsis thaliana]
  misc_feature (29)..(243): Homolog of NCBI NO: 37531042 NR Description: putative thaumatin-like protein
  misc_feature (15)..(243): Homolog of NCBI NO: 2262099 NR Description: thaumatin isolog [Arabidopsis thaliana]
  misc_feature (31)..(245): Homolog of NCBI NO: 7442168 NR Description: pathogenesis-related protein F20M13.220 -
  misc_feature (15)..(245): Homolog of NCBI NO: 18420282 NR Description: thaumatin-like protein, putative [Arabidopsis
  misc_feature (15)..(245): Homolog of NCBI NO: 21592749 NR Description: putative thaumatin-like protein [Arabidopsis
  misc_feature (7)..(243): Homolog of NCBI NO: 15233738 NR Description: thaumatin family [Arabidopsis thaliana]
MAQPSLLLGSPASIVLLLLSFFQGPVVSAITFTFANRCTDTVWPGLLSGSTSPPLETTGFALSPGQSRSIYGPTGWSGRFWARSGCNFNGGKGTCVTGDCGSGEIECRGAGATPPATLAEFTLDGDGGKDFYDVSLVDGYNLPMLVQPSAPGCPDTGCLVDLNERCPSELRSGGGLACRSACEAFGKPEFCCNGAYGNPDTCHPSQYSQLFKSACPKSYSYAYDDATSTFTCNHTDYTITFCPQSNPYRYLPLNSF

SEQ ID NO: 59890 - DNA, 1572 bp, Glycine max
  misc_feature (1)..(1572): Ceres Seq. ID no. 13582332
gaacacaagacaacaacaacaaatcttaagttggctttcttctcttttgttcgaccgtgtcacgtgcgagaacaatgagaattgccattttccactccctatctaaacctttgaatcttattcgattcaatttcatcacaacttaaataccatcgcatgttcattcattgatggtcatgttcttcccttaaaccttcctcaaaaagtcaaaattgaaaacctttctctctcttaactccttctcgtcatcgccccaaagcttctcaacaacatgacggataatgaagaaccgatgatcgtacctggatcgatgtctgaattagcgtttaataaatataagcgatggcaatggtggtgtcttgtgacactcagcatagcctttcttatagttggccaatctgctgctgttatccttggaagattttattatgatcagggtggaaatagtaaatggatggctactctagttcaaactgctgccttcccgatcttgttcattccattatttacaattccttcacctccagaggcttcaacttctgcttcacctcccatcaaaattattcttttgatatattttggtcttggagtcttaattgctgctgacaatatgatgtactccactggactcttatacctctcggcttctacctattcgctgatttgtgcatcacagttagcttttaatgcagttttctcatattttatcaattctcaaaagttcactgccttgattataaactctacagtggttctcactttatctgctgcactccttgctgttaacgaagacacagatgaaccatctggtttctccaagggaaagtacattattggtttcctatgtacccttggagcttctgcagtgtactctcttttgctttccctcatgcagctgacctttgagaaggttctgaagaaggaaacattttctgttgttttggaaatgcaaatctacacatcattcgttgcctctggtgcttctgtcataggcctatttgcaagtggggaatggcgtactttgcatggagaaatggagggttttcagaaaggatatgttgcttatgttatgactttggtttggacttcaatagcctggcaggtatgctctgttggtgttgttggcttgatcttcctagtgtcttctctctactccaatgttataagcacagtttctttagccgtaactcctattgctgctgttatagtttttcatgataagatgaatggggtgaagataatttctatgcttttggctctatggggttttgcctcttatatttatcagaattatcttgatgattcaaagacaagacatgcacaagctgctactaagtcccaaaatgattcttcatgttgagaatattcaatttggtcatacctttgtcgaagtttccttttttctttttagatttaaatccttcagtacaccattcgctagctttagattttatttttccttcagtctcactgaacttgtgaggtagtatagttatgaagttattggtcattctagattattgctctctcatttaagaaatgaaaagtttattggtgtctcggactggttgg

SEQ ID NO: 59891 - protein, 362 aa, Glycine max
  peptide (1)..(362): Ceres Seq. ID no. 13582333
  misc_feature (172)..(351): Pfam Name: Domain of unknown function, DUF250 Pfam Description: Domain of unknown function, DUF250
  misc_feature (39)..(348): Homolog of NCBI NO: 15236799 NR Description: purine permease family [Arabidopsis thaliana]
  misc_feature (23)..(361): Homolog of NCBI NO: 38344291 NR Description: OSJNBa0013K16.23 [Oryza sativa (japonica
  misc_feature (23)..(361): Homolog of NCBI NO: 38605752 NR Description: OSJNBb0016D16.5 [Oryza sativa (japonica
  misc_feature (1)..(362): Homolog of NCBI NO: 30684325 NR Description: purine permease family [Arabidopsis thaliana]
  misc_feature (21)..(353): Homolog of NCBI NO: 15237573 NR Description: purine permease-related [Arabidopsis thaliana]
  misc_feature (21)..(353): Homolog of NCBI NO: 25407443 NR Description: hypothetical protein AT4g08700 [imported] -
  misc_feature (21)..(353): Homolog of NCBI NO: 18413147 NR Description: purine permease family [Arabidopsis thaliana]
  misc_feature (23)..(359): Homolog of NCBI NO: 38605752 NR Description: OSJNBb0016D16.5 [Oryza sativa (japonica
  misc_feature (23)..(357): Homolog of NCBI NO: 38344290 NR Description: OSJNBa0013K16.22 [Oryza sativa (japonica
  misc_feature (1)..(362): Homolog of NCBI NO: 15219436 NR Description: purine permease family [Arabidopsis thaliana]
MTDNEEPMIVPGSMSELAFNKYKRWQWWCLVTLSIAFLIVGQSAAVILGRFYYDQGGNSKWMATLVQTAAFPILFIPLFTIPSPPEASTSASPPIKIILLIYFGLGVLIAADNMMYSTGLLYLSASTYSLICASQLAFNAVFSYFINSQKFTALIINSTVVLTLSAALLAVNEDTDEPSGFSKGKYIIGFLCTLGASAVYSLLLSLMQLTFEKVLKKETFSVVLEMQIYTSFVASGASVIGLFASGEWRTLHGEMEGFQKGYVAYVMTLVWTSIAWQVCSVGVVGLIFLVSSLYSNVISTVSLAVTPIAAVIVFHDKMNGVKIISMLLALWGFASYIYQNYLDDSKTRHAQAATKSQNDSSC

SEQ ID NO: 59892 - protein, 355 aa, Glycine max
  peptide (1)..(355): Ceres Seq. ID no. 13582334
  misc_feature (165)..(344): Pfam Name: Domain of unknown function, DUF250 Pfam Description: Domain of unknown function, DUF250
  misc_feature (32)..(341): Homolog of NCBI NO: 15236799 NR Description: purine permease family [Arabidopsis thaliana]
  misc_feature (16)..(354): Homolog of NCBI NO: 38344291 NR Description: OSJNBa0013K16.23 [Oryza sativa (japonica
  misc_feature (16)..(354): Homolog of NCBI NO: 38605752 NR Description: OSJNBb0016D16.5 [Oryza sativa (japonica
  misc_feature (1)..(355): Homolog of NCBI NO: 30684325 NR Description: purine permease family [Arabidopsis thaliana]
  misc_feature (14)..(346): Homolog of NCBI NO: 15237573 NR Description: purine permease-related [Arabidopsis thaliana]
  misc_feature (14)..(346): Homolog of NCBI NO: 25407443 NR Description: hypothetical protein AT4g08700 [imported] -
  misc_feature (14)..(346): Homolog of NCBI NO: 18413147 NR Description: purine permease family [Arabidopsis thaliana]
  misc_feature (16)..(352): Homolog of NCBI NO: 38605752 NR Description: OSJNBb0016D16.5 [Oryza sativa (japonica
  misc_feature (16)..(350): Homolog of NCBI NO: 38344290 NR Description: OSJNBa0013K16.22 [Oryza sativa (japonica
  misc_feature (1)..(355): Homolog of NCBI NO: 15219436 NR Description: purine permease family [Arabidopsis thaliana]
MIVPGSMSELAFNKYKRWQWWCLVTLSIAFLIVGQSAAVILGRFYYDQGGNSKWMATLVQTAAFPILFIPLFTIPSPPEASTSASPPIKIILLIYFGLGVLIAADNMMYSTGLLYLSASTYSLICASQLAFNAVFSYFINSQKFTALIINSTVVLTLSAALLAVNEDTDEPSGFSKGKYIIGFLCTLGASAVYSLLLSLMQLTFEKVLKKETFSVVLEMQIYTSFVASGASVIGLFASGEWRTLHGEMEGFQKGYVAYVMTLVWTSIAWQVCSVGVVGLIFLVSSLYSNVISTVSLAVTPIAAVIVFHDKMNGVKIISMLLALWGFASYIYQNYLDDSKTRHAQAATKSQNDSSC

SEQ ID NO: 59893 - protein, 349 aa, Glycine max
  peptide (1)..(349): Ceres Seq. ID no. 13582335
  misc_feature (159)..(338): Pfam Name: Domain of unknown function, DUF250 Pfam Description: Domain of unknown function, DUF250
  misc_feature (26)..(335): Homolog of NCBI NO: 15236799 NR Description: purine permease family [Arabidopsis thaliana]
  misc_feature (10)..(348): Homolog of NCBI NO: 38344291 NR Description: OSJNBa0013K16.23 [Oryza sativa (japonica
  misc_feature (10)..(348): Homolog of NCBI NO: 38605752 NR Description: OSJNBb0016D16.5 [Oryza sativa (japonica
  misc_feature (1)..(349): Homolog of NCBI NO: 30684325 NR Description: purine permease family [Arabidopsis thaliana]
  misc_feature (8)..(340): Homolog of NCBI NO: 15237573 NR Description: purine permease-related [Arabidopsis thaliana]
  misc_feature (8)..(340): Homolog of NCBI NO: 25407443 NR Description: hypothetical protein AT4g08700 [imported] -
  misc_feature (8)..(340): Homolog of NCBI NO: 18413147 NR Description: purine permease family [Arabidopsis thaliana]
  misc_feature (10)..(346): Homolog of NCBI NO: 38605752 NR Description: OSJNBb0016D16.5 [Oryza sativa (japonica
  misc_feature (10)..(344): Homolog of NCBI NO: 38344290 NR Description: OSJNBa0013K16.22 [Oryza sativa (japonica
  misc_feature (1)..(349): Homolog of NCBI NO: 15219436 NR Description: purine permease family [Arabidopsis thaliana]
MSELAFNKYKRWQWWCLVTLSIAFLIVGQSAAVILGRFYYDQGGNSKWMATLVQTAAFPILFIPLFTIPSPPEASTSASPPIKIILLIYFGLGVLIAADNMMYSTGLLYLSASTYSLICASQLAFNAVFSYFINSQKFTALIINSTVVLTLSAALLAVNEDTDEPSGFSKGKYIIGFLCTLGASAVYSLLLSLMQLTFEKVLKKETFSVVLEMQIYTSFVASGASVIGLFASGEWRTLHGEMEGFQKGYVAYVMTLVWTSIAWQVCSVGVVGLIFLVSSLYSNVISTVSLAVTPIAAVIVFHDKMNGVKIISMLLALWGFASYIYQNYLDDSKTRHAQAATKSQNDSSC

SEQ ID NO: 59894 - DNA, 695 bp, Glycine max
  misc_feature (1)..(695): Ceres Seq. ID no. 12611808
gccacacacacgcacacacaccagattcatcaagaaaacctcgagaggatcatggccggcgtgaacaccagtgtggtcggcctcaagcccgccgcggcggtgccgcagtccgcctcgccggcggcggcaaagcgcgtgcaggtcgccccggccaaggaccggcggtcggcgcttctcggcctggcggccgtcttcgccgtcacggccgcctccgccgggtcggccagggcaagcgtcttcgacgagtacctcgagaagagcaagctcaacaaggagctgaacgacaagaagagggcggcgacgagcggcgccaacttcgcgcgcgcctacaccgtccagttcggcagctgcaagttcccctacaacttcaccggctgccaggacctcgccaagcagaagaaagtcccgttcatcaccgacgacctggagatcgagtgcgaggggaaggagaagttcaagtgcggatccaacgtcttctggaaatggtgaagctggtcgatctgccaggcaatatggcgagtgctgatgtatgtcagcgcaccgcgtgtacctagatgtccaaactgcgcaagtgtttcgactgtgaagttatcgtcgctgtaattttatcatcatcaagtggaattctgttttcacctggatatggatatatgcatgttagcatgtatcttgtcacatccagaacgcgaacattc

SEQ ID NO: 59895 - protein, 183 aa, Glycine max
  peptide (1)..(183): Ceres Seq. ID no. 12611809
HTHAHTPDSSRKPREDHGRREHQCGRPQARRGGAAVRLAGGGKARAGRPGQGPAVGASRPGGRLRRHGRLRRVGQGKRLRRVPREEQAQQGAERQEEGGDERRQLRARLHRPVRQLQVPLQLHRLPGPRQAEESPVHHRRPGDRVRGEGEVQVRIQRLLEMVKLVDLPGNMASADVCQRTACT

SEQ ID NO: 59896 - protein, 162 aa, Glycine max
  peptide (1)..(162): Ceres Seq. ID no. 12611810
  misc_feature (25)..(162): Pfam Name: Photosystem I reaction centre subunit N (PSAN or PSI-N) Pfam Description: Photosystem I reaction centre subunit N (PSAN
  misc_feature (79)..(127): Homolog of NCBI NO: 485082 NR Description: photosystem I 9K protein - rice (strain
  misc_feature (36)..(156): Homolog of NCBI NO: 12744797 NR Description: PsaN precursor [Chlamydomonas reinhardtii]
  misc_feature (26)..(156): Homolog of NCBI NO: 11134150 NR Description: Photosystem I reaction centre subunit N,
  misc_feature (21)..(162): Homolog of NCBI NO: 15237593 NR Description: photosystem I reaction center subunit PSI-N
  misc_feature (71)..(162): Homolog of NCBI NO: 3914466 NR Description: Photosystem I reaction centre subunit N,
  misc_feature (21)..(162): Homolog of NCBI NO: 28629385 NR Description: photosystem I-N subunit [Phaseolus vulgaris]
  misc_feature (18)..(162): Homolog of NCBI NO: 400879 NR Description: Photosystem I reaction centre subunit N,
ATHTHTHQIHQENLERIMAGVNTSVVGLKPAAAVPQSASPAAAKRVQVAPAKDRRSALLGLAAVFAVTAASAGSARASVFDEYLEKSKLNKELNDKKRAATSGANFARAYTVQFGSCKFPYNFTGCQDLAKQKKVPFITDDLEIECEGKEKFKCGSNVFWKW

SEQ ID NO: 59897 - protein, 145 aa, Glycine max
  peptide (1)..(145): Ceres Seq. ID no. 12611811
  misc_feature (8)..(145): Pfam Name: Photosystem I reaction centre subunit N (PSAN or PSI-N) Pfam Description: Photosystem I reaction centre subunit N (PSAN
  misc_feature (62)..(110): Homolog of NCBI NO: 485082 NR Description: photosystem I 9K protein - rice (strain
  misc_feature (19)..(139): Homolog of NCBI NO: 12744797 NR Description: PsaN precursor [Chlamydomonas reinhardtii]
  misc_feature (9)..(139): Homolog of NCBI NO: 11134150 NR Description: Photosystem I reaction centre subunit N,
  misc_feature (4)..(145): Homolog of NCBI NO: 15237593 NR Description: photosystem I reaction center subunit PSI-N
  misc_feature (54)..(145): Homolog of NCBI NO: 3914466 NR Description: Photosystem I reaction centre subunit N,
  misc_feature (4)..(145): Homolog of NCBI NO: 28629385 NR Description: photosystem I-N subunit [Phaseolus vulgaris]
  misc_feature (1)..(145): Homolog of NCBI NO: 400879 NR Description: Photosystem I reaction centre subunit N,
MAGVNTSVVGLKPAAAVPQSASPAAAKRVQVAPAKDRRSALLGLAAVFAVTAASAGSARASVFDEYLEKSKLNKELNDKKRAATSGANFARAYTVQFGSCKFPYNFTGCQDLAKQKKVPFITDDLEIECEGKEKFKCGSNVFWKW

SEQ ID NO: 59898 - DNA, 803 bp, Glycine max
  misc_feature (1)..(803): Ceres Seq. ID no. 13595582
acatcctaatcgaaaaaaaacctatttagtgtaagaaatagctaggttccacacagctgggttttgtactaaggcaagccattcattcggtgtgacagtccctgagactcgagagactgttgccgccggtattaattctcctcctcctcctccttcttcttcttctccccaaaaccctaatttcttctattcaccaaatcatattcatggctgaacacaacgacccaccccaagaacccacattgccctccaagcgcatgtccgatcccgacctccaagacctcccttccaaaatccccaagctcgacctcaaagaaacactacccactgcaaacgacaacgacctccaaaacgacgatgaagatgacgacgacaacgacgacgacgaggaggagcaggaggataaccgaaagggaaaggggattatgcgtgacgacaagggcaaagggaaaatgattgtagaagaagaagacgacgacgacgatgattccgacgaggatagtgctagcgacgacgacggaagcgatttctctaacgactcgctcacggaggtcgatttgaataacattctgccgtccaggactcgggggcggacggtgagttccggagtgcacattgccggtgactcggggaatgctgctgctgccgtggccgcgggcattgacgacgaagatagcgacagcgacgatagcgatgcttgaattcctgccgaggttagtgagggtttgggaggaaacggaaatggattagttctgttgttgactatgagaaagaagtgtttctttagatttttctttgagccc

SEQ ID NO: 59899 - protein, 164 aa, Glycine max
  peptide (1)..(164): Ceres Seq. ID no. 13595583
  misc_feature (46)..(115): Pfam Name: Mpp10 protein Pfam Description: Mpp10 protein
  misc_feature (6)..(164): Homolog of NCBI NO: 15925620 NR Description: Clumping factor B [Staphylococcus aureus subsp.
  misc_feature (43)..(117): Homolog of NCBI NO: 23481405 NR Description: hypothetical protein [Plasmodium yoelii yoelii]
  misc_feature (43)..(117): Homolog of NCBI NO: 23509612 NR Description: hypothetical protein [Plasmodium falciparum 3D7]
  misc_feature (9)..(111): Homolog of NCBI NO: 35210492 NR Description: aspartic acid-rich protein aspolin1 [Theragra
  misc_feature (6)..(164): Homolog of NCBI NO: 3393011 NR Description: Clumping factor B [Staphylococcus aureus]
  misc_feature (43)..(117): Homolog of NCBI NO: 23481405 NR Description: hypothetical protein [Plasmodium yoelii yoelii]
  misc_feature (37)..(121): Homolog of NCBI NO: 23509612 NR Description: hypothetical protein [Plasmodium falciparum 3D7]
  misc_feature (43)..(163): Homolog of NCBI NO: 35210494 NR Description: aspartic acid-rich protein aspolin2 [Theragra
  misc_feature (48)..(107): Homolog of NCBI NO: 15215676 NR Description: At1g12830/F13K23_6 [Arabidopsis thaliana]
  misc_feature (48)..(164): Homolog of NCBI NO: 15222082 NR Description: peroxisomal targeting signal type 2 receptor
MAEHNDPPQEPTLPSKRMSDPDLQDLPSKIPKLDLKETLPTANDNDLQNDDEDDDDNDDDEEEQEDNRKGKGIMRDDKGKGKMIVEEEDDDDDDSDEDSASDDDGSDFSNDSLTEVDLNNILPSRTRGRTVSSGVHIAGDSGNAAAAVAAGIDDEDSDSDDSDA

SEQ ID NO: 59900 - protein, 147 aa, Glycine max
  peptide (1)..(147): Ceres Seq. ID no. 13595584
  misc_feature (29)..(98): Pfam Name: Mpp10 protein Pfam Description: Mpp10 protein
  misc_feature (1)..(147): Homolog of NCBI NO: 15925620 NR Description: Clumping factor B [Staphylococcus aureus subsp.
  misc_feature (26)..(100): Homolog of NCBI NO: 23481405 NR Description: hypothetical protein [Plasmodium yoelii yoelii]
  misc_feature (26)..(100): Homolog of NCBI NO: 23509612 NR Description: hypothetical protein [Plasmodium falciparum 3D7]
  misc_feature (1)..(94): Homolog of NCBI NO: 35210492 NR Description: aspartic acid-rich protein aspolin1 [Theragra
  misc_feature (1)..(147): Homolog of NCBI NO: 3393011 NR Description: Clumping factor B [Staphylococcus aureus]
  misc_feature (26)..(100): Homolog of NCBI NO: 23481405 NR Description: hypothetical protein [Plasmodium yoelii yoelii]
  misc_feature (20)..(104): Homolog of NCBI NO: 23509612 NR Description: hypothetical protein [Plasmodium falciparum 3D7]
  misc_feature (26)..(146): Homolog of NCBI NO: 35210494 NR Description: aspartic acid-rich protein aspolin2 [Theragra
  misc_feature (31)..(90): Homolog of NCBI NO: 15215676 NR Description: At1g12830/F13K23_6 [Arabidopsis thaliana]
  misc_feature (31)..(147): Homolog of NCBI NO: 15222082 NR Description: peroxisomal targeting signal type 2 receptor
MSDPDLQDLPSKIPKLDLKETLPTANDNDLQNDDEDDDDNDDDEEEQEDNRKGKGIMRDDKGKGKMIVEEEDDDDDDSDEDSASDDDGSDFSNDSLTEVDLNNILPSRTRGRTVSSGVHIAGDSGNAAAAVAAGIDDEDSDSDDSDA

SEQ ID NO: 59901 - protein, 91 aa, Glycine max
  peptide (1)..(91): Ceres Seq. ID no. 13595585
  misc_feature (1)..(69): Pfam Name: Aldose 1-epimerase Pfam Description: Aldose 1-epimerase
  misc_feature (1)..(91): Homolog of NCBI NO: 15925620 NR Description: Clumping factor B [Staphylococcus aureus subsp.
  misc_feature (1)..(44): Homolog of NCBI NO: 23481405 NR Description: hypothetical protein [Plasmodium yoelii yoelii]
  misc_feature (1)..(44): Homolog of NCBI NO: 23509612 NR Description: hypothetical protein [Plasmodium falciparum 3D7]
  misc_feature (1)..(38): Homolog of NCBI NO: 35210492 NR Description: aspartic acid-rich protein aspolin1 [Theragra
  misc_feature (1)..(91): Homolog of NCBI NO: 3393011 NR Description: Clumping factor B [Staphylococcus aureus]
  misc_feature (1)..(44): Homolog of NCBI NO: 23481405 NR Description: hypothetical protein [Plasmodium yoelii yoelii]
  misc_feature (1)..(48): Homolog of NCBI NO: 23509612 NR Description: hypothetical protein [Plasmodium falciparum 3D7]
  misc_feature (1)..(90): Homolog of NCBI NO: 35210494 NR Description: aspartic acid-rich protein aspolin2 [Theragra
  misc_feature (1)..(34): Homolog of NCBI NO: 15215676 NR Description: At1g12830/F13K23_6 [Arabidopsis thaliana]
  misc_feature (1)..(91): Homolog of NCBI NO: 15222082 NR Description: peroxisomal targeting signal type 2 receptor
MRDDKGKGKMIVEEEDDDDDDSDEDSASDDDGSDFSNDSLTEVDLNNILPSRTRGRTVSSGVHIAGDSGNAAAAVAAGIDDEDSDSDDSDA

SEQ ID NO: 59902 - DNA, 1529 bp, Glycine max
  misc_feature (1)..(1529): Ceres Seq. ID no. 13595665
aataacttagatgggttgggaatgagggtagtggcgagacagtgagagggtggaaatggcggctgtggcagcgagaagcacaggcagcgttggtgttggtgctgtcatcttcatctcagtcgctctcaccacttatttcatctcgaaaaagaagaagaagaagaagaaggaatccaggaagaagaagaagggactggtggacgccataggcaacactcctttgattcggatcaacagcctctccgccgccactggttgccaaattctcggcaagtgcgagttcttaaaccccggaggcagcgtcaaagaccgcgttgctgttcaaattattcaagaggctctagaatctggccagctacgtccaggtggaatagtcactgaagggagtgctggaagcactgccattagcattgccactgttgctcctgcctacgggtgcaggacccatgtggttataccagatgatgctgccattgagaagtctcaaatacttgaagcccttggggcaactgttgaaagagtgagaccggtgtccatcacccacaaagaccattttgtcaatattgcaagaagacgggcatctgaagcaaatgagtttgcattgaagcgtagaaattcacaacaattgaatggcaaggaggacaccgagaaaataaatggttatgaatctaatggatgcaattacagctctctgtttcctgaagattgtcaaggtggcttttttgctgatcagtttgagaacctagcgaacttcagggcccattatgagggtacagggcctgagatttgggaacagaccaatggaaagttagatgcatttgttgcagcagcgggtaccggtggtactgtggctggtgtttctaagtttcttcaggaaaagaatccaaacatcaagtgcttcctcttagatcctcctggctctggtttgtttaataaggtaactaggggagtgatgtacaccaaagaggaggcagaaggaagaagactcaagaatccatttgacactataacagaaggaattggaattaacaggataacaaggaattttgcaatggcaaaacttgatggggcctttagaggcaccgatagggaagctgttgaaatgtctaggtttcttttgaagaacgatggtctcttccttgggagttcttctgcaatgaactgtgttggagcagttagagtagcgcaagcaattggcactggtcacacaattgtaaccattctctgcgacagtggaatgagacatttgagcaaattctatgatgctgaatacttgtctcagcttggtttgacaccgaaagcaattggtttggagttcttaggcgtcaagtgagaaggtttcttcagagtttaaaattttaatgccactgccttggatgagagtggccacctagaagttagaactgagggtgttgtagttattgatatagaagatattacacttattaatacaatgttttggggatattacatggctcattctttgttagtctttcatggtttattgatttattaactaggccaagatg

SEQ ID NO: 59903 - protein, 425 aa, Glycine max
  peptide (1)..(425): Ceres Seq. ID no. 13595666
  misc_feature (70)..(393): Pfam Name: Pyridoxal-phosphate dependent enzyme Pfam Description: Pyridoxal-phosphate dependent enzyme
  misc_feature (44)..(180): Homolog of NCBI NO: 22964496 NR Description: hypothetical protein [Rhodopseudomonas palustris]
  misc_feature (201)..(412): Homolog of NCBI NO: 22964496 NR Description: hypothetical protein [Rhodopseudomonas palustris]
  misc_feature (21)..(177): Homolog of NCBI NO: 6321449 NR Description: Hypothetical ORF; Ygr012wp [Saccharomyces
  misc_feature (223)..(402): Homolog of NCBI NO: 6321449 NR Description: Hypothetical ORF; Ygr012wp [Saccharomyces
  misc_feature (46)..(175): Homolog of NCBI NO: 40744670 NR Description: hypothetical protein AN1513.2 [Aspergillus
  misc_feature (221)..(402): Homolog of NCBI NO: 40744670 NR Description: hypothetical protein AN1513.2 [Aspergillus
  misc_feature (12)..(176): Homolog of NCBI NO: 19114255 NR Description: putative cysteine synthase [Schizosaccharomyces
  misc_feature (200)..(422): Homolog of NCBI NO: 19114255 NR Description: putative cysteine synthase [Schizosaccharomyces
  misc_feature (9)..(425): Homolog of NCBI NO: 8778327 NR Description: F14J16.13 [Arabidopsis thaliana]
  misc_feature (9)..(425): Homolog of NCBI NO: 15222794 NR Description: pyridoxal-5'-phosphate-dependent enzyme, beta
MAAVAARSTGSVGVGAVIFISVALTTYFISKKKKKKKKESRKKKKGLVDAIGNTPLIRINSLSAATGCQILGKCEFLNPGGSVKDRVAVQIIQEALESGQLRPGGIVTEGSAGSTAISIATVAPAYGCRTHVVIPDDAAIEKSQILEALGATVERVRPVSITHKDHFVNIARRRASEANEFALKRRNSQQLNGKEDTEKINGYESNGCNYSSLFPEDCQGGFFADQFENLANFRAHYEGTGPEIWEQTNGKLDAFVAAAGTGGTVAGVSKFLQEKNPNIKCFLLDPPGSGLFNKVTRGVMYTKEEAEGRRLKNPFDTITEGIGINRITRNFAMAKLDGAFRGTDREAVEMSRFLLKNDGLFLGSSSAMNCVGAVRVAQAIGTGHTIVTILCDSGMRHLSKFYDAEYLSQLGLTPKAIGLEFLGVK

SEQ ID NO: 59904 - DNA, 953 bp, Glycine max
  misc_feature (1)..(953): Ceres Seq. ID no. 12611846
ttccaccgcacaaaccaaatcccactcccacaatttccggaatagcaagcgcgccgccgccgcagcggttggccagctctccggggcggggctcaccgccggttcggtgaggctgccgggggccctgccgtctgcggcagggtcggcggtctgctgcagggccgcggcgaaggggaaggaggtgctcagcggcgtgatgttccagccgttcgaggagctcaagggggagctgtccctcgtgccgcagggcaaggaccagtcgctcgccaggcacaagttcgtcgacgagtgcgaggccgccctcaacgagcagatcaatgtggagtacaatgcctcgtacgcgtatcactccctcttcgcctacttcgaccgcgacaacgttgctctcaagggatttgccaagttcttcaaggaatcaagcgatgaggagagggggcacgccgagaagctcatggagtaccagaacaaacgtggaggcagggtgaggctccagtcaattgtcacacccttaacggagttcgaccatcctgagaaaggcgatgccctgtatgcaatggagttggctctagctcttgaaaagctggtgaatgagaaactgcacaacctgcacagtgtagctacgaggtgcaatgatcctcagctgaccgactttgttgagagcgaattccttcaggagcaggttgacgccatcaagaagatctctgagtatgtgtcgcagctgagaagagtcggcaaaggccacggagtgtggcacttcgatcagatgctgcttgaggaggcagcttgaaggacacgatgactacgggcaatggaggatgtaggtgtgatatgtcaagtagtggacagataagccaaccactggatgtggttctgagggatttttgcagtggggtttgtagggtgctataatgctgaactgctctgtgtttgggattgaaataaaacgaagggag

SEQ ID NO: 59905 - protein, 261 aa, Glycine max
  peptide (1)..(261): Ceres Seq. ID no. 12611847
  misc_feature (13)..(261): Homolog of NCBI NO: 29840837 NR Description: Ferritin 2, chloroplast precursor (ZmFer2)
  misc_feature (13)..(261): Homolog of NCBI NO: 82688 NR Description: ferritin 2 precursor (clone FM2) - maize
  misc_feature (13)..(261): Homolog of NCBI NO: 1103630 NR Description: ferritin [Zea mays]
  misc_feature (13)..(261): Homolog of NCBI NO: 29840836 NR Description: Ferritin 1, chloroplast precursor (ZmFer1)
  misc_feature (3)..(261): Homolog of NCBI NO: 82687 NR Description: ferritin 1 precursor (clone FM1) - maize
  misc_feature (18)..(261): Homolog of NCBI NO: 14091661 NR Description: ferritin [Oryza sativa]
  misc_feature (13)..(261): Homolog of NCBI NO: 1103628 NR Description: ferritin [Zea mays]
  misc_feature (18)..(261): Homolog of NCBI NO: 21686528 NR Description: ferritin [Oryza sativa (japonica cultivar-group)]
  misc_feature (13)..(261): Homolog of NCBI NO: 21686526 NR Description: ferritin [Oryza sativa (japonica cultivar-group)]
STAQTKSHSHNFRNSKRAAAAAVGQLSGAGLTAGSVRLPGALPSAAGSAVCCRAAAKGKEVLSGVMFQPFEELKGELSLVPQGKDQSLARHKFVDECEAALNEQINVEYNASYAYHSLFAYFDRDNVALKGFAKFFKESSDEERGHAEKLMEYQNKRGGRVRLQSIVTPLTEFDHPEKGDALYAMELALALEKLVNEKLHNLHSVATRCNDPQLTDFVESEFLQEQVDAIKKISEYVSQLRRVGKGHGVWHFDQMLLEEAA

SEQ ID NO: 59906 - protein, 196 aa, Glycine max
  peptide (1)..(196): Ceres Seq. ID no. 12611848
  misc_feature (1)..(196): Homolog of NCBI NO: 29840837 NR Description: Ferritin 2, chloroplast precursor (ZmFer2)
  misc_feature (1)..(196): Homolog of NCBI NO: 82688 NR Description: ferritin 2 precursor (clone FM2) - maize
  misc_feature (1)..(196): Homolog of NCBI NO: 1103630 NR Description: ferritin [Zea mays]
  misc_feature (1)..(196): Homolog of NCBI NO: 29840836 NR Description: Ferritin 1, chloroplast precursor (ZmFer1)
  misc_feature (1)..(196): Homolog of NCBI NO: 82687 NR Description: ferritin 1 precursor (clone FM1) - maize
  misc_feature (1)..(196): Homolog of NCBI NO: 14091661 NR Description: ferritin [Oryza sativa]
  misc_feature (1)..(196): Homolog of NCBI NO: 1103628 NR Description: ferritin [Zea mays]
  misc_feature (1)..(196): Homolog of NCBI NO: 21686528 NR Description: ferritin [Oryza sativa (japonica cultivar-group)]
  misc_feature (1)..(196): Homolog of NCBI NO: 21686526 NR Description: ferritin [Oryza sativa (japonica cultivar-group)]
MFQPFEELKGELSLVPQGKDQSLARHKFVDECEAALNEQINVEYNASYAYHSLFAYFDRDNVALKGFAKFFKESSDEERGHAEKLMEYQNKRGGRVRLQSIVTPLTEFDHPEKGDALYAMELALALEKLVNEKLHNLHSVATRCNDPQLTDFVESEFLQEQVDAIKKISEYVSQLRRVGKGHGVWHFDQMLLEEAA

SEQ ID NO: 59907 - DNA, 1541 bp, Glycine max
  misc_feature (1)..(1541): Ceres Seq. ID no. 15178260
acttctggactctctagctagcacctctctctattctctccctaagtgactcctacttcataatcagagggcatgcctgaatgtccagagaaagggagagatttgatgagatagggaagaagatcaagagggaaggagatgtttcatctcaaatgggaagaagacacatgttaggccctccaggaaccctaaatactatcaccccttgtgcggcatgtaagttgttgagaagaagatgtgcccaagaatgtcccttttctccatatttctctccccatgagccccaaaaatttgcttctgtccacaaagtttttggtgccagcaacgtctcaaagatgctcatggaagtaccagagtgtcaaagagctgatgcagcaaatagtctagtatatgaggctaatgtgaggctaagagatcctgtgtatggatgcatgggtgcaatttctgctttgcaacagcaagttcaatctttacaagctgaacttaatgcagtgagaggtgaaatacttaaatacaaactcagggaagctaacatgataccctcctctcatgttgcaatgctcccttcatctggggctgtttcaattgctgctccaccgccgccaccaccaccaccaccacctcttcctcctccttctcttcctcttcctcttcctctaacttcttcccctccttccatgtacatccaacaaagggatcccaccacttataccacaatttcaagtgataatatctcctattttgtctaaatttgcagcctaaaaacaattattccatttatttctctcttaagatgcatcaaggtggaataaagtaaagaaaaggagagtattgatactgaatgttgttatgccccggctgtatgcttttattattattattattatcttaattcatatgattaatactcccaaaacttcccctggctatatggttggttaaacttttatttcttgtacaccttttcaagctaattaaagctagctactaccatattggaaattaatttctccttgatcctgtgattaactattgcatttcttccccagcctcaagtacaaccgatgtagacataatgccaacttgatatatatttatgccaattaattttcccttcattattttatgaagcaatggacaataaagggggaaaagaaacttggttttatattccattgatgatatttgatcaatttggtatgtgaaacatagcaaattaagggtgggaggagggaatcactggtattgttggtagaattaattctgcacgtacgtgatgactgtggttcgtgaccataacatttcttagacatgttaatctgtgccactgaagtatctgagtttgctgtctgaagttgcgggagacaaaaggtatgcttgtgaccttcaccatgttgagtcagacttaacttctgagaaatttcgtttatatatatggaaattgggaagcataattttacgtcaagttatctatcatttgtattatacagtcaaaactatgttatattgctaactagattgagaattgagtattctaatgt

SEQ ID NO: 59908 - protein, 222 aa, Glycine max
  peptide (1)..(222): Ceres Seq. ID no. 15178261
  misc_feature (42)..(142): Pfam Name: Protein of unknown function DUF260 Pfam Description: Protein of unknown function DUF260
  misc_feature (38)..(160): Homolog of NCBI NO: 15218746 NR Description: lateral organ boundaries (LOB) domain protein 6
  misc_feature (41)..(176): Homolog of NCBI NO: 34896184 NR Description: contains ESTs C98868(E3203),C98869(E3203)~similar
  misc_feature (31)..(157): Homolog of NCBI NO: 21592574 NR Description: unknown [Arabidopsis thaliana]
  misc_feature (31)..(157): Homolog of NCBI NO: 18402268 NR Description: lateral organ boundaries (LOB) domain family
  misc_feature (41)..(168): Homolog of NCBI NO: 15221679 NR Description: lateral organ boundaries (LOB) domain family
  misc_feature (29)..(176): Homolog of NCBI NO: 34907878 NR Description: P0031D02.27 [Oryza sativa (japonica
  misc_feature (1)..(219): Homolog of NCBI NO: 25408064 NR Description: hypothetical protein At2g30340 [imported] -
  misc_feature (1)..(219): Homolog of NCBI NO: 30684548 NR Description: lateral organ boundaries (LOB) domain protein 13
  misc_feature (1)..(221): Homolog of NCBI NO: 21618113 NR Description: LOB DOMAIN 13 [Arabidopsis thaliana]
  misc_feature (1)..(221): Homolog of NCBI NO: 18405401 NR Description: lateral organ boundaries (LOB) domain family
MSRERERFDEIGKKIKREGDVSSQMGRRHMLGPPGTLNTITPCAACKLLRRRCAQECPFSPYFSPHEPQKFASVHKVFGASNVSKMLMEVPECQRADAANSLVYEANVRLRDPVYGCMGAISALQQQVQSLQAELNAVRGEILKYKLREANMIPSSHVAMLPSSGAVSIAAPPPPPPPPPPLPPPSLPLPLPLTSSPPSMYIQQRDPTTYTTISSDNISYFV

SEQ ID NO: 59909 - protein, 198 aa, Glycine max
  peptide (1)..(198): Ceres Seq. ID no. 15178262
  misc_feature (18)..(118): Pfam Name: Protein of unknown function DUF260 Pfam Description: Protein of unknown function DUF260
  misc_feature (14)..(136): Homolog of NCBI NO: 15218746 NR Description: lateral organ boundaries (LOB) domain protein 6
  misc_feature (17)..(152): Homolog of NCBI NO: 34896184 NR Description: contains ESTs C98868(E3203),C98869(E3203)~similar
  misc_feature (7)..(133): Homolog of NCBI NO: 21592574 NR Description: unknown [Arabidopsis thaliana]
  misc_feature (7)..(133): Homolog of NCBI NO: 18402268 NR Description: lateral organ boundaries (LOB) domain family
  misc_feature (17)..(144): Homolog of NCBI NO: 15221679 NR Description: lateral organ boundaries (LOB) domain family
  misc_feature (5)..(152): Homolog of NCBI NO: 34907878 NR Description: P0031D02.27 [Oryza sativa (japonica
  misc_feature (1)..(195): Homolog of NCBI NO: 25408064 NR Description: hypothetical protein At2g30340 [imported] -
  misc_feature (1)..(195): Homolog of NCBI NO: 30684548 NR Description: lateral organ boundaries (LOB) domain protein 13
  misc_feature (1)..(197): Homolog of NCBI NO: 21618113 NR Description: LOB DOMAIN 13 [Arabidopsis thaliana]
  misc_feature (1)..(197): Homolog of NCBI NO: 18405401 NR Description: lateral organ boundaries (LOB) domain family
MGRRHMLGPPGTLNTITPCAACKLLRRRCAQECPFSPYFSPHEPQKFASVHKVFGASNVSKMLMEVPECQRADAANSLVYEANVRLRDPVYGCMGAISALQQQVQSLQAELNAVRGEILKYKLREANMIPSSHVAMLPSSGAVSIAAPPPPPPPPPPLPPPSLPLPLPLTSSPPSMYIQQRDPTTYTTISSDNISYFV

SEQ ID NO: 59910 - protein, 193 aa, Glycine max
  peptide (1)..(193): Ceres Seq. ID no. 15178263
  misc_feature (13)..(113): Pfam Name: Protein of unknown function DUF260 Pfam Description: Protein of unknown function DUF260
  misc_feature (9)..(131): Homolog of NCBI NO: 15218746 NR Description: lateral organ boundaries (LOB) domain protein 6
  misc_feature (12)..(147): Homolog of NCBI NO: 34896184 NR Description: contains ESTs C98868(E3203),C98869(E3203)~similar
  misc_feature (2)..(128): Homolog of NCBI NO: 21592574 NR Description: unknown [Arabidopsis thaliana]
  misc_feature (2)..(128): Homolog of NCBI NO: 18402268 NR Description: lateral organ boundaries (LOB) domain family
  misc_feature (12)..(139): Homolog of NCBI NO: 15221679 NR Description: lateral organ boundaries (LOB) domain family
  misc_feature (1)..(147): Homolog of NCBI NO: 34907878 NR Description: P0031D02.27 [Oryza sativa (japonica
  misc_feature (1)..(190): Homolog of NCBI NO: 25408064 NR Description: hypothetical protein At2g30340 [imported] -
  misc_feature (1)..(190): Homolog of NCBI NO: 30684548 NR Description: lateral organ boundaries (LOB) domain protein 13
  misc_feature (1)..(192): Homolog of NCBI NO: 21618113 NR Description: LOB DOMAIN 13 [Arabidopsis thaliana]
  misc_feature (1)..(192): Homolog of NCBI NO: 18405401 NR Description: lateral organ boundaries (LOB) domain family
MLGPPGTLNTITPCAACKLLRRRCAQECPFSPYFSPHEPQKFASVHKVFGASNVSKMLMEVPECQRADAANSLVYEANVRLRDPVYGCMGAISALQQQVQSLQAELNAVRGEILKYKLREANMIPSSHVAMLPSSGAVSIAAPPPPPPPPPPLPPPSLPLPLPLTSSPPSMYIQQRDPTTYTTISSDNISYFV

SEQ ID NO: 59911 - DNA, 1024 bp, Glycine max
  misc_feature (1)..(1024): Ceres Seq. ID no. 14314739
tcggatgtaatgaaaggagtgatatattgtctttggaatttgactgtgttgtcttcttctttgtgactcactctctcttcagctcttgaatttgatccacctgtgttgcttttcccaccaaaccaaacaaaataacctgatattaacgtaatagtagttcttttatcgaacattgtgccatgacattcgacgaggtttccatggaacacggcaagagcttcatcttcgccttgcaggaacttaagaacctgaggcctcaactctattctgctgcagactactgtgagaaatcttatctcaatagtgataaaaaaccaatggtacttgacaacatgaaagattatgtagtaagggcccttgttaatgctgttgatcatctaggaactgtggcttacaagttaagcgacattcttgagaagcaaacatttgatgtctcgaccatggatttgaaggtctctactttgaatcagagacttcttacatggcatatgtacactgataaagaaggtcttcggcaacagcagttgttggctttcattcccagacatcataagcactacattttgccaaatcccgtcaataaaaaggtacatttcatcccacacagaaaaattggtgcaagacaaaattcatttcaaaccagaactcgtcttcattcttcaggtacccctatttcaaaaactctttcatggcatttagcatcagaaactaagtctaccttaaaaaaacagacttcacgcacttcaaaaaacaccaaggactcaaaattttataagaagatctctggagttttccaccttttagatagtgaagggagtacgcggatgaaaacctcagcagcacaacctcacttgacaaatggagttcctacttctggtgctgccacccaaactatgggtgccacaggcagggtaatgccactttcatcaggttcaaatgcctggtggtgccatgtttgatagaatagtgaaattgtgattattgttgaccaatatgttgctatttattttcgtgtgtttgcaaa

SEQ ID NO: 59912 - protein, 259 aa, Glycine max
  peptide (1)..(259): Ceres Seq. ID no. 14314740
  misc_feature (1)..(130): Homolog of NCBI NO: 21618229 NR Description: unknown [Arabidopsis thaliana]
  misc_feature (1)..(232): Homolog of NCBI NO: 15238265 NR Description: expressed protein [Arabidopsis thaliana]
  misc_feature (2)..(130): Homolog of NCBI NO: 34913914 NR Description: OSJNBa0066C06.8 [Oryza sativa (japonica
  misc_feature (1)..(131): Homolog of NCBI NO: 30689382 NR Description: expressed protein [Arabidopsis thaliana]
  misc_feature (1)..(131): Homolog of NCBI NO: 10177091 NR Description: emb|CAB66408.1~gene_id:MOP9.13~strong similarity
  misc_feature (1)..(223): Homolog of NCBI NO: 15229112 NR Description: expressed protein [Arabidopsis thaliana]
  misc_feature (19)..(223): Homolog of NCBI NO: 25408977 NR Description: hypothetical protein At2g46220 [imported] -
  misc_feature (2)..(196): Homolog of NCBI NO: 34912804 NR Description: P0501G01.11 [Oryza sativa (japonica
  misc_feature (1)..(235): Homolog of NCBI NO: 26452761 NR Description: unknown protein [Arabidopsis thaliana]
  misc_feature (1)..(235): Homolog of NCBI NO: 18407012 NR Description: expressed protein [Arabidopsis thaliana]
MTFDEVSMEHGKSFIFALQELKNLRPQLYSAADYCEKSYLNSDKKPMVLDNMKDYVVRALVNAVDHLGTVAYKLSDILEKQTFDVSTMDLKVSTLNQRLLTWHMYTDKEGLRQQQLLAFIPRHHKHYILPNPVNKKVHFIPHRKIGARQNSFQTRTRLHSSGTPISKTLSWHLASETKSTLKKQTSRTSKNTKDSKFYKKISGVFHLLDSEGSTRMKTSAAQPHLTNGVPTSGAATQTMGATGRVMPLSSGSNAWWCHV

SEQ ID NO: 59913 - protein, 252 aa, Glycine max
  peptide (1)..(252): Ceres Seq. ID no. 14314741
  misc_feature (1)..(123): Homolog of NCBI NO: 21618229 NR Description: unknown [Arabidopsis thaliana]
  misc_feature (1)..(225): Homolog of NCBI NO: 15238265 NR Description: expressed protein [Arabidopsis thaliana]
  misc_feature (1)..(123): Homolog of NCBI NO: 34913914 NR Description: OSJNBa0066C06.8 [Oryza sativa (japonica
  misc_feature (1)..(124): Homolog of NCBI NO: 30689382 NR Description: expressed protein [Arabidopsis thaliana]
  misc_feature (1)..(124): Homolog of NCBI NO: 10177091 NR Description: emb|CAB66408.1~gene_id:MOP9.13~strong similarity
  misc_feature (1)..(216): Homolog of NCBI NO: 15229112 NR Description: expressed protein [Arabidopsis thaliana]
  misc_feature (12)..(216): Homolog of NCBI NO: 25408977 NR Description: hypothetical protein At2g46220 [imported] -
  misc_feature (1)..(189): Homolog of NCBI NO: 34912804 NR Description: P0501G01.11 [Oryza sativa (japonica
  misc_feature (1)..(228): Homolog of NCBI NO: 26452761 NR Description: unknown protein [Arabidopsis thaliana]
  misc_feature (1)..(228): Homolog of NCBI NO: 18407012 NR Description: expressed protein [Arabidopsis thaliana]
MEHGKSFIFALQELKNLRPQLYSAADYCEKSYLNSDKKPMVLDNMKDYVVRALVNAVDHLGTVAYKLSDILEKQTFDVSTMDLKVSTLNQRLLTWHMYTDKEGLRQQQLLAFIPRHHKHYILPNPVNKKVHFIPHRKIGARQNSFQTRTRLHSSGTPISKTLSWHLASETKSTLKKQTSRTSKNTKDSKFYKKISGVFHLLDSEGSTRMKTSAAQPHLTNGVPTSGAATQTMGATGRVMPLSSGSNAWWCHV

SEQ ID NO: 59914 - protein, 213 aa, Glycine max
  peptide (1)..(213): Ceres Seq. ID no. 14314742
  misc_feature (1)..(84): Homolog of NCBI NO: 21618229 NR Description: unknown [Arabidopsis thaliana]
  misc_feature (1)..(186): Homolog of NCBI NO: 15238265 NR Description: expressed protein [Arabidopsis thaliana]
  misc_feature (1)..(84): Homolog of NCBI NO: 34913914 NR Description: OSJNBa0066C06.8 [Oryza sativa (japonica
  misc_feature (1)..(85): Homolog of NCBI NO: 30689382 NR Description: expressed protein [Arabidopsis thaliana]
  misc_feature (1)..(85): Homolog of NCBI NO: 10177091 NR Description: emb|CAB66408.1~gene_id:MOP9.13~strong similarity
  misc_feature (1)..(177): Homolog of NCBI NO: 15229112 NR Description: expressed protein [Arabidopsis thaliana]
  misc_feature (1)..(177): Homolog of NCBI NO: 25408977 NR Description: hypothetical protein At2g46220 [imported] -
  misc_feature (1)..(150): Homolog of NCBI NO: 34912804 NR Description: P0501G01.11 [Oryza sativa (japonica
  misc_feature (1)..(189): Homolog of NCBI NO: 26452761 NR Description: unknown protein [Arabidopsis thaliana]
  misc_feature (1)..(189): Homolog of NCBI NO: 18407012 NR Description: expressed protein [Arabidopsis thaliana]
MVLDNMKDYVVRALVNAVDHLGTVAYKLSDILEKQTFDVSTMDLKVSTLNQRLLTWHMYTDKEGLRQQQLLAFIPRHHKHYILPNPVNKKVHFIPHRKIGARQNSFQTRTRLHSSGTPISKTLSWHLASETKSTLKKQTSRTSKNTKDSKFYKKISGVFHLLDSEGSTRMKTSAAQPHLTNGVPTSGAATQTMGATGRVMPLSSGSNAWWCHV

SEQ ID NO: 59915 - DNA, 944 bp, Glycine max
  misc_feature (1)..(944): Ceres Seq. ID no. 14314759
gaccccgggaaaaagaaaagaaaagaaactcacagctattgaatttcacttcacttcacttgcatgccaaatgaaaacaacctcttcccagaatcttgtcggtatttaactccctcgatttcacaacaccaataacaatgagagtttcaacagagacagagccggagactaaaaagataaaacgcattcgcggcggcggggactcgagcaagcaccctttgtaccgcggcgtgcggatgcggaactgggggaagtgggtgtcggaaatccgcgagccgaggaagaaatcgcggatatggctaggcacattccccacgccggaaatggcggcgagagcgcacgacgtcgccgctctcagcatcaaaggccccgccgccattctcaacttccctcacttggccaactcgctcccccgcccggcttcgctggcgccgcgcgacgttcaagctgcggcggcgaaggcggcgcacatggacccttcctccctctcctccttggtctccgcaatggacttgtcctctgcctctgacgagttgagccaaatcatagagcttccttctttggaaagcaccgatgatggctctgttgacttaaagaaggagtttgtttttgttgattcccttgatgcttggatgtatcagccaccctttggttttgacaccgaacaagacactggtttcgagggtttgatgtggaattactaggttcgatccaagtttctattctatgtcttgtgtttgtataaatttatatcgatctcttttatgttttggtttgtgtgtgtctataagcagtaagcagccacttgtggtttttctttcgggggctgccagtgctactgatcactctcgtattcatcatcatgtctctgtgtccttttcttaattcctctgattttaattgtaaatggctagatgaataaagtaagaggagaaattttctgt

SEQ ID NO: 59916 - protein, 188 aa, Glycine max
  peptide (1)..(188): Ceres Seq. ID no. 14314760
  misc_feature (26)..(90): Pfam Name: AP2 domain Pfam Description: AP2 domain
  misc_feature (27)..(122): Homolog of NCBI NO: 15223860 NR Description: AP2 domain transcription factor TINY, putative
  misc_feature (18)..(131): Homolog of NCBI NO: 14140155 NR Description: putative AP2 domain transcription factor [Oryza
  misc_feature (9)..(147): Homolog of NCBI NO: 25992102 NR Description: dehydration responsive element binding protein
  misc_feature (4)..(152): Homolog of NCBI NO: 14140163 NR Description: putative AP2 domain containing protein [Oryza
  misc_feature (12)..(122): Homolog of NCBI NO: 34903650 NR Description: B1015E06.8 [Oryza sativa (japonica
  misc_feature (22)..(181): Homolog of NCBI NO: 15233928 NR Description: AP2 domain transcription factor TINY, putative
  misc_feature (1)..(188): Homolog of NCBI NO: 15228171 NR Description: AP2 domain transcription factor TINY, putative
  misc_feature (1)..(188): Homolog of NCBI NO: 9279711 NR Description: transcription factor TINY-like protein
  misc_feature (5)..(150): Homolog of NCBI NO: 15239113 NR Description: AP2 domain transcription factor TINY, putative
  misc_feature (8)..(169): Homolog of NCBI NO: 15239501 NR Description: AP2 domain transcription factor TINY [Arabidopsis
MRVSTETEPETKKIKRIRGGGDSSKHPLYRGVRMRNWGKWVSEIREPRKKSRIWLGTFPTPEMAARAHDVAALSIKGPAAILNFPHLANSLPRPASLAPRDVQAAAAKAAHMDPSSLSSLVSAMDLSSASDELSQIIELPSLESTDDGSVDLKKEFVFVDSLDAWMYQPPFGFDTEQDTGFEGLMWNY

SEQ ID NO: 59917 - protein, 155 aa, Glycine max
  peptide (1)..(155): Ceres Seq. ID no. 14314761
  misc_feature (1)..(57): Pfam Name: AP2 domain Pfam Description: AP2 domain
  misc_feature (1)..(89): Homolog of NCBI NO: 15223860 NR Description: AP2 domain transcription factor TINY, putative
  misc_feature (1)..(98): Homolog of NCBI NO: 14140155 NR Description: putative AP2 domain transcription factor [Oryza
  misc_feature (1)..(114): Homolog of NCBI NO: 25992102 NR Description: dehydration responsive element binding protein
  misc_feature (1)..(119): Homolog of NCBI NO: 14140163 NR Description: putative AP2 domain containing protein [Oryza
  misc_feature (1)..(89): Homolog of NCBI NO: 34903650 NR Description: B1015E06.8 [Oryza sativa (japonica
  misc_feature (1)..(148): Homolog of NCBI NO: 15233928 NR Description: AP2 domain transcription factor TINY, putative
  misc_feature (1)..(155): Homolog of NCBI NO: 15228171 NR Description: AP2 domain transcription factor TINY, putative
  misc_feature (1)..(155): Homolog of NCBI NO: 9279711 NR Description: transcription factor TINY-like protein
  misc_feature (1)..(117): Homolog of NCBI NO: 15239113 NR Description: AP2 domain transcription factor TINY, putative
  misc_feature (1)..(136): Homolog of NCBI NO: 15239501 NR Description: AP2 domain transcription factor TINY [Arabidopsis
MRNWGKWVSEIREPRKKSRIWLGTFPTPEMAARAHDVAALSIKGPAAILNFPHLANSLPRPASLAPRDVQAAAAKAAHMDPSSLSSLVSAMDLSSASDELSQIIELPSLESTDDGSVDLKKEFVFVDSLDAWMYQPPFGFDTEQDTGFEGLMWNY

SEQ ID NO: 59918 - protein, 126 aa, Glycine max
  peptide (1)..(126): Ceres Seq. ID no. 14314762
  misc_feature (1)..(60): Homolog of NCBI NO: 15223860 NR Description: AP2 domain transcription factor TINY, putative
  misc_feature (1)..(69): Homolog of NCBI NO: 14140155 NR Description: putative AP2 domain transcription factor [Oryza
  misc_feature (1)..(85): Homolog of NCBI NO: 25992102 NR Description: dehydration responsive element binding protein
  misc_feature (1)..(90): Homolog of NCBI NO: 14140163 NR Description: putative AP2 domain containing protein [Oryza
  misc_feature (1)..(60): Homolog of NCBI NO: 34903650 NR Description: B1015E06.8 [Oryza sativa (japonica
  misc_feature (1)..(119): Homolog of NCBI NO: 15233928 NR Description: AP2 domain transcription factor TINY, putative
  misc_feature (1)..(126): Homolog of NCBI NO: 15228171 NR Description: AP2 domain transcription factor TINY, putative
  misc_feature (1)..(126): Homolog of NCBI NO: 9279711 NR Description: transcription factor TINY-like protein
  misc_feature (1)..(88): Homolog of NCBI NO: 15239113 NR Description: AP2 domain transcription factor TINY, putative
  misc_feature (1)..(107): Homolog of NCBI NO: 15239501 NR Description: AP2 domain transcription factor TINY [Arabidopsis
MAARAHDVAALSIKGPAAILNFPHLANSLPRPASLAPRDVQAAAAKAAHMDPSSLSSLVSAMDLSSASDELSQIIELPSLESTDDGSVDLKKEFVFVDSLDAWMYQPPFGFDTEQDTGFEGLMWNY

SEQ ID NO: 59919 - DNA, 1889 bp, Glycine max
  misc_feature (1)..(1889): Ceres Seq. ID no. 14314755
ctagtttttctaacgtttatgacttttctttcccttcttgggtagtcaggtcccgcagcatcgaaaacctggtctggttcaacatgcataggtagttgagtgcagtgattcagattgtttttttttttttttttggctctttttgctttatttgcactcttcttatcagaaaccaagacaacaagagtttaacgttacttcatcatctctgtctctttgctatttcttttgttagcagaaaccaagacaacaagagttgagtatagtgttcttgtaccacagacagcgcagggtgtagcacatcattcctcgatcgagctcgctccaatggcagagacaccaaacaaaggccacatcgtgatggtacctctcatggcacaaggtcacctcatcccatttctcgcactagcaagacaaatccaacaaaacacaagcttcaccatcaccatagccaacacaccccaaaacattcaacaccttcgatctgcactttcttcttctacttctcctaatcatcaaatccatcttgctgagttagtacccttcaactctacccaacactccaacaaagacaacaacacacaaaaggctcctctcactgacctattgaaacttggctatgcatcactcacccttgagcctccttttcgctccttgatatcacagatcacagaagaagacggtcaccctccactttgcataatatctgacatgttccttggttgggttaacaatgttgcaaagagcttaggcactaggaacctaaccttcaccacttgtggtgcttatggtatcttggcctatatctctatctggtccaacctccctcataggaaaactgattctgatgagttccatgttccgggattccctcaaaactaccgtttccacaaaacacaactgcataggtttcttcaagcggctgatggcaccgatgactggtcaagattcctcgttccacagattcaactttctatgaagtctgatgggtggatttgcaatacgattgaaaagatagagcctttggggttaaagcttctcaggaactatcttcaacttcccgtttgggccgtggggcctctccttccacctgcttcactcatgggttcaaaacatcgttcaggaaaggaaactggcatagctcttgatgcatgcatggagtggctggattcaaaggatgaaaattctgttctctatatttcatttgggtcactgcacactatcaatgcatctcaaatgatggctttggctgagggtttggaagagagtggcaaatcgtttatttgggttataaggccaccagttggttttgacatcaatggagagttcagtccagaatggttgccaaaagggtttgaagagagaatgagagacaccaaacgtggccttttggtgcacaaatggggaccccagttggagattctgtcacacacatccacaggagcttttctaagccattgtggatggaactctgtgttggagagtctcagctatggggtgcctatgattgggtggccaattgttgcagatcaaccttataatgtgaagatgttggtggaagaaatgggtgtggctgtggaacttactcgttctacggaaactgttgtttctagggagaaggttaagaagaccatagaaatagtcatggattatgaagggaagggaaaggtgatgaaggagaaggcaaatgagattgcagcttacattagagaggccaaaacagagaaaggtaaagaaaaagggtcttctgtgagagcaatggatgatcttgttacaaccattttatcacccaaggttctgtgatttgttgcatttagaatttagaatttgaatgatataataaagttgcttgtgtgagcatacttgtcataaactgctcaccaatcttt

SEQ ID NO: 59920 - protein, 491 aa, Glycine max
  peptide (1)..(491): Ceres Seq. ID no. 14314756
  misc_feature (9)..(487): Homolog of NCBI NO: 15228033 NR Description: glycosyltransferase family [Arabidopsis thaliana]
  misc_feature (9)..(475): Homolog of NCBI NO: 15228034 NR Description: UDP-glycosyltransferase family [Arabidopsis
  misc_feature (9)..(489): Homolog of NCBI NO: 15228031 NR Description: UDP-glycosyltransferase family [Arabidopsis
  misc_feature (1)..(485): Homolog of NCBI NO: 38344094 NR Description: OSJNBb0056F09.17 [Oryza sativa (japonica
  misc_feature (1)..(479): Homolog of NCBI NO: 21743074 NR Description: OSJNBb0002J11.3 [Oryza sativa (japonica
  misc_feature (5)..(482): Homolog of NCBI NO: 38344083 NR Description: OSJNBb0056F09.6 [Oryza sativa (japonica
  misc_feature (7)..(491): Homolog of NCBI NO: 38347037 NR Description: OSJNBb0067G11.12 [Oryza sativa (japonica
  misc_feature (7)..(476): Homolog of NCBI NO: 34015076 NR Description: glucosyltransferase-like protein [Crocus sativus]
  misc_feature (1)..(490): Homolog of NCBI NO: 18086351 NR Description: AT5g12890/T24H18_60 [Arabidopsis thaliana]
  misc_feature (1)..(490): Homolog of NCBI NO: 15239937 NR Description: UDP-glycosyltransferase family [Arabidopsis
MAETPNKGHIVMVPLMAQGHLIPFLALARQIQQNTSFTITIANTPQNIQHLRSALSSSTSPNHQIHLAELVPFNSTQHSNKDNNTQKAPLTDLLKLGYASLTLEPPFRSLISQITEEDGHPPLCIISDMFLGWVNNVAKSLGTRNLTFTTCGAYGILAYISIWSNLPHRKTDSDEFHVPGFPQNYRFHKTQLHRFLQAADGTDDWSRFLVPQIQLSMKSDGWICNTIEKIEPLGLKLLRNYLQLPVWAVGPLLPPASLMGSKHRSGKETGIALDACMEWLDSKDENSVLYISFGSLHTINASQMMALAEGLEESGKSFIWVIRPPVGFDINGEFSPEWLPKGFEERMRDTKRGLLVHKWGPQLEILSHTSTGAFLSHCGWNSVLESLSYGVPMIGWPIVADQPYNVKMLVEEMGVAVELTRSTETVVSREKVKKTIEIVMDYEGKGKVMKEKANEIAAYIREAKTEKGKEKGSSVRAMDDLVTTILSPKVL

SEQ ID NO: 59921 - protein, 480 aa, Glycine max
  peptide (1)..(480): Ceres Seq. ID no. 14314757
  misc_feature (1)..(476): Homolog of NCBI NO: 15228033 NR Description: glycosyltransferase family [Arabidopsis thaliana]
  misc_feature (1)..(464): Homolog of NCBI NO: 15228034 NR Description: UDP-glycosyltransferase family [Arabidopsis
  misc_feature (1)..(478): Homolog of NCBI NO: 15228031 NR Description: UDP-glycosyltransferase family [Arabidopsis
  misc_feature (1)..(474): Homolog of NCBI NO: 38344094 NR Description: OSJNBb0056F09.17 [Oryza sativa (japonica
  misc_feature (1)..(468): Homolog of NCBI NO: 21743074 NR Description: OSJNBb0002J11.3 [Oryza sativa (japonica
  misc_feature (1)..(471): Homolog of NCBI NO: 38344083 NR Description: OSJNBb0056F09.6 [Oryza sativa (japonica
  misc_feature (1)..(480): Homolog of NCBI NO: 38347037 NR Description: OSJNBb0067G11.12 [Oryza sativa (japonica
  misc_feature (1)..(465): Homolog of NCBI NO: 34015076 NR Description: glucosyltransferase-like protein [Crocus sativus]
  misc_feature (1)..(479): Homolog of NCBI NO: 18086351 NR Description: AT5g12890/T24H18_60 [Arabidopsis thaliana]
  misc_feature (1)..(479): Homolog of NCBI NO: 15239937 NR Description: UDP-glycosyltransferase family [Arabidopsis
MVPLMAQGHLIPFLALARQIQQNTSFTITIANTPQNIQHLRSALSSSTSPNHQIHLAELVPFNSTQHSNKDNNTQKAPLTDLLKLGYASLTLEPPFRSLISQITEEDGHPPLCIISDMFLGWVNNVAKSLGTRNLTFTTCGAYGILAYISIWSNLPHRKTDSDEFHVPGFPQNYRFHKTQLHRFLQAADGTDDWSRFLVPQIQLSMKSDGWICNTIEKIEPLGLKLLRNYLQLPVWAVGPLLPPASLMGSKHRSGKETGIALDACMEWLDSKDENSVLYISFGSLHTINASQMMALAEGLEESGKSFIWVIRPPVGFDINGEFSPEWLPKGFEERMRDTKRGLLVHKWGPQLEILSHTSTGAFLSHCGWNSVLESLSYGVPMIGWPIVADQPYNVKMLVEEMGVAVELTRSTETVVSREKVKKTIEIVMDYEGKGKVMKEKANEIAAYIREAKTEKGKEKGSSVRAMDDLVTTILSPKVL

SEQ ID NO: 59922 - protein, 476 aa, Glycine max
  peptide (1)..(476): Ceres Seq. ID no. 14314758
  misc_feature (1)..(472): Homolog of NCBI NO: 15228033 NR Description: glycosyltransferase family [Arabidopsis thaliana]
  misc_feature (1)..(460): Homolog of NCBI NO: 15228034 NR Description: UDP-glycosyltransferase family [Arabidopsis
  misc_feature (1)..(474): Homolog of NCBI NO: 15228031 NR Description: UDP-glycosyltransferase family [Arabidopsis
  misc_feature (1)..(470): Homolog of NCBI NO: 38344094 NR Description: OSJNBb0056F09.17 [Oryza sativa (japonica
  misc_feature (1)..(464): Homolog of NCBI NO: 21743074 NR Description: OSJNBb0002J11.3 [Oryza sativa (japonica
  misc_feature (1)..(467): Homolog of NCBI NO: 38344083 NR Description: OSJNBb0056F09.6 [Oryza sativa (japonica
  misc_feature (1)..(476): Homolog of NCBI NO: 38347037 NR Description: OSJNBb0067G11.12 [Oryza sativa (japonica
  misc_feature (1)..(461): Homolog of NCBI NO: 34015076 NR Description: glucosyltransferase-like protein [Crocus sativus]
  misc_feature (1)..(475): Homolog of NCBI NO: 18086351 NR Description: AT5g12890/T24H18_60 [Arabidopsis thaliana]
  misc_feature (1)..(475): Homolog of NCBI NO: 15239937 NR Description: UDP-glycosyltransferase family [Arabidopsis
MAQGHLIPFLALARQIQQNTSFTITIANTPQNIQHLRSALSSSTSPNHQIHLAELVPFNSTQHSNKDNNTQKAPLTDLLKLGYASLTLEPPFRSLISQITEEDGHPPLCIISDMFLGWVNNVAKSLGTRNLTFTTCGAYGILAYISIWSNLPHRKTDSDEFHVPGFPQNYRFHKTQLHRFLQAADGTDDWSRFLVPQIQLSMKSDGWICNTIEKIEPLGLKLLRNYLQLPVWAVGPLLPPASLMGSKHRSGKETGIALDACMEWLDSKDENSVLYISFGSLHTINASQMMALAEGLEESGKSFIWVIRPPVGFDINGEFSPEWLPKGFEERMRDTKRGLLVHKWGPQLEILSHTSTGAFLSHCGWNSVLESLSYGVPMIGWPIVADQPYNVKMLVEEMGVAVELTRSTETVVSREKVKKTIEIVMDYEGKGKVMKEKANEIAAYIREAKTEKGKEKGSSVRAMDDLVTTILSPKVL

SEQ ID NO: 59923 - DNA, 1357 bp, Glycine max
  misc_feature (1)..(1357): Ceres Seq. ID no. 14314632
aacatcctcacacacccctttctttctttcttcacttcattccccttatcctctcttcagttacacacattctcagcaaaactttgtgagcattgtctattgctacatgcttatctaatcttgttacagggcttaaaagtgtgtgatgcaagcaatggagaacattcatcagagggaaatattggaagagcaaaggtttgaattgccaccaggattcaggtttcatccaacagatgaagaactcatcactcactacctctcacagaaggttcttgatagctgcttctgtgccagagccattggagaggctgatttgaacaagtgtgaaccatgggatttgccttggatggccaaaatgggtgaaaaggagtggtattttttctgtgtgagggacagaaaatacccaactggtcaaaggactaatagggccactggtgttggctactggaaggcaacaggcaaggacagagagatatataaggcaaaggcactgattggaatgaagaaaactcttgttttctacaaaggaagagctccaagtggtgaaaaaactagctgggtcatgcatgaatacagattagaagatgaacattctgtgcacaatccacccaaaaaggccatgatgatttgggccatctgcaggatttttcagaagagtaatggtgggaagaaaatgccaatttctggttggtgagattcagcaattttgcaaaggacatgccttcatgatggattcttctccatacaacgacagtgaatcaaaacctgttttgggggagtcatcacagccaacatgcttctctgatccaaaccaaagtgaggaccagaggacacaagatgaaaacatagcggatagctatgaaactctcatgttggcatcttcatattcttcaaacccctctgatatttcccctgcctcatggactttttctaaatctgcccctaccgtgtcccaccaatcactccaagttgggaattcacacagctcagattacttcatgcttcatcaggaacagtccatgttggggatgttgattgaaaaccatggagcaagtgctggccaaagaactcagaaagctcaggatagtaaaggctctgatgctgacatgtcctctgtgatgtacaacaactatgaaatgttccaaagatcatttgggaaccaggaatattcatcaccttccgtaggacatgtgtattctagtggcctatggggattttaaagaaggttgaaggatacactatatgcagattaaaattagagaaactttagggattaaatgctattatacatgtaaataaattgctcttaagctaatgttatcctacaaagtacaggaaatggatgttacggttttcc

SEQ ID NO: 59924 - protein, 186 aa, Glycine max
  peptide (1)..(186): Ceres Seq. ID no. 14314633
MVGRKCQFLVGEIQQFCKGHAFMMDSSPYNDSESKPVLGESSQPTCFSDPNQSEDQRTQDENIADSYETLMLASSYSSNPSDISPASWTFSKSAPTVSHQSLQVGNSHSSDYFMLHQEQSMLGMLIENHGASAGQRTQKAQDSKGSDADMSSVMYNNYEMFQRSFGNQEYSSPSVGHVYSSGLWGF

SEQ ID NO: 59925 - protein, 182 aa, Glycine max
  peptide (1)..(182): Ceres Seq. ID no. 14314634
  misc_feature (20)..(146): Pfam Name: No apical meristem (NAM) protein Pfam Description: No apical meristem (NAM) protein
  misc_feature (19)..(180): Homolog of NCBI NO: 21537315 NR Description: NAM, no apical meristem,-like protein
  misc_feature (14)..(180): Homolog of NCBI NO: 15240252 NR Description: NAM, no apical meristem, - like protein
MQAMENIHQREILEEQRFELPPGFRFHPTDEELITHYLSQKVLDSCFCARAIGEADLNKCEPWDLPWMAKMGEKEWYFFCVRDRKYPTGQRTNRATGVGYWKATGKDREIYKAKALIGMKKTLVFYKGRAPSGEKTSWVMHEYRLEDEHSVHNPPKKAMMIWAICRIFQKSNGGKKMPISGW

SEQ ID NO: 59926 - protein, 179 aa, Glycine max
  peptide (1)..(179): Ceres Seq. ID no. 14314635
  misc_feature (17)..(143): Pfam Name: No apical meristem (NAM) protein Pfam Description: No apical meristem (NAM) protein
  misc_feature (16)..(177): Homolog of NCBI NO: 21537315 NR Description: NAM, no apical meristem,-like protein
  misc_feature (11)..(177): Homolog of NCBI NO: 15240252 NR Description: NAM, no apical meristem, - like protein
MENIHQREILEEQRFELPPGFRFHPTDEELITHYLSQKVLDSCFCARAIGEADLNKCEPWDLPWMAKMGEKEWYFFCVRDRKYPTGQRTNRATGVGYWKATGKDREIYKAKALIGMKKTLVFYKGRAPSGEKTSWVMHEYRLEDEHSVHNPPKKAMMIWAICRIFQKSNGGKKMPISGW

SEQ ID NO: 59927 - DNA, 1186 bp, Glycine max
  misc_feature (1)..(1186): Ceres Seq. ID no. 14306319
aaaaataatcaattcttttcttctctgtctccagctctcttctctctcagcacaagcataccatagcctctgcttaaccacgaagaaaccgagacaacaaaacacacttttttttcttttttttttcctccgtttctgccctgttctttccacgctgttcttcaccctttcaaccaaaacatgatccaccccatttcatgtttcctcttccaaccctcaaattctccataaagttcaacttttttcgatcctttctcaactgggtcaatcacaacaccaaaagggtgtcacaccattagatctcaaattcttcagctctaatggcgacgtgccctgcgaattccttcaacttcaacaccaccctctgcgcgtgcacccccggtcacgtgctccagcacgtgaggaacacgtgcgtgctctacgaggggaattcaacaatcctcaccgacaccggcgtcgactactacgcgctgagcttccccgagacgctcttcgcgttcgacagaatcaagaagttcacgcagtcgcaggcggtgttcttggaagccacgctcgttatgcttctctcgtggcttctgttctgcgtgtttctgaggtgcacgaagctcggtgatggaaggaacgtttggttcaaaatcaggtggtggatcagtaggttggatatttgcttcgccacaaggcactggctggttagtttttttttattatgtggtcctcagtatccatcagctgtcaataactaatttttatcttcggaggaaacctatctaaccacctttaatggattattatctcgtaatcacattttttttcatccaccagcctccaactccagaccttggtttgttttgtttggttctgtgtttttggtttcgtgaattgtggtgatggtttagcttcgcaatccaacttcatccatgagtttgtcttttttaaggatataatttaaatgtagtgatttagatatttttggtgttctttgcttatcagaattagaggccgccatttaatgcaaatatttattgaaattggattctcgattagtttaggcatacaaaatttaacgaaatttgctcttacttaatatctgcaattaatctggaaaacatttcacacatgtgatttttttttaaaaaaataatatgaaattctaatatattaaaacaagtaaattccattgttttgt

SEQ ID NO: 59928 - protein, 140 aa, Glycine max
  peptide (1)..(140): Ceres Seq. ID no. 14306320
  misc_feature (1)..(122): Homolog of NCBI NO: 34893992 NR Description: P0672D08.4 [Oryza sativa (japonica
  misc_feature (85)..(123): Homolog of NCBI NO: 9759136 NR Description: gene_id:MQK4.27~unknown protein [Arabidopsis
  misc_feature (4)..(63): Homolog of NCBI NO: 9759136 NR Description: gene_id:MQK4.27~unknown protein [Arabidopsis
  misc_feature (4)..(123): Homolog of NCBI NO: 30685896 NR Description: expressed protein [Arabidopsis thaliana]
MATCPANSFNFNTTLCACTPGHVLQHVRNTCVLYEGNSTILTDTGVDYYALSFPETLFAFDRIKKFTQSQAVFLEATLVMLLSWLLFCVFLRCTKLGDGRNVWFKIRWWISRLDICFATRHWLVSFFLLCGPQYPSAVNN

SEQ ID NO: 59929 - DNA, 1767 bp, Glycine max
  misc_feature (1)..(1767): Ceres Seq. ID no. 15177878
aaaccgaacactctcattataaactctcccaaacccaaactacactctccacacacacacacacactcaccgccgtatcgttcacactgaaccaatccaaaccccactctctctctctccgccgcaaacgacccttctccggggcggcgccaccgtacaacccccgatttaactaaaggagcaacagaaggagctgcttggttacaaatggcggccaccgcaagcaacaatgacgtcgccgccgccaacgacggtcccgtgatgagccttatcaacaagcgcctccgcgctctccgcaagaagctgaaccgcatcctcgccatggaagaggccgtcaccttgggcaagcccttgaacaaggagcaggaagaggttctacgctccaaaccctccgtcctcgccctcatcgatgagctcgataagctccggcaacctctcgccaccgctctctccgaagagctccaaatcaacggcacgtcttctcaaaaccctcgccacgagaccgagaccgaaaacgaaaccctagctgagagctccggctcgactgagccgaactcgaactcgaggaacgacgtcgttgtggaggacctgcttaatttgctctattttggttcacttttcgatgtgaagagtgactttgcgtccacgatgcttaccaggacgcacgagcgtggctgctgcttgacctacgactacgtcaccgacgatgccaccgatctgcttggcgagaaggacttggattcgatctccgcactgagagggttgctcgtttcgcggcccgcggattcaagcttttcgcacaagaacgcgctgcaccgctgcgtggaacacgccaagctgtggcttgctaagtcggagcagcccattgggcctgatgctgatgttacttatgctgcattaagggagaagttgaacaagattatgtcttcggagtactttactacgacacctgagatgaaggctccggttgaagttgctgcggcagctgctgggggaaattacgtttccttccatgtgccggtgcatgggtctgtggttccggttgaagtggagcagcctgtttttcagtctcaggagagggatgaaggaactgcaattcaaggacatggatctgaagaagatccctctgatcctgagggagagcttgtgaaggatgaagtagaagcagaagcagaaaatgcaggtgaagtggtgtcagttcaacatgaacagacgaaccagcaagtggatctagagtataatgaacgagatgtagaggcaaaggaccagcagtcataccccaggaggggttatcagaaccatagaggtggtcgtggtggaggtggtcgcaggggttactcaaatggtcgtggaggtcgaagtggtggcagaggaggctaccaaaatgggcgcaaccaatattatgatcaacctggaaattattatccaaggaacaactattataacaacagaggaagaggtggcagaggtggtggctattacaacaaccatggtgctggtggtcaagttaatcacgtcgcaggtgatgtgggggtgcaatcatgataagttatgagttgtttatagtggttattactgtcactagttggtggtgaaccattttttattcgcctggcatgaaaacatgttttgaacaattttgtttgacacttgaaagttcaaacgtctagactcctccactattttgtagtccagtggctagtgtggacctttgtccgaaatctcacatgaagaaactaaactgtatgcgaatatctaatgttctgg

SEQ ID NO: 59930 - protein, 445 aa, Glycine max
  peptide (1)..(445): Ceres Seq. ID no. 15177879
  misc_feature (313)..(432): Homolog of NCBI NO: 7442088 NR Description: glycine-rich protein 1 - chickpea
  misc_feature (310)..(444): Homolog of NCBI NO: 7439981 NR Description: glycine-rich RNA-binding protein GRP1 - wheat
  misc_feature (343)..(436): Homolog of NCBI NO: 7488799 NR Description: dormancy-associated protein 2 - garden pea
  misc_feature (315)..(439): Homolog of NCBI NO: 1170023 NR Description: ABSCISIC ACID AND ENVIRONMENTAL STRESS INDUCIBLE
  misc_feature (361)..(436): Homolog of NCBI NO: 585219 NR Description: GLYCINE-RICH PROTEIN DC9.1
  misc_feature (361)..(436): Homolog of NCBI NO: 122785 NR Description: GLYCINE-RICH PROTEIN HC1
  misc_feature (328)..(429): Homolog of NCBI NO: 7488799 NR Description: dormancy-associated protein 2 - garden pea
  misc_feature (313)..(439): Homolog of NCBI NO: 1170023 NR Description: ABSCISIC ACID AND ENVIRONMENTAL STRESS INDUCIBLE
  misc_feature (12)..(123): Homolog of NCBI NO: 15230159 NR Description: hypothetical protein [Arabidopsis thaliana]
  misc_feature (1)..(428): Homolog of NCBI NO: 15223426 NR Description: glycine-rich protein [Arabidopsis thaliana]
MAATASNNDVAAANDGPVMSLINKRLRALRKKLNRILAMEEAVTLGKPLNKEQEEVLRSKPSVLALIDELDKLRQPLATALSEELQINGTSSQNPRHETETENETLAESSGSTEPNSNSRNDVVVEDLLNLLYFGSLFDVKSDFASTMLTRTHERGCCLTYDYVTDDATDLLGEKDLDSISALRGLLVSRPADSSFSHKNALHRCVEHAKLWLAKSEQPIGPDADVTYAALREKLNKIMSSEYFTTTPEMKAPVEVAAAAAGGNYVSFHVPVHGSVVPVEVEQPVFQSQERDEGTAIQGHGSEEDPSDPEGELVKDEVEAEAENAGEVVSVQHEQTNQQVDLEYNERDVEAKDQQSYPRRGYQNHRGGRGGGGRRGYSNGRGGRSGGRGGYQNGRNQYYDQPGNYYPRNNYYNNRGRGGRGGGYYNNHGAGGQVNHVAGDVGVQS

SEQ ID NO: 59931 - protein, 427 aa, Glycine max
  peptide (1)..(427): Ceres Seq. ID no. 15177880
  misc_feature (295)..(414): Homolog of NCBI NO: 7442088 NR Description: glycine-rich protein 1 - chickpea
  misc_feature (292)..(426): Homolog of NCBI NO: 7439981 NR Description: glycine-rich RNA-binding protein GRP1 - wheat
  misc_feature (325)..(418): Homolog of NCBI NO: 7488799 NR Description: dormancy-associated protein 2 - garden pea
  misc_feature (297)..(421): Homolog of NCBI NO: 1170023 NR Description: ABSCISIC ACID AND ENVIRONMENTAL STRESS INDUCIBLE
  misc_feature (343)..(418): Homolog of NCBI NO: 585219 NR Description: GLYCINE-RICH PROTEIN DC9.1
  misc_feature (343)..(418): Homolog of NCBI NO: 122785 NR Description: GLYCINE-RICH PROTEIN HC1
  misc_feature (310)..(411): Homolog of NCBI NO: 7488799 NR Description: dormancy-associated protein 2 - garden pea
  misc_feature (295)..(421): Homolog of NCBI NO: 1170023 NR Description: ABSCISIC ACID AND ENVIRONMENTAL STRESS INDUCIBLE
  misc_feature (1)..(105): Homolog of NCBI NO: 15230159 NR Description: hypothetical protein [Arabidopsis thaliana]
  misc_feature (1)..(410): Homolog of NCBI NO: 15223426 NR Description: glycine-rich protein [Arabidopsis thaliana]
MSLINKRLRALRKKLNRILAMEEAVTLGKPLNKEQEEVLRSKPSVLALIDELDKLRQPLATALSEELQINGTSSQNPRHETETENETLAESSGSTEPNSNSRNDVVVEDLLNLLYFGSLFDVKSDFASTMLTRTHERGCCLTYDYVTDDATDLLGEKDLDSISALRGLLVSRPADSSFSHKNALHRCVEHAKLWLAKSEQPIGPDADVTYAALREKLNKIMSSEYFTTTPEMKAPVEVAAAAAGGNYVSFHVPVHGSVVPVEVEQPVFQSQERDEGTAIQGHGSEEDPSDPEGELVKDEVEAEAENAGEVVSVQHEQTNQQVDLEYNERDVEAKDQQSYPRRGYQNHRGGRGGGGRRGYSNGRGGRSGGRGGYQNGRNQYYDQPGNYYPRNNYYNNRGRGGRGGGYYNNHGAGGQVNHVAGDVGVQS

SEQ ID NO: 59932 - protein, 407 aa, Glycine max
  peptide (1)..(407): Ceres Seq. ID no. 15177881
  misc_feature (275)..(394): Homolog of NCBI NO: 7442088 NR Description: glycine-rich protein 1 - chickpea
  misc_feature (272)..(406): Homolog of NCBI NO: 7439981 NR Description: glycine-rich RNA-binding protein GRP1 - wheat
  misc_feature (305)..(398): Homolog of NCBI NO: 7488799 NR Description: dormancy-associated protein 2 - garden pea
  misc_feature (277)..(401): Homolog of NCBI NO: 1170023 NR Description: ABSCISIC ACID AND ENVIRONMENTAL STRESS INDUCIBLE
  misc_feature (323)..(398): Homolog of NCBI NO: 585219 NR Description: GLYCINE-RICH PROTEIN DC9.1
  misc_feature (323)..(398): Homolog of NCBI NO: 122785 NR Description: GLYCINE-RICH PROTEIN HC1
  misc_feature (290)..(391): Homolog of NCBI NO: 7488799 NR Description: dormancy-associated protein 2 - garden pea
  misc_feature (275)..(401): Homolog of NCBI NO: 1170023 NR Description: ABSCISIC ACID AND ENVIRONMENTAL STRESS INDUCIBLE
  misc_feature (1)..(85): Homolog of NCBI NO: 15230159 NR Description: hypothetical protein [Arabidopsis thaliana]
  misc_feature (1)..(390): Homolog of NCBI NO: 15223426 NR Description: glycine-rich protein [Arabidopsis thaliana]
MEEAVTLGKPLNKEQEEVLRSKPSVLALIDELDKLRQPLATALSEELQINGTSSQNPRHETETENETLAESSGSTEPNSNSRNDVVVEDLLNLLYFGSLFDVKSDFASTMLTRTHERGCCLTYDYVTDDATDLLGEKDLDSISALRGLLVSRPADSSFSHKNALHRCVEHAKLWLAKSEQPIGPDADVTYAALREKLNKIMSSEYFTTTPEMKAPVEVAAAAAGGNYVSFHVPVHGSVVPVEVEQPVFQSQERDEGTAIQGHGSEEDPSDPEGELVKDEVEAEAENAGEVVSVQHEQTNQQVDLEYNERDVEAKDQQSYPRRGYQNHRGGRGGGGRRGYSNGRGGRSGGRGGYQNGRNQYYDQPGNYYPRNNYYNNRGRGGRGGGYYNNHGAGGQVNHVAGDVGVQS

SEQ ID NO: 59933 - DNA, 1251 bp, Glycine max
  misc_feature (1)..(1251): Ceres Seq. ID no. 15177654
atcgactgctccaaatggccgaggtaattttgaatctaatcgtggaatccatgatgcctgatgggaatcattgcagccaaaagacatcataccagttcctggtttccttgattgtcttagaagaacaaacagccttgcatatcttttggtggtgagttaggtctttcttgaatgtacccatgaaatcaggctatcaacacggtggagttgatattactcacactaaggcctttctaacatcactgtcagctatggtggctgagaccacaactttccccatagatttgatcaagaccaggctccaactccatggcgagtcactttcctcgagtcaccccactagtgcatttcgagtaggcttgggcattattcgtgaacaaggtgcccttggcctttacagtggcctgtcaccagcaattattagacacatgttctactcgcctattcgaattgttgggtatgagaacctgagaaatgttgtttctgttgataatgcttcgttctctatcgttggcaaggctgtagttggtggaatctctggtgtcttggctcaggttatagccagcccagctgatcttgtcaaggtgaggatgcaagctgatggccaaagggtgagccaaggtcttcaaccccggtattcggggccatttgatgctctaaacaaaattgttcgtgctgaaggatttcaaggattgtggaagggtgtttttcctaatatccaaagagccttcttagtgaacatgggagaattagcctgttatgatcatgctaaacaatttgttattagaagtaggatagctgatgacaatgtttttgcccacacttttgcttccatcatgtcaggtttagcggcaacgtctttgagctgcccggctgatgttgtgaagactagaatgatgaatcaggcagctaaaaaggaagggaaagtcttatataatagctcttatgattgcttggtgaagacaattaaagttgaaggaataagagcattgtggaaaggattcttccccacatgggcaaggcttggcccatggcaatttgtgttctgggtttcctatgagaagttcaggaaatttgcagggctctcttctttctaatataacattttatttatttatttatactagcactcattcatccataataaattcacaagtcacagcctacagggtactaacacccagatttatatttttctcaacttttagctcagtgtatacttttttgagataaactacattactctttcct

SEQ ID NO: 59934 - protein, 305 aa, Glycine max
  peptide (1)..(305): Ceres Seq. ID no. 15177655
  misc_feature (22)..(298): Homolog of NCBI NO: 24637836 NR Description: brain mitochondrial carrier protein
  misc_feature (15)..(305): Homolog of NCBI NO: 17562272 NR Description: uncoupling protein (5J815) [Caenorhabditis
  misc_feature (15)..(305): Homolog of NCBI NO: 39594577 NR Description: Hypothetical protein CBG19253 [Caenorhabditis
  misc_feature (22)..(305): Homolog of NCBI NO: 18860079 NR Description: CG6492-PA [Drosophila melanogaster]
  misc_feature (18)..(305): Homolog of NCBI NO: 31231996 NR Description: ENSANGP00000020981 [Anopheles gambiae]
  misc_feature (15)..(305): Homolog of NCBI NO: 21312006 NR Description: RIKEN cDNA 3632410G24 [Mus musculus]
  misc_feature (15)..(305): Homolog of NCBI NO: 16758260 NR Description: uncoupling protein UCP-4 [Rattus norvegicus]
  misc_feature (15)..(305): Homolog of NCBI NO: 31418769 NR Description: Unknown (protein for MGC:63899) [Danio rerio]
  misc_feature (8)..(305): Homolog of NCBI NO: 38344836 NR Description: OSJNBa0064H22.17 [Oryza sativa (japonica
  misc_feature (13)..(305): Homolog of NCBI NO: 15223098 NR Description: mitochondrial carrier protein family [Arabidopsis
MKSGYQHGGVDITHTKAFLTSLSAMVAETTTFPIDLIKTRLQLHGESLSSSHPTSAFRVGLGIIREQGALGLYSGLSPAIIRHMFYSPIRIVGYENLRNVVSVDNASFSIVGKAVVGGISGVLAQVIASPADLVKVRMQADGQRVSQGLQPRYSGPFDALNKIVRAEGFQGLWKGVFPNIQRAFLVNMGELACYDHAKQFVIRSRIADDNVFAHTFASIMSGLAATSLSCPADVVKTRMMNQAAKKEGKVLYNSSYDCLVKTIKVEGIRALWKGFFPTWARLGPWQFVFWVSYEKFRKFAGLSSF

SEQ ID NO: 59935 - protein, 281 aa, Glycine max
  peptide (1)..(281): Ceres Seq. ID no. 15177656
  misc_feature (1)..(274): Homolog of NCBI NO: 24637836 NR Description: brain mitochondrial carrier protein
  misc_feature (1)..(281): Homolog of NCBI NO: 17562272 NR Description: uncoupling protein (5J815) [Caenorhabditis
  misc_feature (1)..(281): Homolog of NCBI NO: 39594577 NR Description: Hypothetical protein CBG19253 [Caenorhabditis
  misc_feature (1)..(281): Homolog of NCBI NO: 18860079 NR Description: CG6492-PA [Drosophila melanogaster]
  misc_feature (1)..(281): Homolog of NCBI NO: 31231996 NR Description: ENSANGP00000020981 [Anopheles gambiae]
  misc_feature (1)..(281): Homolog of NCBI NO: 21312006 NR Description: RIKEN cDNA 3632410G24 [Mus musculus]
  misc_feature (1)..(281): Homolog of NCBI NO: 16758260 NR Description: uncoupling protein UCP-4 [Rattus norvegicus]
  misc_feature (1)..(281): Homolog of NCBI NO: 31418769 NR Description: Unknown (protein for MGC:63899) [Danio rerio]
  misc_feature (1)..(281): Homolog of NCBI NO: 38344836 NR Description: OSJNBa0064H22.17 [Oryza sativa (japonica
  misc_feature (1)..(281): Homolog of NCBI NO: 15223098 NR Description: mitochondrial carrier protein family [Arabidopsis
MVAETTTFPIDLIKTRLQLHGESLSSSHPTSAFRVGLGIIREQGALGLYSGLSPAIIRHMFYSPIRIVGYENLRNVVSVDNASFSIVGKAVVGGISGVLAQVIASPADLVKVRMQADGQRVSQGLQPRYSGPFDALNKIVRAEGFQGLWKGVFPNIQRAFLVNMGELACYDHAKQFVIRSRIADDNVFAHTFASIMSGLAATSLSCPADVVKTRMMNQAAKKEGKVLYNSSYDCLVKTIKVEGIRALWKGFFPTWARLGPWQFVFWVSYEKFRKFAGLSSF

SEQ ID NO: 59936 - protein, 222 aa, Glycine max
  peptide (1)..(222): Ceres Seq. ID no. 15177657
  misc_feature (1)..(215): Homolog of NCBI NO: 24637836 NR Description: brain mitochondrial carrier protein
  misc_feature (1)..(222): Homolog of NCBI NO: 17562272 NR Description: uncoupling protein (5J815) [Caenorhabditis
  misc_feature (1)..(222): Homolog of NCBI NO: 39594577 NR Description: Hypothetical protein CBG19253 [Caenorhabditis
  misc_feature (1)..(222): Homolog of NCBI NO: 18860079 NR Description: CG6492-PA [Drosophila melanogaster]
  misc_feature (1)..(222): Homolog of NCBI NO: 31231996 NR Description: ENSANGP00000020981 [Anopheles gambiae]
  misc_feature (1)..(222): Homolog of NCBI NO: 21312006 NR Description: RIKEN cDNA 3632410G24 [Mus musculus]
  misc_feature (1)..(222): Homolog of NCBI NO: 16758260 NR Description: uncoupling protein UCP-4 [Rattus norvegicus]
  misc_feature (1)..(222): Homolog of NCBI NO: 31418769 NR Description: Unknown (protein for MGC:63899) [Danio rerio]
  misc_feature (1)..(222): Homolog of NCBI NO: 38344836 NR Description: OSJNBa0064H22.17 [Oryza sativa (japonica
  misc_feature (1)..(222): Homolog of NCBI NO: 15223098 NR Description: mitochondrial carrier protein family [Arabidopsis
MFYSPIRIVGYENLRNVVSVDNASFSIVGKAVVGGISGVLAQVIASPADLVKVRMQADGQRVSQGLQPRYSGPFDALNKIVRAEGFQGLWKGVFPNIQRAFLVNMGELACYDHAKQFVIRSRIADDNVFAHTFASIMSGLAATSLSCPADVVKTRMMNQAAKKEGKVLYNSSYDCLVKTIKVEGIRALWKGFFPTWARLGPWQFVFWVSYEKFRKFAGLSSF

SEQ ID NO: 59937 - DNA, 1282 bp, Glycine max
  misc_feature (1)..(1282): Ceres Seq. ID no. 14314647
gaaattcttttaacattgaattacctagctgagaatccagagaccacttgggtaactgaaatggaataaaaagggagtcgagtttcattagcgatagcatgagccagtctagttagccacatggggatggtagatcggcaagagcaacatattcagttcctccttaacattcttcatcccacccaaatccctaaaaattgtcacatccttccccttaacctcaacaccaccacagactgaacccttccgaagctgaaccagaagggcctcctccactcgacgccgccggagcaccggccttctcccgttcctactgaacccagcaatgagacccagctgtgcctgagcctgtcccacaaaaacaattaccaaaaaactaggctagaaaaaaaaaaaagataacttctcaatctgtttttctaaactgtttttattttaaaaaatatattttctcttgagaaacaaattttattgaatacacttatcttaaaattgattttttcctctttgttctcaagatgtcctcacccgaaacccttacattcatggagctcgccatacaacaggcaaagttagctttggatgttcttgaagtgcctgttggatgtgtaattgttgaggatggcaaggttatagcctcaggcaggaatcgaactacccagacacgaaatgctacaaggcatgcagaaatggaagctgtagatgtgcttctcgggcagtggcagaaacatggactttcaatgtctgaagtttctgaaaaattctcaaactgcagcctttatgttacctgtgaaccatgcataatgtgtgcatctgctttatcaattttaggtataaaggaagtattttatggctgttcaaatgataaatttggaggctgtggatcgatactgtcattgcatttaagtaacaccacaccgctcaataatgaagttccacccggaaagtgtttcaaatgtactggaggtataatggcatcagaagctgttcttctctttcgaacattctatgagcaaggaaatcccaatgctccaaagccacacaggcctctagcacgtcaggcatgaagtttaatttgtatataaccagttactgatatggttatcagtcatggcctgaggatctgtgctaccgtagcattttgggcaggttgaagctgttattgaatgccatacagggctttttaattcgaaaaatcaacttcatgtattgattattaatgtatgatttgaaagatgaatcaggggttgccgtttgaaatgaatcttactggattaagttc

SEQ ID NO: 59938 - protein, 182 aa, Glycine max
  peptide (1)..(182): Ceres Seq. ID no. 14314648
  misc_feature (30)..(113): Pfam Name: Cytidine and deoxycytidylate deaminase Pfam Description: Cytidine and deoxycytidylate deaminase
  misc_feature (76)..(179): Homolog of NCBI NO: 23619417 NR Description: cytidine and deoxycytidylate deaminase family,
  misc_feature (3)..(176): Homolog of NCBI NO: 17541138 NR Description: deaminase (4O9) [Caenorhabditis elegans]
  misc_feature (9)..(172): Homolog of NCBI NO: 21355527 NR Description: CG5292-PA [Drosophila melanogaster]
  misc_feature (1)..(127): Homolog of NCBI NO: 34852600 NR Description: similar to RIKEN cDNA 4933426M09 [Rattus
  misc_feature (3)..(182): Homolog of NCBI NO: 31206173 NR Description: ENSANGP00000018657 [Anopheles gambiae]
  misc_feature (32)..(173): Homolog of NCBI NO: 32698845 NR Description: hypothetical protein DKFZp686L1118 [Homo sapiens]
  misc_feature (1)..(173): Homolog of NCBI NO: 27754114 NR Description: RIKEN cDNA 4933426M09 [Mus musculus]
  misc_feature (1)..(173): Homolog of NCBI NO: 31652308 NR Description: dJ20N2.1.1 (novel protein similar to yeast and
  misc_feature (58)..(181): Homolog of NCBI NO: 30694260 NR Description: expressed protein [Arabidopsis thaliana]
  misc_feature (30)..(170): Homolog of NCBI NO: 8778532 NR Description: F21D18.9 [Arabidopsis thaliana]
MSSPETLTFMELAIQQAKLALDVLEVPVGCVIVEDGKVIASGRNRTTQTRNATRHAEMEAVDVLLGQWQKHGLSMSEVSEKFSNCSLYVTCEPCIMCASALSILGIKEVFYGCSNDKFGGCGSILSLHLSNTTPLNNEVPPGKCFKCTGGIMASEAVLLFRTFYEQGNPNAPKPHRPLARQA

SEQ ID NO: 59939 - protein, 173 aa, Glycine max
  peptide (1)..(173): Ceres Seq. ID no. 14314649
  misc_feature (21)..(104): Pfam Name: Cytidine and deoxycytidylate deaminase Pfam Description: Cytidine and deoxycytidylate deaminase
  misc_feature (67)..(170): Homolog of NCBI NO: 23619417 NR Description: cytidine and deoxycytidylate deaminase family,
  misc_feature (1)..(167): Homolog of NCBI NO: 17541138 NR Description: deaminase (4O9) [Caenorhabditis elegans]
  misc_feature (1)..(163): Homolog of NCBI NO: 21355527 NR Description: CG5292-PA [Drosophila melanogaster]
  misc_feature (1)..(118): Homolog of NCBI NO: 34852600 NR Description: similar to RIKEN cDNA 4933426M09 [Rattus
  misc_feature (1)..(173): Homolog of NCBI NO: 31206173 NR Description: ENSANGP00000018657 [Anopheles gambiae]
  misc_feature (23)..(164): Homolog of NCBI NO: 32698845 NR Description: hypothetical protein DKFZp686L1118 [Homo sapiens]
  misc_feature (1)..(164): Homolog of NCBI NO: 27754114 NR Description: RIKEN cDNA 4933426M09 [Mus musculus]
  misc_feature (1)..(164): Homolog of NCBI NO: 31652308 NR Description: dJ20N2.1.1 (novel protein similar to yeast and
  misc_feature (49)..(172): Homolog of NCBI NO: 30694260 NR Description: expressed protein [Arabidopsis thaliana]
  misc_feature (21)..(161): Homolog of NCBI NO: 8778532 NR Description: F21D18.9 [Arabidopsis thaliana]
MELAIQQAKLALDVLEVPVGCVIVEDGKVIASGRNRTTQTRNATRHAEMEAVDVLLGQWQKHGLSMSEVSEKFSNCSLYVTCEPCIMCASALSILGIKEVFYGCSNDKFGGCGSILSLHLSNTTPLNNEVPPGKCFKCTGGIMASEAVLLFRTFYEQGNPNAPKPHRPLARQA

SEQ ID NO: 59940 - protein, 125 aa, Glycine max
  peptide (1)..(125): Ceres Seq. ID no. 14314650
  misc_feature (1)..(56): Pfam Name: Cytidine and deoxycytidylate deaminase Pfam Description: Cytidine and deoxycytidylate deaminase
  misc_feature (19)..(122): Homolog of NCBI NO: 23619417 NR Description: cytidine and deoxycytidylate deaminase family,
  misc_feature (1)..(119): Homolog of NCBI NO: 17541138 NR Description: deaminase (4O9) [Caenorhabditis elegans]
  misc_feature (1)..(115): Homolog of NCBI NO: 21355527 NR Description: CG5292-PA [Drosophila melanogaster]
  misc_feature (1)..(70): Homolog of NCBI NO: 34852600 NR Description: similar to RIKEN cDNA 4933426M09 [Rattus
  misc_feature (1)..(125): Homolog of NCBI NO: 31206173 NR Description: ENSANGP00000018657 [Anopheles gambiae]
  misc_feature (1)..(116): Homolog of NCBI NO: 32698845 NR Description: hypothetical protein DKFZp686L1118 [Homo sapiens]
  misc_feature (1)..(116): Homolog of NCBI NO: 27754114 NR Description: RIKEN cDNA 4933426M09 [Mus musculus]
  misc_feature (1)..(116): Homolog of NCBI NO: 31652308 NR Description: dJ20N2.1.1 (novel protein similar to yeast and
  misc_feature (1)..(124): Homolog of NCBI NO: 30694260 NR Description: expressed protein [Arabidopsis thaliana]
  misc_feature (1)..(113): Homolog of NCBI NO: 8778532 NR Description: F21D18.9 [Arabidopsis thaliana]
MEAVDVLLGQWQKHGLSMSEVSEKFSNCSLYVTCEPCIMCASALSILGIKEVFYGCSNDKFGGCGSILSLHLSNTTPLNNEVPPGKCFKCTGGIMASEAVLLFRTFYEQGNPNAPKPHRPLARQA

SEQ ID NO: 59941 - DNA, 1415 bp, Glycine max
  misc_feature (1)..(1415): Ceres Seq. ID no. 14314640
atttttacactctttgccagttgacacttgtttctctcttttcatgactccctttctcccaaaaagtgaaacaccaaaatcctcccacaacaacaacaaacaggttaggacttagagagccactcattcccatttgatggaggcgaagaaggaatatgaagtggaccatctgagcacacccacagggaccagtttctctcagttactattcggagatgacgacgacgacgttgatgaaagtgcattgggtctcgctgtggaccagtcttactcttacaattacaacaaccttacccgttcacctcttttctccattcacaaggcaccccaaatgctttgttttggcaaccatcaaaacgaagaaggtggcgttttgcttcctgaaaccaacgtaacccctcagaaatctgtcatcacttctagtgactcctcttctgctagcgcttcctcctgcaaccacaccaacaccgccttcaattccttacctaagtctaataatagtttgcagaaaaagcgacaagaaggagttgccaaggttggtgttggaagccagagacaaactaaaaagaacaaagcagagaaccccacctcaaccggacatgcaaagaggaaggagaagctcggagaacgaattgcaacgttacaacaacttgtttctccctttggaaagacagatacagcatcagtgcttcacgaggccatgggttatataagatttcttcatgaccaagttcaggtcctgtgctctccttacttgcaaagtttgccttcctcataccatcaaaatcagcacgggggcggaggtaacaatgaagaggaagtgaacaaggacttgaggagtaagggtctttgcttgatccctgtgggatgcaccgtacacgtggcaggtagcaatggtgctgatttttggtcatctgctgcaatagggaacaatgttagtttcaccatcagccaagcagtgaaacgaaaccaagatcaatgaatccttttcaaaaaaagttgtagccttttgggaaatgggtttcctatgtctgcccaaattgaagttgtacccaatctggagatggatggttgaggaggtaaactacatgaaatggcaaagagggataacaaataacaagaatggttcaaagttcacacatgggggtacaaaccagaggccatgattttgtccttaattatgtaacatctgttttggtttttggggggtccttttctcaggacacctatatcaatattctatagaaggaaggaaggaaatattttatgtaggatttagggatgtgtgctggcattgaaccctgaactaggagtctaggattccatatatttttattatagatattttgtctctgtaaatttcggtaggcaagccagttaatgaagttattataacatatatttttattatatac

SEQ ID NO: 59942 - protein, 281 aa, Glycine max
  peptide (1)..(281): Ceres Seq. ID no. 14314641
  misc_feature (158)..(196): Pfam Name: Helix-loop-helix DNA-binding domain Pfam Description: Helix-loop-helix DNA-binding domain
  misc_feature (137)..(261): Homolog of NCBI NO: 21740790 NR Description: OSJNBb0091E11.4 [Oryza sativa (japonica
  misc_feature (143)..(259): Homolog of NCBI NO: 5669656 NR Description: ER33 protein [Lycopersicon esculentum]
  misc_feature (112)..(259): Homolog of NCBI NO: 9294343 NR Description: gene_id:F3H11.2~unknown protein [Arabidopsis
  misc_feature (112)..(259): Homolog of NCBI NO: 15232315 NR Description: bHLH transcription factor (bHLH123) -related
  misc_feature (118)..(266): Homolog of NCBI NO: 21553730 NR Description: unknown [Arabidopsis thaliana]
  misc_feature (118)..(266): Homolog of NCBI NO: 18407276 NR Description: expressed protein [Arabidopsis thaliana]
  misc_feature (124)..(259): Homolog of NCBI NO: 22093671 NR Description: bHLH transcription factor-like protein
  misc_feature (77)..(280): Homolog of NCBI NO: 14488370 NR Description: putative ethylene-responsive protein
  misc_feature (18)..(273): Homolog of NCBI NO: 18402256 NR Description: expressed protein [Arabidopsis thaliana]
  misc_feature (18)..(273): Homolog of NCBI NO: 21536756 NR Description: unknown [Arabidopsis thaliana]
MEAKKEYEVDHLSTPTGTSFSQLLFGDDDDDVDESALGLAVDQSYSYNYNNLTRSPLFSIHKAPQMLCFGNHQNEEGGVLLPETNVTPQKSVITSSDSSSASASSCNHTNTAFNSLPKSNNSLQKKRQEGVAKVGVGSQRQTKKNKAENPTSTGHAKRKEKLGERIATLQQLVSPFGKTDTASVLHEAMGYIRFLHDQVQVLCSPYLQSLPSSYHQNQHGGGGNNEEEVNKDLRSKGLCLIPVGCTVHVAGSNGADFWSSAAIGNNVSFTISQAVKRNQDQ

SEQ ID NO: 59943 - protein, 216 aa, Glycine max
  peptide (1)..(216): Ceres Seq. ID no. 14314642
  misc_feature (93)..(131): Pfam Name: Helix-loop-helix DNA-binding domain Pfam Description: Helix-loop-helix DNA-binding domain
  misc_feature (72)..(196): Homolog of NCBI NO: 21740790 NR Description: OSJNBb0091E11.4 [Oryza sativa (japonica
  misc_feature (78)..(194): Homolog of NCBI NO: 5669656 NR Description: ER33 protein [Lycopersicon esculentum]
  misc_feature (47)..(194): Homolog of NCBI NO: 9294343 NR Description: gene_id:F3H11.2~unknown protein [Arabidopsis
  misc_feature (47)..(194): Homolog of NCBI NO: 15232315 NR Description: bHLH transcription factor (bHLH123) -related
  misc_feature (53)..(201): Homolog of NCBI NO: 21553730 NR Description: unknown [Arabidopsis thaliana]
  misc_feature (53)..(201): Homolog of NCBI NO: 18407276 NR Description: expressed protein [Arabidopsis thaliana]
  misc_feature (59)..(194): Homolog of NCBI NO: 22093671 NR Description: bHLH transcription factor-like protein
  misc_feature (12)..(215): Homolog of NCBI NO: 14488370 NR Description: putative ethylene-responsive protein
  misc_feature (1)..(208): Homolog of NCBI NO: 18402256 NR Description: expressed protein [Arabidopsis thaliana]
  misc_feature (1)..(208): Homolog of NCBI NO: 21536756 NR Description: unknown [Arabidopsis thaliana]
MLCFGNHQNEEGGVLLPETNVTPQKSVITSSDSSSASASSCNHTNTAFNSLPKSNNSLQKKRQEGVAKVGVGSQRQTKKNKAENPTSTGHAKRKEKLGERIATLQQLVSPFGKTDTASVLHEAMGYIRFLHDQVQVLCSPYLQSLPSSYHQNQHGGGGNNEEEVNKDLRSKGLCLIPVGCTVHVAGSNGADFWSSAAIGNNVSFTISQAVKRNQDQ

SEQ ID NO: 59944 - DNA, 1292 bp, Glycine max
  misc_feature (1)..(1292): Ceres Seq. ID no. 14314651
ccttttttaagactgagagagttatgttttgtccatgtcattgacacagtattaaatattacaaatattctgttcaaaaacaagttttaaaatgagctgtaaaatcaaccatataatcaaaagtgtgattaaaacaattaagtaatacaagctagtttatttctgcttccaacaagcatgcagtgcacttattaaaaaaagggttaggttagtcaattaggcaaaacatgttaaactgttagttcaacaatataaaaatgcatttaattacttgtcttgtagtttatttaacattaattggacaaaataaagctgaatcaatgcttgaaggcttctactgcggccgagacaattgttatgatgtgttgggtgttactcgggatacaagcagagctgacattgcaaaagcctacagaaaacttgcaaaaaaattccatccagatttatataggaatgaagatgagaaaatagaagcggaatctaattttaagagggtagccaatgcatatgaaatcctcaaagatgaagaatcacgaatggactatgattacatgcttgacaatccagagcaggtgtacagccattactaccgatattatcgtaggagagttgcgcctaaagtggatgttcgagtagtgatagccgtcagtattactatcatatccgctattcagtatgtcactgcttggcagagatacaactcggcaataaaatacttattgacagttccaaaatacagaaataaggcgctgcaaattgccaaagaaaaagggctgcttgaaaaagttagaaaaacacgaggaaaaagcaagtcagaagtgaaagaggaaactgaagatgtaatacgaaaagtgttagaagagaacatggatatcagaggagcatatgccaagccagtgataactgatattctgtggctgaaaataatacttttcccagttgatttagtaaaatacatgtactggtacacatgttggatttggaagcataatatcctccaacttccttatgatgatgaagaaaagctgtatcttatcaggaagtacatgaagaaaggacctaatcaatttgctgctattgaagaatctgaaaaacaagagtacttaaaacaagaactgtggatcagagagaaatttgatgtatggtttcaagaaaaagaagaagaacagaaaaagcttcttgctgaaaatgcgagatacaaagcataccgaagatacctcaagacacatggaactggaagaatgacatttgatgattcatgattttgtgatttattataattctcagttgtt

SEQ ID NO: 59945 - protein, 334 aa, Glycine max
  peptide (1)..(334): Ceres Seq. ID no. 14314652
  misc_feature (32)..(100): Pfam Name: DnaJ domain Pfam Description: DnaJ domain
  misc_feature (4)..(262): Homolog of NCBI NO: 25404348 NR Description: hypothetical protein T13M11.13 [imported] -
  misc_feature (4)..(306): Homolog of NCBI NO: 30696610 NR Description: DnaJ protein family [Arabidopsis thaliana]
  misc_feature (99)..(333): Homolog of NCBI NO: 13874539 NR Description: hypothetical protein [Macaca fascicularis]
  misc_feature (27)..(326): Homolog of NCBI NO: 17538212 NR Description: DNaJ domain (prokaryotic heat shock protein)
  misc_feature (7)..(326): Homolog of NCBI NO: 39593758 NR Description: Hypothetical protein CBG06069 [Caenorhabditis
  misc_feature (3)..(333): Homolog of NCBI NO: 12313893 NR Description: bA16L21.2.1 (novel DnaJ domain protein similar to
  misc_feature (19)..(333): Homolog of NCBI NO: 34868434 NR Description: similar to bA16L21.2.1 (novel DnaJ domain protein to Drosophila, C. elegans and Arabidopsis predicted proteins
  misc_feature (19)..(333): Homolog of NCBI NO: 38078426 NR Description: RIKEN cDNA 2010203O07 [Mus musculus]
  misc_feature (3)..(333): Homolog of NCBI NO: 31219417 NR Description: ENSANGP00000010358 [Anopheles gambiae]
  misc_feature (8)..(333): Homolog of NCBI NO: 18859921 NR Description: CG7872-PA [Drosophila melanogaster]
MHLITCLVVYLTLIGQNKAESMLEGFYCGRDNCYDVLGVTRDTSRADIAKAYRKLAKKFHPDLYRNEDEKIEAESNFKRVANAYEILKDEESRMDYDYMLDNPEQVYSHYYRYYRRRVAPKVDVRVVIAVSITIISAIQYVTAWQRYNSAIKYLLTVPKYRNKALQIAKEKGLLEKVRKTRGKSKSEVKEETEDVIRKVLEENMDIRGAYAKPVITDILWLKIILFPVDLVKYMYWYTCWIWKHNILQLPYDDEEKLYLIRKYMKKGPNQFAAIEESEKQEYLKQELWIREKFDVWFQEKEEEQKKLLAENARYKAYRRYLKTHGTGRMTFDDS

SEQ ID NO: 59946 - protein, 313 aa, Glycine max
  peptide (1)..(313): Ceres Seq. ID no. 14314653
  misc_feature (11)..(79): Pfam Name: DnaJ domain Pfam Description: DnaJ domain
  misc_feature (1)..(241): Homolog of NCBI NO: 25404348 NR Description: hypothetical protein T13M11.13 [imported] -
  misc_feature (1)..(285): Homolog of NCBI NO: 30696610 NR Description: DnaJ protein family [Arabidopsis thaliana]
  misc_feature (78)..(312): Homolog of NCBI NO: 13874539 NR Description: hypothetical protein [Macaca fascicularis]
  misc_feature (6)..(305): Homolog of NCBI NO: 17538212 NR Description: DNaJ domain (prokaryotic heat shock protein)
  misc_feature (1)..(305): Homolog of NCBI NO: 39593758 NR Description: Hypothetical protein CBG06069 [Caenorhabditis
  misc_feature (1)..(312): Homolog of NCBI NO: 12313893 NR Description: bA16L21.2.1 (novel DnaJ domain protein similar to
  misc_feature (1)..(312): Homolog of NCBI NO: 34868434 NR Description: similar to bA16L21.2.1 (novel DnaJ domain protein to Drosophila, C. elegans and Arabidopsis predicted proteins
  misc_feature (1)..(312): Homolog of NCBI NO: 38078426 NR Description: RIKEN cDNA 2010203O07 [Mus musculus]
  misc_feature (1)..(312): Homolog of NCBI NO: 31219417 NR Description: ENSANGP00000010358 [Anopheles gambiae]
  misc_feature (1)..(312): Homolog of NCBI NO: 18859921 NR Description: CG7872-PA [Drosophila melanogaster]
MLEGFYCGRDNCYDVLGVTRDTSRADIAKAYRKLAKKFHPDLYRNEDEKIEAESNFKRVANAYEILKDEESRMDYDYMLDNPEQVYSHYYRYYRRRVAPKVDVRVVIAVSITIISAIQYVTAWQRYNSAIKYLLTVPKYRNKALQIAKEKGLLEKVRKTRGKSKSEVKEETEDVIRKVLEENMDIRGAYAKPVITDILWLKIILFPVDLVKYMYWYTCWIWKHNILQLPYDDEEKLYLIRKYMKKGPNQFAAIEESEKQEYLKQELWIREKFDVWFQEKEEEQKKLLAENARYKAYRRYLKTHGTGRMTFDDS

SEQ ID NO: 59947 - protein, 241 aa, Glycine max
  peptide (1)..(241): Ceres Seq. ID no. 14314654
  misc_feature (1)..(169): Homolog of NCBI NO: 25404348 NR Description: hypothetical protein T13M11.13 [imported] -
  misc_feature (1)..(213): Homolog of NCBI NO: 30696610 NR Description: DnaJ protein family [Arabidopsis thaliana]
  misc_feature (6)..(240): Homolog of NCBI NO: 13874539 NR Description: hypothetical protein [Macaca fascicularis]
  misc_feature (1)..(233): Homolog of NCBI NO: 17538212 NR Description: DNaJ domain (prokaryotic heat shock protein)
  misc_feature (1)..(233): Homolog of NCBI NO: 39593758 NR Description: Hypothetical protein CBG06069 [Caenorhabditis
  misc_feature (1)..(240): Homolog of NCBI NO: 12313893 NR Description: bA16L21.2.1 (novel DnaJ domain protein similar to
  misc_feature (1)..(240): Homolog of NCBI NO: 34868434 NR Description: similar to bA16L21.2.1 (novel DnaJ domain protein to Drosophila, C. elegans and Arabidopsis predicted proteins
  misc_feature (1)..(240): Homolog of NCBI NO: 38078426 NR Description: RIKEN cDNA 2010203O07 [Mus musculus]
  misc_feature (1)..(240): Homolog of NCBI NO: 31219417 NR Description: ENSANGP00000010358 [Anopheles gambiae]
  misc_feature (1)..(240): Homolog of NCBI NO: 18859921 NR Description: CG7872-PA [Drosophila melanogaster]
MDYDYMLDNPEQVYSHYYRYYRRRVAPKVDVRVVIAVSITIISAIQYVTAWQRYNSAIKYLLTVPKYRNKALQIAKEKGLLEKVRKTRGKSKSEVKEETEDVIRKVLEENMDIRGAYAKPVITDILWLKIILFPVDLVKYMYWYTCWIWKHNILQLPYDDEEKLYLIRKYMKKGPNQFAAIEESEKQEYLKQELWIREKFDVWFQEKEEEQKKLLAENARYKAYRRYLKTHGTGRMTFDDS

SEQ ID NO: 59948 - DNA, 1475 bp, Glycine max
  misc_feature (1)..(1475): Ceres Seq. ID no. 14314031
aggactagcatttgcaccaaatgtgagtcacgcagctcttcactttgaagactgaagacggtggcgtttagggtttcggaagagcatgcaattgaacccaaatggcgacggctgaagatgctccagtgctccctgaggacctcatagtggaaattctgtcatgggttgaagtgaagaatctcatgcgattcaggtgcgtttccaagtcctggaattccctcatcttcaatcccacattcattaaattgcaccttcaaaggtcctcccaaaacatccacatcctgttaacatttgaccaagattcatcgaacccctacccgtaccatgatgataactacatctccgtcgttgccgcaccctgctctatacagcgtttacttgagaacccatcatccactatttataatatagttcattttctcgaggctcagtcaacatcatcatcgtccactatttattttgatgtttgttaccgatttaagcacacttatttgttcttgggtgtatgcaatgggttggtttgcttgcttgattgtttgtatgaggatgaatttgaggaatactgggtccgattttggaacccggccactagggccatgtccgcagattcgccccacttgcgtgtccattcgagcaattataaacttggagacattgctgtgaagcatgcgtttgggtacgatgattcgagtgacacttacaaggtgttggcgatcctttttaacgttaaatcacaagattgggagctgagagttcactgcatgggtgatgacactggttggagaaatgttttgacttgttctgcttttcccattttgcaacaagtttatgggcagtttgtgagtggcactcttaactggctagcacttaacaattcgtcgggttctgatcattatcaatgggaaactgtcactgtcgatcagttagtcattttttcctatgatctgaagaacgagacatacagttatttgtcgatgcctgatggtctttctgaaatctctcttgacgagccttatcttggggttttgaatggctgcctttgtctttctcatgatcacaggcgaaccaatcttgttgtttggctaatgagagagtttggagctgaaaagtcttggactcagttgctgaatgtaagctatcatcatcttcaagttctagattttccaccttgtccagtggtacctttgtgcaagtctgaaaatgacgacgtcctgttgctggaagactatggaggtggtgcagaatttgttctggttgataagagagataatagtatagaccgcatggaaggtttcaacaatggattatcgtctttctctgcatttgtctctcatgattatgttcaaagtttggttttgccatatcgaaattaagctacctgcatttgcttatattatgtaagtggtttcagaaccgtggcatttaacatttggacaggagagatagcttgaataattttggtggttccttagttt

SEQ ID NO: 59949 - protein, 423 aa, Glycine max
  peptide (1)..(423): Ceres Seq. ID no. 14314032
  misc_feature (10)..(52): Pfam Name: F-box domain Pfam Description: F-box domain
  misc_feature (10)..(65): Homolog of NCBI NO: 25405558 NR Description: hypothetical protein F6D8.30 [imported] -
  misc_feature (139)..(254): Homolog of NCBI NO: 25405558 NR Description: hypothetical protein F6D8.30 [imported] -
  misc_feature (10)..(62): Homolog of NCBI NO: 30682162 NR Description: F-box protein family [Arabidopsis thaliana]
  misc_feature (159)..(419): Homolog of NCBI NO: 30682162 NR Description: F-box protein family [Arabidopsis thaliana]
  misc_feature (10)..(62): Homolog of NCBI NO: 7487230 NR Description: hypothetical protein T1P17.150 - Arabidopsis
  misc_feature (159)..(419): Homolog of NCBI NO: 7487230 NR Description: hypothetical protein T1P17.150 - Arabidopsis
  misc_feature (10)..(105): Homolog of NCBI NO: 15229536 NR Description: F-box protein family [Arabidopsis thaliana]
  misc_feature (174)..(344): Homolog of NCBI NO: 15229536 NR Description: F-box protein family [Arabidopsis thaliana]
  misc_feature (9)..(352): Homolog of NCBI NO: 30679777 NR Description: F-box protein family [Arabidopsis thaliana]
  misc_feature (9)..(352): Homolog of NCBI NO: 6862928 NR Description: hypothetical protein [Arabidopsis thaliana]
MATAEDAPVLPEDLIVEILSWVEVKNLMRFRCVSKSWNSLIFNPTFIKLHLQRSSQNIHILLTFDQDSSNPYPYHDDNYISVVAAPCSIQRLLENPSSTIYNIVHFLEAQSTSSSSTIYFDVCYRFKHTYLFLGVCNGLVCLLDCLYEDEFEEYWVRFWNPATRAMSADSPHLRVHSSNYKLGDIAVKHAFGYDDSSDTYKVLAILFNVKSQDWELRVHCMGDDTGWRNVLTCSAFPILQQVYGQFVSGTLNWLALNNSSGSDHYQWETVTVDQLVIFSYDLKNETYSYLSMPDGLSEISLDEPYLGVLNGCLCLSHDHRRTNLVVWLMREFGAEKSWTQLLNVSYHHLQVLDFPPCPVVPLCKSENDDVLLLEDYGGGAEFVLVDKRDNSIDRMEGFNNGLSSFSAFVSHDYVQSLVLPYRN

SEQ ID NO: 59950 - protein, 396 aa, Glycine max
  peptide (1)..(396): Ceres Seq. ID no. 14314033
  misc_feature (1)..(38): Homolog of NCBI NO: 25405558 NR Description: hypothetical protein F6D8.30 [imported] -
  misc_feature (112)..(227): Homolog of NCBI NO: 25405558 NR Description: hypothetical protein F6D8.30 [imported] -
  misc_feature (1)..(35): Homolog of NCBI NO: 30682162 NR Description: F-box protein family [Arabidopsis thaliana]
  misc_feature (132)..(392): Homolog of NCBI NO: 30682162 NR Description: F-box protein family [Arabidopsis thaliana]
  misc_feature (1)..(35): Homolog of NCBI NO: 7487230 NR Description: hypothetical protein T1P17.150 - Arabidopsis
  misc_feature (132)..(392): Homolog of NCBI NO: 7487230 NR Description: hypothetical protein T1P17.150 - Arabidopsis
  misc_feature (1)..(78): Homolog of NCBI NO: 15229536 NR Description: F-box protein family [Arabidopsis thaliana]
  misc_feature (147)..(317): Homolog of NCBI NO: 15229536 NR Description: F-box protein family [Arabidopsis thaliana]
  misc_feature (1)..(325): Homolog of NCBI NO: 30679777 NR Description: F-box protein family [Arabidopsis thaliana]
  misc_feature (1)..(325): Homolog of NCBI NO: 6862928 NR Description: hypothetical protein [Arabidopsis thaliana]
MRFRCVSKSWNSLIFNPTFIKLHLQRSSQNIHILLTFDQDSSNPYPYHDDNYISVVAAPCSIQRLLENPSSTIYNIVHFLEAQSTSSSSTIYFDVCYRFKHTYLFLGVCNGLVCLLDCLYEDEFEEYWVRFWNPATRAMSADSPHLRVHSSNYKLGDIAVKHAFGYDDSSDTYKVLAILFNVKSQDWELRVHCMGDDTGWRNVLTCSAFPILQQVYGQFVSGTLNWLALNNSSGSDHYQWETVTVDQLVIFSYDLKNETYSYLSMPDGLSEISLDEPYLGVLNGCLCLSHDHRRTNLVVWLMREFGAEKSWTQLLNVSYHHLQVLDFPPCPVVPLCKSENDDVLLLEDYGGGAEFVLVDKRDNSIDRMEGFNNGLSSFSAFVSHDYVQSLVLPYRN

SEQ ID NO: 59951 - protein, 258 aa, Glycine max
  peptide (1)..(258): Ceres Seq. ID no. 14314034
  misc_feature (26)..(89): Homolog of NCBI NO: 22330194 NR Description: F-box protein family [Arabidopsis thaliana]
  misc_feature (1)..(254): Homolog of NCBI NO: 15235636 NR Description: F-box protein-related [Arabidopsis thaliana]
  misc_feature (1)..(89): Homolog of NCBI NO: 25405558 NR Description: hypothetical protein F6D8.30 [imported] -
  misc_feature (1)..(254): Homolog of NCBI NO: 30682162 NR Description: F-box protein family [Arabidopsis thaliana]
  misc_feature (1)..(254): Homolog of NCBI NO: 7487230 NR Description: hypothetical protein T1P17.150 - Arabidopsis
  misc_feature (9)..(179): Homolog of NCBI NO: 15229536 NR Description: F-box protein family [Arabidopsis thaliana]
  misc_feature (1)..(187): Homolog of NCBI NO: 30679777 NR Description: F-box protein family [Arabidopsis thaliana]
  misc_feature (1)..(187): Homolog of NCBI NO: 6862928 NR Description: hypothetical protein [Arabidopsis thaliana]
MSADSPHLRVHSSNYKLGDIAVKHAFGYDDSSDTYKVLAILFNVKSQDWELRVHCMGDDTGWRNVLTCSAFPILQQVYGQFVSGTLNWLALNNSSGSDHYQWETVTVDQLVIFSYDLKNETYSYLSMPDGLSEISLDEPYLGVLNGCLCLSHDHRRTNLVVWLMREFGAEKSWTQLLNVSYHHLQVLDFPPCPVVPLCKSENDDVLLLEDYGGGAEFVLVDKRDNSIDRMEGFNNGLSSFSAFVSHDYVQSLVLPYRN

SEQ ID NO: 59952 - DNA, 1296 bp, Glycine max
  misc_feature (1)..(1296): Ceres Seq. ID no. 14314050
atttatcatttcattcctataaagtgagtaatcgtgtcctgtcagtagatattccaaaaatgatttttcattaaaattaaaaacaattactttatcctcctccaaactccaaagtgagtaaccatatatagccaccctctctcctccgatcactctccactccagtgtggaaaatcaaaacaaggtgccatctttgtttgtcatacatgaccatggccatgcccctgtttctgatgttccttcttctgcacatagcttgggtggcatcgtcggatctccgacctgggttttactcaaaaacatgtccaaaagcggaactcatagtccgagatgtgatgaagaaggcccttatgagggaacccagaagtgttgcctctgttatgcgcttccagttccatgattgctttgtcaacgggtgtgatggttctatgctgcttgatgatacaccaacgatgctgggggagaaattggccctctcaaatataaattcgctgagatcgtatgaagttgtcgatcaagtgaaggaagcgctcgagaaggactgcccctgagtggtttcctgtgctgacatcataattatggcatctagagatgctgtctctctgacaggtggacctgagtgggaggtgaggttgggaagattggacagcttgagtgctaatcaagaagactcaaacaacatcatgccaagcccaagagccaacgcaagctctcttattgatctcttccagaaatataaccttactgtgaaagacctggtagcactctcaggatctcactctattggccaaggtcgttgtttctccatcatgtttaggctatacaatcaatctggaactggaaggcctgaccctgccattgaccctagctatagacaataccttaacaggctatgtccactggatgttgaccaaaatgtcacagggaaccttgattccacgcctctcgtctttgataaccaatatttcaaggacttggctgctgggaggggctttctcaattctgatcaaacactcttcacattcccccacacaagggagtttgtgaggttatttagtagacgcaaaactgagtttttcaaggcatttgtggaaggaatgttgaaaatgggtgacttgcagtctggtcgacctggggaagttaggactaactgcaggctcgtcaatgctcgcccgattaatttgctgcttcagtctccacacaacatggagagtaacgataaataaataaaaaataaatgcgtgtctcttcatattatatgttatccaaatatgaaacgaaatattttcacttccg

SEQ ID NO: 59953 - protein, 215 aa, Glycine max
  peptide (1)..(215): Ceres Seq. ID no. 14314051
  misc_feature (1)..(160): Pfam Name: Peroxidase Pfam Description: Peroxidase
  misc_feature (1)..(196): Homolog of NCBI NO: 1402918 NR Description: peroxidase [Arabidopsis thaliana]
  misc_feature (1)..(197): Homolog of NCBI NO: 15234394 NR Description: peroxidase, putative [Arabidopsis thaliana]
  misc_feature (1)..(196): Homolog of NCBI NO: 18420061 NR Description: peroxidase, putative [Arabidopsis thaliana]
  misc_feature (1)..(196): Homolog of NCBI NO: 2129513 NR Description: peroxidase (EC 1.11.1.7) A3a precursor - Japanese
  misc_feature (1)..(196): Homolog of NCBI NO: 21593604 NR Description: peroxidase ATP N [Arabidopsis thaliana]
  misc_feature (1)..(196): Homolog of NCBI NO: 1403134 NR Description: peroxidase [Arabidopsis thaliana]
  misc_feature (1)..(196): Homolog of NCBI NO: 21537275 NR Description: putative peroxidase [Arabidopsis thaliana]
  misc_feature (1)..(196): Homolog of NCBI NO: 15224116 NR Description: peroxidase, putative [Arabidopsis thaliana]
  misc_feature (1)..(204): Homolog of NCBI NO: 19698448 NR Description: gaiacol peroxidase [Gossypium hirsutum]
  misc_feature (1)..(206): Homolog of NCBI NO: 15227200 NR Description: putative peroxidase [Arabidopsis thaliana]
MASRDAVSLTGGPEWEVRLGRLDSLSANQEDSNNIMPSPRANASSLIDLFQKYNLTVKDLVALSGSHSIGQGRCFSIMFRLYNQSGTGRPDPAIDPSYRQYLNRLCPLDVDQNVTGNLDSTPLVFDNQYFKDLAAGRGFLNSDQTLFTFPHTREFVRLFSRRKTEFFKAFVEGMLKMGDLQSGRPGEVRTNCRLVNARPINLLLQSPHNMESNDK

SEQ ID NO: 59954 - protein, 180 aa, Glycine max
  peptide (1)..(180): Ceres Seq. ID no. 14314052
  misc_feature (1)..(125): Pfam Name: Peroxidase Pfam Description: Peroxidase
  misc_feature (1)..(161): Homolog of NCBI NO: 1402918 NR Description: peroxidase [Arabidopsis thaliana]
  misc_feature (1)..(162): Homolog of NCBI NO: 15234394 NR Description: peroxidase, putative [Arabidopsis thaliana]
  misc_feature (1)..(161): Homolog of NCBI NO: 18420061 NR Description: peroxidase, putative [Arabidopsis thaliana]
  misc_feature (1)..(161): Homolog of NCBI NO: 2129513 NR Description: peroxidase (EC 1.11.1.7) A3a precursor - Japanese
  misc_feature (1)..(161): Homolog of NCBI NO: 21593604 NR Description: peroxidase ATP N [Arabidopsis thaliana]
  misc_feature (1)..(161): Homolog of NCBI NO: 1403134 NR Description: peroxidase [Arabidopsis thaliana]
  misc_feature (1)..(161): Homolog of NCBI NO: 21537275 NR Description: putative peroxidase [Arabidopsis thaliana]
  misc_feature (1)..(161): Homolog of NCBI NO: 15224116 NR Description: peroxidase, putative [Arabidopsis thaliana]
  misc_feature (1)..(169): Homolog of NCBI NO: 19698448 NR Description: gaiacol peroxidase [Gossypium hirsutum]
  misc_feature (1)..(171): Homolog of NCBI NO: 15227200 NR Description: putative peroxidase [Arabidopsis thaliana]
MPSPRANASSLIDLFQKYNLTVKDLVALSGSHSIGQGRCFSIMFRLYNQSGTGRPDPAIDPSYRQYLNRLCPLDVDQNVTGNLDSTPLVFDNQYFKDLAAGRGFLNSDQTLFTFPHTREFVRLFSRRKTEFFKAFVEGMLKMGDLQSGRPGEVRTNCRLVNARPINLLLQSPHNMESNDK

SEQ ID NO: 59955 - protein, 138 aa, Glycine max
  peptide (1)..(138): Ceres Seq. ID no. 14314053
  misc_feature (1)..(83): Pfam Name: Peroxidase Pfam Description: Peroxidase
  misc_feature (1)..(119): Homolog of NCBI NO: 1402918 NR Description: peroxidase [Arabidopsis thaliana]
  misc_feature (1)..(120): Homolog of NCBI NO: 15234394 NR Description: peroxidase, putative [Arabidopsis thaliana]
  misc_feature (1)..(119): Homolog of NCBI NO: 18420061 NR Description: peroxidase, putative [Arabidopsis thaliana]
  misc_feature (1)..(119): Homolog of NCBI NO: 2129513 NR Description: peroxidase (EC 1.11.1.7) A3a precursor - Japanese
  misc_feature (1)..(119): Homolog of NCBI NO: 21593604 NR Description: peroxidase ATP N [Arabidopsis thaliana]
  misc_feature (1)..(119): Homolog of NCBI NO: 1403134 NR Description: peroxidase [Arabidopsis thaliana]
  misc_feature (1)..(119): Homolog of NCBI NO: 21537275 NR Description: putative peroxidase [Arabidopsis thaliana]
  misc_feature (1)..(119): Homolog of NCBI NO: 15224116 NR Description: peroxidase, putative [Arabidopsis thaliana]
  misc_feature (1)..(127): Homolog of NCBI NO: 19698448 NR Description: gaiacol peroxidase [Gossypium hirsutum]
  misc_feature (1)..(129): Homolog of NCBI NO: 15227200 NR Description: putative peroxidase [Arabidopsis thaliana]
MFRLYNQSGTGRPDPAIDPSYRQYLNRLCPLDVDQNVTGNLDSTPLVFDNQYFKDLAAGRGFLNSDQTLFTFPHTREFVRLFSRRKTEFFKAFVEGMLKMGDLQSGRPGEVRTNCRLVNARPINLLLQSPHNMESNDK

SEQ ID NO: 59956 - DNA, 1103 bp, Glycine max
  misc_feature (1)..(1103): Ceres Seq. ID no. 14306201
atttgttccattccgtgcgcggtgaatggtgatcttattgtatttgagacttgagttggaagtcatggcgattggtaatgagaatcagccacaacaatctgaaggcaaagtgtggaatttgttcaagcttccctttcgccattcaacttcaactcctcacaatcacaatcaagtttccacctccaattctgtttcttcctttgccaaatcgctcctcccctcaccacgtcgtcttaagcttgatccttccaacaagctctacttcccttatgagccgggcaagcagggtaggagtgccatcaggattaaaaacaccagcaaatccaacgtagctttcaagtttcaaacaaatgcacccaagagttgtttcatgcgccctcctgggggcattctggcaccgggcgagagtataattgcaactgtgttcaagtttatagaacatccattgaataatgaaaagccagaaaaaactggactcaaattcaaaatcacgagcttgaaggtcaaaggaccaattgattatgtccctgaaatgtttgatgagctgaaggatcaagtaacagtggagcagattttgcaggttgtttttcttgatccagagcgtaactgtcctgctttggaaaaactgaagcttcagctggttgaggctgatgctgctgttgaggcacgtaagagagccccagaagatgcaggtcctaagattctcggagaagggctcgtcgtagatgaatggaaagagaggagggaaagatacctggccaaacagcagggtgaagtggtagtggactctatatagctaagttttgagtaggaaattgtgttactgcgggaaggtgactttagggaaacaattatatttaatcgcaacgtttggcttagcgaaaattaaagtggtgaatgactagcgtgaagtgttcttttgagaaacttatgattagatgagaacatcctctattatgtacataagtgtcagtgtcattgcatttgggtttcctggaatgatattttgatggattgatgtaaaatggtagtttttgtaagatggatgatttgctgtcatggcatggtttcatggtaaacttcaattgttgagattttcatcc

SEQ ID NO: 59957 - protein, 256 aa, Glycine max
  peptide (1)..(256): Ceres Seq. ID no. 14306202
  misc_feature (46)..(251): Homolog of NCBI NO: 25365874 NR Description: hypothetical protein AT4g05060 [imported] -
  misc_feature (55)..(256): Homolog of NCBI NO: 1800147 NR Description: membrane associated protein [Arabidopsis thaliana]
  misc_feature (55)..(236): Homolog of NCBI NO: 8809582 NR Description: membrane associated protein [Arabidopsis thaliana]
  misc_feature (46)..(251): Homolog of NCBI NO: 21593103 NR Description: membrane associated protein-like protein
  misc_feature (46)..(251): Homolog of NCBI NO: 18412787 NR Description: VAMP (vesicle-associated membrane
  misc_feature (55)..(256): Homolog of NCBI NO: 18423592 NR Description: VAMP (vesicle-associated membrane
  misc_feature (48)..(256): Homolog of NCBI NO: 7485721 NR Description: hypothetical protein F18E5.70 - Arabidopsis
  misc_feature (53)..(256): Homolog of NCBI NO: 34394013 NR Description: putative 27k vesicle-associated membrane
  misc_feature (48)..(256): Homolog of NCBI NO: 18415696 NR Description: VAMP (vesicle-associated membrane
MVILLYLRLELEVMAIGNENQPQQSEGKVWNLFKLPFRHSTSTPHNHNQVSTSNSVSSFAKSLLPSPRRLKLDPSNKLYFPYEPGKQGRSAIRIKNTSKSNVAFKFQTNAPKSCFMRPPGGILAPGESIIATVFKFIEHPLNNEKPEKTGLKFKITSLKVKGPIDYVPEMFDELKDQVTVEQILQVVFLDPERNCPALEKLKLQLVEADAAVEARKRAPEDAGPKILGEGLVVDEWKERRERYLAKQQGEVVVDSI

SEQ ID NO: 59958 - protein, 243 aa, Glycine max
  peptide (1)..(243): Ceres Seq. ID no. 14306203
  misc_feature (33)..(238): Homolog of NCBI NO: 25365874 NR Description: hypothetical protein AT4g05060 [imported] -
  misc_feature (42)..(243): Homolog of NCBI NO: 1800147 NR Description: membrane associated protein [Arabidopsis thaliana]
  misc_feature (42)..(223): Homolog of NCBI NO: 8809582 NR Description: membrane associated protein [Arabidopsis thaliana]
  misc_feature (33)..(238): Homolog of NCBI NO: 21593103 NR Description: membrane associated protein-like protein
  misc_feature (33)..(238): Homolog of NCBI NO: 18412787 NR Description: VAMP (vesicle-associated membrane
  misc_feature (42)..(243): Homolog of NCBI NO: 18423592 NR Description: VAMP (vesicle-associated membrane
  misc_feature (35)..(243): Homolog of NCBI NO: 7485721 NR Description: hypothetical protein F18E5.70 - Arabidopsis
  misc_feature (40)..(243): Homolog of NCBI NO: 34394013 NR Description: putative 27k vesicle-associated membrane
  misc_feature (35)..(243): Homolog of NCBI NO: 18415696 NR Description: VAMP (vesicle-associated membrane
MAIGNENQPQQSEGKVWNLFKLPFRHSTSTPHNHNQVSTSNSVSSFAKSLLPSPRRLKLDPSNKLYFPYEPGKQGRSAIRIKNTSKSNVAFKFQTNAPKSCFMRPPGGILAPGESIIATVFKFIEHPLNNEKPEKTGLKFKITSLKVKGPIDYVPEMFDELKDQVTVEQILQVVFLDPERNCPALEKLKLQLVEADAAVEARKRAPEDAGPKILGEGLVVDEWKERRERYLAKQQGEVVVDSI

SEQ ID NO: 59959 - protein, 141 aa, Glycine max
  peptide (1)..(141): Ceres Seq. ID no. 14306204
  misc_feature (1)..(136): Homolog of NCBI NO: 25365874 NR Description: hypothetical protein AT4g05060 [imported] -
  misc_feature (1)..(141): Homolog of NCBI NO: 1800147 NR Description: membrane associated protein [Arabidopsis thaliana]
  misc_feature (1)..(121): Homolog of NCBI NO: 8809582 NR Description: membrane associated protein [Arabidopsis thaliana]
  misc_feature (1)..(136): Homolog of NCBI NO: 21593103 NR Description: membrane associated protein-like protein
  misc_feature (1)..(136): Homolog of NCBI NO: 18412787 NR Description: VAMP (vesicle-associated membrane
  misc_feature (1)..(141): Homolog of NCBI NO: 18423592 NR Description: VAMP (vesicle-associated membrane
  misc_feature (1)..(141): Homolog of NCBI NO: 7485721 NR Description: hypothetical protein F18E5.70 - Arabidopsis
  misc_feature (1)..(141): Homolog of NCBI NO: 34394013 NR Description: putative 27k vesicle-associated membrane
  misc_feature (1)..(141): Homolog of NCBI NO: 18415696 NR Description: VAMP (vesicle-associated membrane
MRPPGGILAPGESIIATVFKFIEHPLNNEKPEKTGLKFKITSLKVKGPIDYVPEMFDELKDQVTVEQILQVVFLDPERNCPALEKLKLQLVEADAAVEARKRAPEDAGPKILGEGLVVDEWKERRERYLAKQQGEVVVDSI

SEQ ID NO: 59960 - DNA, 1460 bp, Glycine max
  misc_feature (1)..(1460): Ceres Seq. ID no. 14314789
gaaagtgttgtgcgtgctacgcgcggaacctgtcgtttcgagttctacttgtacgttctaccacctttgagtatcttaaacaatctaccatacgtggatcaaaacaccattgccattggctctctttctttgccgtaccatttgaattgaatgtgattgcaattgcaaatccccccttcaattcaattactactttcacgacctaatctaacccttcgctctgctctgctctcacttcaccatattcacacccagatggaaactgtttgtctccactgtggcgacagaggctttccagagacattggttttttgcaccgaatgtatggcttatgcgctgcataggtactgtttaaaggggcttgtgaattttactgatgctgttacatggttttgcgaggattgtgcaacaaagcttggggtgccacctgctcttgaccaatctacacctatcgcatctgtaacaagagaaaattgcatacagggagtgaaaaaacacaataaacagcaaaaaaagaagattacaaagaagcagattgaaggaaaagctaacgctggcttagttgctaaaacaaagggtgtgttatctgctagtcacagttcatctgagcctgagcatcctcattgtagtaacagaggcgaagaagaacatgaggtgaaaaatgactgtggaccagttccaagggatgtagctaattttgatgtaggtgaagaagaaagtgtggcaagggatttagctaattctgatgtaagtttcaaatctgttccagtttctcaaggagctaccaatagtgattcaggttgtgtagaagtagatggtcatgtttatgcacagcctactattgatccaatctggaggggaagtatgtacttttgcaatggaacaattcgtactgtcagtggacttctggctcatatctccaatttagcgtgctcccaagttgcggaggagacaggacatttcccagaagtgcttcatgcagaatttcttcccagagataaggtgtgggctgaaagtttcaagaggggggatccaactgatcaggacattgctctttttttctttcctgacagtgaaggatctgaaaaggacttcgatgtgctggttgaagatatcatgatctgtaaacatgtcataagatttgtgggtaaaaatgcagagcttttaatttttccttctactgagcttccagtccaaaattggagatatgaagccaagtattatttgtggggtgtcttcagaaagaaagcaaacttaagaagagacaaatgatgcagtgtgcagagtttgacaaggctcttaggttggcataaccatagacgtagtctccatctaaaaatttgagcaatagtggttgtgtagctatgactctagtgcatagtactcctgtgtttatagtcactgatatgttaattaaacatatatatactgtagtgcatagtaccctttttgtgaaaaat

SEQ ID NO: 59961 - protein, 338 aa, Glycine max
  peptide (1)..(338): Ceres Seq. ID no. 14314790
  misc_feature (4)..(50): Pfam Name: PHD-finger Pfam Description: PHD-finger
  misc_feature (4)..(136): Homolog of NCBI NO: 25405141 NR Description: hypothetical protein F28H19.3 [imported] -
  misc_feature (4)..(136): Homolog of NCBI NO: 30693717 NR Description: expressed protein [Arabidopsis thaliana]
  misc_feature (79)..(274): Homolog of NCBI NO: 30693717 NR Description: expressed protein [Arabidopsis thaliana]
  misc_feature (192)..(328): Homolog of NCBI NO: 7488990 NR Description: DNA binding protein E4/E8BP-1 - tomato
  misc_feature (4)..(50): Homolog of NCBI NO: 15233015 NR Description: expressed protein [Arabidopsis thaliana]
  misc_feature (192)..(331): Homolog of NCBI NO: 15233015 NR Description: expressed protein [Arabidopsis thaliana]
  misc_feature (4)..(106): Homolog of NCBI NO: 30685968 NR Description: expressed protein [Arabidopsis thaliana]
  misc_feature (154)..(337): Homolog of NCBI NO: 30685968 NR Description: expressed protein [Arabidopsis thaliana]
  misc_feature (4)..(106): Homolog of NCBI NO: 11357809 NR Description: hypothetical protein F5E19_20 - Arabidopsis
  misc_feature (154)..(337): Homolog of NCBI NO: 11357809 NR Description: hypothetical protein F5E19_20 - Arabidopsis
METVCLHCGDRGFPETLVFCTECMAYALHRYCLKGLVNFTDAVTWFCEDCATKLGVPPALDQSTPIASVTRENCIQGVKKHNKQQKKKITKKQIEGKANAGLVAKTKGVLSASHSSSEPEHPHCSNRGEEEHEVKNDCGPVPRDVANFDVGEEESVARDLANSDVSFKSVPVSQGATNSDSGCVEVDGHVYAQPTIDPIWRGSMYFCNGTIRTVSGLLAHISNLACSQVAEETGHFPEVLHAEFLPRDKVWAESFKRGDPTDQDIALFFFPDSEGSEKDFDVLVEDIMICKHVIRFVGKNAELLIFPSTELPVQNWRYEAKYYLWGVFRKKANLRRDK

SEQ ID NO: 59962 - protein, 315 aa, Glycine max
  peptide (1)..(315): Ceres Seq. ID no. 14314791
  misc_feature (1)..(113): Homolog of NCBI NO: 25405141 NR Description: hypothetical protein F28H19.3 [imported] -
  misc_feature (1)..(113): Homolog of NCBI NO: 30693717 NR Description: expressed protein [Arabidopsis thaliana]
  misc_feature (56)..(251): Homolog of NCBI NO: 30693717 NR Description: expressed protein [Arabidopsis thaliana]
  misc_feature (169)..(305): Homolog of NCBI NO: 7488990 NR Description: DNA binding protein E4/E8BP-1 - tomato
  misc_feature (1)..(27): Homolog of NCBI NO: 15233015 NR Description: expressed protein [Arabidopsis thaliana]
  misc_feature (169)..(308): Homolog of NCBI NO: 15233015 NR Description: expressed protein [Arabidopsis thaliana]
  misc_feature (1)..(83): Homolog of NCBI NO: 30685968 NR Description: expressed protein [Arabidopsis thaliana]
  misc_feature (131)..(314): Homolog of NCBI NO: 30685968 NR Description: expressed protein [Arabidopsis thaliana]
  misc_feature (1)..(83): Homolog of NCBI NO: 11357809 NR Description: hypothetical protein F5E19_20 - Arabidopsis
  misc_feature (131)..(314): Homolog of NCBI NO: 11357809 NR Description: hypothetical protein F5E19_20 - Arabidopsis
MAYALHRYCLKGLVNFTDAVTWFCEDCATKLGVPPALDQSTPIASVTRENCIQGVKKHNKQQKKKITKKQIEGKANAGLVAKTKGVLSASHSSSEPEHPHCSNRGEEEHEVKNDCGPVPRDVANFDVGEEESVARDLANSDVSFKSVPVSQGATNSDSGCVEVDGHVYAQPTIDPIWRGSMYFCNGTIRTVSGLLAHISNLACSQVAEETGHFPEVLHAEFLPRDKVWAESFKRGDPTDQDIALFFFPDSEGSEKDFDVLVEDIMICKHVIRFVGKNAELLIFPSTELPVQNWRYEAKYYLWGVFRKKANLRRDK

SEQ ID NO: 59963 - DNA, 634 bp, Glycine max
  misc_feature (1)..(634): Ceres Seq. ID no. 12608143
atatgaacacgcaaggtaagttaaggagaccaaaggaagaagaagaagtagtggagtgatcctggttgggtgtgaaaaatgtcgcacagcgataccataccccttcacccatcttcccaatccgacattgacgagatcgagaacctcatcaatgccagcgttcaccaatcagtcccttcggcgagacctcccagtcccccacgcgcctccatccccgtctccgtctccgccgccccttcccccttcatctcctccaacctccctccaccgccacccctccctaaatcctccgtctccgccgtccctccgccccctcccccgccgcgcgccgacatctcctcctccgggttcggctccgcccccaacacgctcactgagcccgtctgggacaccgtgaagcgcgatctctcgagaatcgtgagcaatctgaagctcgttgtgttccccaaccctttccgcgaggaccccggtaaggccctcagggattgggatctgtggggccctttcttcttcattgtcttcctcggcctcaccctctcttggtctgcctctgtcaaaaagtctgaggtttttgctgttgcatttgctttacttgctgctggcgctgtaattttgacattgaacgtacttcttc

SEQ ID NO: 59964 - protein, 185 aa, Glycine max
  peptide (1)..(185): Ceres Seq. ID no. 12608144
  misc_feature (106)..(184): Pfam Name: Yip1 domain Pfam Description: Yip1 domain
  misc_feature (94)..(123): Homolog of NCBI NO: 32411483 NR Description: hypothetical protein [Neurospora crassa]
  misc_feature (130)..(184): Homolog of NCBI NO: 32411483 NR Description: hypothetical protein [Neurospora crassa]
  misc_feature (96)..(184): Homolog of NCBI NO: 29374033 NR Description: terbinafine resistance locus protein YIP1
  misc_feature (96)..(184): Homolog of NCBI NO: 17509487 NR Description: Yeast YIP1 protein like [Caenorhabditis elegans]
  misc_feature (96)..(184): Homolog of NCBI NO: 39580726 NR Description: Hypothetical protein CBG08721 [Caenorhabditis
  misc_feature (2)..(184): Homolog of NCBI NO: 34908612 NR Description: P0677H08.6 [Oryza sativa (japonica
  misc_feature (1)..(184): Homolog of NCBI NO: 18417560 NR Description: hypothetical protein common family
  misc_feature (1)..(184): Homolog of NCBI NO: 21553537 NR Description: unknown [Arabidopsis thaliana]
  misc_feature (1)..(184): Homolog of NCBI NO: 7486761 NR Description: hypothetical protein F9N11.110 - Arabidopsis
  misc_feature (1)..(184): Homolog of NCBI NO: 18398861 NR Description: Expressed protein
MSHSDTIPLHPSSQSDIDEIENLINASVHQSVPSARPPSPPRASIPVSVSAAPSPFISSNLPPPPPLPKSSVSAVPPPPPPPRADISSSGFGSAPNTLTEPVWDTVKRDLSRIVSNLKLVVFPNPFREDPGKALRDWDLWGPFFFIVFLGLTLSWSASVKKSEVFAVAFALLAAGAVILTLNVLL

SEQ ID NO: 59965 - DNA, 663 bp, Glycine max
  misc_feature (1)..(663): Ceres Seq. ID no. 13581656
atagtatatgatcctgatccaatccttgacagctaggaagcgtctgagtccgagggaagacatgttcccacaaaccctaatattgttctcagcactcataatcctcttccatggagatctcgtcttaagcacaacagcaccagatgatatccacgatgttctccctcagtacggtttcccaaagggtcttcttcccaacaacgcggtctcctacaccctctcccccgacgatggcttcttcaccgtccagctcgatgccccctgctacgtccactgggacgaccaattagtctactaccacagccaaatcagtggcactctcacctacggttccgtctcgcacgtgtcggggattcaggcccagaaactcttcctctggctccctgttaccggaattaaggtccaccaggattccggcatgttagagttcttcgttggagctttgtcccagacgctacccgccagcgacttccaggatgtgcctgggtgctcccgcagaggatcgctgctcgctacaaacctcattcttcctctctgaccgtattcatctctgtctattctctcctactcatcttgttcaacttcaaattaattgtttcatactcaaatactacctactagcctactaccatgttaatgttaattaaaattatagggattttc

SEQ ID NO: 59966 - protein, 176 aa, Glycine max
  peptide (1)..(176): Ceres Seq. ID no. 13581657
  misc_feature (44)..(163): Pfam Name: Protein of unknown function, DUF538 Pfam Description: Protein of unknown function, DUF538
  misc_feature (39)..(172): Homolog of NCBI NO: 34906900 NR Description: P0470A12.30 [Oryza sativa (japonica
  misc_feature (28)..(168): Homolog of NCBI NO: 18407279 NR Description: expressed protein [Arabidopsis thaliana]
  misc_feature (24)..(168): Homolog of NCBI NO: 21553956 NR Description: unknown [Arabidopsis thaliana]
  misc_feature (26)..(167): Homolog of NCBI NO: 30696469 NR Description: expressed protein [Arabidopsis thaliana]
  misc_feature (26)..(168): Homolog of NCBI NO: 9758945 NR Description: gb|AAF02153.1~gene_id:MRB17.3~similar to unknown
  misc_feature (44)..(166): Homolog of NCBI NO: 34898576 NR Description: P0534A03.14 [Oryza sativa (japonica
  misc_feature (19)..(165): Homolog of NCBI NO: 18420052 NR Description: expressed protein [Arabidopsis thaliana]
  misc_feature (23)..(161): Homolog of NCBI NO: 28273404 NR Description: unknown protein [Oryza sativa (japonica
  misc_feature (19)..(167): Homolog of NCBI NO: 28273408 NR Description: unknown protein [Oryza sativa (japonica
  misc_feature (2)..(167): Homolog of NCBI NO: 18405296 NR Description: expressed protein [Arabidopsis thaliana]
MILIQSLTARKRLSPREDMFPQTLILFSALIILFHGDLVLSTTAPDDIHDVLPQYGFPKGLLPNNAVSYTLSPDDGFFTVQLDAPCYVHWDDQLVYYHSQISGTLTYGSVSHVSGIQAQKLFLWLPVTGIKVHQDSGMLEFFVGALSQTLPASDFQDVPGCSRRGSLLATNLILPL

SEQ ID NO: 59967 - protein, 158 aa, Glycine max
  peptide (1)..(158): Ceres Seq. ID no. 13581658
  misc_feature (26)..(145): Pfam Name: Protein of unknown function, DUF538 Pfam Description: Protein of unknown function, DUF538
  misc_feature (21)..(154): Homolog of NCBI NO: 34906900 NR Description: P0470A12.30 [Oryza sativa (japonica
  misc_feature (10)..(150): Homolog of NCBI NO: 18407279 NR Description: expressed protein [Arabidopsis thaliana]
  misc_feature (6)..(150): Homolog of NCBI NO: 21553956 NR Description: unknown [Arabidopsis thaliana]
  misc_feature (8)..(149): Homolog of NCBI NO: 30696469 NR Description: expressed protein [Arabidopsis thaliana]
  misc_feature (8)..(150): Homolog of NCBI NO: 9758945 NR Description: gb|AAF02153.1~gene_id:MRB17.3~similar to unknown
  misc_feature (26)..(148): Homolog of NCBI NO: 34898576 NR Description: P0534A03.14 [Oryza sativa (japonica
  misc_feature (1)..(147): Homolog of NCBI NO: 18420052 NR Description: expressed protein [Arabidopsis thaliana]
  misc_feature (5)..(143): Homolog of NCBI NO: 28273404 NR Description: unknown protein [Oryza sativa (japonica
  misc_feature (1)..(149): Homolog of NCBI NO: 28273408 NR Description: unknown protein [Oryza sativa (japonica
  misc_feature (1)..(149): Homolog of NCBI NO: 18405296 NR Description: expressed protein [Arabidopsis thaliana]
MFPQTLILFSALIILFHGDLVLSTTAPDDIHDVLPQYGFPKGLLPNNAVSYTLSPDDGFFTVQLDAPCYVHWDDQLVYYHSQISGTLTYGSVSHVSGIQAQKLFLWLPVTGIKVHQDSGMLEFFVGALSQTLPASDFQDVPGCSRRGSLLATNLILPL

SEQ ID NO: 59968 - DNA, 1605 bp, Glycine max
  misc_feature (1)..(1605): Ceres Seq. ID no. 15171618
actcatttccacatctctgacagaaaatggagaactatcagtacccggcgtcgtaccctgactccggcgagtcgtcgccgcgctcccgcgagatcgacttcgagaacccgccgccgtgggacgagcagcagaaccaaaactacaaggccaagttcatgtgcagctacggcggcaagatccagccccgcacccacgacaaccagctctcctacgtcggcggcgacaccaagatcctcgccgtcgaccgctccgtcaagttccccgccttcctctccaagctcgccgccgtctgcgactccgccccgcaggacctcaccttcaagtaccagctccccggtgaggacctcgacgccctcatctccgtcaccaacgacgacgacctcgaacacatgatgcacgagtacgacagactctatcgccctaacctaaaacctgttagaatgagactcttcctcttcacgctctctagttcaaatcctaattcctctttctcctccgaacgcgaccatttcgtcgaggctcttaattcgggtccgattccttctcaacccgacccgatcaaaaccccgcccgttacgccttctaatgttgactatctcttcggtctcgataaagccgttgctcctcctccaaatcttcctccgaacttcgcagcggttaaattccacgatccggtgccggagcctgtcgcgccgccggtagagtatcaatcgagaggctccgatcgggttgttggatcggatccgaatgtgaatccgattgaaattcagagacagttgcagcaggagatggagcgattgcagattgcggagaatgaatatcgtagaaggagtgaggatggatttgcagccggttatgctgctgctgctgctgccggaggggattattatatgcagaaggtgcaggagaaggttccgccgcagaatgcggcggcgtactggtcggagaagcagttttccggggagggatatcagacgacggtgacgacggctccaggaggaggtgaccagccgatgtatgttatggcgccgccggggacgttctaccacgcgccagtggtgcggcctccggcggcggcgcaggggtactacgccgtgcagaggatgggttccgagggctaccgcgagcagcaggcggtttacggcggcgtggcgccgtcgaaagcggcgttttcttcggcggggatggctaaggggacggcgtattcggagggatatggtggcggcgtggtgaggcctgcgggggtgccggataatgcggcgtacgcgcaggtggcgtatgatagcgcgagtgggaggcaggtttactatactgcgcagggagggatggtgcacgcgccgccgccgccgcagtaccaaggggttccgcctcaggaatttaggccgggtggggtttcggtggggcaagatggtaaggtggttaacaaggttaaccaaggttctgcgtgattaagattgtgattatgttaattctgaaacaaataatacactaaatatgttttgcgtttttttttttttctcttcatggtttatatatatacactaaatattacgagtattgtttgctaataatttatgggtagtgcttaaacttccttctgtctgc

SEQ ID NO: 59969 - protein, 473 aa, Glycine max
  peptide (1)..(473): Ceres Seq. ID no. 15171619
  misc_feature (56)..(144): Pfam Name: PB1 domain Pfam Description: PB1 domain
  misc_feature (38)..(211): Homolog of NCBI NO: 9293928 NR Description: gb|AAF04880.1~gene_id:MFE16.2~similar to unknown
  misc_feature (8)..(207): Homolog of NCBI NO: 34895646 NR Description: P0480E02.2 [Oryza sativa (japonica
  misc_feature (44)..(168): Homolog of NCBI NO: 25410886 NR Description: hypothetical protein At2g01190 [imported] -
  misc_feature (30)..(169): Homolog of NCBI NO: 25407315 NR Description: hypothetical protein AT4g05150 [imported] -
  misc_feature (1)..(169): Homolog of NCBI NO: 18412822 NR Description: octicosapeptide/Phox/Bem1p (PB1)
  misc_feature (8)..(207): Homolog of NCBI NO: 21553908 NR Description: unknown [Arabidopsis thaliana]
  misc_feature (8)..(207): Homolog of NCBI NO: 18379168 NR Description: octicosapeptide/Phox/Bem1p (PB1)
  misc_feature (1)..(447): Homolog of NCBI NO: 15242462 NR Description: octicosapeptide/Phox/Bem1p (PB1)
  misc_feature (323)..(465): Homolog of NCBI NO: 15237703 NR Description: octicosapeptide/Phox/Bem1p (PB1)
  misc_feature (1)..(353): Homolog of NCBI NO: 15237703 NR Description: octicosapeptide/Phox/Bem1p (PB1)
MENYQYPASYPDSGESSPRSREIDFENPPPWDEQQNQNYKAKFMCSYGGKIQPRTHDNQLSYVGGDTKILAVDRSVKFPAFLSKLAAVCDSAPQDLTFKYQLPGEDLDALISVTNDDDLEHMMHEYDRLYRPNLKPVRMRLFLFTLSSSNPNSSFSSERDHFVEALNSGPIPSQPDPIKTPPVTPSNVDYLFGLDKAVAPPPNLPPNFAAVKFHDPVPEPVAPPVEYQSRGSDRVVGSDPNVNPIEIQRQLQQEMERLQIAENEYRRRSEDGFAAGYAAAAAAGGDYYMQKVQEKVPPQNAAAYWSEKQFSGEGYQTTVTTAPGGGDQPMYVMAPPGTFYHAPVVRPPAAAQGYYAVQRMGSEGYREQQAVYGGVAPSKAAFSSAGMAKGTAYSEGYGGGVVRPAGVPDNAAYAQVAYDSASGRQVYYTAQGGMVHAPPPPQYQGVPPQEFRPGGVSVGQDGKVVNKVNQGSA

SEQ ID NO: 59970 - protein, 430 aa, Glycine max
  peptide (1)..(430): Ceres Seq. ID no. 15171620
  misc_feature (13)..(101): Pfam Name: PB1 domain Pfam Description: PB1 domain
  misc_feature (1)..(168): Homolog of NCBI NO: 9293928 NR Description: gb|AAF04880.1~gene_id:MFE16.2~similar to unknown
  misc_feature (1)..(164): Homolog of NCBI NO: 34895646 NR Description: P0480E02.2 [Oryza sativa (japonica
  misc_feature (1)..(125): Homolog of NCBI NO: 25410886 NR Description: hypothetical protein At2g01190 [imported] -
  misc_feature (1)..(126): Homolog of NCBI NO: 25407315 NR Description: hypothetical protein AT4g05150 [imported] -
  misc_feature (1)..(126): Homolog of NCBI NO: 18412822 NR Description: octicosapeptide/Phox/Bem1p (PB1)
  misc_feature (1)..(164): Homolog of NCBI NO: 21553908 NR Description: unknown [Arabidopsis thaliana]
  misc_feature (1)..(164): Homolog of NCBI NO: 18379168 NR Description: octicosapeptide/Phox/Bem1p (PB1)
  misc_feature (1)..(404): Homolog of NCBI NO: 15242462 NR Description: octicosapeptide/Phox/Bem1p (PB1)
  misc_feature (280)..(422): Homolog of NCBI NO: 15237703 NR Description: octicosapeptide/Phox/Bem1p (PB1)
  misc_feature (1)..(310): Homolog of NCBI NO: 15237703 NR Description: octicosapeptide/Phox/Bem1p (PB1)
MCSYGGKIQPRTHDNQLSYVGGDTKILAVDRSVKFPAFLSKLAAVCDSAPQDLTFKYQLPGEDLDALISVTNDDDLEHMMHEYDRLYRPNLKPVRMRLFLFTLSSSNPNSSFSSERDHFVEALNSGPIPSQPDPIKTPPVTPSNVDYLFGLDKAVAPPPNLPPNFAAVKFHDPVPEPVAPPVEYQSRGSDRVVGSDPNVNPIEIQRQLQQEMERLQIAENEYRRRSEDGFAAGYAAAAAAGGDYYMQKVQEKVPPQNAAAYWSEKQFSGEGYQTTVTTAPGGGDQPMYVMAPPGTFYHAPVVRPPAAAQGYYAVQRMGSEGYREQQAVYGGVAPSKAAFSSAGMAKGTAYSEGYGGGVVRPAGVPDNAAYAQVAYDSASGRQVYYTAQGGMVHAPPPPQYQGVPPQEFRPGGVSVGQDGKVVNKVNQGSA

SEQ ID NO: 59971 - protein, 352 aa, Glycine max
  peptide (1)..(352): Ceres Seq. ID no. 15171621
  misc_feature (49)..(226): Pfam Name: Glycoprotein GG/GX Pfam Description: Glycoprotein GG/GX
  misc_feature (1)..(90): Homolog of NCBI NO: 9293928 NR Description: gb|AAF04880.1~gene_id:MFE16.2~similar to unknown
  misc_feature (1)..(86): Homolog of NCBI NO: 34895646 NR Description: P0480E02.2 [Oryza sativa (japonica
  misc_feature (1)..(47): Homolog of NCBI NO: 25410886 NR Description: hypothetical protein At2g01190 [imported] -
  misc_feature (1)..(48): Homolog of NCBI NO: 25407315 NR Description: hypothetical protein AT4g05150 [imported] -
  misc_feature (1)..(48): Homolog of NCBI NO: 18412822 NR Description: octicosapeptide/Phox/Bem1p (PB1)
  misc_feature (1)..(86): Homolog of NCBI NO: 21553908 NR Description: unknown [Arabidopsis thaliana]
  misc_feature (1)..(86): Homolog of NCBI NO: 18379168 NR Description: octicosapeptide/Phox/Bem1p (PB1)
  misc_feature (1)..(326): Homolog of NCBI NO: 15242462 NR Description: octicosapeptide/Phox/Bem1p (PB1)
  misc_feature (202)..(344): Homolog of NCBI NO: 15237703 NR Description: octicosapeptide/Phox/Bem1p (PB1)
  misc_feature (1)..(232): Homolog of NCBI NO: 15237703 NR Description: octicosapeptide/Phox/Bem1p (PB1)
MMHEYDRLYRPNLKPVRMRLFLFTLSSSNPNSSFSSERDHFVEALNSGPIPSQPDPIKTPPVTPSNVDYLFGLDKAVAPPPNLPPNFAAVKFHDPVPEPVAPPVEYQSRGSDRVVGSDPNVNPIEIQRQLQQEMERLQIAENEYRRRSEDGFAAGYAAAAAAGGDYYMQKVQEKVPPQNAAAYWSEKQFSGEGYQTTVTTAPGGGDQPMYVMAPPGTFYHAPVVRPPAAAQGYYAVQRMGSEGYREQQAVYGGVAPSKAAFSSAGMAKGTAYSEGYGGGVVRPAGVPDNAAYAQVAYDSASGRQVYYTAQGGMVHAPPPPQYQGVPPQEFRPGGVSVGQDGKVVNKVNQGSA

SEQ ID NO: 59972 - DNA, 1112 bp, Glycine max
  misc_feature (1)..(1112): Ceres Seq. ID no. 15173696
atcgttattccttccaccctgcccggtggaaccaaacgaagaagacgttccgttttccctctgcttttccaagttttcatcgactcaaccatgctattcttacataactagggttaggagttagggcgttcttatcgttttcgctccgttaattacaacaacgggcaacatggttgttctttcgctttcacctcccagcctctctaccgctttcctcgcaaagaaactgtctccccaagaacacgcggtgaagctagcgacctttcgcaactattcatttcgcattagatgcgcggtggatacgccctatggagggaatgttcaaaaattccctcgaaccaatgtttgggatccttaccgacgccttggtattagccctgatgcctctgaagaagaaatctggggatcaagaaattttctgttgcaacaatactctgggcatgagaggagtgaagaatcaatagaagcagcttttgaaaaaatattgatggcaagtttcgtacagaggaggaaaacaaaaattaatttgaaaagcaagttgaaaaaaaaagtagaagagtctccaccatgggtgaagaacttgctaagctttgttgaacttccaccgactgaagttatccttagaagattgtttctctttggcttcatgggtggctggagtattatgaattctgctgaaactggacctgcttttcaggtggcaatctctttggctgcatgcatatattttcttaacgaaaagacaaagagcttggctagagcattcattattgggtttggagctctagtggctggatgggtctctggttcattgctggtacctaatattccatctatgttgctgcgcccaacttggacacttgaactcttaacgtcattggtagtttatttgttcttgttcgttgcctgtactttcctcaagtgaagtggagcctattctttcaacgttatagtcggtgatgagcttataggtgatcaaacaattttttttaagcgagccaaattgtttactgtcatctttttttatgaaacaaattgtttaagttggcaatgttcagctgagatattactgagccttaactccttgtctaaatttccgttggttacgaggc

SEQ ID NO: 59973 - protein, 251 aa, Glycine max
  peptide (1)..(251): Ceres Seq. ID no. 15173697
  misc_feature (61)..(118): Pfam Name: DnaJ domain Pfam Description: DnaJ domain
  misc_feature (61)..(251): Homolog of NCBI NO: 22299891 NR Description: ORF_ID:tlr2348~hypothetical protein
  misc_feature (50)..(251): Homolog of NCBI NO: 16329734 NR Description: unknown protein [Synechocystis sp. PCC 6803]
  misc_feature (61)..(251): Homolog of NCBI NO: 23129945 NR Description: hypothetical protein [Nostoc punctiforme]
  misc_feature (63)..(251): Homolog of NCBI NO: 23039527 NR Description: hypothetical protein [Trichodesmium erythraeum
  misc_feature (62)..(251): Homolog of NCBI NO: 17230751 NR Description: hypothetical protein [Nostoc sp. PCC 7120]
  misc_feature (54)..(251): Homolog of NCBI NO: 18409276 NR Description: expressed protein [Arabidopsis thaliana]
  misc_feature (54)..(251): Homolog of NCBI NO: 11357625 NR Description: hypothetical protein F24M12.180 - Arabidopsis
  misc_feature (138)..(251): Homolog of NCBI NO: 37573058 NR Description: unknown protein [Oryza sativa (japonica
  misc_feature (4)..(251): Homolog of NCBI NO: 15237199 NR Description: expressed protein [Arabidopsis thaliana]
MVVLSLSPPSLSTAFLAKKLSPQEHAVKLATFRNYSFRIRCAVDTPYGGNVQKFPRTNVWDPYRRLGISPDASEEEIWGSRNFLLQQYSGHERSEESIEAAFEKILMASFVQRRKTKINLKSKLKKKVEESPPWVKNLLSFVELPPTEVILRRLFLFGFMGGWSIMNSAETGPAFQVAISLAACIYFLNEKTKSLARAFIIGFGALVAGWVSGSLLVPNIPSMLLRPTWTLELLTSLVVYLFLFVACTFLK

SEQ ID NO: 59974 - protein, 145 aa, Glycine max
  peptide (1)..(145): Ceres Seq. ID no. 15173698
  misc_feature (1)..(145): Homolog of NCBI NO: 22299891 NR Description: ORF_ID:tlr2348~hypothetical protein
  misc_feature (1)..(145): Homolog of NCBI NO: 16329734 NR Description: unknown protein [Synechocystis sp. PCC 6803]
  misc_feature (1)..(145): Homolog of NCBI NO: 23129945 NR Description: hypothetical protein [Nostoc punctiforme]
  misc_feature (1)..(145): Homolog of NCBI NO: 23039527 NR Description: hypothetical protein [Trichodesmium erythraeum
  misc_feature (1)..(145): Homolog of NCBI NO: 17230751 NR Description: hypothetical protein [Nostoc sp. PCC 7120]
  misc_feature (1)..(145): Homolog of NCBI NO: 18409276 NR Description: expressed protein [Arabidopsis thaliana]
  misc_feature (1)..(145): Homolog of NCBI NO: 11357625 NR Description: hypothetical protein F24M12.180 - Arabidopsis
  misc_feature (32)..(145): Homolog of NCBI NO: 37573058 NR Description: unknown protein [Oryza sativa (japonica
  misc_feature (1)..(145): Homolog of NCBI NO: 15237199 NR Description: expressed protein [Arabidopsis thaliana]
MASFVQRRKTKINLKSKLKKKVEESPPWVKNLLSFVELPPTEVILRRLFLFGFMGGWSIMNSAETGPAFQVAISLAACIYFLNEKTKSLARAFIIGFGALVAGWVSGSLLVPNIPSMLLRPTWTLELLTSLVVYLFLFVACTFLK

SEQ ID NO: 59975 - DNA, 1201 bp, Glycine max
  misc_feature (1)..(1201): Ceres Seq. ID no. 15175048
catgttatctacaataataaaccaagtgaagtcgtgcaagttccttcttcactttcacgacactcactcacacaccatggatttgctctcaatctctccctctcaccctttaccttcttccattcgaaccctttcctcaaaccctaagccacccatttcctcctccttcttcttcatccccaaaccccattcacgcttctccaaaaccccaccaaggtgcgtcttcacgccggcctcgccaatcccctccaaaaacacaaactttgggtcccagtttcggaaccctacgagcctcaccttcgagctctcctcgccccagactccctcgacggcggcgagaggcgcggagggcgacgtgatggggctgttgctgagagagaggattgtgttcctcgggagcagcatcgatgactttgtggccgatgctatcatgagccagttgctgctgttggatgcccaagaccccactaaggatatcaggctcttcattaattccactggtggctctctcagtgctacaatggctatctatgatgccgtacagcttgtgagggccgatgtttccacagttgcactcggcattgcagcatcaacagcttctgttatccttggtggtggcaccaaaggcaagcgctttgctatgccaaatacacgaattatgattcatcaacctctaggaggtgctagtggacaagctatagatgtagaaattcaggctaaagaagttatgcacaacaagaataatatcacaagaattatatcaagtttcactggacgctcatttgaacaagtgcaaaaagatattgatagggataaatatatgtctccaattgaagcagtggaatacggaattattgatggtgtaatcgatagagatagcattattcctctcatgccagtgccagaaagggtgaaatcaaccctaaactatgaagaaataagtaaagatcccaggaaattcctaaccccagatattcctgatgatgagatatactagctttaaatggttgatagggttataattaaccttgaatttaatgttacggtgataacagaacattttgggtaaagcttgaggatgctgtaacaaaccctgaaagatttaagattgtcttatatttttgtcttgcaattttaattttatttcgtgtgggtgagtgaaaaattatggttcagctattgagaattttgttggttatct

SEQ ID NO: 59976 - protein, 331 aa, Glycine max
  peptide (1)..(331): Ceres Seq. ID no. 15175049
  misc_feature (113)..(292): Pfam Name: Clp protease Pfam Description: Clp protease
  misc_feature (103)..(289): Homolog of NCBI NO: 15485610 NR Description: Clp protease 2 proteolytic subunit [Lycopersicon
  misc_feature (74)..(289): Homolog of NCBI NO: 18378982 NR Description: ATP-dependent Clp protease proteolytic subunit
  misc_feature (71)..(294): Homolog of NCBI NO: 25019682 NR Description: ClpP2 [Synechococcus sp. PCC 7942]
  misc_feature (44)..(329): Homolog of NCBI NO: 34914540 NR Description: putative ATP-dependent Clp protease
  misc_feature (74)..(331): Homolog of NCBI NO: 37537218 NR Description: putative Clp protease [Oryza sativa (japonica
  misc_feature (106)..(331): Homolog of NCBI NO: 4454056 NR Description: ClpP [Arabidopsis thaliana]
  misc_feature (26)..(331): Homolog of NCBI NO: 9758729 NR Description: ATP-dependent Clp protease-like protein
  misc_feature (26)..(331): Homolog of NCBI NO: 21593305 NR Description: ATP-dependent Clp protease proteolytic subunit
  misc_feature (26)..(331): Homolog of NCBI NO: 25453516 NR Description: ATP-dependent Clp proteinase (EC 3.4.21.-)
  misc_feature (26)..(331): Homolog of NCBI NO: 18422548 NR Description: ATP-dependent Clp protease proteolytic subunit
MLSTIINQVKSCKFLLHFHDTHSHTMDLLSISPSHPLPSSIRTLSSNPKPPISSSFFFIPKPHSRFSKTPPRCVFTPASPIPSKNTNFGSQFRNPTSLTFELSSPQTPSTAARGAEGDVMGLLLRERIVFLGSSIDDFVADAIMSQLLLLDAQDPTKDIRLFINSTGGSLSATMAIYDAVQLVRADVSTVALGIAASTASVILGGGTKGKRFAMPNTRIMIHQPLGGASGQAIDVEIQAKEVMHNKNNITRIISSFTGRSFEQVQKDIDRDKYMSPIEAVEYGIIDGVIDRDSIIPLMPVPERVKSTLNYEEISKDPRKFLTPDIPDDEIY

SEQ ID NO: 59977 - protein, 306 aa, Glycine max
  peptide (1)..(306): Ceres Seq. ID no. 15175050
  misc_feature (88)..(267): Pfam Name: Clp protease Pfam Description: Clp protease
  misc_feature (78)..(264): Homolog of NCBI NO: 15485610 NR Description: Clp protease 2 proteolytic subunit [Lycopersicon
  misc_feature (49)..(264): Homolog of NCBI NO: 18378982 NR Description: ATP-dependent Clp protease proteolytic subunit
  misc_feature (46)..(269): Homolog of NCBI NO: 25019682 NR Description: ClpP2 [Synechococcus sp. PCC 7942]
  misc_feature (19)..(304): Homolog of NCBI NO: 34914540 NR Description: putative ATP-dependent Clp protease
  misc_feature (49)..(306): Homolog of NCBI NO: 37537218 NR Description: putative Clp protease [Oryza sativa (japonica
  misc_feature (81)..(306): Homolog of NCBI NO: 4454056 NR Description: ClpP [Arabidopsis thaliana]
  misc_feature (1)..(306): Homolog of NCBI NO: 9758729 NR Description: ATP-dependent Clp protease-like protein
  misc_feature (1)..(306): Homolog of NCBI NO: 21593305 NR Description: ATP-dependent Clp protease proteolytic subunit
  misc_feature (1)..(306): Homolog of NCBI NO: 25453516 NR Description: ATP-dependent Clp proteinase (EC 3.4.21.-)
  misc_feature (1)..(306): Homolog of NCBI NO: 18422548 NR Description: ATP-dependent Clp protease proteolytic subunit
MDLLSISPSHPLPSSIRTLSSNPKPPISSSFFFIPKPHSRFSKTPPRCVFTPASPIPSKNTNFGSQFRNPTSLTFELSSPQTPSTAARGAEGDVMGLLLRERIVFLGSSIDDFVADAIMSQLLLLDAQDPTKDIRLFINSTGGSLSATMAIYDAVQLVRADVSTVALGIAASTASVILGGGTKGKRFAMPNTRIMIHQPLGGASGQAIDVEIQAKEVMHNKNNITRIISSFTGRSFEQVQKDIDRDKYMSPIEAVEYGIIDGVIDRDSIIPLMPVPERVKSTLNYEEISKDPRKFLTPDIPDDEIY

SEQ ID NO: 59978 - protein, 212 aa, Glycine max
  peptide (1)..(212): Ceres Seq. ID no. 15175051
  misc_feature (1)..(173): Pfam Name: Clp protease Pfam Description: Clp protease
  misc_feature (1)..(170): Homolog of NCBI NO: 15485610 NR Description: Clp protease 2 proteolytic subunit [Lycopersicon
  misc_feature (1)..(170): Homolog of NCBI NO: 18378982 NR Description: ATP-dependent Clp protease proteolytic subunit
  misc_feature (1)..(175): Homolog of NCBI NO: 25019682 NR Description: ClpP2 [Synechococcus sp. PCC 7942]
  misc_feature (1)..(210): Homolog of NCBI NO: 34914540 NR Description: putative ATP-dependent Clp protease
  misc_feature (1)..(212): Homolog of NCBI NO: 37537218 NR Description: putative Clp protease [Oryza sativa (japonica
  misc_feature (1)..(212): Homolog of NCBI NO: 4454056 NR Description: ClpP [Arabidopsis thaliana]
  misc_feature (1)..(212): Homolog of NCBI NO: 9758729 NR Description: ATP-dependent Clp protease-like protein
  misc_feature (1)..(212): Homolog of NCBI NO: 21593305 NR Description: ATP-dependent Clp protease proteolytic subunit
  misc_feature (1)..(212): Homolog of NCBI NO: 25453516 NR Description: ATP-dependent Clp proteinase (EC 3.4.21.-)
  misc_feature (1)..(212): Homolog of NCBI NO: 18422548 NR Description: ATP-dependent Clp protease proteolytic subunit
MGLLLRERIVFLGSSIDDFVADAIMSQLLLLDAQDPTKDIRLFINSTGGSLSATMAIYDAVQLVRADVSTVALGIAASTASVILGGGTKGKRFAMPNTRIMIHQPLGGASGQAIDVEIQAKEVMHNKNNITRIISSFTGRSFEQVQKDIDRDKYMSPIEAVEYGIIDGVIDRDSIIPLMPVPERVKSTLNYEEISKDPRKFLTPDIPDDEIY

SEQ ID NO: 59979 - DNA, 1479 bp, Glycine max
  misc_feature (1)..(1479): Ceres Seq. ID no. 14315958
attgccttcactttcaacccgtactttctctgtttctaaacaccccccacaaaattttctcactcgagaattttcccggaaaatctcacctttttcgatttctcagtcaagacaaacaacaacaaaaactctaaattctttcttaattcttgccaaattcgaaggagagagaaagagaaaaagaaaaggaaaaaaggttaatggcatcactgggatctccgtcttctttctggtgctaccgctgcaaccgcatagttagggttccacaaaaccacgccgttctcctctgccccgattgcaactccggcttcctcgaagagctccaaacccctccccactcgcgccgatccacgcgcggcggcggtgggtcccccttcaacccggtaatcgtcctgcgcaacgcaaacgacgtcgtctcgcccgaaacgcggaacttcgaactctactacaacgacgccgtttcaggttcctccggcccaagcagtctccgtcctttaccacagggagtatccgagttcctcatgggctccggcttcgacaatgtactcgaccatctcgacgccgccgcggggggcgccggagcactgccccccacggcagcgtcgaaagcggcgatcgagtcgatgccggtggttaagatcctcgcgagccacacctacgcggaatcgcactgcgcggtctgcatggagaatttcgagatcaactgcgacgcacgtgagatgccgtgcggtcacgtgtaccattccgagtgcatcgtgccgtggctctcggtgagaaactcgtgccccgtgtgccgccacgaggttccttcggatgaagttgaagaaagtaataacaatactgtggggttgactatttggagacttcctgggggaggattcgctgtgggcaggttcatcggagggagggagctcccactggtgtatacggagatggacggcgggtttaacggcgctaacggcgttccaaggagagtcgcttgggatagctccgttgggaggtctagggagaatagaggcttcggtgctgctttcaggaatgttttttcgtatatcgggagggttaggagctcgttttctcgccgaacgagaaattcgcgtgccaacggaagatctcgttcttaaacaacggtctgcaattgcaatttcgatcgtaacgtcaaggttattagagctcactgactgtgacgcggtcgcaattgatgctgcgctgtcctcaacatttttctgcaattttctacgatatcaaaggctgcggtgatgagaccgcaatcgcagattcgcagtaaggttttaagaaaaaacgtgattgcaattgacgtcacatcagctgcatttgtctgcaatttttctgttgtattcggaaacaatgacgagactgcaacttttttttaccacagtgggatttttcgatttttgtgatgtttttagtttgctaagtattcgtttgaatttttagaggaaatgcatttttttttat

SEQ ID NO: 59980 - protein, 307 aa, Glycine max
  peptide (1)..(307): Ceres Seq. ID no. 14315959
  misc_feature (158)..(198): Pfam Name: Zinc finger, C3HC4 type (RING finger) Pfam Description: Zinc finger, C3HC4 type (RING finger)
  misc_feature (99)..(209): Homolog of NCBI NO: 15231238 NR Description: expressed protein [Arabidopsis thaliana]
  misc_feature (45)..(256): Homolog of NCBI NO: 15231003 NR Description: expressed protein [Arabidopsis thaliana]
  misc_feature (112)..(232): Homolog of NCBI NO: 34906008 NR Description: putative RING-H2 finger protein RHC2a
  misc_feature (57)..(235): Homolog of NCBI NO: 18405141 NR Description: RING-H2 finger protein (RHC2a) [Arabidopsis
  misc_feature (52)..(305): Homolog of NCBI NO: 34902106 NR Description: unknown protein [Oryza sativa (japonica
  misc_feature (40)..(307): Homolog of NCBI NO: 18424254 NR Description: expressed protein [Arabidopsis thaliana]
  misc_feature (40)..(307): Homolog of NCBI NO: 8885559 NR Description: emb|CAB62332.1~gene_id:F2O15.22~strong similarity
  misc_feature (53)..(305): Homolog of NCBI NO: 15232595 NR Description: expressed protein [Arabidopsis thaliana]
  misc_feature (3)..(45): Homolog of NCBI NO: 14719329 NR Description: putative RING-H2 finger protein [Oryza sativa]
  misc_feature (22)..(294): Homolog of NCBI NO: 14719329 NR Description: putative RING-H2 finger protein [Oryza sativa]
MASLGSPSSFWCYRCNRIVRVPQNHAVLLCPDCNSGFLEELQTPPHSRRSTRGGGGSPFNPVIVLRNANDVVSPETRNFELYYNDAVSGSSGPSSLRPLPQGVSEFLMGSGFDNVLDHLDAAAGGAGALPPTAASKAAIESMPVVKILASHTYAESHCAVCMENFEINCDAREMPCGHVYHSECIVPWLSVRNSCPVCRHEVPSDEVEESNNNTVGLTIWRLPGGGFAVGRFIGGRELPLVYTEMDGGFNGANGVPRRVAWDSSVGRSRENRGFGAAFRNVFSYIGRVRSSFSRRTRNSRANGRSRS

SEQ ID NO: 59981 - protein, 200 aa, Glycine max
  peptide (1)..(200): Ceres Seq. ID no. 14315960
  misc_feature (51)..(91): Pfam Name: Zinc finger, C3HC4 type (RING finger) Pfam Description: Zinc finger, C3HC4 type (RING finger)
  misc_feature (1)..(102): Homolog of NCBI NO: 38454178 NR Description: At3g13430 [Arabidopsis thaliana]
  misc_feature (1)..(102): Homolog of NCBI NO: 15231238 NR Description: expressed protein [Arabidopsis thaliana]
  misc_feature (1)..(149): Homolog of NCBI NO: 15231003 NR Description: expressed protein [Arabidopsis thaliana]
  misc_feature (5)..(125): Homolog of NCBI NO: 34906008 NR Description: putative RING-H2 finger protein RHC2a
  misc_feature (1)..(128): Homolog of NCBI NO: 18405141 NR Description: RING-H2 finger protein (RHC2a) [Arabidopsis
  misc_feature (1)..(198): Homolog of NCBI NO: 34902106 NR Description: unknown protein [Oryza sativa (japonica
  misc_feature (1)..(200): Homolog of NCBI NO: 18424254 NR Description: expressed protein [Arabidopsis thaliana]
  misc_feature (1)..(200): Homolog of NCBI NO: 8885559 NR Description: emb|CAB62332.1~gene_id:F2O15.22~strong similarity
  misc_feature (1)..(198): Homolog of NCBI NO: 15232595 NR Description: expressed protein [Arabidopsis thaliana]
  misc_feature (1)..(187): Homolog of NCBI NO: 14719329 NR Description: putative RING-H2 finger protein [Oryza sativa]
MGSGFDNVLDHLDAAAGGAGALPPTAASKAAIESMPVVKILASHTYAESHCAVCMENFEINCDAREMPCGHVYHSECIVPWLSVRNSCPVCRHEVPSDEVEESNNNTVGLTIWRLPGGGFAVGRFIGGRELPLVYTEMDGGFNGANGVPRRVAWDSSVGRSRENRGFGAAFRNVFSYIGRVRSSFSRRTRNSRANGRSRS

SEQ ID NO: 59982 - protein, 166 aa, Glycine max
  peptide (1)..(166): Ceres Seq. ID no. 14315961
  misc_feature (17)..(57): Pfam Name: Zinc finger, C3HC4 type (RING finger) Pfam Description: Zinc finger, C3HC4 type (RING finger)
  misc_feature (1)..(68): Homolog of NCBI NO: 38454178 NR Description: At3g13430 [Arabidopsis thaliana]
  misc_feature (1)..(68): Homolog of NCBI NO: 15231238 NR Description: expressed protein [Arabidopsis thaliana]
  misc_feature (1)..(115): Homolog of NCBI NO: 15231003 NR Description: expressed protein [Arabidopsis thaliana]
  misc_feature (1)..(91): Homolog of NCBI NO: 34906008 NR Description: putative RING-H2 finger protein RHC2a
  misc_feature (1)..(94): Homolog of NCBI NO: 18405141 NR Description: RING-H2 finger protein (RHC2a) [Arabidopsis
  misc_feature (1)..(164): Homolog of NCBI NO: 34902106 NR Description: unknown protein [Oryza sativa (japonica
  misc_feature (1)..(166): Homolog of NCBI NO: 18424254 NR Description: expressed protein [Arabidopsis thaliana]
  misc_feature (1)..(166): Homolog of NCBI NO: 8885559 NR Description: emb|CAB62332.1~gene_id:F2O15.22~strong similarity
  misc_feature (1)..(164): Homolog of NCBI NO: 15232595 NR Description: expressed protein [Arabidopsis thaliana]
  misc_feature (1)..(153): Homolog of NCBI NO: 14719329 NR Description: putative RING-H2 finger protein [Oryza sativa]
MPVVKILASHTYAESHCAVCMENFEINCDAREMPCGHVYHSECIVPWLSVRNSCPVCRHEVPSDEVEESNNNTVGLTIWRLPGGGFAVGRFIGGRELPLVYTEMDGGFNGANGVPRRVAWDSSVGRSRENRGFGAAFRNVFSYIGRVRSSFSRRTRNSRANGRSRS

SEQ ID NO: 59983 - DNA, 1531 bp, Glycine max
  misc_feature (1)..(1531): Ceres Seq. ID no. 14315874
atcatatcatatattcatattcatctccccacgagattctggttctgtttaggccacccacacacctccatttccccaactcgctccgagtttactcactcctttccctttcgagatcaaccgccaccgctacgcctccgcgctccgccgccactgcaatccccgcctcccttctccgtcaatgcaaaattcggcgtcgattctcgccggaaccttctcccgctcttccttcccctccgggctttgacttttgctttcttgcgattgcgatgagtccctttcgccctttgttgctcttcgccgccgtattcttcctcctccgtcccctcgccgccaccgacggcgacgccgatccgctttacataggttgtgtggagcagtgtaagaaaactggatgtgtaggggatagatactttcaacattgtaaattttcatcagatggaaaaccaattgatggtccatggtatatgcatgaacccctctatctgaggtggaaacaatgggactgttgcactgactgtaggtattactgtatgctagctagagaggaagaacgaacaaaacttggcgacaagcctgtcaagtatcatggaaaatggccattccgtcgcgtttatggaattcaggaacctgtggctgttgctctgtctgccgtcaatcttgctatgcagtttcatggttgggtatcctttttcattcttgtgtactataagttgactttgaggccagataagaagacttactatgagtacactggattgtggcatatttatgggattttatccatgaacgcatggctgtggagtgctgttttccatagtagagccgtggaattaacagagaagctggatttttcttctgctgtggcattacttggattcagcctcattctagcaatattgcgagcttttaacgtgagggatgaggctacgcgagtcatgatttctgctcccttgattgcttttgtgacaactcatatcatgtatctgaatttctatgaacttgcttatggtttgaacagaatagtttgcacgggaatggttgttgtccagcttcttatttgggccatttgggctggtgcttcgaaccacccggcgcgatggaaattatgggcagtagtggttggaggaggcttagctatggtgttggagacatatgactttccaccttacatgggatatgtggatgctcatgctctatggcatgcaacaagcattcctctcacatttttttggtggggttttataagggatgatgctgagtttagaaccacagctatgctcaagaaggtaaaatagtgctgcagacacaatttggcagaggttggatctgatgaagaacatgtcatatatgttgctgcttactttgtttttgtacatcagaactttttttttttttttaatttgttttcctcgtgtaggcgtttatttgaaatgcttaacacgatggtttctgtgcttttgattttgtaactttttgttttcctcatgtatgaagcatactttcttagtggaattaattgcaatgcttt

SEQ ID NO: 59984 - protein, 431 aa, Glycine max
  peptide (1)..(431): Ceres Seq. ID no. 14315875
  misc_feature (158)..(427): Pfam Name: Per1-like Pfam Description: Per1-like
  misc_feature (130)..(412): Homolog of NCBI NO: 24586036 NR Description: CG3271-PA [Drosophila melanogaster]
  misc_feature (77)..(420): Homolog of NCBI NO: 32418510 NR Description: hypothetical protein [Neurospora crassa]
  misc_feature (130)..(418): Homolog of NCBI NO: 19921698 NR Description: CG3271-PB [Drosophila melanogaster]
  misc_feature (130)..(419): Homolog of NCBI NO: 32949296 NR Description: CAB2 protein [Homo sapiens]
  misc_feature (105)..(431): Homolog of NCBI NO: 19114746 NR Description: similar to yeast protein involved in Mn2+
  misc_feature (124)..(274): Homolog of NCBI NO: 20260110 NR Description: unknown protein [Arabidopsis thaliana]
  misc_feature (156)..(431): Homolog of NCBI NO: 10176931 NR Description: gene_id:MTG10.16~unknown protein [Arabidopsis
  misc_feature (86)..(431): Homolog of NCBI NO: 37536224 NR Description: unknown protein [Oryza sativa (japonica
  misc_feature (96)..(431): Homolog of NCBI NO: 18424554 NR Description: expressed protein [Arabidopsis thaliana]
  misc_feature (99)..(431): Homolog of NCBI NO: 15219283 NR Description: expressed protein [Arabidopsis thaliana]
HIIYSYSSPHEILVLFRPPTHLHFPNSLRVYSLLSLSRSTATATPPRSAATAIPASLLRQCKIRRRFSPEPSPALPSPPGFDFCFLAIAMSPFRPLLLFAAVFFLLRPLAATDGDADPLYIGCVEQCKKTGCVGDRYFQHCKFSSDGKPIDGPWYMHEPLYLRWKQWDCCTDCRYYCMLAREEERTKLGDKPVKYHGKWPFRRVYGIQEPVAVALSAVNLAMQFHGWVSFFILVYYKLTLRPDKKTYYEYTGLWHIYGILSMNAWLWSAVFHSRAVELTEKLDFSSAVALLGFSLILAILRAFNVRDEATRVMISAPLIAFVTTHIMYLNFYELAYGLNRIVCTGMVVVQLLIWAIWAGASNHPARWKLWAVVVGGGLAMVLETYDFPPYMGYVDAHALWHATSIPLTFFWWGFIRDDAEFRTTAMLKKVK

SEQ ID NO: 59985 - protein, 342 aa, Glycine max
  peptide (1)..(342): Ceres Seq. ID no. 14315876
  misc_feature (69)..(338): Pfam Name: Per1-like Pfam Description: Per1-like
  misc_feature (41)..(323): Homolog of NCBI NO: 24586036 NR Description: CG3271-PA [Drosophila melanogaster]
  misc_feature (1)..(331): Homolog of NCBI NO: 32418510 NR Description: hypothetical protein [Neurospora crassa]
  misc_feature (41)..(329): Homolog of NCBI NO: 19921698 NR Description: CG3271-PB [Drosophila melanogaster]
  misc_feature (41)..(330): Homolog of NCBI NO: 32949296 NR Description: CAB2 protein [Homo sapiens]
  misc_feature (16)..(342): Homolog of NCBI NO: 19114746 NR Description: similar to yeast protein involved in Mn2+
  misc_feature (35)..(185): Homolog of NCBI NO: 20260110 NR Description: unknown protein [Arabidopsis thaliana]
  misc_feature (67)..(342): Homolog of NCBI NO: 10176931 NR Description: gene_id:MTG10.16~unknown protein [Arabidopsis
  misc_feature (1)..(342): Homolog of NCBI NO: 37536224 NR Description: unknown protein [Oryza sativa (japonica
  misc_feature (7)..(342): Homolog of NCBI NO: 18424554 NR Description: expressed protein [Arabidopsis thaliana]
  misc_feature (10)..(342): Homolog of NCBI NO: 15219283 NR Description: expressed protein [Arabidopsis thaliana]
MSPFRPLLLFAAVFFLLRPLAATDGDADPLYIGCVEQCKKTGCVGDRYFQHCKFSSDGKPIDGPWYMHEPLYLRWKQWDCCTDCRYYCMLAREEERTKLGDKPVKYHGKWPFRRVYGIQEPVAVALSAVNLAMQFHGWVSFFILVYYKLTLRPDKKTYYEYTGLWHIYGILSMNAWLWSAVFHSRAVELTEKLDFSSAVALLGFSLILAILRAFNVRDEATRVMISAPLIAFVTTHIMYLNFYELAYGLNRIVCTGMVVVQLLIWAIWAGASNHPARWKLWAVVVGGGLAMVLETYDFPPYMGYVDAHALWHATSIPLTFFWWGFIRDDAEFRTTAMLKKVK

SEQ ID NO: 59986 - protein, 276 aa, Glycine max
  peptide (1)..(276): Ceres Seq. ID no. 14315877
  misc_feature (3)..(272): Pfam Name: Per1-like Pfam Description: Per1-like
  misc_feature (1)..(257): Homolog of NCBI NO: 24586036 NR Description: CG3271-PA [Drosophila melanogaster]
  misc_feature (1)..(265): Homolog of NCBI NO: 32418510 NR Description: hypothetical protein [Neurospora crassa]
  misc_feature (1)..(263): Homolog of NCBI NO: 19921698 NR Description: CG3271-PB [Drosophila melanogaster]
  misc_feature (1)..(264): Homolog of NCBI NO: 32949296 NR Description: CAB2 protein [Homo sapiens]
  misc_feature (1)..(276): Homolog of NCBI NO: 19114746 NR Description: similar to yeast protein involved in Mn2+
  misc_feature (1)..(119): Homolog of NCBI NO: 20260110 NR Description: unknown protein [Arabidopsis thaliana]
  misc_feature (1)..(276): Homolog of NCBI NO: 10176931 NR Description: gene_id:MTG10.16~unknown protein [Arabidopsis
  misc_feature (1)..(276): Homolog of NCBI NO: 37536224 NR Description: unknown protein [Oryza sativa (japonica
  misc_feature (1)..(276): Homolog of NCBI NO: 18424554 NR Description: expressed protein [Arabidopsis thaliana]
  misc_feature (1)..(276): Homolog of NCBI NO: 15219283 NR Description: expressed protein [Arabidopsis thaliana]
MHEPLYLRWKQWDCCTDCRYYCMLAREEERTKLGDKPVKYHGKWPFRRVYGIQEPVAVALSAVNLAMQFHGWVSFFILVYYKLTLRPDKKTYYEYTGLWHIYGILSMNAWLWSAVFHSRAVELTEKLDFSSAVALLGFSLILAILRAFNVRDEATRVMISAPLIAFVTTHIMYLNFYELAYGLNRIVCTGMVVVQLLIWAIWAGASNHPARWKLWAVVVGGGLAMVLETYDFPPYMGYVDAHALWHATSIPLTFFWWGFIRDDAEFRTTAMLKKVK

SEQ ID NO: 59987 - DNA, 631 bp, Glycine max
  misc_feature (1)..(631): Ceres Seq. ID no. 13594289
agttcagttcaccctaaatttcttccactatcatcttctctcagttcgacgtcagcgaagccttcattgtttgttgggggcaattcgattcgatttcgcagagtagaatgtttgggacggcgattcgatgtttggcgaagaaaccgaagccgaagatgggacccgtgatcctgaaaacgccgccggagcagaggcagacaatcacaagaaccctcttcgatataattaaggagcatggtcccatcactgttgctaacacctgggaacgtgtccaggaagttggattgaaagatttgacaagcaagaatcacatgaaaatagtgctgaaatggatgagagagaggcagaagattcggctcctttgcaaccacgttggagcacacaaacagtttctctacaccacttggtttaccaagccggttacccctcccaagaattcctcttgaaagttgaaacttcatcatcagttcgttgctgctgttttgtaccatgtcttgtcaagagtaataatttcattttagaaccgttaatcaatagagatcgaaatgttttgcccaaaaaaaaaaaaaaaaaagcttatcgataccgtcgacctcgagggggggcccggtacccaattcgccctatagtg

SEQ ID NO: 59988 - protein, 112 aa, Glycine max
  peptide (1)..(112): Ceres Seq. ID no. 13594290
  misc_feature (23)..(100): Homolog of NCBI NO: 27573361 NR Description: unknown protein [Oryza sativa (japonica
  misc_feature (6)..(98): Homolog of NCBI NO: 18410491 NR Description: expressed protein [Arabidopsis thaliana]
  misc_feature (1)..(112): Homolog of NCBI NO: 38637563 NR Description: unknown protein [Oryza sativa (japonica
  misc_feature (1)..(112): Homolog of NCBI NO: 21594042 NR Description: unknown [Arabidopsis thaliana]
  misc_feature (1)..(112): Homolog of NCBI NO: 15239880 NR Description: expressed protein [Arabidopsis thaliana]
MFGTAIRCLAKKPKPKMGPVILKTPPEQRQTITRTLFDIIKEHGPITVANTWERVQEVGLKDLTSKNHMKIVLKWMRERQKIRLLCNHVGAHKQFLYTTWFTKPVTPPKNSS

SEQ ID NO: 59989 - protein, 101 aa, Glycine max
  peptide (1)..(101): Ceres Seq. ID no. 13594291
MDEREAEDSAPLQPRWSTQTVSLHHLVYQAGYPSQEFLLKVETSSSVRCCCFVPCLVKSNNFILEPLINRDRNVLPKKKKKKAYRYRRPRGGARYPIRPIV

SEQ ID NO: 59990 - protein, 96 aa, Glycine max
  peptide (1)..(96): Ceres Seq. ID no. 13594292
  misc_feature (7)..(84): Homolog of NCBI NO: 27573361 NR Description: unknown protein [Oryza sativa (japonica
  misc_feature (1)..(82): Homolog of NCBI NO: 18410491 NR Description: expressed protein [Arabidopsis thaliana]
  misc_feature (1)..(96): Homolog of NCBI NO: 38637563 NR Description: unknown protein [Oryza sativa (japonica
  misc_feature (1)..(96): Homolog of NCBI NO: 21594042 NR Description: unknown [Arabidopsis thaliana]
  misc_feature (1)..(96): Homolog of NCBI NO: 15239880 NR Description: expressed protein [Arabidopsis thaliana]
MGPVILKTPPEQRQTITRTLFDIIKEHGPITVANTWERVQEVGLKDLTSKNHMKIVLKWMRERQKIRLLCNHVGAHKQFLYTTWFTKPVTPPKNSS

SEQ ID NO: 59991 - DNA, 1036 bp, Glycine max
  misc_feature (1)..(1036): Ceres Seq. ID no. 15175072
ctctctctttctcaaaggtcctgtgtcagggactctgaagagagagatcacaaacatcaagtacttactacttagcacaaaattcacacaactcgtgccggggttcagaaagactgaaactttctcctttaaaacttgctgggtattaatgatctttgcctccctgagtcattacatgaagattctcaacttgggtgttcaaaatgttggttactgaggacaagtctcatgttgctgttgctatagacaatgatggctgttgtcaccggagctctgccggcggtgaggggtgctccgacgctagcgaccggacagataaggagcaaaggaggtcctcccatgtttctggcactgagattgtgggagtgtgtgaggagagaggatcagagtgttcagtggaggtggatctggttcctgaggttaaggtgcatttggccaatgaggagagggattgtaggatttgccatctcagcatggatatgaccaaccatgaatctgggactcccattgagttgggatgttcttgcaaggatgatttggctgctgctcacaagcagtgtgccgaggcttggttcaagatcaagggaaacaaaacttgtgaaatctgtggatcagttgcacgcaatgtagccggagctattgaaattcaaatgacagaacagtggaatgaggcaaatgatgcttccacggcaccatcatctggaccggcaccacttgcagaaactcaaaatttctggcagggtcaccgttttttgaattttctgctagcctgtatggtgtttgcctttgtcatatcctggctttttcactttaatgtgccctcttgaattcccgtgtaacttgaggatgaagcaggttaagatgatggggggttaatgggttattagaccaatctatggctcttaacgcaggtatcaaactcaatacctgtgcctgcttagttagttggttgggatctgtgtatttctttccatatgatatgatgttcacagtgtatttgtatttgttgtattatatggttgttcttattttgctc

SEQ ID NO: 59992 - protein, 207 aa, Glycine max
  peptide (1)..(207): Ceres Seq. ID no. 15175073
  misc_feature (84)..(135): Pfam Name: Zinc finger, C3HC4 type (RING finger) Pfam Description: Zinc finger, C3HC4 type (RING finger)
  misc_feature (35)..(154): Homolog of NCBI NO: 21593046 NR Description: unknown [Arabidopsis thaliana]
  misc_feature (23)..(154): Homolog of NCBI NO: 18406816 NR Description: zinc finger (C3HC4-type RING finger) protein
  misc_feature (81)..(130): Homolog of NCBI NO: 15240886 NR Description: zinc finger (C3HC4-type RING finger) protein
  misc_feature (4)..(159): Homolog of NCBI NO: 29725746 NR Description: hypothetical protein [Arabidopsis thaliana]
  misc_feature (99)..(205): Homolog of NCBI NO: 21537129 NR Description: unknown [Arabidopsis thaliana]
  misc_feature (99)..(205): Homolog of NCBI NO: 15237796 NR Description: zinc finger (C3HC4-type RING finger) protein
  misc_feature (82)..(205): Homolog of NCBI NO: 9759231 NR Description: gb|AAD32776.1~gene_id:K19M22.19~similar to
  misc_feature (78)..(207): Homolog of NCBI NO: 15224415 NR Description: zinc finger (C3HC4-type RING finger) protein
  misc_feature (61)..(206): Homolog of NCBI NO: 34908318 NR Description: P0529H11.12 [Oryza sativa (japonica
  misc_feature (38)..(207): Homolog of NCBI NO: 15239254 NR Description: zinc finger (C3HC4-type RING finger) protein
MLVTEDKSHVAVAIDNDGCCHRSSAGGEGCSDASDRTDKEQRRSSHVSGTEIVGVCEERGSECSVEVDLVPEVKVHLANEERDCRICHLSMDMTNHESGTPIELGCSCKDDLAAAHKQCAEAWFKIKGNKTCEICGSVARNVAGAIEIQMTEQWNEANDASTAPSSGPAPLAETQNFWQGHRFLNFLLACMVFAFVISWLFHFNVPS

SEQ ID NO: 59993 - protein, 117 aa, Glycine max
  peptide (1)..(117): Ceres Seq. ID no. 15175074
  misc_feature (1)..(45): Pfam Name: Zinc finger, C3HC4 type (RING finger) Pfam Description: Zinc finger, C3HC4 type (RING finger)
  misc_feature (1)..(64): Homolog of NCBI NO: 21593046 NR Description: unknown [Arabidopsis thaliana]
  misc_feature (1)..(64): Homolog of NCBI NO: 18406816 NR Description: zinc finger (C3HC4-type RING finger) protein
  misc_feature (1)..(40): Homolog of NCBI NO: 15240886 NR Description: zinc finger (C3HC4-type RING finger) protein
  misc_feature (1)..(69): Homolog of NCBI NO: 29725746 NR Description: hypothetical protein [Arabidopsis thaliana]
  misc_feature (9)..(115): Homolog of NCBI NO: 21537129 NR Description: unknown [Arabidopsis thaliana]
  misc_feature (9)..(115): Homolog of NCBI NO: 15237796 NR Description: zinc finger (C3HC4-type RING finger) protein
  misc_feature (1)..(115): Homolog of NCBI NO: 9759231 NR Description: gb|AAD32776.1~gene_id:K19M22.19~similar to
  misc_feature (1)..(117): Homolog of NCBI NO: 15224415 NR Description: zinc finger (C3HC4-type RING finger) protein
  misc_feature (1)..(116): Homolog of NCBI NO: 34908318 NR Description: P0529H11.12 [Oryza sativa (japonica
  misc_feature (1)..(117): Homolog of NCBI NO: 15239254 NR Description: zinc finger (C3HC4-type RING finger) protein
MDMTNHESGTPIELGCSCKDDLAAAHKQCAEAWFKIKGNKTCEICGSVARNVAGAIEIQMTEQWNEANDASTAPSSGPAPLAETQNFWQGHRFLNFLLACMVFAFVISWLFHFNVPS

SEQ ID NO: 59994 - protein, 115 aa, Glycine max
  peptide (1)..(115): Ceres Seq. ID no. 15175075
  misc_feature (1)..(43): Pfam Name: Zinc finger, C3HC4 type (RING finger) Pfam Description: Zinc finger, C3HC4 type (RING finger)
  misc_feature (1)..(62): Homolog of NCBI NO: 21593046 NR Description: unknown [Arabidopsis thaliana]
  misc_feature (1)..(62): Homolog of NCBI NO: 18406816 NR Description: zinc finger (C3HC4-type RING finger) protein
  misc_feature (1)..(38): Homolog of NCBI NO: 15240886 NR Description: zinc finger (C3HC4-type RING finger) protein
  misc_feature (1)..(67): Homolog of NCBI NO: 29725746 NR Description: hypothetical protein [Arabidopsis thaliana]
  misc_feature (7)..(113): Homolog of NCBI NO: 21537129 NR Description: unknown [Arabidopsis thaliana]
  misc_feature (7)..(113): Homolog of NCBI NO: 15237796 NR Description: zinc finger (C3HC4-type RING finger) protein
  misc_feature (1)..(113): Homolog of NCBI NO: 9759231 NR Description: gb|AAD32776.1~gene_id:K19M22.19~similar to
  misc_feature (1)..(115): Homolog of NCBI NO: 15224415 NR Description: zinc finger (C3HC4-type RING finger) protein
  misc_feature (1)..(114): Homolog of NCBI NO: 34908318 NR Description: P0529H11.12 [Oryza sativa (japonica
  misc_feature (1)..(115): Homolog of NCBI NO: 15239254 NR Description: zinc finger (C3HC4-type RING finger) protein
MTNHESGTPIELGCSCKDDLAAAHKQCAEAWFKIKGNKTCEICGSVARNVAGAIEIQMTEQWNEANDASTAPSSGPAPLAETQNFWQGHRFLNFLLACMVFAFVISWLFHFNVPS

SEQ ID NO: 59995 - DNA, 1108 bp, Glycine max
  misc_feature (1)..(1108): Ceres Seq. ID no. 14316300
attcggcctccagccctttaaaccccacaaaaccctagacttcgcagcgagcagccgtcgtccgatccccacagaaacaccaaagcccgagccatgtcgtcggcgtccctcgccgccaggctcctccgccgcgccgcctcttcgtcgcgggcctccaccctatcccgacgctgcgcccactcctccgcgacgtcccgcgcgcccgtttcgcttgcccgtttccaccccgccgccgcctccccttcagggaccactgcccgccgcttcctgtcgtcgcagtccccggcgtcttcctccaagatctccccggacgagaacctgaggcgggtcatcgactccgagatcgagtgcgtcgtcgaatcggaggagggctccgcgcagcaaattgatccaccagaagacttcccctttgagataattgataaccctggtgatcagtccatcgttctcaaaagagagcttgcaggagagactattaaagctactgtctacacaaattttgatactgaggaagatttgaacaatgaggactctggtgctgagaatgatgatgactcatttaagccagcacttcagatggttgtcactgttgagaaaccaggaggctcaatcctggaatttgagtgcaactttaatgatgatgaactggcaattgaaaatatgaggttgctgaatcgcgatgccaagtttactgagaatgcatatgaggggccacaattctctgatctggacgagagcttgcagaagtcctttcacaggtatcttgaggtgagggggatcaagcactcgctgcatgactggctgcacgagtacatgatgagcaaggatgagaaggagtacgtggtttggttgaagaacatgagagagttcatcgagaaatgagtgccactgcccgtcattctcttttaatagaaagaacatgcctggtgctctatgtcaaacctgtctgatcataattgtgccttgctttctggcacaccaagtctcggtggacgctgagctggatttatattttgctggacctgtttagctgtagaaaagtttcggcatcttatctttcgatgtttaacctgtgatccgttcagatatgatcagttcatgtattttc

SEQ ID NO: 59996 - protein, 262 aa, Glycine max
  peptide (1)..(262): Ceres Seq. ID no. 14316301
  misc_feature (80)..(260): Pfam Name: Mitochondrial glycoprotein Pfam Description: Mitochondrial glycoprotein
  misc_feature (1)..(262): Homolog of NCBI NO: 34895742 NR Description: P0019D06.29 [Oryza sativa (japonica
  misc_feature (12)..(260): Homolog of NCBI NO: 34895730 NR Description: P0019D06.23 [Oryza sativa (japonica
  misc_feature (8)..(261): Homolog of NCBI NO: 15239320 NR Description: expressed protein [Arabidopsis thaliana]
  misc_feature (13)..(262): Homolog of NCBI NO: 7487698 NR Description: hypothetical protein At2g39790 [imported] -
  misc_feature (5)..(262): Homolog of NCBI NO: 21593469 NR Description: unknown [Arabidopsis thaliana]
  misc_feature (5)..(262): Homolog of NCBI NO: 18405164 NR Description: expressed protein [Arabidopsis thaliana]
  misc_feature (20)..(262): Homolog of NCBI NO: 18410318 NR Description: expressed protein [Arabidopsis thaliana]
  misc_feature (1)..(262): Homolog of NCBI NO: 11357566 NR Description: hypothetical protein F1I16.10 - Arabidopsis
  misc_feature (10)..(262): Homolog of NCBI NO: 21592321 NR Description: unknown [Arabidopsis thaliana]
  misc_feature (10)..(262): Homolog of NCBI NO: 15241669 NR Description: expressed protein [Arabidopsis thaliana]
MSSASLAARLLRRAASSSRASTLSRRCAHSSATSRAPVSLARFHPAAASPSGTTARRFLSSQSPASSSKISPDENLRRVIDSEIECVVESEEGSAQQIDPPEDFPFEIIDNPGDQSIVLKRELAGETIKATVYTNFDTEEDLNNEDSGAENDDDSFKPALQMVVTVEKPGGSILEFECNFNDDELAIENMRLLNRDAKFTENAYEGPQFSDLDESLQKSFHRYLEVRGIKHSLHDWLHEYMMSKDEKEYVVWLKNMREFIEK

SEQ ID NO: 59997 - DNA, 1766 bp, Glycine max
  misc_feature (1)..(1766): Ceres Seq. ID no. 15171696
aaagcagaaaaaaaagtgggtcactttagcaacaaaaccttcacatcccatctctcatcaatggtgtttccaattgctgggtggagctttacgcaatcccattacactctctttctctccatttccttctattctctattattatatccttttctatttttatttttctcattgcattctctaatctttaatctctattctctacccattcatattcatccccgtttttctctgtcactgtcgcataacactctttgaaccaccgcaactaaagtaacaaccccatgtcctgaacctcacttttcttctcgccaaagcttccaattttcgatttttcccttgttttcagagaaatatcaacaccccagaaaataaaattgagagaatagaagaaaaccttttctgggttaatttggtaatttcctttttcttctttcatgggtaacataggaagcagcggctccaacagccgccggagacacggcggcggcggcggcagcggtaggcggattcacccgcctccgccgcaggtgatgccgccgccggaggtcacggccaaccaattcgtgtatcctccggccgccacgccgtatcacaactaccccgggtactacccggcgccgaccaccatgccggcgccgttgccggcgccgtacgaccaccaccaccgtacggcggtagacccgatgtgggggcggtatccggtggcggcaccgccggcaccggcgccgtacgtggaacaccagaaggcggttactattaagaacgatgtcaacatcaagaaggagacgcttaggattgagcctgatgacgagaatcctggccgtttccttgtgtcatttacgtttgatgccaccgtttcggggagcatcaccatacttttctttgcaaaagaaggggaaggttgcacactaactccaatgaaagaaaatgttcttccacccgtgactgtaaatttccagcaaggacttggccagaagtttaaacagccagctggaactggtattgatttttcaacatttgaggagtctgagttattgaaagtaggggacatggatgtctatcctgttgcaattaaagcagatgcatcctccagcgaccatgatgaatcaaaatcaaatgaaactccatcatccggtagctcaaactctcagataactcaagcagtgtttgagaaggagaaaggagaattccaggtgaaggttgtgaagcagatcttatgggtaaatggaatgaggtatgaactgcaggagatatatggtattggaaattcagtggagagtgatgtggatgggaatgacccaggaaaagagtgtgttatatgcttgtcagagcctcgggacacaactgtccttccatgccgccacatgtgtatgtgtagcggatgtgcgaaggttttgaggttccagacaaatagatgtccaatctgcagacaaccagttgagaggctattggagatcaaagtcgggcctgagcctgaggaatgaagattcaatgttagtgacacaacaagcttcctgtacagtccaactgttatagctaatacttttctcttactttatcaggtttttccaataatcccacaaaatagaaattggaatttatgtatgacattatgtttgacatgtacagcaggctggcattgcacctgacttgtattattgtataagccaatgcctccgccatgcttgtttggttttacttctaatttttatgtggctttcccttctgaatcatatttagatgtgtttctcaccttcgcttcg

SEQ ID NO: 59998 - protein, 349 aa, Glycine max
  peptide (1)..(349): Ceres Seq. ID no. 15171697
  misc_feature (293)..(331): Pfam Name: Zinc finger, C3HC4 type (RING finger) Pfam Description: Zinc finger, C3HC4 type (RING finger)
  misc_feature (1)..(349): Homolog of NCBI NO: 6862918 NR Description: putative RING zinc finger protein [Arabidopsis
  misc_feature (28)..(349): Homolog of NCBI NO: 21928149 NR Description: AT5g19080/T16G12_120 [Arabidopsis thaliana]
  misc_feature (28)..(349): Homolog of NCBI NO: 15239642 NR Description: expressed protein [Arabidopsis thaliana]
  misc_feature (63)..(343): Homolog of NCBI NO: 15231808 NR Description: expressed protein [Arabidopsis thaliana]
  misc_feature (27)..(311): Homolog of NCBI NO: 30681003 NR Description: putative RING zinc finger protein [Arabidopsis
  misc_feature (20)..(341): Homolog of NCBI NO: 26449588 NR Description: unknown protein [Arabidopsis thaliana]
  misc_feature (20)..(341): Homolog of NCBI NO: 21618140 NR Description: putative RING zinc finger protein [Arabidopsis
  misc_feature (20)..(341): Homolog of NCBI NO: 15242675 NR Description: expressed protein [Arabidopsis thaliana]
  misc_feature (26)..(349): Homolog of NCBI NO: 37532246 NR Description: putative hydroxyproline-rich glycoprotein
  misc_feature (27)..(343): Homolog of NCBI NO: 18398633 NR Description: putative RING zinc finger protein [Arabidopsis
MGNIGSSGSNSRRRHGGGGGSGRRIHPPPPQVMPPPEVTANQFVYPPAATPYHNYPGYYPAPTTMPAPLPAPYDHHHRTAVDPMWGRYPVAAPPAPAPYVEHQKAVTIKNDVNIKKETLRIEPDDENPGRFLVSFTFDATVSGSITILFFAKEGEGCTLTPMKENVLPPVTVNFQQGLGQKFKQPAGTGIDFSTFEESELLKVGDMDVYPVAIKADASSSDHDESKSNETPSSGSSNSQITQAVFEKEKGEFQVKVVKQILWVNGMRYELQEIYGIGNSVESDVDGNDPGKECVICLSEPRDTTVLPCRHMCMCSGCAKVLRFQTNRCPICRQPVERLLEIKVGPEPEE

SEQ ID NO: 59999 - protein, 317 aa, Glycine max
  peptide (1)..(317): Ceres Seq. ID no. 15171698
  misc_feature (261)..(299): Pfam Name: Zinc finger, C3HC4 type (RING finger) Pfam Description: Zinc finger, C3HC4 type (RING finger)
  misc_feature (1)..(317): Homolog of NCBI NO: 6862918 NR Description: putative RING zinc finger protein [Arabidopsis
  misc_feature (1)..(317): Homolog of NCBI NO: 21928149 NR Description: AT5g19080/T16G12_120 [Arabidopsis thaliana]
  misc_feature (1)..(317): Homolog of NCBI NO: 15239642 NR Description: expressed protein [Arabidopsis thaliana]
  misc_feature (31)..(311): Homolog of NCBI NO: 15231808 NR Description: expressed protein [Arabidopsis thaliana]
  misc_feature (1)..(279): Homolog of NCBI NO: 30681003 NR Description: putative RING zinc finger protein [Arabidopsis
  misc_feature (1)..(309): Homolog of NCBI NO: 26449588 NR Description: unknown protein [Arabidopsis thaliana]
  misc_feature (1)..(309): Homolog of NCBI NO: 21618140 NR Description: putative RING zinc finger protein [Arabidopsis
  misc_feature (1)..(309): Homolog of NCBI NO: 15242675 NR Description: expressed protein [Arabidopsis thaliana]
  misc_feature (1)..(317): Homolog of NCBI NO: 37532246 NR Description: putative hydroxyproline-rich glycoprotein
  misc_feature (1)..(311): Homolog of NCBI NO: 18398633 NR Description: putative RING zinc finger protein [Arabidopsis
MPPPEVTANQFVYPPAATPYHNYPGYYPAPTTMPAPLPAPYDHHHRTAVDPMWGRYPVAAPPAPAPYVEHQKAVTIKNDVNIKKETLRIEPDDENPGRFLVSFTFDATVSGSITILFFAKEGEGCTLTPMKENVLPPVTVNFQQGLGQKFKQPAGTGIDFSTFEESELLKVGDMDVYPVAIKADASSSDHDESKSNETPSSGSSNSQITQAVFEKEKGEFQVKVVKQILWVNGMRYELQEIYGIGNSVESDVDGNDPGKECVICLSEPRDTTVLPCRHMCMCSGCAKVLRFQTNRCPICRQPVERLLEIKVGPEPEE

SEQ ID NO: 60000 - protein, 285 aa, Glycine max
  peptide (1)..(285): Ceres Seq. ID no. 15171699
  misc_feature (229)..(267): Pfam Name: Zinc finger, C3HC4 type (RING finger) Pfam Description: Zinc finger, C3HC4 type (RING finger)
  misc_feature (1)..(285): Homolog of NCBI NO: 6862918 NR Description: putative RING zinc finger protein [Arabidopsis
  misc_feature (1)..(285): Homolog of NCBI NO: 21928149 NR Description: AT5g19080/T16G12_120 [Arabidopsis thaliana]
  misc_feature (1)..(285): Homolog of NCBI NO: 15239642 NR Description: expressed protein [Arabidopsis thaliana]
  misc_feature (1)..(279): Homolog of NCBI NO: 15231808 NR Description: expressed protein [Arabidopsis thaliana]
  misc_feature (1)..(247): Homolog of NCBI NO: 30681003 NR Description: putative RING zinc finger protein [Arabidopsis
  misc_feature (1)..(277): Homolog of NCBI NO: 26449588 NR Description: unknown protein [Arabidopsis thaliana]
  misc_feature (1)..(277): Homolog of NCBI NO: 21618140 NR Description: putative RING zinc finger protein [Arabidopsis
  misc_feature (1)..(277): Homolog of NCBI NO: 15242675 NR Description: expressed protein [Arabidopsis thaliana]
  misc_feature (1)..(285): Homolog of NCBI NO: 37532246 NR Description: putative hydroxyproline-rich glycoprotein
  misc_feature (1)..(279): Homolog of NCBI NO: 18398633 NR Description: putative RING zinc finger protein [Arabidopsis
MPAPLPAPYDHHHRTAVDPMWGRYPVAAPPAPAPYVEHQKAVTIKNDVNIKKETLRIEPDDENPGRFLVSFTFDATVSGSITILFFAKEGEGCTLTPMKENVLPPVTVNFQQGLGQKFKQPAGTGIDFSTFEESELLKVGDMDVYPVAIKADASSSDHDESKSNETPSSGSSNSQITQAVFEKEKGEFQVKVVKQILWVNGMRYELQEIYGIGNSVESDVDGNDPGKECVICLSEPRDTTVLPCRHMCMCSGCAKVLRFQTNRCPICRQPVERLLEIKVGPEPEE

SEQ ID NO: 60001 - DNA, 1656 bp, Glycine max
  misc_feature (1)..(1656): Ceres Seq. ID no. 14316111
aaaagactatccctggttttcaatctggctccttcctctctgtccatgacgacgtcgtccggttccctaaagaacacgattcccccaggcctccaagaagtgcttctcaacagaaaacgcccccaacaagaacccaacaacaatgccggaccctcttcctccaccgaggacgctgccatcgccgacgattgctccagctccaactccaagctcatcgtgctggtcaccaacagtgacagcattgagtcaccgggccttacattcctcgtcgaagccctcgtgcgtcagggcctctacgacgtccatgtctgcgttcctcaatcggacaaatcggcttcgggccactctgtcactcgcggagaaaccgtcgaagcttgttcggtacaaattaatggcgccaccgcctttgaagtttcaggaactcctgtggattgcgtttcactagcgttatctggggccttgttttcatggtcaaagcctgtgctggttattagcggaattaaccagggatcaagctgtggtcatcacatgttttactcaggtgctgttgctggagctagagaggcgttattatgtggtgtaccttcattgtcaatatcattaaatcggaagaaggatgaaagtcaagagactgatttcaaggatgcagtagtactctgtttacctttaataaatgctgctatcagggatgttgtaaacggaactttcctcaaaaactgctttctgaatatagaaattcctaaatcacctttaaccagcaagggcttcaaattgaccaagcaaagtatgtggagatccactccaaactggcaggcagtttcaactagccggtatcctcctggtcatttcttggccagtaaacaaggctttggtcttcagtttgcacagattggccgagatgcctctgctgctggtgcagctcggagattaactacacagaaaaagaatttggagattgttgaatcaattggagctgccggaaaagctgattccaacagggtgaagaagtacttcaggctagagtttttggataaacagcaggaagatatagatgatgatctagattacatggcacttgaaaatggatttgttgcagttactccactctctctttctcttcatactgagaccgatattcaaatggcagcttctgattggatttcatctgtgctttctggtgaacaatagcctcaagcagagttcagcttcagcgtaattatgtacatttgagatttctgatgattctttcttttctatgttcttgaaagcaaaggtcgagcagaagcggcagtcacacctattctatagttgatatcatcaatctgcactctttttttttttgtatgcgtgtaagatattttgtattcctctcttcattgtttcatttcttttggtcgctagttatttctgatgtgtgcttcctgtaatctcctaggcatattttaaaaatgccatttcgtctgtttgtaacttaaaaaactactagcaaaacgctggtgcacgtgtcattgtaatttttcgctaaattgttgtttgaaagatagttttaagcttggtttgatggtttgtagcctctggtcagatatctagcagccttgtatggattttgacctttcaaaatatttttttttcaatgttaaaatgtttaacgaaaac

SEQ ID NO: 60002 - protein, 395 aa, Glycine max
  peptide (1)..(395): Ceres Seq. ID no. 14316112
  misc_feature (72)..(270): Pfam Name: Survival protein SurE Pfam Description: Survival protein SurE
  misc_feature (73)..(260): Homolog of NCBI NO: 15791661 NR Description: SurE protein homolog [Campylobacter jejuni]
  misc_feature (54)..(213): Homolog of NCBI NO: 29840278 NR Description: phosphatase, SurE family [Chlamydophila caviae
  misc_feature (73)..(260): Homolog of NCBI NO: 23112477 NR Description: hypothetical protein [Desulfitobacterium
  misc_feature (179)..(247): Homolog of NCBI NO: 7485145 NR Description: hypothetical protein - Arabidopsis thaliana
  misc_feature (67)..(177): Homolog of NCBI NO: 7485145 NR Description: hypothetical protein - Arabidopsis thaliana
  misc_feature (16)..(177): Homolog of NCBI NO: 25406225 NR Description: hypothetical protein F3N23.8 [imported] -
  misc_feature (57)..(271): Homolog of NCBI NO: 33146601 NR Description: putative stationary phase survival protein SurE
  misc_feature (67)..(338): Homolog of NCBI NO: 18414342 NR Description: expressed protein [Arabidopsis thaliana]
  misc_feature (123)..(395): Homolog of NCBI NO: 25406225 NR Description: hypothetical protein F3N23.8 [imported] -
  misc_feature (16)..(395): Homolog of NCBI NO: 15218620 NR Description: expressed protein [Arabidopsis thaliana]
KRLSLVFNLAPSSLSMTTSSGSLKNTIPPGLQEVLLNRKRPQQEPNNNAGPSSSTEDAAIADDCSSSNSKLIVLVTNSDSIESPGLTFLVEALVRQGLYDVHVCVPQSDKSASGHSVTRGETVEACSVQINGATAFEVSGTPVDCVSLALSGALFSWSKPVLVISGINQGSSCGHHMFYSGAVAGAREALLCGVPSLSISLNRKKDESQETDFKDAVVLCLPLINAAIRDVVNGTFLKNCFLNIEIPKSPLTSKGFKLTKQSMWRSTPNWQAVSTSRYPPGHFLASKQGFGLQFAQIGRDASAAGAARRLTTQKKNLEIVESIGAAGKADSNRVKKYFRLEFLDKQQEDIDDDLDYMALENGFVAVTPLSLSLHTETDIQMAASDWISSVLSGEQ

SEQ ID NO: 60003 - protein, 380 aa, Glycine max
  peptide (1)..(380): Ceres Seq. ID no. 14316113
  misc_feature (57)..(255): Pfam Name: Survival protein SurE Pfam Description: Survival protein SurE
  misc_feature (58)..(245): Homolog of NCBI NO: 15791661 NR Description: SurE protein homolog [Campylobacter jejuni]
  misc_feature (39)..(198): Homolog of NCBI NO: 29840278 NR Description: phosphatase, SurE family [Chlamydophila caviae
  misc_feature (58)..(245): Homolog of NCBI NO: 23112477 NR Description: hypothetical protein [Desulfitobacterium
  misc_feature (164)..(232): Homolog of NCBI NO: 7485145 NR Description: hypothetical protein - Arabidopsis thaliana
  misc_feature (52)..(162): Homolog of NCBI NO: 7485145 NR Description: hypothetical protein - Arabidopsis thaliana
  misc_feature (1)..(162): Homolog of NCBI NO: 25406225 NR Description: hypothetical protein F3N23.8 [imported] -
  misc_feature (42)..(256): Homolog of NCBI NO: 33146601 NR Description: putative stationary phase survival protein SurE
  misc_feature (52)..(323): Homolog of NCBI NO: 18414342 NR Description: expressed protein [Arabidopsis thaliana]
  misc_feature (108)..(380): Homolog of NCBI NO: 25406225 NR Description: hypothetical protein F3N23.8 [imported] -
  misc_feature (1)..(380): Homolog of NCBI NO: 15218620 NR Description: expressed protein [Arabidopsis thaliana]
MTTSSGSLKNTIPPGLQEVLLNRKRPQQEPNNNAGPSSSTEDAAIADDCSSSNSKLIVLVTNSDSIESPGLTFLVEALVRQGLYDVHVCVPQSDKSASGHSVTRGETVEACSVQINGATAFEVSGTPVDCVSLALSGALFSWSKPVLVISGINQGSSCGHHMFYSGAVAGAREALLCGVPSLSISLNRKKDESQETDFKDAVVLCLPLINAAIRDVVNGTFLKNCFLNIEIPKSPLTSKGFKLTKQSMWRSTPNWQAVSTSRYPPGHFLASKQGFGLQFAQIGRDASAAGAARRLTTQKKNLEIVESIGAAGKADSNRVKKYFRLEFLDKQQEDIDDDLDYMALENGFVAVTPLSLSLHTETDIQMAASDWISSVLSGEQ

SEQ ID NO: 60004 - protein, 219 aa, Glycine max
  peptide (1)..(219): Ceres Seq. ID no. 14316114
  misc_feature (1)..(94): Pfam Name: Survival protein SurE Pfam Description: Survival protein SurE
  misc_feature (1)..(104): Homolog of NCBI NO: 23136015 NR Description: hypothetical protein [Cytophaga hutchinsonii]
  misc_feature (1)..(37): Homolog of NCBI NO: 39932349 NR Description: Acid phosphatase surE 2
  misc_feature (1)..(84): Homolog of NCBI NO: 15791661 NR Description: SurE protein homolog [Campylobacter jejuni]
  misc_feature (1)..(37): Homolog of NCBI NO: 29840278 NR Description: phosphatase, SurE family [Chlamydophila caviae
  misc_feature (1)..(84): Homolog of NCBI NO: 23112477 NR Description: hypothetical protein [Desulfitobacterium
  misc_feature (3)..(71): Homolog of NCBI NO: 7485145 NR Description: hypothetical protein - Arabidopsis thaliana
  misc_feature (1)..(95): Homolog of NCBI NO: 33146601 NR Description: putative stationary phase survival protein SurE
  misc_feature (1)..(162): Homolog of NCBI NO: 18414342 NR Description: expressed protein [Arabidopsis thaliana]
  misc_feature (1)..(219): Homolog of NCBI NO: 25406225 NR Description: hypothetical protein F3N23.8 [imported] -
  misc_feature (1)..(219): Homolog of NCBI NO: 15218620 NR Description: expressed protein [Arabidopsis thaliana]
MFYSGAVAGAREALLCGVPSLSISLNRKKDESQETDFKDAVVLCLPLINAAIRDVVNGTFLKNCFLNIEIPKSPLTSKGFKLTKQSMWRSTPNWQAVSTSRYPPGHFLASKQGFGLQFAQIGRDASAAGAARRLTTQKKNLEIVESIGAAGKADSNRVKKYFRLEFLDKQQEDIDDDLDYMALENGFVAVTPLSLSLHTETDIQMAASDWISSVLSGEQ

SEQ ID NO: 60005 - DNA, 1648 bp, Glycine max
  misc_feature (1)..(1648): Ceres Seq. ID no. 14315162
atgtcaatcatagtgataattggagagagagagagaacacacggtgtgagagaaagaaagtttttggttagggaggaacccacctacattctagttagggagaaagtgtgagagagaaagaaagggatcggaagaatgaagctctagttttctctgagagtaagtgaagaaaaactcaaaatagaagatgtttatcatgctgatggtgatgagagagaaagggtcagcaacaagaacagaagaaaagagattcatcacactaatatagattgtacttgattggagcaggattgtccataaaaatacaagccttcagttgtggctactacaaggtggttcccttcggattccggtgcctttgcggactggtcggcccctccgtctgctgtctccggccgcggcgacgatctctccctcggcttcaatgcttcatccgccaccacacatggtggcggtgcagccatgtggccgggggcatccaggtcatttaactacaacatggcgcctcaccacgacatcttcgtggtagcgcccgcttcctctttccaccaccaccacgaccacaacgacgccgtattgtccgatccaaataacggttctaacaattcgaacaacaatcctggaactgcactcggtgtgaatgttttccctctcctaaccgccacgccatgcctcgagagcgagggcataatgggaaacatcagccaccaccgtaacagaattcagttatgggaagatcacgagtcttctccaccgcagcagcaacagggtcacgtggagcgtgacacgtgtggggatgggggtttgggtgggagtgggactaacacgtgccaggactgtgggaaccaggcgaagaaggactgtagtcaccggaggtgcaggacgtgttgcaagagtaggggttttgattgcgccacgcacgtgaagagcacgtgggtgccggcgtcgcggcggagggagaggcagctcatgacggttgcggcggccaggtccagtggggacacttctggtgccaagaaacctaggcttgttgcttcccagactacttcgcatacttcaacgtctaataatactaataccactcctccgaggagttttgacactggttctagccaccaagatgtgggtttcaaggagtcactaccttgccaagtgcgtgcaccggcggtgttcaagtgtgttcgtgtaacagcagtggatgatggtggggaagatgagtatgcttatcaagcagttgtgaagattggtggccatgtgttcaaagggtttctctatgatcaaggggttgaggacaaagaagggtatcctaatttatcagaattgcatttgggtggtggaaatggggtttcctcttcatctccaatggtggatccttctcatgatgtctatgcagcttcaggtggtgggttacttcttggaggttcatcaaactatggtaatcatccaataaattaaaaaccattctttccaagtgcaacatagatgatgatgatgggcttggaaagcctgacttattaattattgtagggtaatttttctaattttgccaaatattgggggttgggggtggggggtatagattaattaatattaatattcttctgagtttgtatcttatcttataaccatatgtcactctgcatttttc

SEQ ID NO: 60006 - protein, 330 aa, Glycine max
  peptide (1)..(330): Ceres Seq. ID no. 14315163
  misc_feature (113)..(277): Pfam Name: Domain of unknown function (DUF702) Pfam Description: Domain of unknown function (DUF702)
  misc_feature (191)..(275): Homolog of NCBI NO: 15226540 NR Description: expressed protein [Arabidopsis thaliana]
  misc_feature (216)..(278): Homolog of NCBI NO: 15224110 NR Description: expressed protein [Arabidopsis thaliana]
  misc_feature (79)..(199): Homolog of NCBI NO: 15224110 NR Description: expressed protein [Arabidopsis thaliana]
  misc_feature (107)..(274): Homolog of NCBI NO: 15223669 NR Description: hypothetical protein [Arabidopsis thaliana]
  misc_feature (119)..(330): Homolog of NCBI NO: 15222285 NR Description: hypothetical protein [Arabidopsis thaliana]
  misc_feature (45)..(302): Homolog of NCBI NO: 15234365 NR Description: expressed protein [Arabidopsis thaliana]
  misc_feature (117)..(330): Homolog of NCBI NO: 15239350 NR Description: zinc finger protein SHI-related [Arabidopsis
  misc_feature (21)..(327): Homolog of NCBI NO: 34906658 NR Description: putative LRP(lateral root primordia) 1
  misc_feature (18)..(314): Homolog of NCBI NO: 882341 NR Description: LRP1
  misc_feature (18)..(314): Homolog of NCBI NO: 18416839 NR Description: lateral root primordia (LRP1) [Arabidopsis
MWPGASRSFNYNMAPHHDIFVVAPASSFHHHHDHNDAVLSDPNNGSNNSNNNPGTALGVNVFPLLTATPCLESEGIMGNISHHRNRIQLWEDHESSPPQQQQGHVERDTCGDGGLGGSGTNTCQDCGNQAKKDCSHRRCRTCCKSRGFDCATHVKSTWVPASRRRERQLMTVAAARSSGDTSGAKKPRLVASQTTSHTSTSNNTNTTPPRSFDTGSSHQDVGFKESLPCQVRAPAVFKCVRVTAVDDGGEDEYAYQAVVKIGGHVFKGFLYDQGVEDKEGYPNLSELHLGGGNGVSSSSPMVDPSHDVYAASGGGLLLGGSSNYGNHPIN

SEQ ID NO: 60007 - protein, 318 aa, Glycine max
  peptide (1)..(318): Ceres Seq. ID no. 14315164
  misc_feature (101)..(265): Pfam Name: Domain of unknown function (DUF702) Pfam Description: Domain of unknown function (DUF702)
  misc_feature (179)..(263): Homolog of NCBI NO: 15226540 NR Description: expressed protein [Arabidopsis thaliana]
  misc_feature (204)..(266): Homolog of NCBI NO: 15224110 NR Description: expressed protein [Arabidopsis thaliana]
  misc_feature (67)..(187): Homolog of NCBI NO: 15224110 NR Description: expressed protein [Arabidopsis thaliana]
  misc_feature (95)..(262): Homolog of NCBI NO: 15223669 NR Description: hypothetical protein [Arabidopsis thaliana]
  misc_feature (107)..(318): Homolog of NCBI NO: 15222285 NR Description: hypothetical protein [Arabidopsis thaliana]
  misc_feature (33)..(290): Homolog of NCBI NO: 15234365 NR Description: expressed protein [Arabidopsis thaliana]
  misc_feature (105)..(318): Homolog of NCBI NO: 15239350 NR Description: zinc finger protein SHI-related [Arabidopsis
  misc_feature (9)..(315): Homolog of NCBI NO: 34906658 NR Description: putative LRP(lateral root primordia) 1
  misc_feature (6)..(302): Homolog of NCBI NO: 882341 NR Description: LRP1
  misc_feature (6)..(302): Homolog of NCBI NO: 18416839 NR Description: lateral root primordia (LRP1) [Arabidopsis
MAPHHDIFVVAPASSFHHHHDHNDAVLSDPNNGSNNSNNNPGTALGVNVFPLLTATPCLESEGIMGNISHHRNRIQLWEDHESSPPQQQQGHVERDTCGDGGLGGSGTNTCQDCGNQAKKDCSHRRCRTCCKSRGFDCATHVKSTWVPASRRRERQLMTVAAARSSGDTSGAKKPRLVASQTTSHTSTSNNTNTTPPRSFDTGSSHQDVGFKESLPCQVRAPAVFKCVRVTAVDDGGEDEYAYQAVVKIGGHVFKGFLYDQGVEDKEGYPNLSELHLGGGNGVSSSSPMVDPSHDVYAASGGGLLLGGSSNYGNHPIN

SEQ ID NO: 60008 - protein, 254 aa, Glycine max
  peptide (1)..(254): Ceres Seq. ID no. 14315165
  misc_feature (37)..(201): Pfam Name: Domain of unknown function (DUF702) Pfam Description: Domain of unknown function (DUF702)
  misc_feature (115)..(199): Homolog of NCBI NO: 15226540 NR Description: expressed protein [Arabidopsis thaliana]
  misc_feature (140)..(202): Homolog of NCBI NO: 15224110 NR Description: expressed protein [Arabidopsis thaliana]
  misc_feature (3)..(123): Homolog of NCBI NO: 15224110 NR Description: expressed protein [Arabidopsis thaliana]
  misc_feature (31)..(198): Homolog of NCBI NO: 15223669 NR Description: hypothetical protein [Arabidopsis thaliana]
  misc_feature (43)..(254): Homolog of NCBI NO: 15222285 NR Description: hypothetical protein [Arabidopsis thaliana]
  misc_feature (1)..(226): Homolog of NCBI NO: 15234365 NR Description: expressed protein [Arabidopsis thaliana]
  misc_feature (41)..(254): Homolog of NCBI NO: 15239350 NR Description: zinc finger protein SHI-related [Arabidopsis
  misc_feature (1)..(251): Homolog of NCBI NO: 34906658 NR Description: putative LRP(lateral root primordia) 1
  misc_feature (1)..(238): Homolog of NCBI NO: 882341 NR Description: LRP1
  misc_feature (1)..(238): Homolog of NCBI NO: 18416839 NR Description: lateral root primordia (LRP1) [Arabidopsis
MGNISHHRNRIQLWEDHESSPPQQQQGHVERDTCGDGGLGGSGTNTCQDCGNQAKKDCSHRRCRTCCKSRGFDCATHVKSTWVPASRRRERQLMTVAAARSSGDTSGAKKPRLVASQTTSHTSTSNNTNTTPPRSFDTGSSHQDVGFKESLPCQVRAPAVFKCVRVTAVDDGGEDEYAYQAVVKIGGHVFKGFLYDQGVEDKEGYPNLSELHLGGGNGVSSSSPMVDPSHDVYAASGGGLLLGGSSNYGNHPIN

SEQ ID NO: 60009 - DNA, 1341 bp, Glycine max
  misc_feature (1)..(1341): Ceres Seq. ID no. 14315170
agatttaattcctttcaaccaaacacaccaaaataagccgggcgccaaaacaaataagccggaatcaaagagtaccctttccagccttccgtaccaaacaaaattgaatctctcttccgcacaaacaacctctcacgccccaaagccacacacaaaacatttaccttttccaacccttcaattccctaaacatttttcttttccttcgaactccaattccctcaccagaacacggtcaccattgttttccctttcaacaacattcgccatcctttcgcgacgaagagaaaaaaaaaaggggtgttagggtttcgattctctgcgacgctctccgcattgcgctaccctgcaccttcctcaccatatcgcgcgcctctctcactcccctactgtttttccgctccccaccccctctctctgtgttgcgaaaattagggttcataggtttggggctaattcttcttccgatttcgaaccgagcgcaatcgtaaagagagaaaatgtacgctgatcgcgtggagggtggagcaaggaggccagtgaaggaacgccttaatgatgtgaatggtgtcagtggctctactcgcccgcagcagcagcgtcaaatcactggcaagaggtcaaggcaagatgacaagtgggaacatgatctctttgacaatgacgaaccccggatcactaatcgcaaagttagtgctcaagatcttcgcctcaagcttcaaaggaagggtcttcaacctgcatctcagagtggaaagagttctgccccaaacgtgctggatctccgtgaaaggctatcagggacaatggcaccacaacctacaaattatgatctgcctaagacaaaagttattaaaccaagcagtaaaagtgttggtgttgaggctcctgcagtgcagatcaaaaggccagctgacccagctcctaaaaagtcatggaaggctggtccttcagttgatgaatttttgcggtccttgggtctcgaaaagtatctcataacttttcaggctgaagaagttgatatgacagctctcaatcatatgactgatgaagatctcaaggctatgggcataccaatgggaccaagaaagaagatacttttagcactggagtcgaaagtctaacatttagttatggaattgattttctaagctggatggtggtgggaggagatcaggatctaaaaaccaagtgtaatagcatagttctttgattattttcgtttttaatattttcccttactttttagacattaatcaagttaattttggtgtttattttgctaaaccccgtcaatctcctgaaactctcttataatgcaattaatggatttgagagttt

SEQ ID NO: 60010 - protein, 207 aa, Glycine max
  peptide (1)..(207): Ceres Seq. ID no. 14315171
  misc_feature (145)..(206): Pfam Name: SAM domain (Sterile alpha motif) Pfam Description: SAM domain (Sterile alpha motif)
  misc_feature (151)..(205): Homolog of NCBI NO: 22330538 NR Description: expressed protein [Arabidopsis thaliana]
  misc_feature (70)..(203): Homolog of NCBI NO: 38345636 NR Description: OSJNBb0048E02.6 [Oryza sativa (japonica
  misc_feature (1)..(193): Homolog of NCBI NO: 39546279 NR Description: OSJNBa0083D01.12 [Oryza sativa (japonica
  misc_feature (1)..(203): Homolog of NCBI NO: 30695517 NR Description: expressed protein [Arabidopsis thaliana]
  misc_feature (1)..(206): Homolog of NCBI NO: 18397861 NR Description: expressed protein [Arabidopsis thaliana]
MYADRVEGGARRPVKERLNDVNGVSGSTRPQQQRQITGKRSRQDDKWEHDLFDNDEPRITNRKVSAQDLRLKLQRKGLQPASQSGKSSAPNVLDLRERLSGTMAPQPTNYDLPKTKVIKPSSKSVGVEAPAVQIKRPADPAPKKSWKAGPSVDEFLRSLGLEKYLITFQAEEVDMTALNHMTDEDLKAMGIPMGPRKKILLALESKV

SEQ ID NO: 60011 - protein, 144 aa, Glycine max
  peptide (1)..(144): Ceres Seq. ID no. 14315172
MVSVALLARSSSVKSLARGQGKMTSGNMISLTMTNPGSLIAKLVLKIFASSFKGRVFNLHLRVERVLPQTCWISVKGYQGQWHHNLQIMICLRQKLLNQAVKVLVLRLLQCRSKGQLTQLLKSHGRLVLQLMNFCGPWVSKSIS

SEQ ID NO: 60012 - protein, 122 aa, Glycine max
  peptide (1)..(122): Ceres Seq. ID no. 14315173
MTSGNMISLTMTNPGSLIAKLVLKIFASSFKGRVFNLHLRVERVLPQTCWISVKGYQGQWHHNLQIMICLRQKLLNQAVKVLVLRLLQCRSKGQLTQLLKSHGRLVLQLMNFCGPWVSKSIS

SEQ ID NO: 60013 - DNA, 663 bp, Glycine max
  misc_feature (1)..(663): Ceres Seq. ID no. 13594273
atattcaaaagccgaacccaaataacacaacacaaaacgatcttttatttctctgtctagagaagaatctagcaagccttgctcgtcacaaaatcaaaggttgcaactgagaactcactccttcgaatcaaaatcaaaaaatgtcggtgactctgcacacaaacctaggcgacatcaagtgtgaaatcttctgcgacgaggtccctaaaacctccgagaattttttagcgctatgtgcaagtggttactatgatgggactatatttcaccgcaacattaagggttttatgattcaaggtggagatccaactggaactggcaaagggggaaccagtatatggggcaagaaatttaacgatgagataagagaatctctgaagcacaatgcaagaggaatattagcaatggccaatagtggtccaaatactaatggaagccaatttttcttgacttatgcaaagctttatccaatcactgtgtgtggtgtgtgcttaagttaaaaacttgccttccaattaatgtaacgagtgtttcctttctcatttccttttgccacagaattgtgagagtcagttgatatctttgtatgtgacttcaataaattttaataaaagaaagcatcatttaaaaaaaaaaaaaaaaaagcttatcgataccgtcgac

SEQ ID NO: 60014 - protein, 119 aa, Glycine max
  peptide (1)..(119): Ceres Seq. ID no. 13594274
  misc_feature (1)..(107): Homolog of NCBI NO: 39590255 NR Description: Hypothetical protein CBG11184 [Caenorhabditis
  misc_feature (1)..(105): Homolog of NCBI NO: 27924331 NR Description: Similar to peptidylprolyl isomerase
  misc_feature (1)..(107): Homolog of NCBI NO: 29028318 NR Description: cyclophilin [Homo sapiens]
  misc_feature (1)..(107): Homolog of NCBI NO: 28190012 NR Description: CYP10L [Mus musculus]
  misc_feature (1)..(107): Homolog of NCBI NO: 28269677 NR Description: peptidylprolyl isomerase-like 3; cyclophilin-like
  misc_feature (1)..(107): Homolog of NCBI NO: 21746159 NR Description: peptidylprolyl isomerase-like 3; cyclophilin-like
  misc_feature (1)..(107): Homolog of NCBI NO: 19557636 NR Description: peptidylprolyl isomerase-like protein 3 isoform
  misc_feature (1)..(107): Homolog of NCBI NO: 14043400 NR Description: Unknown (protein for MGC:10732) [Homo sapiens]
  misc_feature (1)..(107): Homolog of NCBI NO: 6006361 NR Description: ESTs AU030008(E50477),AU078239(E50477) correspond a region of the predicted gene.~Similar to peptidyl-prolyl
  misc_feature (1)..(107): Homolog of NCBI NO: 30678211 NR Description: expressed protein [Arabidopsis thaliana]
MSVTLHTNLGDIKCEIFCDEVPKTSENFLALCASGYYDGTIFHRNIKGFMIQGGDPTGTGKGGTSIWGKKFNDEIRESLKHNARGILAMANSGPNTNGSQFFLTYAKLYPITVCGVCLS

SEQ ID NO: 60015 - protein, 70 aa, Glycine max
  peptide (1)..(70): Ceres Seq. ID no. 13594275
  misc_feature (1)..(58): Homolog of NCBI NO: 39590255 NR Description: Hypothetical protein CBG11184 [Caenorhabditis
  misc_feature (1)..(56): Homolog of NCBI NO: 27924331 NR Description: Similar to peptidylprolyl isomerase
  misc_feature (1)..(58): Homolog of NCBI NO: 29028318 NR Description: cyclophilin [Homo sapiens]
  misc_feature (1)..(58): Homolog of NCBI NO: 28190012 NR Description: CYP10L [Mus musculus]
  misc_feature (1)..(58): Homolog of NCBI NO: 28269677 NR Description: peptidylprolyl isomerase-like 3; cyclophilin-like
  misc_feature (1)..(58): Homolog of NCBI NO: 21746159 NR Description: peptidylprolyl isomerase-like 3; cyclophilin-like
  misc_feature (1)..(58): Homolog of NCBI NO: 19557636 NR Description: peptidylprolyl isomerase-like protein 3 isoform
  misc_feature (1)..(58): Homolog of NCBI NO: 14043400 NR Description: Unknown (protein for MGC:10732) [Homo sapiens]
  misc_feature (1)..(58): Homolog of NCBI NO: 6006361 NR Description: ESTs AU030008(E50477),AU078239(E50477) correspond a region of the predicted gene.~Similar to peptidyl-prolyl
  misc_feature (1)..(58): Homolog of NCBI NO: 30678211 NR Description: expressed protein [Arabidopsis thaliana]
MIQGGDPTGTGKGGTSIWGKKFNDEIRESLKHNARGILAMANSGPNTNGSQFFLTYAKLYPITVCGVCLS

SEQ ID NO: 60016 - DNA, 1062 bp, Glycine max
  misc_feature (1)..(1062): Ceres Seq. ID no. 15225932
ggttacttttcgcatcttttcgttttgagctcaccgtggctcttctccattgtcgttttgcttctcccttcttccttcccattcaaaccctaatctgtccctcggatcccaaaattgccccaaattgagaacacgccatggcggcaacgttcgatttggttcgttccctcgcacttctcactcttgcatttgtgtgtagcgtcgcgaattcgatgcggttcgagcttcaatcgggtaacaccaagtgcatttcagaagacattaagaccaacgcgatgagtgtgggaaagtacagtgttgttaatccccgagaagggtacccacttcccgattcccacaggatcgttgtcaaggtgacgtcgcctcatgcgaacatgtatcactttggagatcatgtggattctggtaattttgcatttacggcatctgagtctggtgactactcagcttgcttttgggttcaggataccagagataccccgtcggtggtgactattgaatttgagtggagaactggggttgctgccaaagactggtccaaggttgccaagaaagggcagattgaagtaatggaatttgagttgaagaagctatatgatactatcctatccatccatgacgagatgttttatcttcgagaaagggaggaagagatgcaagatcttaacaaagcaacaaacagcaagatgtttaccttcagtttcctttcgattgtggtttgcttgtctgtggctggtttgcaactatggcatttgaagacattctttgagaggaagaagctcctctaagttcatcacacgaattttgttcatttttgcttcagaattttttttattttctgttcctggttgttccttatgtatccaaatgtatgattagttcatctttcacttttacattttatggcaactagaaattgctgctgatcgcaagtcatgttaaatgtatgttacaattatgaaccggtattaactttagaaactatagttaaatttcttaacaggcccttaaaaaaaaaaaaaaaaaaaaaaaaaaaaaaaaaaaaaaaaaaaaaaaaaaaag

SEQ ID NO: 60017 - protein, 216 aa, Glycine max
  peptide (1)..(216): Ceres Seq. ID no. 15225933
  misc_feature (13)..(216): Pfam Name: emp24/gp25L/p24 family Pfam Description: emp24/gp25L/p24 family
  misc_feature (8)..(216): Homolog of NCBI NO: 11994711 NR Description: golgi-associated membrane trafficking
  misc_feature (13)..(216): Homolog of NCBI NO: 22330523 NR Description: emp24/gp25L/p24 family [Arabidopsis thaliana]
  misc_feature (13)..(216): Homolog of NCBI NO: 12597802 NR Description: unknown protein [Arabidopsis thaliana]
  misc_feature (6)..(216): Homolog of NCBI NO: 15227591 NR Description: emp24/gp25L/p24 family [Arabidopsis thaliana]
  misc_feature (10)..(216): Homolog of NCBI NO: 8778403 NR Description: F16A14.23 [Arabidopsis thaliana]
  misc_feature (21)..(216): Homolog of NCBI NO: 18921314 NR Description: putative transmembrane protein [Oryza sativa]
  misc_feature (10)..(216): Homolog of NCBI NO: 15223027 NR Description: emp24/gp25L/p24 family [Arabidopsis thaliana]
  misc_feature (13)..(216): Homolog of NCBI NO: 18396016 NR Description: emp24/gp25L/p24 family [Arabidopsis thaliana]
  misc_feature (13)..(216): Homolog of NCBI NO: 21618241 NR Description: unknown [Arabidopsis thaliana]
  misc_feature (7)..(216): Homolog of NCBI NO: 33146897 NR Description: putative transmembrane protein
MAATFDLVRSLALLTLAFVCSVANSMRFELQSGNTKCISEDIKTNAMSVGKYSVVNPREGYPLPDSHRIVVKVTSPHANMYHFGDHVDSGNFAFTASESGDYSACFWVQDTRDTPSVVTIEFEWRTGVAAKDWSKVAKKGQIEVMEFELKKLYDTILSIHDEMFYLREREEEMQDLNKATNSKMFTFSFLSIVVCLSVAGLQLWHLKTFFERKKLL

SEQ ID NO: 60018 - protein, 191 aa, Glycine max
  peptide (1)..(191): Ceres Seq. ID no. 15225934
  misc_feature (1)..(191): Pfam Name: emp24/gp25L/p24 family Pfam Description: emp24/gp25L/p24 family
  misc_feature (1)..(191): Homolog of NCBI NO: 11994711 NR Description: golgi-associated membrane trafficking
  misc_feature (1)..(191): Homolog of NCBI NO: 22330523 NR Description: emp24/gp25L/p24 family [Arabidopsis thaliana]
  misc_feature (1)..(191): Homolog of NCBI NO: 12597802 NR Description: unknown protein [Arabidopsis thaliana]
  misc_feature (1)..(191): Homolog of NCBI NO: 15227591 NR Description: emp24/gp25L/p24 family [Arabidopsis thaliana]
  misc_feature (1)..(191): Homolog of NCBI NO: 8778403 NR Description: F16A14.23 [Arabidopsis thaliana]
  misc_feature (1)..(191): Homolog of NCBI NO: 18921314 NR Description: putative transmembrane protein [Oryza sativa]
  misc_feature (1)..(191): Homolog of NCBI NO: 15223027 NR Description: emp24/gp25L/p24 family [Arabidopsis thaliana]
  misc_feature (1)..(191): Homolog of NCBI NO: 18396016 NR Description: emp24/gp25L/p24 family [Arabidopsis thaliana]
  misc_feature (1)..(191): Homolog of NCBI NO: 21618241 NR Description: unknown [Arabidopsis thaliana]
  misc_feature (1)..(191): Homolog of NCBI NO: 33146897 NR Description: putative transmembrane protein
MRFELQSGNTKCISEDIKTNAMSVGKYSVVNPREGYPLPDSHRIVVKVTSPHANMYHFGDHVDSGNFAFTASESGDYSACFWVQDTRDTPSVVTIEFEWRTGVAAKDWSKVAKKGQIEVMEFELKKLYDTILSIHDEMFYLREREEEMQDLNKATNSKMFTFSFLSIVVCLSVAGLQLWHLKTFFERKKLL

SEQ ID NO: 60019 - protein, 170 aa, Glycine max
  peptide (1)..(170): Ceres Seq. ID no. 15225935
  misc_feature (1)..(170): Pfam Name: emp24/gp25L/p24 family Pfam Description: emp24/gp25L/p24 family
  misc_feature (1)..(170): Homolog of NCBI NO: 11994711 NR Description: golgi-associated membrane trafficking
  misc_feature (1)..(170): Homolog of NCBI NO: 22330523 NR Description: emp24/gp25L/p24 family [Arabidopsis thaliana]
  misc_feature (1)..(170): Homolog of NCBI NO: 12597802 NR Description: unknown protein [Arabidopsis thaliana]
  misc_feature (1)..(170): Homolog of NCBI NO: 15227591 NR Description: emp24/gp25L/p24 family [Arabidopsis thaliana]
  misc_feature (1)..(170): Homolog of NCBI NO: 8778403 NR Description: F16A14.23 [Arabidopsis thaliana]
  misc_feature (1)..(170): Homolog of NCBI NO: 18921314 NR Description: putative transmembrane protein [Oryza sativa]
  misc_feature (1)..(170): Homolog of NCBI NO: 15223027 NR Description: emp24/gp25L/p24 family [Arabidopsis thaliana]
  misc_feature (1)..(170): Homolog of NCBI NO: 18396016 NR Description: emp24/gp25L/p24 family [Arabidopsis thaliana]
  misc_feature (1)..(170): Homolog of NCBI NO: 21618241 NR Description: unknown [Arabidopsis thaliana]
  misc_feature (1)..(170): Homolog of NCBI NO: 33146897 NR Description: putative transmembrane protein
MSVGKYSVVNPREGYPLPDSHRIVVKVTSPHANMYHFGDHVDSGNFAFTASESGDYSACFWVQDTRDTPSVVTIEFEWRTGVAAKDWSKVAKKGQIEVMEFELKKLYDTILSIHDEMFYLREREEEMQDLNKATNSKMFTFSFLSIVVCLSVAGLQLWHLKTFFERKKLL

SEQ ID NO: 60020 - DNA, 1305 bp, Glycine max
  misc_feature (1)..(1305): Ceres Seq. ID no. 14316546
tgctcaattcttatcctccttttcagcttcatcagggcaaatggcaccacagtctttttttacacagtctggtcaacacgtgcagcaagatttctcagctgtaaccagtcaacctgcagcacaatccttttcagctcctggtggccaacctctacaacccccaccatcagttcccactagtcaacatgcacagcaaccctttccatctcacactgatcaatctgcacagtcagttagtcatatatatggtggatttccttccctggctgctggctctatgactcaagaagcttcttcagccatgttccctcaatctcaaggtggacatatgaaccagacctatgaacaaggatctatgccacttatccctttacacacggctccccaagcttcaacaggacagagtgcaaactatttgtcttctcaatcccccattgatcaagcatcacagtttaacagtgggaacttgtcgggacagtcatttaaccatcaaccacttggtcaaggagtacatgcttcacagaatgctgtttctcagccacccaaggacaagtttgagacaaaatcgacagtttgggcagacacacttagcagggggttggttaatttgaatatatctggacctaaaataaaccctttagcagatattggagttgactttgatgccattaataggagggaaaagaggatggagaagcccaccacgacaacggtaacgtcaactgtaacaatgggtaaagctatgggatctggttcaggtatgggccgggctggtgtgggtgctcttagacctccaccaaacccgatgatgggtcctggtgttggtatggcacatatgggtatgggaggctatggaggcatgaacgtgcctatgggtatggtgcagatgcagccaccaccttttggatttccgcctgggtccaacatgcctggaaattataactccatgatgagaagaggtggttatcctcaacatccgtacagtggtggtggctaccgatgagatttatagcaatgtcaaagtgtataagattgagcactatacctagataagatcatagcaaggtaaagtagtattagtttatgacgcaattgttttgctacacagtttagagaacggcacggcaatacatctggtctacatcttgcaatcgtatttctaacaatagatgttatccttatacttgtttttttattatgctttccactcatttttataggtgttttgctgtgtaccagtcaccccatcaaataaccttacttgggttattggtttttttttttatagttaatacccccaacgcc

SEQ ID NO: 60021 - protein, 333 aa, Glycine max
  peptide (1)..(333): Ceres Seq. ID no. 14316547
  misc_feature (1)..(218): Homolog of NCBI NO: 1724114 NR Description: Af10-protein [Avena fatua]
  misc_feature (33)..(323): Homolog of NCBI NO: 18411135 NR Description: epsin-related protein [Arabidopsis thaliana]
  misc_feature (33)..(323): Homolog of NCBI NO: 11357285 NR Description: epsin-like protein - Arabidopsis thaliana
  misc_feature (11)..(308): Homolog of NCBI NO: 15451572 NR Description: Putative epsin [Oryza sativa]
  misc_feature (23)..(330): Homolog of NCBI NO: 15215854 NR Description: At2g43170/F14B2.11 [Arabidopsis thaliana]
  misc_feature (23)..(330): Homolog of NCBI NO: 30689266 NR Description: clathrin binding protein (epsin) -related
  misc_feature (23)..(330): Homolog of NCBI NO: 25408842 NR Description: hypothetical protein At2g43170 [imported] -
AQFLSSFSASSGQMAPQSFFTQSGQHVQQDFSAVTSQPAAQSFSAPGGQPLQPPPSVPTSQHAQQPFPSHTDQSAQSVSHIYGGFPSLAAGSMTQEASSAMFPQSQGGHMNQTYEQGSMPLIPLHTAPQASTGQSANYLSSQSPIDQASQFNSGNLSGQSFNHQPLGQGVHASQNAVSQPPKDKFETKSTVWADTLSRGLVNLNISGPKINPLADIGVDFDAINRREKRMEKPTTTTVTSTVTMGKAMGSGSGMGRAGVGALRPPPNPMMGPGVGMAHMGMGGYGGMNVPMGMVQMQPPPFGFPPGSNMPGNYNSMMRRGGYPQHPYSGGGYR

SEQ ID NO: 60022 - protein, 320 aa, Glycine max
  peptide (1)..(320): Ceres Seq. ID no. 14316548
  misc_feature (1)..(205): Homolog of NCBI NO: 1724114 NR Description: Af10-protein [Avena fatua]
  misc_feature (20)..(310): Homolog of NCBI NO: 18411135 NR Description: epsin-related protein [Arabidopsis thaliana]
  misc_feature (20)..(310): Homolog of NCBI NO: 11357285 NR Description: epsin-like protein - Arabidopsis thaliana
  misc_feature (1)..(295): Homolog of NCBI NO: 15451572 NR Description: Putative epsin [Oryza sativa]
  misc_feature (10)..(317): Homolog of NCBI NO: 15215854 NR Description: At2g43170/F14B2.11 [Arabidopsis thaliana]
  misc_feature (10)..(317): Homolog of NCBI NO: 30689266 NR Description: clathrin binding protein (epsin) -related
  misc_feature (10)..(317): Homolog of NCBI NO: 25408842 NR Description: hypothetical protein At2g43170 [imported] -
MAPQSFFTQSGQHVQQDFSAVTSQPAAQSFSAPGGQPLQPPPSVPTSQHAQQPFPSHTDQSAQSVSHIYGGFPSLAAGSMTQEASSAMFPQSQGGHMNQTYEQGSMPLIPLHTAPQASTGQSANYLSSQSPIDQASQFNSGNLSGQSFNHQPLGQGVHASQNAVSQPPKDKFETKSTVWADTLSRGLVNLNISGPKINPLADIGVDFDAINRREKRMEKPTTTTVTSTVTMGKAMGSGSGMGRAGVGALRPPPNPMMGPGVGMAHMGMGGYGGMNVPMGMVQMQPPPFGFPPGSNMPGNYNSMMRRGGYPQHPYSGGGYR

SEQ ID NO: 60023 - protein, 241 aa, Glycine max
  peptide (1)..(241): Ceres Seq. ID no. 14316549
  misc_feature (1)..(126): Homolog of NCBI NO: 1724114 NR Description: Af10-protein [Avena fatua]
  misc_feature (1)..(231): Homolog of NCBI NO: 18411135 NR Description: epsin-related protein [Arabidopsis thaliana]
  misc_feature (1)..(231): Homolog of NCBI NO: 11357285 NR Description: epsin-like protein - Arabidopsis thaliana
  misc_feature (1)..(216): Homolog of NCBI NO: 15451572 NR Description: Putative epsin [Oryza sativa]
  misc_feature (1)..(238): Homolog of NCBI NO: 15215854 NR Description: At2g43170/F14B2.11 [Arabidopsis thaliana]
  misc_feature (1)..(238): Homolog of NCBI NO: 30689266 NR Description: clathrin binding protein (epsin) -related
  misc_feature (1)..(238): Homolog of NCBI NO: 25408842 NR Description: hypothetical protein At2g43170 [imported] -
MTQEASSAMFPQSQGGHMNQTYEQGSMPLIPLHTAPQASTGQSANYLSSQSPIDQASQFNSGNLSGQSFNHQPLGQGVHASQNAVSQPPKDKFETKSTVWADTLSRGLVNLNISGPKINPLADIGVDFDAINRREKRMEKPTTTTVTSTVTMGKAMGSGSGMGRAGVGALRPPPNPMMGPGVGMAHMGMGGYGGMNVPMGMVQMQPPPFGFPPGSNMPGNYNSMMRRGGYPQHPYSGGGYR

SEQ ID NO: 60024 - DNA, 1071 bp, Glycine max
  misc_feature (1)..(1071): Ceres Seq. ID no. 15177034
atatatcatttcaagaccttaaagtaccaaacttccaactcttctctcttctctcttcactcttcactcttgtcgtcatttcctcacaaaaccagtgtccgtaacatctccaccttaacgatgtcggtaaaggagtgtcaccaccacaagggaaagaagcacaaactctggagacgcatcttctggggcatagtgatcttcgccttcatcgtgttgctaacagttcttataatctgggcaatcctaaagccttcaaagccaaccttcatcctccaagacgtgaccgtctacggcttcaacgccaccatccccaacttcctcacctcaagctttcaggtcacgctttcctcgcgcaaccccaacgacaaaatcggagtctactacgaccgtctcgacacctacgtcacttaccggaaccaggtcacgtaccgaacctcaatcccaccctcataccaaggtcacaaggaagaggatgtgtggtccccattcgtcttcggcactaacgtccccgtcgcacccttcaacttcgttggtctcagtcaagaccagaccaacggcaacgtcctcgtcctcgttaagattgacggtaaggtacgatggaaagttggtaccttcgtctctggtcactacaacctctatgtaaggtgccctgctttcataacttttggcccccaaagcaccgggattgcccttggcaagaacgccgttaagtatcaattggttcaacgctgcaccgtcggggtttgatgtaaccgccgtccaacatatattcattctgtctttgctctgctccttgctatatttagtgtctatctatatacggtcttttctcatttctttttttttatatacgtattcttgttatcttccactacgtatttcttctgtattgacggatcactttgttgttaggcatacgtgcgtgtctttgttacagcatttggaattgtacattttgctacagaataaactgcacttggaaaaaaaagtatgtaatagagatgaaagcgaaattacaatttgtaacaaagagccaattgaaataaattaaaacgttgtttcaatttggac

SEQ ID NO: 60025 - protein, 248 aa, Glycine max
  peptide (1)..(248): Ceres Seq. ID no. 15177035
  misc_feature (41)..(248): Homolog of NCBI NO: 32488715 NR Description: OSJNBa0088H09.16 [Oryza sativa (japonica
  misc_feature (41)..(246): Homolog of NCBI NO: 15227540 NR Description: harpin-induced protein 1 family (HIN1)
  misc_feature (41)..(248): Homolog of NCBI NO: 22326984 NR Description: harpin-induced protein 1 family (HIN1)
  misc_feature (41)..(246): Homolog of NCBI NO: 15233951 NR Description: harpin-induced protein 1 family (HIN1)
  misc_feature (41)..(248): Homolog of NCBI NO: 15240001 NR Description: harpin-induced protein, putative (HIN1)
  misc_feature (41)..(248): Homolog of NCBI NO: 15229906 NR Description: harpin-induced protein 1 family (HIN1)
  misc_feature (44)..(248): Homolog of NCBI NO: 15231227 NR Description: harpin-induced protein 1 family (HIN1)
  misc_feature (41)..(248): Homolog of NCBI NO: 15227538 NR Description: harpin-induced protein 1 family (HIN1)
  misc_feature (43)..(248): Homolog of NCBI NO: 28392929 NR Description: putative VAMP protein SEC22 [Arabidopsis thaliana]
  misc_feature (43)..(248): Homolog of NCBI NO: 18399308 NR Description: harpin-induced protein 1 family (HIN1)
IYHFKTLKYQTSNSSLFSLHSSLLSSFPHKTSVRNISTLTMSVKECHHHKGKKHKLWRRIFWGIVIFAFIVLLTVLIIWAILKPSKPTFILQDVTVYGFNATIPNFLTSSFQVTLSSRNPNDKIGVYYDRLDTYVTYRNQVTYRTSIPPSYQGHKEEDVWSPFVFGTNVPVAPFNFVGLSQDQTNGNVLVLVKIDGKVRWKVGTFVSGHYNLYVRCPAFITFGPQSTGIALGKNAVKYQLVQRCTVGV

SEQ ID NO: 60026 - protein, 208 aa, Glycine max
  peptide (1)..(208): Ceres Seq. ID no. 15177036
  misc_feature (1)..(208): Homolog of NCBI NO: 32488715 NR Description: OSJNBa0088H09.16 [Oryza sativa (japonica
  misc_feature (1)..(206): Homolog of NCBI NO: 15227540 NR Description: harpin-induced protein 1 family (HIN1)
  misc_feature (1)..(208): Homolog of NCBI NO: 22326984 NR Description: harpin-induced protein 1 family (HIN1)
  misc_feature (1)..(206): Homolog of NCBI NO: 15233951 NR Description: harpin-induced protein 1 family (HIN1)
  misc_feature (1)..(208): Homolog of NCBI NO: 15240001 NR Description: harpin-induced protein, putative (HIN1)
  misc_feature (1)..(208): Homolog of NCBI NO: 15229906 NR Description: harpin-induced protein 1 family (HIN1)
  misc_feature (4)..(208): Homolog of NCBI NO: 15231227 NR Description: harpin-induced protein 1 family (HIN1)
  misc_feature (1)..(208): Homolog of NCBI NO: 15227538 NR Description: harpin-induced protein 1 family (HIN1)
  misc_feature (3)..(208): Homolog of NCBI NO: 28392929 NR Description: putative VAMP protein SEC22 [Arabidopsis thaliana]
  misc_feature (3)..(208): Homolog of NCBI NO: 18399308 NR Description: harpin-induced protein 1 family (HIN1)
MSVKECHHHKGKKHKLWRRIFWGIVIFAFIVLLTVLIIWAILKPSKPTFILQDVTVYGFNATIPNFLTSSFQVTLSSRNPNDKIGVYYDRLDTYVTYRNQVTYRTSIPPSYQGHKEEDVWSPFVFGTNVPVAPFNFVGLSQDQTNGNVLVLVKIDGKVRWKVGTFVSGHYNLYVRCPAFITFGPQSTGIALGKNAVKYQLVQRCTVGV

SEQ ID NO: 60027 - DNA, 803 bp, Glycine max
  misc_feature (1)..(803): Ceres Seq. ID no. 14316320
agttggcgaatgacaatgcaatgctcgtgtcgttttggtgtcactgagtcagtctgagtaggaagaggaagccatgggcaacacatcctccatgctcacccaatacgacatcgaagaggttcagcaacattgcaaaaacgcttttacgcaacaggagatagtttctctgtaccaacgcttctgtcagctggatcgcaacaactgcggtttcatcccttccgatgaattcctctccattcccgaattcgccgtcaatcctctctctcagagtttgttgaggatgctggatgggttgaacttcaaggaatttgtggccttcttgtccgccttcagtccccgtgccactctccaccacaaaattgaattcattttcaaggtctatgacaccgattgcaatggaaaagttaccttccatgacatgttgagggctttaaggaatttgagtggacccttcatgtctgagcaacagagagaggacgttctgacacaggtccttgaggaagctggctatgcaaaggattcttcattagtcttgtctgacttcatgaagattcttggcaattcgggtttgaagatggaagtagaggttccggtggattagagtgaggataatacaattccctttttgagttttcttttttcttttttttgaggataactttccctttcagtttgatgacggaggttcttggttctggtatttagttcttcctcttaatgggtaaaagattatttgttcagtgattaattactgcaaacaaagttatggattatataatgtttaacaaatgctttcaaaactg

SEQ ID NO: 60028 - protein, 175 aa, Glycine max
  peptide (1)..(175): Ceres Seq. ID no. 14316321
  misc_feature (31)..(59): Pfam Name: EF hand Pfam Description: EF hand
  misc_feature (74)..(172): Homolog of NCBI NO: 39593284 NR Description: Hypothetical protein CBG09544 [Caenorhabditis
  misc_feature (1)..(164): Homolog of NCBI NO: 2645886 NR Description: calcineurin subunit B [Neurospora crassa]
  misc_feature (1)..(170): Homolog of NCBI NO: 3929338 NR Description: Calcineurin B subunit (Protein phosphatase 2B
  misc_feature (1)..(88): Homolog of NCBI NO: 17566934 NR Description: calcium binding protein P22 like, possibly
  misc_feature (74)..(172): Homolog of NCBI NO: 17566934 NR Description: calcium binding protein P22 like, possibly
  misc_feature (1)..(172): Homolog of NCBI NO: 13445166 NR Description: calcineurin B [Dictyostelium discoideum]
  misc_feature (1)..(172): Homolog of NCBI NO: 1168750 NR Description: Calcineurin B subunit (Protein phosphatase 2B
  misc_feature (1)..(175): Homolog of NCBI NO: 21592761 NR Description: calcineurin-like protein [Arabidopsis thaliana]
  misc_feature (1)..(175): Homolog of NCBI NO: 18401887 NR Description: calcineurin B subunit, putative [Arabidopsis
  misc_feature (1)..(175): Homolog of NCBI NO: 16550928 NR Description: calcineurin-like protein [Eucalyptus grandis]
MGNTSSMLTQYDIEEVQQHCKNAFTQQEIVSLYQRFCQLDRNNCGFIPSDEFLSIPEFAVNPLSQSLLRMLDGLNFKEFVAFLSAFSPRATLHHKIEFIFKVYDTDCNGKVTFHDMLRALRNLSGPFMSEQQREDVLTQVLEEAGYAKDSSLVLSDFMKILGNSGLKMEVEVPVD

SEQ ID NO: 60029 - protein, 169 aa, Glycine max
  peptide (1)..(169): Ceres Seq. ID no. 14316322
  misc_feature (25)..(53): Pfam Name: EF hand Pfam Description: EF hand
  misc_feature (68)..(166): Homolog of NCBI NO: 39593284 NR Description: Hypothetical protein CBG09544 [Caenorhabditis
  misc_feature (1)..(158): Homolog of NCBI NO: 2645886 NR Description: calcineurin subunit B [Neurospora crassa]
  misc_feature (1)..(164): Homolog of NCBI NO: 3929338 NR Description: Calcineurin B subunit (Protein phosphatase 2B
  misc_feature (1)..(82): Homolog of NCBI NO: 17566934 NR Description: calcium binding protein P22 like, possibly
  misc_feature (68)..(166): Homolog of NCBI NO: 17566934 NR Description: calcium binding protein P22 like, possibly
  misc_feature (1)..(166): Homolog of NCBI NO: 13445166 NR Description: calcineurin B [Dictyostelium discoideum]
  misc_feature (1)..(166): Homolog of NCBI NO: 1168750 NR Description: Calcineurin B subunit (Protein phosphatase 2B
  misc_feature (1)..(169): Homolog of NCBI NO: 21592761 NR Description: calcineurin-like protein [Arabidopsis thaliana]
  misc_feature (1)..(169): Homolog of NCBI NO: 18401887 NR Description: calcineurin B subunit, putative [Arabidopsis
  misc_feature (1)..(169): Homolog of NCBI NO: 16550928 NR Description: calcineurin-like protein [Eucalyptus grandis]
MLTQYDIEEVQQHCKNAFTQQEIVSLYQRFCQLDRNNCGFIPSDEFLSIPEFAVNPLSQSLLRMLDGLNFKEFVAFLSAFSPRATLHHKIEFIFKVYDTDCNGKVTFHDMLRALRNLSGPFMSEQQREDVLTQVLEEAGYAKDSSLVLSDFMKILGNSGLKMEVEVPVD

SEQ ID NO: 60030 - protein, 106 aa, Glycine max
  peptide (1)..(106): Ceres Seq. ID no. 14316323
  misc_feature (5)..(103): Homolog of NCBI NO: 39593284 NR Description: Hypothetical protein CBG09544 [Caenorhabditis
  misc_feature (1)..(95): Homolog of NCBI NO: 2645886 NR Description: calcineurin subunit B [Neurospora crassa]
  misc_feature (1)..(101): Homolog of NCBI NO: 3929338 NR Description: Calcineurin B subunit (Protein phosphatase 2B
  misc_feature (1)..(19): Homolog of NCBI NO: 17566934 NR Description: calcium binding protein P22 like, possibly
  misc_feature (5)..(103): Homolog of NCBI NO: 17566934 NR Description: calcium binding protein P22 like, possibly
  misc_feature (1)..(103): Homolog of NCBI NO: 13445166 NR Description: calcineurin B [Dictyostelium discoideum]
  misc_feature (1)..(103): Homolog of NCBI NO: 1168750 NR Description: Calcineurin B subunit (Protein phosphatase 2B
  misc_feature (1)..(106): Homolog of NCBI NO: 21592761 NR Description: calcineurin-like protein [Arabidopsis thaliana]
  misc_feature (1)..(106): Homolog of NCBI NO: 18401887 NR Description: calcineurin B subunit, putative [Arabidopsis
  misc_feature (1)..(106): Homolog of NCBI NO: 16550928 NR Description: calcineurin-like protein [Eucalyptus grandis]
MLDGLNFKEFVAFLSAFSPRATLHHKIEFIFKVYDTDCNGKVTFHDMLRALRNLSGPFMSEQQREDVLTQVLEEAGYAKDSSLVLSDFMKILGNSGLKMEVEVPVD

SEQ ID NO: 60031 - DNA, 1109 bp, Glycine max
  misc_feature (1)..(1109): Ceres Seq. ID no. 15173557
agtttagataaacctccgactctgttctcaaggcgtcgtaacatcctcgtcactctcacacatcacacaacaatggcttctcttcattcttctttcctccttacatcaaattttctttccctcacaaccccatcaagttcttccactcacgttctctttcccatgagactctccacgacccacttgcgaccccttcttctcaccacacgacacggtttcgggagaccaccctttgccgcggtggcggaacaggcggccaccgcgaccgaggcgtccgcgaggaggctctacgttggcaacattccccgcaccgtcaccaacgaagagcttgccaagattgttcaagaacatggtgctgttgagaaagctgaggttatgtatgataaatactctggaaggagccgccgctttgcatttgttacgatgaaaactgttgaggatgcaactgctgtgattgagaaacttaacggcactgaaattggaggacgtgaggtcaaagtaaacgtaacggaaaaacctttatcaacaccagatttgcctttactccaagctgaggaatctgaatttattgacagtccccacaaggtgtatgtgggaaatctggccaaaacagtaacaactgatactcttaaaaactttttttctgagaagggaaaagttcttagtgccaaggtttcacgggtccctggtacctcaaaatccagtggatatgggtttgttactttttcgtcagaagaggatgtagaagctgcaatctcatctttcaacaattctttgttagaaggccaaacaatccgtgtaaacaaggcatagagaattagcaatgttggagagcatgtttgaccacgtgtcatctagccggaacaatgtatactttgtgtgaggctgaaaccactagcaaatttccttgtctcttgtatagcataaacctaatcattttcagttgataaggttctacgaaaaaatagtgcttcatgcttctgttgcaggcattgctcctttagtccaggatattgagacctcactttttcttcatgatcatgttgttgcacctttctactctgcttcagtgttgcaactcttgttgatatatgcatgtattcaattcc

SEQ ID NO: 60032 - protein, 270 aa, Glycine max
  peptide (1)..(270): Ceres Seq. ID no. 15173558
  misc_feature (96)..(167): Pfam Name: RNA recognition motif. (a.k.a. RRM, RBD, or RNP domain) Pfam Description: RNA recognition motif. (a.k.a. RRM, RBD, or RNP
  misc_feature (83)..(270): Homolog of NCBI NO: 133249 NR Description: 33 kDa ribonucleoprotein, chloroplast precursor
  misc_feature (83)..(270): Homolog of NCBI NO: 7446342 NR Description: RNA-binding protein precursor, 33K - wood tobacco
  misc_feature (81)..(270): Homolog of NCBI NO: 1076509 NR Description: RNA-binding protein RNP1 precursor - kidney bean
  misc_feature (83)..(270): Homolog of NCBI NO: 15231200 NR Description: 33 kDa ribonucleoprotein, chloroplast
  misc_feature (83)..(270): Homolog of NCBI NO: 17064758 NR Description: ubiquitin / ribosomal protein CEP52 [Arabidopsis
  misc_feature (83)..(270): Homolog of NCBI NO: 681912 NR Description: cp33 [Arabidopsis thaliana]
  misc_feature (156)..(270): Homolog of NCBI NO: 20159727 NR Description: plastid-specific ribosomal protein 2 precursor
  misc_feature (77)..(267): Homolog of NCBI NO: 11357772 NR Description: hypothetical protein F4F15.260 - Arabidopsis
  misc_feature (25)..(270): Homolog of NCBI NO: 7578881 NR Description: plastid-specific ribosomal protein 2 precursor
  misc_feature (77)..(270): Homolog of NCBI NO: 30693595 NR Description: RNA recognition motif (RRM)-containing protein
SLDKPPTLFSRRRNILVTLTHHTTMASLHSSFLLTSNFLSLTTPSSSSTHVLFPMRLSTTHLRPLLLTTRHGFGRPPFAAVAEQAATATEASARRLYVGNIPRTVTNEELAKIVQEHGAVEKAEVMYDKYSGRSRRFAFVTMKTVEDATAVIEKLNGTEIGGREVKVNVTEKPLSTPDLPLLQAEESEFIDSPHKVYVGNLAKTVTTDTLKNFFSEKGKVLSAKVSRVPGTSKSSGYGFVTFSSEEDVEAAISSFNNSLLEGQTIRVNKA

SEQ ID NO: 60033 - protein, 246 aa, Glycine max
  peptide (1)..(246): Ceres Seq. ID no. 15173559
  misc_feature (72)..(143): Pfam Name: RNA recognition motif. (a.k.a. RRM, RBD, or RNP domain) Pfam Description: RNA recognition motif. (a.k.a. RRM, RBD, or RNP
  misc_feature (59)..(246): Homolog of NCBI NO: 133249 NR Description: 33 kDa ribonucleoprotein, chloroplast precursor
  misc_feature (59)..(246): Homolog of NCBI NO: 7446342 NR Description: RNA-binding protein precursor, 33K - wood tobacco
  misc_feature (57)..(246): Homolog of NCBI NO: 1076509 NR Description: RNA-binding protein RNP1 precursor - kidney bean
  misc_feature (59)..(246): Homolog of NCBI NO: 17064758 NR Description: ubiquitin / ribosomal protein CEP52 [Arabidopsis
  misc_feature (59)..(246): Homolog of NCBI NO: 15231200 NR Description: 33 kDa ribonucleoprotein, chloroplast
  misc_feature (59)..(246): Homolog of NCBI NO: 681912 NR Description: cp33 [Arabidopsis thaliana]
  misc_feature (132)..(246): Homolog of NCBI NO: 20159727 NR Description: plastid-specific ribosomal protein 2 precursor
  misc_feature (53)..(243): Homolog of NCBI NO: 11357772 NR Description: hypothetical protein F4F15.260 - Arabidopsis
  misc_feature (1)..(246): Homolog of NCBI NO: 7578881 NR Description: plastid-specific ribosomal protein 2 precursor
  misc_feature (53)..(246): Homolog of NCBI NO: 30693595 NR Description: RNA recognition motif (RRM)-containing protein
MASLHSSFLLTSNFLSLTTPSSSSTHVLFPMRLSTTHLRPLLLTTRHGFGRPPFAAVAEQAATATEASARRLYVGNIPRTVTNEELAKIVQEHGAVEKAEVMYDKYSGRSRRFAFVTMKTVEDATAVIEKLNGTEIGGREVKVNVTEKPLSTPDLPLLQAEESEFIDSPHKVYVGNLAKTVTTDTLKNFFSEKGKVLSAKVSRVPGTSKSSGYGFVTFSSEEDVEAAISSFNNSLLEGQTIRVNKA

SEQ ID NO: 60034 - protein, 216 aa, Glycine max
  peptide (1)..(216): Ceres Seq. ID no. 15173560
  misc_feature (42)..(113): Pfam Name: RNA recognition motif. (a.k.a. RRM, RBD, or RNP domain) Pfam Description: RNA recognition motif. (a.k.a. RRM, RBD, or RNP
  misc_feature (29)..(216): Homolog of NCBI NO: 133249 NR Description: 33 kDa ribonucleoprotein, chloroplast precursor
  misc_feature (29)..(216): Homolog of NCBI NO: 7446342 NR Description: RNA-binding protein precursor, 33K - wood tobacco
  misc_feature (27)..(216): Homolog of NCBI NO: 1076509 NR Description: RNA-binding protein RNP1 precursor - kidney bean
  misc_feature (29)..(216): Homolog of NCBI NO: 17064758 NR Description: ubiquitin / ribosomal protein CEP52 [Arabidopsis
  misc_feature (29)..(216): Homolog of NCBI NO: 15231200 NR Description: 33 kDa ribonucleoprotein, chloroplast
  misc_feature (29)..(216): Homolog of NCBI NO: 681912 NR Description: cp33 [Arabidopsis thaliana]
  misc_feature (102)..(216): Homolog of NCBI NO: 20159727 NR Description: plastid-specific ribosomal protein 2 precursor
  misc_feature (23)..(213): Homolog of NCBI NO: 11357772 NR Description: hypothetical protein F4F15.260 - Arabidopsis
  misc_feature (1)..(216): Homolog of NCBI NO: 7578881 NR Description: plastid-specific ribosomal protein 2 precursor
  misc_feature (23)..(216): Homolog of NCBI NO: 30693595 NR Description: RNA recognition motif (RRM)-containing protein
MRLSTTHLRPLLLTTRHGFGRPPFAAVAEQAATATEASARRLYVGNIPRTVTNEELAKIVQEHGAVEKAEVMYDKYSGRSRRFAFVTMKTVEDATAVIEKLNGTEIGGREVKVNVTEKPLSTPDLPLLQAEESEFIDSPHKVYVGNLAKTVTTDTLKNFFSEKGKVLSAKVSRVPGTSKSSGYGFVTFSSEEDVEAAISSFNNSLLEGQTIRVNKA

SEQ ID NO: 60035 - DNA, 1775 bp, Glycine max
  misc_feature (1)..(1775): Ceres Seq. ID no. 14306857
aatcctcataactgcactatcacacacatagttctcttatctggtgcaagtgcaacaatcaagtactcatcagcatgggaatgttgttgttgttgttgtcttattctctccttttcctggttctattccttacactgaaatcccttttccaaagcagaaaattgagaaacctaccaccaggtcctcctcctcttcccataataggtaaccttaacctcctcgaacaacctattcaccgtttcttccaacgcatgtccaaagaatatggaaacatcgtttccctttggttcggttcacgtctcgccgttgtcatttcctcaccaactgcataccaagaatgcttcaccaaacacgacgttgccttggccaaccggctaccttctctctcgggaaaatacatattctacaacaacaccaccgtagggtcctgctcccacggccagcactggcggaacctccgccgaatcaccgccctggacgtcctctccacgcagcgagtccactctttctccggaatccgaagcgacgagacgaaaaggttggtacagaggttgctggccaagaactccaaggagggttttgctcgcgtggagataagctccatgttcaatgacttgacctacaacaacatcatgaggatgatatcagggaagaggttttacggagaggagagtgagttgaagaacgttgagaaagcgagggagttcagagagacagtgacagagatgctagaactcatgggggtggctaataagggagatcacttacctttcctaagatggttcgattttcagaatgtggagaagcgtttgaagagtattagtaaaaggtatgataccatcttgaatgagatcattgatgagaaccgtagcaagaaggaccgcgagaattccatgattgatcatcttctcaaactgcaagagactcagcctgagtactacactgaccaaatcatcaaaggccttgctttggccatgctttttggcggaactgactcatcaacgggaaccttagagtggtcgctatctaatttattgaatcacccagaggtgttgaagaaagcaaaagaagaattggacactcaagtaggacaagaccgcttgttaaatgagtcagaccttccaaaacttccttatcttagaaagatcattcttgagacacttaggttgtatcctccagctccaattctaatacctcatgtgtcttcagaagatatcactattgaaggattcaatgtcccacgagacacaattgtgatcattaatggttggggcatgcagagagatcctcatttgtggaatgatgccacatgctttaaacctgagaggtttgatgtggaaggagaggagaaaaagttggtagcatttggaatgggaagaagggcttgcccaggagaacccatggctatgcaaagtgtcagctttactttgggattattgattcaatgttttgactggaaacgagtaagtgaggaaaagcttgatatgacagagaataattggattaccttgtcaaggttaattccattggaagccatgtgcaaggctcgtccactcgccactaaaattggagtttaattattaatagtttttttatttggtaaagttgggtcaacatctaatacttataatttcagtgtgcatgtggtggttatacatgttaaacataatagtatttgtttgtatgtttacaaggccagttgtagaattggtgtgcattaggatatattaatattgtatgcatccccaacttctcaaataaattttttacttttt

SEQ ID NO: 60036 - protein, 500 aa, Glycine max
  peptide (1)..(500): Ceres Seq. ID no. 14306858
  misc_feature (34)..(487): Pfam Name: Cytochrome P450 Pfam Description: Cytochrome P450
  misc_feature (11)..(498): Homolog of NCBI NO: 15235534 NR Description: cytochrome P450 family [Arabidopsis thaliana]
  misc_feature (3)..(498): Homolog of NCBI NO: 15228472 NR Description: cytochrome P450 family [Arabidopsis thaliana]
  misc_feature (3)..(498): Homolog of NCBI NO: 15235535 NR Description: cytochrome P450 family [Arabidopsis thaliana]
  misc_feature (8)..(498): Homolog of NCBI NO: 4894170 NR Description: cytochrome P450 [Cicer arietinum]
  misc_feature (4)..(498): Homolog of NCBI NO: 7415996 NR Description: cytochrome P450 [Lotus corniculatus var.
  misc_feature (1)..(498): Homolog of NCBI NO: 33521517 NR Description: isoflavone 2'-hydroxylase [Medicago truncatula]
  misc_feature (1)..(498): Homolog of NCBI NO: 4688640 NR Description: cytochrome P450 monooxygenase [Cicer arietinum]
  misc_feature (4)..(498): Homolog of NCBI NO: 5915842 NR Description: Cytochrome P450 81E1 (Isoflavone 2'-hydroxylase)
  misc_feature (1)..(498): Homolog of NCBI NO: 3850630 NR Description: cytochrome P450 [Cicer arietinum]
  misc_feature (4)..(498): Homolog of NCBI NO: 4200044 NR Description: cytochrome P450 [Glycyrrhiza echinata]
MGMLLLLLSYSLLFLVLFLTLKSLFQSRKLRNLPPGPPPLPIIGNLNLLEQPIHRFFQRMSKEYGNIVSLWFGSRLAVVISSPTAYQECFTKHDVALANRLPSLSGKYIFYNNTTVGSCSHGQHWRNLRRITALDVLSTQRVHSFSGIRSDETKRLVQRLLAKNSKEGFARVEISSMFNDLTYNNIMRMISGKRFYGEESELKNVEKAREFRETVTEMLELMGVANKGDHLPFLRWFDFQNVEKRLKSISKRYDTILNEIIDENRSKKDRENSMIDHLLKLQETQPEYYTDQIIKGLALAMLFGGTDSSTGTLEWSLSNLLNHPEVLKKAKEELDTQVGQDRLLNESDLPKLPYLRKIILETLRLYPPAPILIPHVSSEDITIEGFNVPRDTIVIINGWGMQRDPHLWNDATCFKPERFDVEGEEKKLVAFGMGRRACPGEPMAMQSVSFTLGLLIQCFDWKRVSEEKLDMTENNWITLSRLIPLEAMCKARPLATKIGV

SEQ ID NO: 60037 - protein, 498 aa, Glycine max
  peptide (1)..(498): Ceres Seq. ID no. 14306859
  misc_feature (32)..(485): Pfam Name: Cytochrome P450 Pfam Description: Cytochrome P450
  misc_feature (9)..(496): Homolog of NCBI NO: 15235534 NR Description: cytochrome P450 family [Arabidopsis thaliana]
  misc_feature (1)..(496): Homolog of NCBI NO: 15228472 NR Description: cytochrome P450 family [Arabidopsis thaliana]
  misc_feature (1)..(496): Homolog of NCBI NO: 15235535 NR Description: cytochrome P450 family [Arabidopsis thaliana]
  misc_feature (6)..(496): Homolog of NCBI NO: 4894170 NR Description: cytochrome P450 [Cicer arietinum]
  misc_feature (2)..(496): Homolog of NCBI NO: 7415996 NR Description: cytochrome P450 [Lotus corniculatus var.
  misc_feature (1)..(496): Homolog of NCBI NO: 33521517 NR Description: isoflavone 2'-hydroxylase [Medicago truncatula]
  misc_feature (1)..(496): Homolog of NCBI NO: 4688640 NR Description: cytochrome P450 monooxygenase [Cicer arietinum]
  misc_feature (2)..(496): Homolog of NCBI NO: 5915842 NR Description: Cytochrome P450 81E1 (Isoflavone 2'-hydroxylase)
  misc_feature (1)..(496): Homolog of NCBI NO: 3850630 NR Description: cytochrome P450 [Cicer arietinum]
  misc_feature (2)..(496): Homolog of NCBI NO: 4200044 NR Description: cytochrome P450 [Glycyrrhiza echinata]
MLLLLLSYSLLFLVLFLTLKSLFQSRKLRNLPPGPPPLPIIGNLNLLEQPIHRFFQRMSKEYGNIVSLWFGSRLAVVISSPTAYQECFTKHDVALANRLPSLSGKYIFYNNTTVGSCSHGQHWRNLRRITALDVLSTQRVHSFSGIRSDETKRLVQRLLAKNSKEGFARVEISSMFNDLTYNNIMRMISGKRFYGEESELKNVEKAREFRETVTEMLELMGVANKGDHLPFLRWFDFQNVEKRLKSISKRYDTILNEIIDENRSKKDRENSMIDHLLKLQETQPEYYTDQIIKGLALAMLFGGTDSSTGTLEWSLSNLLNHPEVLKKAKEELDTQVGQDRLLNESDLPKLPYLRKIILETLRLYPPAPILIPHVSSEDITIEGFNVPRDTIVIINGWGMQRDPHLWNDATCFKPERFDVEGEEKKLVAFGMGRRACPGEPMAMQSVSFTLGLLIQCFDWKRVSEEKLDMTENNWITLSRLIPLEAMCKARPLATKIGV

SEQ ID NO: 60038 - protein, 441 aa, Glycine max
  peptide (1)..(441): Ceres Seq. ID no. 14306860
  misc_feature (1)..(428): Pfam Name: Cytochrome P450 Pfam Description: Cytochrome P450
  misc_feature (1)..(439): Homolog of NCBI NO: 15235534 NR Description: cytochrome P450 family [Arabidopsis thaliana]
  misc_feature (1)..(439): Homolog of NCBI NO: 15228472 NR Description: cytochrome P450 family [Arabidopsis thaliana]
  misc_feature (1)..(439): Homolog of NCBI NO: 15235535 NR Description: cytochrome P450 family [Arabidopsis thaliana]
  misc_feature (1)..(439): Homolog of NCBI NO: 4894170 NR Description: cytochrome P450 [Cicer arietinum]
  misc_feature (1)..(439): Homolog of NCBI NO: 7415996 NR Description: cytochrome P450 [Lotus corniculatus var.
  misc_feature (1)..(439): Homolog of NCBI NO: 33521517 NR Description: isoflavone 2'-hydroxylase [Medicago truncatula]
  misc_feature (1)..(439): Homolog of NCBI NO: 4688640 NR Description: cytochrome P450 monooxygenase [Cicer arietinum]
  misc_feature (1)..(439): Homolog of NCBI NO: 5915842 NR Description: Cytochrome P450 81E1 (Isoflavone 2'-hydroxylase)
  misc_feature (1)..(439): Homolog of NCBI NO: 3850630 NR Description: cytochrome P450 [Cicer arietinum]
  misc_feature (1)..(439): Homolog of NCBI NO: 4200044 NR Description: cytochrome P450 [Glycyrrhiza echinata]
MSKEYGNIVSLWFGSRLAVVISSPTAYQECFTKHDVALANRLPSLSGKYIFYNNTTVGSCSHGQHWRNLRRITALDVLSTQRVHSFSGIRSDETKRLVQRLLAKNSKEGFARVEISSMFNDLTYNNIMRMISGKRFYGEESELKNVEKAREFRETVTEMLELMGVANKGDHLPFLRWFDFQNVEKRLKSISKRYDTILNEIIDENRSKKDRENSMIDHLLKLQETQPEYYTDQIIKGLALAMLFGGTDSSTGTLEWSLSNLLNHPEVLKKAKEELDTQVGQDRLLNESDLPKLPYLRKIILETLRLYPPAPILIPHVSSEDITIEGFNVPRDTIVIINGWGMQRDPHLWNDATCFKPERFDVEGEEKKLVAFGMGRRACPGEPMAMQSVSFTLGLLIQCFDWKRVSEEKLDMTENNWITLSRLIPLEAMCKARPLATKIGV

SEQ ID NO: 60039 - DNA, 1024 bp, Glycine max
  misc_feature (1)..(1024): Ceres Seq. ID no. 14315060
ttttctgccattcattataccaacgtataagcatctctctctctctctctgtgttgtgccttttcactactactttgttcggtagctacttcgcttctaccctccattccattctctggaacaatgtctgagaaaatcacagctgaaaaccttttaaacacccttgtggaaacacttactgagaagcaaaaatctggatcattttttgaagaagacaagtcaagctcagtgagctaccaattcaacagactgtttggacgccagaaacctgtgcaccatattttagggggtggaaaatctgctgatgtcttgttatggaggaacaagaagatctctgctagcgttttatcggcagcaacagctatatgggtgctttttgaatggcttaattataatttcataactattttattctttgttgtggctcttggtatgcttggacagtttctttggacaaatgtttctggcttgtttagcaggaagccatctaaagttccccgttttgtcctcccagatgatatcttcgtgaatattgcaactgtagttggtgctgaggttaaccgtggtttgaggtttctccaagatgtttcttgtggaggaagcctaaaacaatttcttattgttgtagtaagcttatgggctggtgctgtgattgggagctggtgcaattttttgactgtcatgtatattggttttgttgctgcacatacactcccagttctctatgaaaggtatgaggatcaagttgacaactttgtgtacaaggtctttgatcagatgcaaaatcactatcagaagctggatactggtttgctcagcaaaatccccaagggaaagctcaaaggaaagaagtatgaatagactcttccttttgtaaatggtttgattttcaatatctctttctctcacttgtgatggaattgggaaaggctgaaggatgtgatgtaactagggaacaaatctatgttggggtctttaaaatttgttgtatctcttctgtcaaaaaaaaaaaaagttttatcac

SEQ ID NO: 60040 - protein, 245 aa, Glycine max
  peptide (1)..(245): Ceres Seq. ID no. 14315061
  misc_feature (120)..(245): Homolog of NCBI NO: 38605972 NR Description: TPA: RTN3 [Silurana tropicalis]
  misc_feature (55)..(245): Homolog of NCBI NO: 38605970 NR Description: TPA: RTN3.1 [Xenopus laevis]
  misc_feature (47)..(245): Homolog of NCBI NO: 38345298 NR Description: OSJNBa0043A12.26 [Oryza sativa (japonica
  misc_feature (1)..(244): Homolog of NCBI NO: 34909318 NR Description: OSJNBb0021A09.5 [Oryza sativa (japonica
  misc_feature (42)..(244): Homolog of NCBI NO: 34904202 NR Description: P0492F05.25 [Oryza sativa (japonica
  misc_feature (7)..(243): Homolog of NCBI NO: 34899590 NR Description: hypothetical protein~similar to Oryza sativa
  misc_feature (1)..(245): Homolog of NCBI NO: 34897094 NR Description: unknown protein [Oryza sativa (japonica
  misc_feature (1)..(245): Homolog of NCBI NO: 30681227 NR Description: expressed protein [Arabidopsis thaliana]
  misc_feature (1)..(245): Homolog of NCBI NO: 18398810 NR Description: expressed protein [Arabidopsis thaliana]
MSEKITAENLLNTLVETLTEKQKSGSFFEEDKSSSVSYQFNRLFGRQKPVHHILGGGKSADVLLWRNKKISASVLSAATAIWVLFEWLNYNFITILFFVVALGMLGQFLWTNVSGLFSRKPSKVPRFVLPDDIFVNIATVVGAEVNRGLRFLQDVSCGGSLKQFLIVVVSLWAGAVIGSWCNFLTVMYIGFVAAHTLPVLYERYEDQVDNFVYKVFDQMQNHYQKLDTGLLSKIPKGKLKGKKYE

SEQ ID NO: 60041 - protein, 142 aa, Glycine max
  peptide (1)..(142): Ceres Seq. ID no. 14315062
  misc_feature (17)..(142): Homolog of NCBI NO: 38605972 NR Description: TPA: RTN3 [Silurana tropicalis]
  misc_feature (1)..(142): Homolog of NCBI NO: 38605970 NR Description: TPA: RTN3.1 [Xenopus laevis]
  misc_feature (1)..(142): Homolog of NCBI NO: 38345298 NR Description: OSJNBa0043A12.26 [Oryza sativa (japonica
  misc_feature (1)..(141): Homolog of NCBI NO: 34909318 NR Description: OSJNBb0021A09.5 [Oryza sativa (japonica
  misc_feature (1)..(141): Homolog of NCBI NO: 34904202 NR Description: P0492F05.25 [Oryza sativa (japonica
  misc_feature (1)..(140): Homolog of NCBI NO: 34899590 NR Description: hypothetical protein~similar to Oryza sativa
  misc_feature (1)..(142): Homolog of NCBI NO: 34897094 NR Description: unknown protein [Oryza sativa (japonica
  misc_feature (1)..(142): Homolog of NCBI NO: 30681227 NR Description: expressed protein [Arabidopsis thaliana]
  misc_feature (1)..(142): Homolog of NCBI NO: 18398810 NR Description: expressed protein [Arabidopsis thaliana]
MLGQFLWTNVSGLFSRKPSKVPRFVLPDDIFVNIATVVGAEVNRGLRFLQDVSCGGSLKQFLIVVVSLWAGAVIGSWCNFLTVMYIGFVAAHTLPVLYERYEDQVDNFVYKVFDQMQNHYQKLDTGLLSKIPKGKLKGKKYE

SEQ ID NO: 60042 - DNA, 1251 bp, Glycine max
  misc_feature (1)..(1251): Ceres Seq. ID no. 14316312
aacgtatggatcgaaggactatgtctatgatgtctagcaaagttgatcccttccagcatctcaaactcgtccccaattccgacggcacgatcactcgccagcgtgatgacccacccatctcaccctcactcaatcccacccttcccgtcctcacccaagacgcaaccatcaaccgatcaaacaacaccttcgcccgcatattcctaccccgcgaagcactcgattcctccccctccaacaacctccctctcgtcgtttacttccacggcggcggcttcgtcctcttcagcgccgcctctgacttcttccacgacgcatgcgtaaacctcgcagacgacaccaactccatcgtcgtttccgtggagtaccgcctcgcaccggaacacagactccccgcggcgtacgaagatgccgtcgaagcgctgcactggatcaaagcacagtcaaacgattggttgcgcaaccacgcggatttttccaactgttaccttatgggaagtagcgccggagcaaacatcgcgtaccacgtgggtctacgtgtagctgcggagcttaacgtttatggagacaattatctggcgccacttaagatcagagggctgatattgagtcagccgttcttcggaggaacgaagagggtgccttctgaggtgaggcttgtggacgatccggttttgccgccgcacgtgtgtgacttactgtgggagttgtcgctgcccctgggggttgaccgtgatcacgagtattgcaatccgacggctggcgatgggcctgtgattctggatcgggtgaggcagcttgcgtggcgggtgctggtgagtgggtgccatggggacccacttctggatcatcagatggctctggcaagactgatagaggagaagggtgtggctgtggtcacccgttttgaccaagggggatgtcatgggattgaggttcgtgctcgtaagcaccaaaaccaactctataacctagtcaaagattttattgcataatttctgacatggaactaccatttctttttaagctctatactgtataattacattttcaaaatattgctacaaataaatgttattttctctcttttgatactctcctccacccctcacttagagactgtttggtattacgaaaatagagagggagattaaggaagaaagtgaaaatgagttgtttaataatgtaacggaattgaaggtgtgtataatggcacacatagtatttcagtagcctacatttttaaatttg

SEQ ID NO: 60043 - protein, 330 aa, Glycine max
  peptide (1)..(330): Ceres Seq. ID no. 14316313
  misc_feature (27)..(312): Homolog of NCBI NO: 5487873 NR Description: PrMC3 [Pinus radiata]
  misc_feature (26)..(309): Homolog of NCBI NO: 34899932 NR Description: putative cell death associated protein
  misc_feature (26)..(312): Homolog of NCBI NO: 34895916 NR Description: P0030H07.24 [Oryza sativa (japonica
  misc_feature (26)..(251): Homolog of NCBI NO: 21593215 NR Description: unknown [Arabidopsis thaliana]
  misc_feature (26)..(251): Homolog of NCBI NO: 15237267 NR Description: expressed protein [Arabidopsis thaliana]
  misc_feature (15)..(330): Homolog of NCBI NO: 15225521 NR Description: expressed protein [Arabidopsis thaliana]
  misc_feature (15)..(329): Homolog of NCBI NO: 8574455 NR Description: pepper esterase [Capsicum annuum]
  misc_feature (15)..(329): Homolog of NCBI NO: 21593183 NR Description: unknown [Arabidopsis thaliana]
  misc_feature (15)..(329): Homolog of NCBI NO: 18406834 NR Description: expressed protein [Arabidopsis thaliana]
  misc_feature (7)..(329): Homolog of NCBI NO: 15241725 NR Description: expressed protein [Arabidopsis thaliana]
RMDRRTMSMMSSKVDPFQHLKLVPNSDGTITRQRDDPPISPSLNPTLPVLTQDATINRSNNTFARIFLPREALDSSPSNNLPLVVYFHGGGFVLFSAASDFFHDACVNLADDTNSIVVSVEYRLAPEHRLPAAYEDAVEALHWIKAQSNDWLRNHADFSNCYLMGSSAGANIAYHVGLRVAAELNVYGDNYLAPLKIRGLILSQPFFGGTKRVPSEVRLVDDPVLPPHVCDLLWELSLPLGVDRDHEYCNPTAGDGPVILDRVRQLAWRVLVSGCHGDPLLDHQMALARLIEEKGVAVVTRFDQGGCHGIEVRARKHQNQLYNLVKDFIA

SEQ ID NO: 60044 - protein, 329 aa, Glycine max
  peptide (1)..(329): Ceres Seq. ID no. 14316314
  misc_feature (26)..(311): Homolog of NCBI NO: 5487873 NR Description: PrMC3 [Pinus radiata]
  misc_feature (25)..(308): Homolog of NCBI NO: 34899932 NR Description: putative cell death associated protein
  misc_feature (25)..(311): Homolog of NCBI NO: 34895916 NR Description: P0030H07.24 [Oryza sativa (japonica
  misc_feature (25)..(250): Homolog of NCBI NO: 21593215 NR Description: unknown [Arabidopsis thaliana]
  misc_feature (25)..(250): Homolog of NCBI NO: 15237267 NR Description: expressed protein [Arabidopsis thaliana]
  misc_feature (14)..(329): Homolog of NCBI NO: 15225521 NR Description: expressed protein [Arabidopsis thaliana]
  misc_feature (14)..(328): Homolog of NCBI NO: 8574455 NR Description: pepper esterase [Capsicum annuum]
  misc_feature (14)..(328): Homolog of NCBI NO: 21593183 NR Description: unknown [Arabidopsis thaliana]
  misc_feature (14)..(328): Homolog of NCBI NO: 18406834 NR Description: expressed protein [Arabidopsis thaliana]
  misc_feature (6)..(328): Homolog of NCBI NO: 15241725 NR Description: expressed protein [Arabidopsis thaliana]
MDRRTMSMMSSKVDPFQHLKLVPNSDGTITRQRDDPPISPSLNPTLPVLTQDATINRSNNTFARIFLPREALDSSPSNNLPLVVYFHGGGFVLFSAASDFFHDACVNLADDTNSIVVSVEYRLAPEHRLPAAYEDAVEALHWIKAQSNDWLRNHADFSNCYLMGSSAGANIAYHVGLRVAAELNVYGDNYLAPLKIRGLILSQPFFGGTKRVPSEVRLVDDPVLPPHVCDLLWELSLPLGVDRDHEYCNPTAGDGPVILDRVRQLAWRVLVSGCHGDPLLDHQMALARLIEEKGVAVVTRFDQGGCHGIEVRARKHQNQLYNLVKDFIA

SEQ ID NO: 60045 - protein, 324 aa, Glycine max
  peptide (1)..(324): Ceres Seq. ID no. 14316315
  misc_feature (21)..(306): Homolog of NCBI NO: 5487873 NR Description: PrMC3 [Pinus radiata]
  misc_feature (20)..(303): Homolog of NCBI NO: 34899932 NR Description: putative cell death associated protein
  misc_feature (20)..(306): Homolog of NCBI NO: 34895916 NR Description: P0030H07.24 [Oryza sativa (japonica
  misc_feature (20)..(245): Homolog of NCBI NO: 21593215 NR Description: unknown [Arabidopsis thaliana]
  misc_feature (20)..(245): Homolog of NCBI NO: 15237267 NR Description: expressed protein [Arabidopsis thaliana]
  misc_feature (9)..(324): Homolog of NCBI NO: 15225521 NR Description: expressed protein [Arabidopsis thaliana]
  misc_feature (9)..(323): Homolog of NCBI NO: 8574455 NR Description: pepper esterase [Capsicum annuum]
  misc_feature (9)..(323): Homolog of NCBI NO: 21593183 NR Description: unknown [Arabidopsis thaliana]
  misc_feature (9)..(323): Homolog of NCBI NO: 18406834 NR Description: expressed protein [Arabidopsis thaliana]
  misc_feature (1)..(323): Homolog of NCBI NO: 15241725 NR Description: expressed protein [Arabidopsis thaliana]
MSMMSSKVDPFQHLKLVPNSDGTITRQRDDPPISPSLNPTLPVLTQDATINRSNNTFARIFLPREALDSSPSNNLPLVVYFHGGGFVLFSAASDFFHDACVNLADDTNSIVVSVEYRLAPEHRLPAAYEDAVEALHWIKAQSNDWLRNHADFSNCYLMGSSAGANIAYHVGLRVAAELNVYGDNYLAPLKIRGLILSQPFFGGTKRVPSEVRLVDDPVLPPHVCDLLWELSLPLGVDRDHEYCNPTAGDGPVILDRVRQLAWRVLVSGCHGDPLLDHQMALARLIEEKGVAVVTRFDQGGCHGIEVRARKHQNQLYNLVKDFIA

SEQ ID NO: 60046 - DNA, 1054 bp, Glycine max
  misc_feature (1)..(1054): Ceres Seq. ID no. 14305357
aaaaaaagcttctttgtctctcgtgccgattctccaccacaattcccttcaccccaatcacactttccggtagttgttgctattagtgtagaagatgagtacgctggatgcaacaagggctgaacttggtcttcttgttttatatttgggcaaggctgaagcaagggacaaaatatgcagggcaatacaatatggttccaaatttttgagtaatggggaacctggtactgctcagaatgtagacaaaacaaccagcttggcacgaaaagtcttccgtctctttaagtttgtcaatgacctacatgctttgataagtccaacaccacaggggacacccctccccctagctctgttggacttatcaaagcatgtagtcactgagcaaaccaaggaggaaagtactgaggccccacgacctgcagcttcagaagacaagccctcggttgaagttcagactaaagaggtggcagaggaagttgtgtctgagaccgtcacacaagagccaacagttgagaaacaagaagctgctgagggaacaaaagaaaatgccgatcctgctgagattaagacaccagaagctgcagaagatgttaatgttaaggaagagaaagaagctgaggctgaagctaggagggaagaggccccggcagagaaaagtgaggagaaggttgagacagaagggtcagctgaaaagaaagaggaggaagtgattgcagaagctgaagctgagaagaaggaggaggtcacagtcacagacacagaggctccaacagagtaaaagaatgtgaagaggggaaatgtgcagtttaagtgagtgtttgagagggtatttttttcttagttgcatcgtgtcttgttgctccatgcatgtcttttctttgtttagtggtctaataaaaagtctagctagggaagggatgagtgatgcgaatgccaaccactcagtacaagaaccacatggcatgtagtctttcaatctgatctatggggtgtgcatggctagctctccatccaatgaattatgttatggtcctttgtgtgattcaaaaaaaat

SEQ ID NO: 60047 - protein, 227 aa, Glycine max
  peptide (1)..(227): Ceres Seq. ID no. 14305358
  misc_feature (11)..(94): Pfam Name: Peroxisomal biogenesis factor 11 (PEX11) Pfam Description: Peroxisomal biogenesis factor 11 (PEX11)
  misc_feature (76)..(215): Homolog of NCBI NO: 2367429 NR Description: Nlj21 [Lotus japonicus]
  misc_feature (94)..(227): Homolog of NCBI NO: 2367429 NR Description: Nlj21 [Lotus japonicus]
  misc_feature (1)..(94): Homolog of NCBI NO: 11358250 NR Description: hypothetical protein T27I15_160 - Arabidopsis
  misc_feature (1)..(94): Homolog of NCBI NO: 34898026 NR Description: ESTs AU064537(E31904),AU082147(E31904) correspond a region of the predicted gene.~Similar to Arabidopsis thaliana
  misc_feature (1)..(94): Homolog of NCBI NO: 25553559 NR Description: OSJNBa0038F22.7 [Oryza sativa (japonica
  misc_feature (1)..(94): Homolog of NCBI NO: 8489788 NR Description: unknown [Lycopersicon esculentum]
  misc_feature (2)..(94): Homolog of NCBI NO: 18406877 NR Description: expressed protein [Arabidopsis thaliana]
  misc_feature (2)..(94): Homolog of NCBI NO: 7486466 NR Description: hypothetical protein At2g45740 [imported] -
  misc_feature (1)..(94): Homolog of NCBI NO: 30695340 NR Description: expressed protein [Arabidopsis thaliana]
  misc_feature (1)..(94): Homolog of NCBI NO: 18378887 NR Description: expressed protein [Arabidopsis thaliana]
MSTLDATRAELGLLVLYLGKAEARDKICRAIQYGSKFLSNGEPGTAQNVDKTTSLARKVFRLFKFVNDLHALISPTPQGTPLPLALLDLSKHVVTEQTKEESTEAPRPAASEDKPSVEVQTKEVAEEVVSETVTQEPTVEKQEAAEGTKENADPAEIKTPEAAEDVNVKEEKEAEAEARREEAPAEKSEEKVETEGSAEKKEEEVIAEAEAEKKEEVTVTDTEAPTE

SEQ ID NO: 60048 - DNA, 1182 bp, Glycine max
  misc_feature (1)..(1182): Ceres Seq. ID no. 14314396
atatacaccccattgctacgaagggctatatagcataaacattttagtcttcattgcacaatgtcgacctcttccattaacgggtggtgcctctcttccatctccccagccaaaacctctctcaagaaggccacattaggcccttctgtcttcgcaaccagagaggatatggcaaaggaatacgagcaagctattgaagaactccagaaattgttgagggagaagagtgaactcaaagccacagctgctgagaaagtggagcagataacagcttctctgggaacatcatcatctgatggcatcccatcatcagaagcctcagacaggatcaaagctggtttcattcacttcaagaaggagaaatatgacaagaatccagctttgtatggtgaacttgccaaaggccagagccccaagtttatggtgtttgcttgctcagactcaagggtgtgcccatctcatgtgctagatttccaaccaggagaggcctttgtggtcagaaatgttgctaacattgtcccaccatatgaccagtcaaaatacgctggaactggggcagcagttgagtatgctgttttgcatcttaaggtgtctgagattgtggtcattggacacagtgcttgtggtggtattaaggggcttctgtctttcccatatgatggaacctactctactgattttattgaggagtgggtcaaaattggcttgcctgcaaaggcaaaggtgaagacacaacatggggatgcaccttttgctgagttgtgctcacactgtgagaaggaagctgtgaatgtttcccttggaaaccttctaacatacccatttgttagagatggcttggtgaacaagacattgtcactaaaaggaggatactatgactttgttaagggatcttttgagctctggggccttcagtttggccttgcatcctctttctccgtatgaacatcaaccattatcaatgacctcatcttggttccctaagttaaagatgtggccaccattctgcattggaagctataggggccatgcttagaggtcgtgtgtatctgcaatgaagaggcctagccaccttcatcaccatatgatatttataaaaatatatatatatgaaactatgaactgcgtttatgcatgtcggaaaatcttcttttgataagagtttggaaatcctcttgtaac

SEQ ID NO: 60049 - protein, 294 aa, Glycine max
  peptide (1)..(294): Ceres Seq. ID no. 14314397
  misc_feature (113)..(282): Pfam Name: Carbonic anhydrase Pfam Description: Carbonic anhydrase
  misc_feature (34)..(294): Homolog of NCBI NO: 20502881 NR Description: carbonic anhydrase [Gossypium hirsutum]
  misc_feature (34)..(294): Homolog of NCBI NO: 4754913 NR Description: carbonic anhydrase isoform 1 [Gossypium hirsutum]
  misc_feature (75)..(294): Homolog of NCBI NO: 8569250 NR Description: Chain A, The X-Ray Crystallographic Structure Of
  misc_feature (1)..(33): Homolog of NCBI NO: 7436819 NR Description: carbonate dehydratase (EC 4.2.1.1) 1a - Populus
  misc_feature (12)..(294): Homolog of NCBI NO: 7436819 NR Description: carbonate dehydratase (EC 4.2.1.1) 1a - Populus
  misc_feature (1)..(33): Homolog of NCBI NO: 7436820 NR Description: carbonate dehydratase (EC 4.2.1.1) 1b - Populus
  misc_feature (12)..(294): Homolog of NCBI NO: 7436820 NR Description: carbonate dehydratase (EC 4.2.1.1) 1b - Populus
  misc_feature (1)..(294): Homolog of NCBI NO: 169057 NR Description: carbonic anhydrase
  misc_feature (1)..(294): Homolog of NCBI NO: 115471 NR Description: Carbonic anhydrase, chloroplast precursor
  misc_feature (1)..(294): Homolog of NCBI NO: 8954289 NR Description: carbonic anhydrase [Vigna radiata]
MSTSSINGWCLSSISPAKTSLKKATLGPSVFATREDMAKEYEQAIEELQKLLREKSELKATAAEKVEQITASLGTSSSDGIPSSEASDRIKAGFIHFKKEKYDKNPALYGELAKGQSPKFMVFACSDSRVCPSHVLDFQPGEAFVVRNVANIVPPYDQSKYAGTGAAVEYAVLHLKVSEIVVIGHSACGGIKGLLSFPYDGTYSTDFIEEWVKIGLPAKAKVKTQHGDAPFAELCSHCEKEAVNVSLGNLLTYPFVRDGLVNKTLSLKGGYYDFVKGSFELWGLQFGLASSFSV

SEQ ID NO: 60050 - protein, 258 aa, Glycine max
  peptide (1)..(258): Ceres Seq. ID no. 14314398
  misc_feature (77)..(246): Pfam Name: Carbonic anhydrase Pfam Description: Carbonic anhydrase
  misc_feature (1)..(258): Homolog of NCBI NO: 30678350 NR Description: carbonic anhydrase, chloroplast precursor
  misc_feature (1)..(258): Homolog of NCBI NO: 4754915 NR Description: carbonic anhydrase isoform 2 [Gossypium hirsutum]
  misc_feature (1)..(258): Homolog of NCBI NO: 20502881 NR Description: carbonic anhydrase [Gossypium hirsutum]
  misc_feature (1)..(258): Homolog of NCBI NO: 4754913 NR Description: carbonic anhydrase isoform 1 [Gossypium hirsutum]
  misc_feature (39)..(258): Homolog of NCBI NO: 8569250 NR Description: Chain A, The X-Ray Crystallographic Structure Of
  misc_feature (1)..(258): Homolog of NCBI NO: 7436819 NR Description: carbonate dehydratase (EC 4.2.1.1) 1a - Populus
  misc_feature (1)..(258): Homolog of NCBI NO: 7436820 NR Description: carbonate dehydratase (EC 4.2.1.1) 1b - Populus
  misc_feature (1)..(258): Homolog of NCBI NO: 169057 NR Description: carbonic anhydrase
  misc_feature (1)..(258): Homolog of NCBI NO: 115471 NR Description: Carbonic anhydrase, chloroplast precursor
  misc_feature (1)..(258): Homolog of NCBI NO: 8954289 NR Description: carbonic anhydrase [Vigna radiata]
MAKEYEQAIEELQKLLREKSELKATAAEKVEQITASLGTSSSDGIPSSEASDRIKAGFIHFKKEKYDKNPALYGELAKGQSPKFMVFACSDSRVCPSHVLDFQPGEAFVVRNVANIVPPYDQSKYAGTGAAVEYAVLHLKVSEIVVIGHSACGGIKGLLSFPYDGTYSTDFIEEWVKIGLPAKAKVKTQHGDAPFAELCSHCEKEAVNVSLGNLLTYPFVRDGLVNKTLSLKGGYYDFVKGSFELWGLQFGLASSFSV

SEQ ID NO: 60051 - protein, 174 aa, Glycine max
  peptide (1)..(174): Ceres Seq. ID no. 14314399
  misc_feature (1)..(162): Pfam Name: Carbonic anhydrase Pfam Description: Carbonic anhydrase
  misc_feature (1)..(174): Homolog of NCBI NO: 30678350 NR Description: carbonic anhydrase, chloroplast precursor
  misc_feature (1)..(174): Homolog of NCBI NO: 20502881 NR Description: carbonic anhydrase [Gossypium hirsutum]
  misc_feature (1)..(174): Homolog of NCBI NO: 4754915 NR Description: carbonic anhydrase isoform 2 [Gossypium hirsutum]
  misc_feature (1)..(174): Homolog of NCBI NO: 4754913 NR Description: carbonic anhydrase isoform 1 [Gossypium hirsutum]
  misc_feature (1)..(174): Homolog of NCBI NO: 8569250 NR Description: Chain A, The X-Ray Crystallographic Structure Of
  misc_feature (1)..(174): Homolog of NCBI NO: 7436819 NR Description: carbonate dehydratase (EC 4.2.1.1) 1a - Populus
  misc_feature (1)..(174): Homolog of NCBI NO: 7436820 NR Description: carbonate dehydratase (EC 4.2.1.1) 1b - Populus
  misc_feature (1)..(174): Homolog of NCBI NO: 169057 NR Description: carbonic anhydrase
  misc_feature (1)..(174): Homolog of NCBI NO: 115471 NR Description: Carbonic anhydrase, chloroplast precursor
  misc_feature (1)..(174): Homolog of NCBI NO: 8954289 NR Description: carbonic anhydrase [Vigna radiata]
MVFACSDSRVCPSHVLDFQPGEAFVVRNVANIVPPYDQSKYAGTGAAVEYAVLHLKVSEIVVIGHSACGGIKGLLSFPYDGTYSTDFIEEWVKIGLPAKAKVKTQHGDAPFAELCSHCEKEAVNVSLGNLLTYPFVRDGLVNKTLSLKGGYYDFVKGSFELWGLQFGLASSFSV

SEQ ID NO: 60052 - DNA, 1785 bp, Glycine max
  misc_feature (1)..(1785): Ceres Seq. ID no. 15226659
gttacaacagactctgactctctctctcaagattcctctccgcgcaaagaatcttcatttctgtttcgcttccaacactccaaattccatttcattttcatctctctctgtatctgatgctcagaacaaatttcgattccgaaaatggcactagcaagtaccaacactgatcaatccacaatcaccactccttcaaagaaaccctcaaaaaactccgagaatctgaaccctaacgtgcctcatcatcgaagcccttcttcaaagtcccctgctttgcgatcctccaagccaaacaacagcaacccaattgcgcaatcgccgcagaacaggatccggcagaggaagttcgtggtggcaaagaagaaaaatcagaagggtacccaaaacgacgccgtttcgtgcaagtgcaaacacaatggtggcgccaagtgtgtttgtgtagctttccagactctgagggcttctcaggaagagtttttcctcaaagaaaagaaggattgtgattatgattttgaagaagaaagagaagaagaagcaaaagctgtgaatgctattgaaatctatggaacaaaaagtgaaacagtgcaaggagaagaagaaaaagaagaaggaggttccacagtgaaacgaaggagggagagagataggttgttggaagaggcaaggaatagtgttcctgaaaatgggtttgggagggttatgcatttggtgaaagcctttgagaagcttctcactatacctaagagttcaaaggagaaagatcacaaggaggagcatgatcatgagcatgaagagcaaaagaataagagccaggtgatgaaatgggcattgccagggttgcaatttcaacaacatcctaagcctaagacacttgaagctactactgatgatgcttctgtttcgggttcttcttcattttgttgtacttctgatttggttttgacatccaagaaccttggtattggtcaagggatttcagtttcttcatcttgggattgtaaccgtgcaagtgtatctagtaggacttctgggggtagaaggagcaggagaaatagctcggagtcatctgggacttttggagggaggaggtggaagcagaaggagaagctaaaagtcactaggcaaaaaccatttaagttaagaacagagcaaaggggaaagttgaaagaggaagaatttgtgaagaaagtacaagagatgatgactgaagaagagaagatgaggataccaattgctcaggggcttccatggacaacagatgaacctgagtgcttgttaaaacctacagttaaagaaagcacaaggcctattgacctaaagcttcatagtgatattcgggcaattgatcgtgctgaatttgaccaacaggtggcagaaaaaatgaacttcatagaacaactcaagttggaaaaggaaagacaacaaaagttagaagaagaagaagaaatcaggaggttgaggaaggaactcattccaaaagctcaaccaatgccttattttgacagaccatttgtcccaaggaggtcaatgaagcatcccactatacctagagaacccaagttccacatgccccaacataagaagatcaagtgtttggtcatggaatgacatgtcctatctcaacataagaaatcaatgaatgcttcatttctccatcattctctccacaatataattataaaaatgcaaattaatggtagtgtattgagatattataaaaaaatacaaactaatgtgttccaaacaagttcaaattaatgatgactaattatgtttttagttctc

SEQ ID NO: 60053 - protein, 487 aa, Glycine max
  peptide (1)..(487): Ceres Seq. ID no. 15226660
  misc_feature (64)..(412): Pfam Name: Caldesmon Pfam Description: Caldesmon
  misc_feature (319)..(473): Homolog of NCBI NO: 8926136 NR Description: targeting protein for Xklp2; TPX2 [Xenopus laevis]
  misc_feature (379)..(479): Homolog of NCBI NO: 28453880 NR Description: WAVE-DAMPENED2 [Arabidopsis thaliana]
  misc_feature (390)..(475): Homolog of NCBI NO: 15241452 NR Description: hypothetical protein [Arabidopsis thaliana]
  misc_feature (9)..(206): Homolog of NCBI NO: 15232025 NR Description: hypothetical protein [Arabidopsis thaliana]
  misc_feature (141)..(483): Homolog of NCBI NO: 15232025 NR Description: hypothetical protein [Arabidopsis thaliana]
  misc_feature (9)..(483): Homolog of NCBI NO: 11358122 NR Description: hypothetical protein T20K14_120 - Arabidopsis
  misc_feature (9)..(483): Homolog of NCBI NO: 30685394 NR Description: expressed protein [Arabidopsis thaliana]
MALASTNTDQSTITTPSKKPSKNSENLNPNVPHHRSPSSKSPALRSSKPNNSNPIAQSPQNRIRQRKFVVAKKKNQKGTQNDAVSCKCKHNGGAKCVCVAFQTLRASQEEFFLKEKKDCDYDFEEEREEEAKAVNAIEIYGTKSETVQGEEEKEEGGSTVKRRRERDRLLEEARNSVPENGFGRVMHLVKAFEKLLTIPKSSKEKDHKEEHDHEHEEQKNKSQVMKWALPGLQFQQHPKPKTLEATTDDASVSGSSSFCCTSDLVLTSKNLGIGQGISVSSSWDCNRASVSSRTSGGRRSRRNSSESSGTFGGRRWKQKEKLKVTRQKPFKLRTEQRGKLKEEEFVKKVQEMMTEEEKMRIPIAQGLPWTTDEPECLLKPTVKESTRPIDLKLHSDIRAIDRAEFDQQVAEKMNFIEQLKLEKERQQKLEEEEEIRRLRKELIPKAQPMPYFDRPFVPRRSMKHPTIPREPKFHMPQHKKIKCLVME

SEQ ID NO: 60054 - protein, 302 aa, Glycine max
  peptide (1)..(302): Ceres Seq. ID no. 15226661
  misc_feature (1)..(227): Pfam Name: Caldesmon Pfam Description: Caldesmon
  misc_feature (134)..(288): Homolog of NCBI NO: 8926136 NR Description: targeting protein for Xklp2; TPX2 [Xenopus laevis]
  misc_feature (194)..(294): Homolog of NCBI NO: 28453880 NR Description: WAVE-DAMPENED2 [Arabidopsis thaliana]
  misc_feature (205)..(290): Homolog of NCBI NO: 15241452 NR Description: hypothetical protein [Arabidopsis thaliana]
  misc_feature (1)..(21): Homolog of NCBI NO: 15232025 NR Description: hypothetical protein [Arabidopsis thaliana]
  misc_feature (1)..(298): Homolog of NCBI NO: 15232025 NR Description: hypothetical protein [Arabidopsis thaliana]
  misc_feature (1)..(298): Homolog of NCBI NO: 11358122 NR Description: hypothetical protein T20K14_120 - Arabidopsis
  misc_feature (1)..(298): Homolog of NCBI NO: 30685394 NR Description: expressed protein [Arabidopsis thaliana]
MHLVKAFEKLLTIPKSSKEKDHKEEHDHEHEEQKNKSQVMKWALPGLQFQQHPKPKTLEATTDDASVSGSSSFCCTSDLVLTSKNLGIGQGISVSSSWDCNRASVSSRTSGGRRSRRNSSESSGTFGGRRWKQKEKLKVTRQKPFKLRTEQRGKLKEEEFVKKVQEMMTEEEKMRIPIAQGLPWTTDEPECLLKPTVKESTRPIDLKLHSDIRAIDRAEFDQQVAEKMNFIEQLKLEKERQQKLEEEEEIRRLRKELIPKAQPMPYFDRPFVPRRSMKHPTIPREPKFHMPQHKKIKCLVME

SEQ ID NO: 60055 - protein, 263 aa, Glycine max
  peptide (1)..(263): Ceres Seq. ID no. 15226662
  misc_feature (1)..(188): Pfam Name: Caldesmon Pfam Description: Caldesmon
  misc_feature (95)..(249): Homolog of NCBI NO: 8926136 NR Description: targeting protein for Xklp2; TPX2 [Xenopus laevis]
  misc_feature (155)..(255): Homolog of NCBI NO: 28453880 NR Description: WAVE-DAMPENED2 [Arabidopsis thaliana]
  misc_feature (166)..(251): Homolog of NCBI NO: 15241452 NR Description: hypothetical protein [Arabidopsis thaliana]
  misc_feature (1)..(259): Homolog of NCBI NO: 15232025 NR Description: hypothetical protein [Arabidopsis thaliana]
  misc_feature (1)..(259): Homolog of NCBI NO: 11358122 NR Description: hypothetical protein T20K14_120 - Arabidopsis
  misc_feature (1)..(259): Homolog of NCBI NO: 30685394 NR Description: expressed protein [Arabidopsis thaliana]
MKWALPGLQFQQHPKPKTLEATTDDASVSGSSSFCCTSDLVLTSKNLGIGQGISVSSSWDCNRASVSSRTSGGRRSRRNSSESSGTFGGRRWKQKEKLKVTRQKPFKLRTEQRGKLKEEEFVKKVQEMMTEEEKMRIPIAQGLPWTTDEPECLLKPTVKESTRPIDLKLHSDIRAIDRAEFDQQVAEKMNFIEQLKLEKERQQKLEEEEEIRRLRKELIPKAQPMPYFDRPFVPRRSMKHPTIPREPKFHMPQHKKIKCLVME

SEQ ID NO: 60056 - DNA, 1214 bp, Glycine max
  misc_feature (1)..(1214): Ceres Seq. ID no. 14305398
aaaaaaaggtttgttcttagcaattcctctgtgttctcaaaggccgttttttttagtgtgtgtgtttcacttttatttccttttcggttccaatctatgtttgagtcgtattgtaatcatgttgagtcttggtcgatgccttgtataatgtgtatggtgggttgtatcttccttggattttattgaacatgcctgcctgcccgccacctgtttgatgaaatgcttgaacttttcagaaatgaactagtgtgtgatatattggcgcttgaatttgtgatgctacacctgttggctttcttgtttgcatctgaattacaaaagaagtgactgtgaatccgaatccaaatctgaatgggttatcttcaatttggcagacatggtgttaggcaggtccttagatttagagatgctagttgtgataatgttgtggtaaacccactcttatatgcttcccaaggacttcgttacaagaggaagctccaagtcatccttacaactgacatagataagctgggaaaggcaggtgacactgtcaaagttgcccctggatattttcgcaaccacctaatgcccaagctccttgctttccctaacattgataagtttgcttatctcctcaatgagcagcgcaagatctatcaaccaactgaagaagaaaaacaagaagatgtcactctagttaaagagtccaaggaagatatgatgaaagagtatgaaaaggcagcattacgtcttgataaagctcagctggttttgcggaggttaattaatgttcaaaaagccaagtcacgtgaatcaaaagaagaccccttggagttacgttatcctgtgacaaaagatactcttgtggctgaggtggcaagacaactttgtgtgaacgttgcacctgataacctgcatcttccatcacctctatccacattaggagaatatgaggtgccactgcgtataccaaggtccatcccgttgccagagggcaaggttaactggagtttgaaagttaaagtcaggagtaaataaatcactcatcttgttgaattcaagttcacaagggatggaatagtggttttatgctaataaatcattaaattgaatccgaggattataagattttgacattgcttttatttatagaaacagaaacgccactcatttaacaatgtctcttgaatagtctgtttttattgagtggagtctcatgtgttattgacaag

SEQ ID NO: 60057 - protein, 222 aa, Glycine max
  peptide (1)..(222): Ceres Seq. ID no. 14305399
  misc_feature (43)..(92): Pfam Name: Ribosomal protein L9, N-terminal domain Pfam Description: Ribosomal protein L9, N-terminal domain
  misc_feature (1)..(220): Homolog of NCBI NO: 15237342 NR Description: expressed protein [Arabidopsis thaliana]
MGYLQFGRHGVRQVLRFRDASCDNVVVNPLLYASQGLRYKRKLQVILTTDIDKLGKAGDTVKVAPGYFRNHLMPKLLAFPNIDKFAYLLNEQRKIYQPTEEEKQEDVTLVKESKEDMMKEYEKAALRLDKAQLVLRRLINVQKAKSRESKEDPLELRYPVTKDTLVAEVARQLCVNVAPDNLHLPSPLSTLGEYEVPLRIPRSIPLPEGKVNWSLKVKVRSK

SEQ ID NO: 60058 - protein, 150 aa, Glycine max
  peptide (1)..(150): Ceres Seq. ID no. 14305400
  misc_feature (1)..(148): Homolog of NCBI NO: 15237342 NR Description: expressed protein [Arabidopsis thaliana]
MPKLLAFPNIDKFAYLLNEQRKIYQPTEEEKQEDVTLVKESKEDMMKEYEKAALRLDKAQLVLRRLINVQKAKSRESKEDPLELRYPVTKDTLVAEVARQLCVNVAPDNLHLPSPLSTLGEYEVPLRIPRSIPLPEGKVNWSLKVKVRSK

SEQ ID NO: 60059 - DNA, 1266 bp, Glycine max
  misc_feature (1)..(1266): Ceres Seq. ID no. 14316075
atccgttacccttcctttcacaagtcataaaactcccttcacttgctctgaaattttcatgtatcactttcccttcactggttctattatcgttcttcttcttcactaagaatccaaaaaaaaatgaacgatcttatgacgaaatccttcaccagctacgtggagctgaagaaggtcgcaatgaaagaagacgttgatttggaagccggtggtcctggtgatcgcaaggtggaactgagctcttccacgacccacttggacacagacatgggcctcttcctagaagaggccgagaaggtgaaggccgagatggggtccctccgagacatcctgggccggctccagcaggccaacgaggagagcaagtccctccacaagcctgaagcccacaaggccctcagaagccgaatcaacgctgaaatccttgccgtactcaagaaggcccgggccatccggacccagctggaggagatggaccgcgccaatgccgccaacaggcgcctctccgccctcaaggacgggacccccgccatctaccggacccggattgctgtcaccaatggcctcaggaagaagctgaaggagctcatgatggactttcaggatctgaggcagaggatgatgactgagtacaaggatactgtgtgtagaaggtacttcacagttactggggagcacccagatgaggatgtgattgagaagatcatcgccaacgggaacgaggaagaggttcttgctaaggccatagaggaacacgggagagggaaggttctggataccgtgctggaaattcaggacaggcatgatgctgccaaggaggttgagaagagtctgcttgagctgcaccaggtgtttcttgacatggctgtcatggtggaggcacagggtgagaagatggacgacatcgagcatcacgtcttccacgcttcccactatgtcaaggatggaaccaagagtctccagagtgcaaaggagtaccagaagaggagcaggaagtggatgtgcattgggatcattcttctgctcattcttattctggttattgttattcctattgtcaccagtttaagcagttcttgagcttagtaaggaggagactttggatgatgatgatgatgattcttcttgactcatcgtgtttagagtgcttgatgggagataatgattcatctttttttcttttcctgcagatttgtttaattgttgttaaggtgttaccttaaccatgatttttctatctttgcgaaattgaaatataattcaatc

SEQ ID NO: 60060 - protein, 318 aa, Glycine max
  peptide (1)..(318): Ceres Seq. ID no. 14316076
  misc_feature (52)..(156): Pfam Name: Syntaxin Pfam Description: Syntaxin
  misc_feature (14)..(310): Homolog of NCBI NO: 15219900 NR Description: syntaxin of plants SYP124 [Arabidopsis thaliana]
  misc_feature (32)..(312): Homolog of NCBI NO: 15220328 NR Description: syntaxin of plants SYP125 [Arabidopsis thaliana]
  misc_feature (36)..(311): Homolog of NCBI NO: 4206787 NR Description: syntaxin-related protein Nt-syr1 [Nicotiana
  misc_feature (1)..(312): Homolog of NCBI NO: 15236285 NR Description: syntaxin of plants SYP123 [Arabidopsis thaliana]
  misc_feature (1)..(318): Homolog of NCBI NO: 15229865 NR Description: syntaxin of plants SYP121 [Arabidopsis thaliana]
  misc_feature (11)..(264): Homolog of NCBI NO: 25311687 NR Description: protein F22O13.4 [imported] - Arabidopsis
  misc_feature (1)..(318): Homolog of NCBI NO: 29788865 NR Description: putative cytokinesis-specific syntaxin-related
  misc_feature (1)..(318): Homolog of NCBI NO: 15223261 NR Description: syntaxin of plants SYP111 (KNOLLE) [Arabidopsis
  misc_feature (1)..(318): Homolog of NCBI NO: 28974542 NR Description: knolle [Antirrhinum majus]
  misc_feature (1)..(318): Homolog of NCBI NO: 5912543 NR Description: Knolle [Capsicum annuum]
MNDLMTKSFTSYVELKKVAMKEDVDLEAGGPGDRKVELSSSTTHLDTDMGLFLEEAEKVKAEMGSLRDILGRLQQANEESKSLHKPEAHKALRSRINAEILAVLKKARAIRTQLEEMDRANAANRRLSALKDGTPAIYRTRIAVTNGLRKKLKELMMDFQDLRQRMMTEYKDTVCRRYFTVTGEHPDEDVIEKIIANGNEEEVLAKAIEEHGRGKVLDTVLEIQDRHDAAKEVEKSLLELHQVFLDMAVMVEAQGEKMDDIEHHVFHASHYVKDGTKSLQSAKEYQKRSRKWMCIGIILLLILILVIVIPIVTSLSSS

SEQ ID NO: 60061 - protein, 314 aa, Glycine max
  peptide (1)..(314): Ceres Seq. ID no. 14316077
  misc_feature (48)..(152): Pfam Name: Syntaxin Pfam Description: Syntaxin
  misc_feature (10)..(306): Homolog of NCBI NO: 15219900 NR Description: syntaxin of plants SYP124 [Arabidopsis thaliana]
  misc_feature (28)..(308): Homolog of NCBI NO: 15220328 NR Description: syntaxin of plants SYP125 [Arabidopsis thaliana]
  misc_feature (32)..(307): Homolog of NCBI NO: 4206787 NR Description: syntaxin-related protein Nt-syr1 [Nicotiana
  misc_feature (1)..(308): Homolog of NCBI NO: 15236285 NR Description: syntaxin of plants SYP123 [Arabidopsis thaliana]
  misc_feature (1)..(314): Homolog of NCBI NO: 15229865 NR Description: syntaxin of plants SYP121 [Arabidopsis thaliana]
  misc_feature (7)..(260): Homolog of NCBI NO: 25311687 NR Description: protein F22O13.4 [imported] - Arabidopsis
  misc_feature (1)..(314): Homolog of NCBI NO: 29788865 NR Description: putative cytokinesis-specific syntaxin-related
  misc_feature (1)..(314): Homolog of NCBI NO: 15223261 NR Description: syntaxin of plants SYP111 (KNOLLE) [Arabidopsis
  misc_feature (1)..(314): Homolog of NCBI NO: 28974542 NR Description: knolle [Antirrhinum majus]
  misc_feature (1)..(314): Homolog of NCBI NO: 5912543 NR Description: Knolle [Capsicum annuum]
MTKSFTSYVELKKVAMKEDVDLEAGGPGDRKVELSSSTTHLDTDMGLFLEEAEKVKAEMGSLRDILGRLQQANEESKSLHKPEAHKALRSRINAEILAVLKKARAIRTQLEEMDRANAANRRLSALKDGTPAIYRTRIAVTNGLRKKLKELMMDFQDLRQRMMTEYKDTVCRRYFTVTGEHPDEDVIEKIIANGNEEEVLAKAIEEHGRGKVLDTVLEIQDRHDAAKEVEKSLLELHQVFLDMAVMVEAQGEKMDDIEHHVFHASHYVKDGTKSLQSAKEYQKRSRKWMCIGIILLLILILVIVIPIVTSLSSS

SEQ ID NO: 60062 - protein, 299 aa, Glycine max
  peptide (1)..(299): Ceres Seq. ID no. 14316078
  misc_feature (33)..(137): Pfam Name: Syntaxin Pfam Description: Syntaxin
  misc_feature (1)..(291): Homolog of NCBI NO: 15219900 NR Description: syntaxin of plants SYP124 [Arabidopsis thaliana]
  misc_feature (13)..(293): Homolog of NCBI NO: 15220328 NR Description: syntaxin of plants SYP125 [Arabidopsis thaliana]
  misc_feature (17)..(292): Homolog of NCBI NO: 4206787 NR Description: syntaxin-related protein Nt-syr1 [Nicotiana
  misc_feature (1)..(293): Homolog of NCBI NO: 15236285 NR Description: syntaxin of plants SYP123 [Arabidopsis thaliana]
  misc_feature (1)..(299): Homolog of NCBI NO: 15229865 NR Description: syntaxin of plants SYP121 [Arabidopsis thaliana]
  misc_feature (1)..(245): Homolog of NCBI NO: 25311687 NR Description: protein F22O13.4 [imported] - Arabidopsis
  misc_feature (1)..(299): Homolog of NCBI NO: 29788865 NR Description: putative cytokinesis-specific syntaxin-related
  misc_feature (1)..(299): Homolog of NCBI NO: 15223261 NR Description: syntaxin of plants SYP111 (KNOLLE) [Arabidopsis
  misc_feature (1)..(299): Homolog of NCBI NO: 28974542 NR Description: knolle [Antirrhinum majus]
  misc_feature (1)..(299): Homolog of NCBI NO: 5912543 NR Description: Knolle [Capsicum annuum]
MKEDVDLEAGGPGDRKVELSSSTTHLDTDMGLFLEEAEKVKAEMGSLRDILGRLQQANEESKSLHKPEAHKALRSRINAEILAVLKKARAIRTQLEEMDRANAANRRLSALKDGTPAIYRTRIAVTNGLRKKLKELMMDFQDLRQRMMTEYKDTVCRRYFTVTGEHPDEDVIEKIIANGNEEEVLAKAIEEHGRGKVLDTVLEIQDRHDAAKEVEKSLLELHQVFLDMAVMVEAQGEKMDDIEHHVFHASHYVKDGTKSLQSAKEYQKRSRKWMCIGIILLLILILVIVIPIVTSLSSS

SEQ ID NO: 60063 - DNA, 1341 bp, Glycine max
  misc_feature (1)..(1341): Ceres Seq. ID no. 15171708
aaagactaatattctcattctccccaaaacctctgctagtttttggttttgcttcaacaccctcgtcctccttcttcttcacactcccccagaaatcccaattttgcccctaccctcttccccaatttacctacgatgtacagcaacatgctggtcaactgctccaactgccgcacccctctgcagctgccacctggcgcgggatccatccgctgcgccctctgccgcgctgtcactctcatcggcgatccacgcgccctcccttcgcagccaccggcctccacccacgcgcctcctcctccgtcctctccctacagccacgcgccgcccccgcccaacccccacggccgcaagaaggccgtcatcgtcggcatctcctaccgcttctcgcgacacgagctcaagggatgcatcaacgacgccaagtgcatgaagtacctcctcatcaacaagttcagctttccagaatcttccatcatcatgctcaccgaagaagaagatccccatggccccaaatttccaacgaagcacaacatcaggatggcaatgtattggcttgcacaaggatgtcaacctggagactccctggtttttcattattctggtcatggatcacagcaaaggaactatagtggtgatgaagctgatggatatgatgaaactctatgtccccttgattttgaaacacagggtatgattgtagatgatgagatcaatgccgcacttgttagacctattcctcatggagctaagctacatgcactaattgatgcctgccatagtggcactgttctagatttgccatttctttgcagaatgaacaggagtgggcaatatgtatgggaggaccatcgccctagatccggtgtatggaagggatctagtggtggagaagttatctgcttcagtggatgcgacgatcatcaaacttcagctgatacatctgctctatcaaaaattacatcgactggggcaatgacattttgcttcatccaagccatagagcgtggccatggggctacctatggcagcattcttactgcaatgcgcacttccatcagaaatgttggcggcggcggcggcggtaccgggggtggtgatgtggtaacatcccttctctccatgcttttgactggagggagtctcagcggtgtcggtggactgggacaggaaccacagttaacagcttgcgaagcatttgatgtgcatagaaaacctttttcattatgatactcaatattctttattctgcaatttgttttcctaggctctgcccctgtatacgactacattgattacaatgattaatatattataaagtagagaggattcttttttcgc

SEQ ID NO: 60064 - protein, 364 aa, Glycine max
  peptide (1)..(364): Ceres Seq. ID no. 15171709
  misc_feature (73)..(364): Pfam Name: Caspase domain Pfam Description: Caspase domain
  misc_feature (52)..(309): Homolog of NCBI NO: 11358463 NR Description: hypothetical protein [imported] - Arabidopsis
  misc_feature (5)..(69): Homolog of NCBI NO: 7485453 NR Description: hypothetical protein F13M23.250 - Arabidopsis
  misc_feature (39)..(336): Homolog of NCBI NO: 7485453 NR Description: hypothetical protein F13M23.250 - Arabidopsis
  misc_feature (5)..(69): Homolog of NCBI NO: 30686772 NR Description: expressed protein [Arabidopsis thaliana]
  misc_feature (39)..(364): Homolog of NCBI NO: 30686772 NR Description: expressed protein [Arabidopsis thaliana]
  misc_feature (1)..(343): Homolog of NCBI NO: 3258570 NR Description: Unknown protein [Arabidopsis thaliana]
  misc_feature (5)..(69): Homolog of NCBI NO: 32482814 NR Description: metacaspase 2 [Arabidopsis thaliana]
  misc_feature (39)..(364): Homolog of NCBI NO: 32482814 NR Description: metacaspase 2 [Arabidopsis thaliana]
  misc_feature (43)..(364): Homolog of NCBI NO: 37536924 NR Description: hypothetical protein [Oryza sativa (japonica
  misc_feature (1)..(364): Homolog of NCBI NO: 30678252 NR Description: expressed protein [Arabidopsis thaliana]
MYSNMLVNCSNCRTPLQLPPGAGSIRCALCRAVTLIGDPRALPSQPPASTHAPPPPSSPYSHAPPPPNPHGRKKAVIVGISYRFSRHELKGCINDAKCMKYLLINKFSFPESSIIMLTEEEDPHGPKFPTKHNIRMAMYWLAQGCQPGDSLVFHYSGHGSQQRNYSGDEADGYDETLCPLDFETQGMIVDDEINAALVRPIPHGAKLHALIDACHSGTVLDLPFLCRMNRSGQYVWEDHRPRSGVWKGSSGGEVICFSGCDDHQTSADTSALSKITSTGAMTFCFIQAIERGHGATYGSILTAMRTSIRNVGGGGGGTGGGDVVTSLLSMLLTGGSLSGVGGLGQEPQLTACEAFDVHRKPFSL

SEQ ID NO: 60065 - protein, 360 aa, Glycine max
  peptide (1)..(360): Ceres Seq. ID no. 15171710
  misc_feature (69)..(360): Pfam Name: Caspase domain Pfam Description: Caspase domain
  misc_feature (48)..(305): Homolog of NCBI NO: 11358463 NR Description: hypothetical protein [imported] - Arabidopsis
  misc_feature (1)..(65): Homolog of NCBI NO: 7485453 NR Description: hypothetical protein F13M23.250 - Arabidopsis
  misc_feature (35)..(332): Homolog of NCBI NO: 7485453 NR Description: hypothetical protein F13M23.250 - Arabidopsis
  misc_feature (1)..(65): Homolog of NCBI NO: 30686772 NR Description: expressed protein [Arabidopsis thaliana]
  misc_feature (35)..(360): Homolog of NCBI NO: 30686772 NR Description: expressed protein [Arabidopsis thaliana]
  misc_feature (1)..(339): Homolog of NCBI NO: 3258570 NR Description: Unknown protein [Arabidopsis thaliana]
  misc_feature (1)..(65): Homolog of NCBI NO: 32482814 NR Description: metacaspase 2 [Arabidopsis thaliana]
  misc_feature (35)..(360): Homolog of NCBI NO: 32482814 NR Description: metacaspase 2 [Arabidopsis thaliana]
  misc_feature (39)..(360): Homolog of NCBI NO: 37536924 NR Description: hypothetical protein [Oryza sativa (japonica
  misc_feature (1)..(360): Homolog of NCBI NO: 30678252 NR Description: expressed protein [Arabidopsis thaliana]
MLVNCSNCRTPLQLPPGAGSIRCALCRAVTLIGDPRALPSQPPASTHAPPPPSSPYSHAPPPPNPHGRKKAVIVGISYRFSRHELKGCINDAKCMKYLLINKFSFPESSIIMLTEEEDPHGPKFPTKHNIRMAMYWLAQGCQPGDSLVFHYSGHGSQQRNYSGDEADGYDETLCPLDFETQGMIVDDEINAALVRPIPHGAKLHALIDACHSGTVLDLPFLCRMNRSGQYVWEDHRPRSGVWKGSSGGEVICFSGCDDHQTSADTSALSKITSTGAMTFCFIQAIERGHGATYGSILTAMRTSIRNVGGGGGGTGGGDVVTSLLSMLLTGGSLSGVGGLGQEPQLTACEAFDVHRKPFSL

SEQ ID NO: 60066 - protein, 266 aa, Glycine max
  peptide (1)..(266): Ceres Seq. ID no. 15171711
  misc_feature (1)..(266): Pfam Name: Caspase domain Pfam Description: Caspase domain
  misc_feature (1)..(171): Homolog of NCBI NO: 30697974 NR Description: expressed protein [Arabidopsis thaliana]
  misc_feature (1)..(211): Homolog of NCBI NO: 37788549 NR Description: metacaspase 3 [Arabidopsis thaliana]
  misc_feature (1)..(211): Homolog of NCBI NO: 15237654 NR Description: expressed protein [Arabidopsis thaliana]
  misc_feature (1)..(211): Homolog of NCBI NO: 11358463 NR Description: hypothetical protein [imported] - Arabidopsis
  misc_feature (1)..(238): Homolog of NCBI NO: 7485453 NR Description: hypothetical protein F13M23.250 - Arabidopsis
  misc_feature (1)..(266): Homolog of NCBI NO: 30686772 NR Description: expressed protein [Arabidopsis thaliana]
  misc_feature (1)..(245): Homolog of NCBI NO: 3258570 NR Description: Unknown protein [Arabidopsis thaliana]
  misc_feature (1)..(266): Homolog of NCBI NO: 32482814 NR Description: metacaspase 2 [Arabidopsis thaliana]
  misc_feature (1)..(266): Homolog of NCBI NO: 37536924 NR Description: hypothetical protein [Oryza sativa (japonica
  misc_feature (1)..(266): Homolog of NCBI NO: 30678252 NR Description: expressed protein [Arabidopsis thaliana]
MKYLLINKFSFPESSIIMLTEEEDPHGPKFPTKHNIRMAMYWLAQGCQPGDSLVFHYSGHGSQQRNYSGDEADGYDETLCPLDFETQGMIVDDEINAALVRPIPHGAKLHALIDACHSGTVLDLPFLCRMNRSGQYVWEDHRPRSGVWKGSSGGEVICFSGCDDHQTSADTSALSKITSTGAMTFCFIQAIERGHGATYGSILTAMRTSIRNVGGGGGGTGGGDVVTSLLSMLLTGGSLSGVGGLGQEPQLTACEAFDVHRKPFSL

SEQ ID NO: 60067 - DNA, 1260 bp, Glycine max
  misc_feature (1)..(1260): Ceres Seq. ID no. 14316336
attttcactaaactaacttcctcaaatcaattacaatttttggacattttctctctcaaccctccaacaatattcccttctctctcatcattctcatgacataatcacatcacacaattgatttcctcaattacttctaatccacaatcaaatagcgcagcatggaagaatctgcgccccaacccaaaccaatcttacagaaaccccccggttaccgggaccccaactccaaaccgccaccacctcctcctcgaaagctcatgctgcccccccccttccagcccaaacggaagcgtcgcaacttctgccgcatatgctgctgtaccttctgcatcctcatcctcatcctcctccttgtgctcgttatcgccgccgctctcttctacctcatctacgacccctccctccctgagtttcacctcggctccttccgcgtccccaaacttaacgtcaccaatgccgccgacggggcctacctggctgccgacacggccgcacgtgtcgaggtcaagaaccgcagcggcaggatgtcgtggcatttctcccagagccgcttctcggtttcggcggagaacggggacctgaatctggggtccacgaaggtggccgggttcacggtgaaggagaagggcgtgaccgagctgaaggcggagacgagcgtaaaggagctggcattgaatgagaagcagaggagaaggcttaagagcgctgtggagagcaaagcgttggtccccaccgtggaggttcgaaccaaaaccggtgttggcttggagggttggaactcaccctccatctccgtcactgtcgtctgcggagatgccaccgtgagacaactcgataaaggagaccctcccctttgctccatcactctcctcaaatggatcaaaatacgatgagttggggatgtgttctgccagattgatgtccactgcgcgccatttagatcgaggtgaagattttgtgcgcttgtatctaaattatttttatattcttcttttttctctttacaaagtaaaggaagaatgaaaatgtaaattctttgcttagaaaaaagaaaagagtctcttctacagcagatcaacttgctgctggttctcccaaatgcgatgtgggatgcacataagaccaatacgtgaggttgtatttatcaaatatttattgttttttatgtggctggtgatcgtaggaatcgtaagtactcgagaaaatgttctctgtctttctctttttaataagaagaaaaccacaatgtgatgaggc

SEQ ID NO: 60068 - protein, 244 aa, Glycine max
  peptide (1)..(244): Ceres Seq. ID no. 14316337
  misc_feature (2)..(225): Homolog of NCBI NO: 18401317 NR Description: expressed protein [Arabidopsis thaliana]
  misc_feature (6)..(232): Homolog of NCBI NO: 21536796 NR Description: unknown [Arabidopsis thaliana]
  misc_feature (6)..(232): Homolog of NCBI NO: 15239804 NR Description: expressed protein [Arabidopsis thaliana]
  misc_feature (6)..(231): Homolog of NCBI NO: 34903552 NR Description: P0001B06.28 [Oryza sativa (japonica
  misc_feature (14)..(230): Homolog of NCBI NO: 34914304 NR Description: B1151A10.19 [Oryza sativa (japonica
  misc_feature (9)..(240): Homolog of NCBI NO: 15234066 NR Description: hypothetical protein [Arabidopsis thaliana]
  misc_feature (2)..(240): Homolog of NCBI NO: 25518342 NR Description: hypothetical protein F22L4.1 [imported] -
  misc_feature (7)..(244): Homolog of NCBI NO: 30690312 NR Description: expressed protein [Arabidopsis thaliana]
  misc_feature (7)..(244): Homolog of NCBI NO: 26449684 NR Description: unknown protein [Arabidopsis thaliana]
  misc_feature (7)..(243): Homolog of NCBI NO: 25408980 NR Description: hypothetical protein At2g46300 [imported] -
MEESAPQPKPILQKPPGYRDPNSKPPPPPPRKLMLPPPFQPKRKRRNFCRICCCTFCILILILLLVLVIAAALFYLIYDPSLPEFHLGSFRVPKLNVTNAADGAYLAADTAARVEVKNRSGRMSWHFSQSRFSVSAENGDLNLGSTKVAGFTVKEKGVTELKAETSVKELALNEKQRRRLKSAVESKALVPTVEVRTKTGVGLEGWNSPSISVTVVCGDATVRQLDKGDPPLCSITLLKWIKIR

SEQ ID NO: 60069 - protein, 211 aa, Glycine max
  peptide (1)..(211): Ceres Seq. ID no. 14316338
  misc_feature (1)..(192): Homolog of NCBI NO: 18401317 NR Description: expressed protein [Arabidopsis thaliana]
  misc_feature (1)..(199): Homolog of NCBI NO: 21536796 NR Description: unknown [Arabidopsis thaliana]
  misc_feature (1)..(199): Homolog of NCBI NO: 15239804 NR Description: expressed protein [Arabidopsis thaliana]
  misc_feature (1)..(198): Homolog of NCBI NO: 34903552 NR Description: P0001B06.28 [Oryza sativa (japonica
  misc_feature (1)..(197): Homolog of NCBI NO: 34914304 NR Description: B1151A10.19 [Oryza sativa (japonica
  misc_feature (1)..(207): Homolog of NCBI NO: 15234066 NR Description: hypothetical protein [Arabidopsis thaliana]
  misc_feature (1)..(207): Homolog of NCBI NO: 25518342 NR Description: hypothetical protein F22L4.1 [imported] -
  misc_feature (1)..(211): Homolog of NCBI NO: 30690312 NR Description: expressed protein [Arabidopsis thaliana]
  misc_feature (1)..(211): Homolog of NCBI NO: 26449684 NR Description: unknown protein [Arabidopsis thaliana]
  misc_feature (1)..(210): Homolog of NCBI NO: 25408980 NR Description: hypothetical protein At2g46300 [imported] -
MLPPPFQPKRKRRNFCRICCCTFCILILILLLVLVIAAALFYLIYDPSLPEFHLGSFRVPKLNVTNAADGAYLAADTAARVEVKNRSGRMSWHFSQSRFSVSAENGDLNLGSTKVAGFTVKEKGVTELKAETSVKELALNEKQRRRLKSAVESKALVPTVEVRTKTGVGLEGWNSPSISVTVVCGDATVRQLDKGDPPLCSITLLKWIKIR

SEQ ID NO: 60070 - protein, 122 aa, Glycine max
  peptide (1)..(122): Ceres Seq. ID no. 14316339
  misc_feature (1)..(103): Homolog of NCBI NO: 18401317 NR Description: expressed protein [Arabidopsis thaliana]
  misc_feature (1)..(110): Homolog of NCBI NO: 21536796 NR Description: unknown [Arabidopsis thaliana]
  misc_feature (1)..(110): Homolog of NCBI NO: 15239804 NR Description: expressed protein [Arabidopsis thaliana]
  misc_feature (1)..(109): Homolog of NCBI NO: 34903552 NR Description: P0001B06.28 [Oryza sativa (japonica
  misc_feature (1)..(108): Homolog of NCBI NO: 34914304 NR Description: B1151A10.19 [Oryza sativa (japonica
  misc_feature (1)..(118): Homolog of NCBI NO: 15234066 NR Description: hypothetical protein [Arabidopsis thaliana]
  misc_feature (1)..(118): Homolog of NCBI NO: 25518342 NR Description: hypothetical protein F22L4.1 [imported] -
  misc_feature (1)..(122): Homolog of NCBI NO: 30690312 NR Description: expressed protein [Arabidopsis thaliana]
  misc_feature (1)..(122): Homolog of NCBI NO: 26449684 NR Description: unknown protein [Arabidopsis thaliana]
  misc_feature (1)..(121): Homolog of NCBI NO: 25408980 NR Description: hypothetical protein At2g46300 [imported] -
MSWHFSQSRFSVSAENGDLNLGSTKVAGFTVKEKGVTELKAETSVKELALNEKQRRRLKSAVESKALVPTVEVRTKTGVGLEGWNSPSISVTVVCGDATVRQLDKGDPPLCSITLLKWIKIR

SEQ ID NO: 60071 - DNA, 650 bp, Glycine max
  misc_feature (1)..(650): Ceres Seq. ID no. 15175368
atatttggagagagagagagagagagagaataaaaatggaaggaggatcaggtggcgagaggaacagtagtgtataccgagagtgcttgagaaatcatgcagccagcctaggaagctacgccacggacgggtgcgccgagtacacggtggacggcgcggggggactacaatgcgccgcgtgcgggtgccaccgcaacttccaccggaaagtgaagtacctggcggcggctgaaagccctcccacggagtatgggggcagcaacagcaagaagcggttcaggtctaagttcacggaagatcaaaaggagaagatgctagggtttgcggagaagcttggttggaagcttcagaggagggatcttgatgatgagatagagaggttttgccgaagcgttggggtgagtaggcaagtcttcaaagtttggatgcataaccataagaactcttcctcctcctcttctaccgccgccaatgtctcctccctcacccagtaattcactctctcctcttgtaattgtttctcattaattatcactttcatctttttagattgactagtttacttcaatattgtaagaagtcaatgaaatcacttaattgtcaggattatgtatgctatcactatctatttataacctataaagtttccg

SEQ ID NO: 60072 - protein, 163 aa, Glycine max
  peptide (1)..(163): Ceres Seq. ID no. 15175369
  misc_feature (20)..(75): Pfam Name: ZF-HD protein dimerisation region Pfam Description: ZF-HD protein dimerisation region
  misc_feature (14)..(69): Homolog of NCBI NO: 13374061 NR Description: ZF-HD homeobox protein [Flaveria bidentis]
  misc_feature (84)..(148): Homolog of NCBI NO: 13374061 NR Description: ZF-HD homeobox protein [Flaveria bidentis]
  misc_feature (78)..(148): Homolog of NCBI NO: 15233925 NR Description: expressed protein [Arabidopsis thaliana]
  misc_feature (14)..(83): Homolog of NCBI NO: 15233925 NR Description: expressed protein [Arabidopsis thaliana]
  misc_feature (25)..(69): Homolog of NCBI NO: 18410804 NR Description: expressed protein [Arabidopsis thaliana]
  misc_feature (74)..(154): Homolog of NCBI NO: 18410804 NR Description: expressed protein [Arabidopsis thaliana]
  misc_feature (10)..(69): Homolog of NCBI NO: 32480091 NR Description: OSJNBb0086G13.8 [Oryza sativa (japonica
  misc_feature (84)..(156): Homolog of NCBI NO: 32480091 NR Description: OSJNBb0086G13.8 [Oryza sativa (japonica
  misc_feature (19)..(69): Homolog of NCBI NO: 28301934 NR Description: putative ZF-HD homeobox protein
  misc_feature (84)..(146): Homolog of NCBI NO: 28301934 NR Description: putative ZF-HD homeobox protein
IWRERERERIKMEGGSGGERNSSVYRECLRNHAASLGSYATDGCAEYTVDGAGGLQCAACGCHRNFHRKVKYLAAAESPPTEYGGSNSKKRFRSKFTEDQKEKMLGFAEKLGWKLQRRDLDDEIERFCRSVGVSRQVFKVWMHNHKNSSSSSSTAANVSSLTQ

SEQ ID NO: 60073 - protein, 152 aa, Glycine max
  peptide (1)..(152): Ceres Seq. ID no. 15175370
  misc_feature (9)..(64): Pfam Name: ZF-HD protein dimerisation region Pfam Description: ZF-HD protein dimerisation region
  misc_feature (3)..(58): Homolog of NCBI NO: 13374061 NR Description: ZF-HD homeobox protein [Flaveria bidentis]
  misc_feature (73)..(137): Homolog of NCBI NO: 13374061 NR Description: ZF-HD homeobox protein [Flaveria bidentis]
  misc_feature (67)..(137): Homolog of NCBI NO: 15233925 NR Description: expressed protein [Arabidopsis thaliana]
  misc_feature (3)..(72): Homolog of NCBI NO: 15233925 NR Description: expressed protein [Arabidopsis thaliana]
  misc_feature (14)..(58): Homolog of NCBI NO: 18410804 NR Description: expressed protein [Arabidopsis thaliana]
  misc_feature (63)..(143): Homolog of NCBI NO: 18410804 NR Description: expressed protein [Arabidopsis thaliana]
  misc_feature (1)..(58): Homolog of NCBI NO: 32480091 NR Description: OSJNBb0086G13.8 [Oryza sativa (japonica
  misc_feature (73)..(145): Homolog of NCBI NO: 32480091 NR Description: OSJNBb0086G13.8 [Oryza sativa (japonica
  misc_feature (8)..(58): Homolog of NCBI NO: 28301934 NR Description: putative ZF-HD homeobox protein
  misc_feature (73)..(135): Homolog of NCBI NO: 28301934 NR Description: putative ZF-HD homeobox protein
MEGGSGGERNSSVYRECLRNHAASLGSYATDGCAEYTVDGAGGLQCAACGCHRNFHRKVKYLAAAESPPTEYGGSNSKKRFRSKFTEDQKEKMLGFAEKLGWKLQRRDLDDEIERFCRSVGVSRQVFKVWMHNHKNSSSSSSTAANVSSLTQ

SEQ ID NO: 60074 - DNA, 1717 bp, Glycine max
  misc_feature (1)..(1717): Ceres Seq. ID no. 14315919
agaaaaatcttttggattcccttctcattcactttcactttcactccttagcctggttataggagctagggtttatcgagggtttcgttccttcctctctgcaacaacaatggcgaaacctgggcgaggtcgtcgctctccctccggttccgtttccggctcctcctctcgctcctcttccccctccgactctcgttcctcctctcgctcgcgctccctttctcggtcccgttctccctcgcgctccagatcctcttccccctcctcctcctcttcctcccgaagctcccgcagccgcagccctcccccgcagaggcgccgaagtcctgctgacgcaactaggcgaggtcggtctcctccacctcagtctaagagagcttcacctcccccaaggaaaccttctcctgtacgcgagtcacttgttcttcatgtagaaaagctcagcagaaatgtcaatgaagggcacttgaaagaaattttcagtaactttggtgaggttataagtgtcgagttggcaatggatcgaactgtcaatcttccaaaagggtatggatatgtgcagttcaagacaagaggggatgctgaaaaggcattattgtacatggatggtgcccaaatagatggcaatgtcatcaaggcaagatttactctacctccaaggcagaaagtttcaccacccccaaaggcttctgctgttgctccaaagagagacacccccagggctgataatgctagtgcagatgttgacaaggatggaccaaagcggcaaagagaatcttctcctcgtagaaaacctcctccctcaccacggaggagatctcctgtacctagaagagctggatctccgagacgaccagattctccacgtcgccgtgcagattctcctgttcgtcgccgattagactctccttatcgtcgtggaggagacacacctcctaggaggcggcctgtgtctcctggaagaggtcgttctccatctccacctagacgccttagatcccctgcaaggctgtcacctagaaggatacgtggaagtccaggtcgaagacgttcacctccacctcctcccaggcgccgatcaccacctagacgaccacgtagtcctcctagaaggtctccaattggtcgtagacgtactcgctctccaatacgtaggtctgcacgctcacgctcaaggtcattctcacctcgcagaggtagaccaccagttagacgtggaaggtcatcatcctactctgattcacctagtccacgcaaggtatcccggagatcaaagagtcggagcccaagaaggcctttgagaggaagaggcagtagcaacagcagcagcagcagttcaccaccaccaccaccaccaccaccaactcgcaagccatagataattcttgtacatctactgtctatttctgttgatgtatttattgagattctgtaccggctgagttctagcttgatgtgcttggggatatatgttgcttttcattgtggtctattaacacattttttcttattagcacttaaaagttgtttggaaactaggcattccgtttttgtttggatcctactttagttgttactttgctcaaaaatgcaaaacatgaaagacgatagtgctctgctttattgtatttctagaaattcagtggaattccatgtaactggtagtttctttagaaatttgattatgcgaagaaagtagtagtaaatgttcaatgtg

SEQ ID NO: 60075 - protein, 458 aa, Glycine max
  peptide (1)..(458): Ceres Seq. ID no. 14315920
  misc_feature (142)..(213): Pfam Name: RNA recognition motif. (a.k.a. RRM, RBD, or RNP domain) Pfam Description: RNA recognition motif. (a.k.a. RRM, RBD, or RNP
  misc_feature (42)..(294): Homolog of NCBI NO: 14733321 NR Description: similar to RNA-binding protein S1, serine-rich
  misc_feature (54)..(294): Homolog of NCBI NO: 8101025 NR Description: SR-related protein LD2 [Homo sapiens]
  misc_feature (44)..(294): Homolog of NCBI NO: 34785364 NR Description: Unknown (protein for MGC:65775) [Danio rerio]
  misc_feature (42)..(294): Homolog of NCBI NO: 3253165 NR Description: SR protein [Homo sapiens]
  misc_feature (42)..(294): Homolog of NCBI NO: 34870512 NR Description: similar to Rnps1 protein [Rattus norvegicus]
  misc_feature (42)..(294): Homolog of NCBI NO: 18032270 NR Description: splicing-related factor RNPS1 [Homo sapiens]
  misc_feature (42)..(294): Homolog of NCBI NO: 6857826 NR Description: RNA-binding protein S1, serine-rich domain; SR
  misc_feature (162)..(423): Homolog of NCBI NO: 34905768 NR Description: P0401G10.10 [Oryza sativa (japonica
  misc_feature (37)..(453): Homolog of NCBI NO: 15027957 NR Description: putative arginine/serine-rich protein
  misc_feature (37)..(453): Homolog of NCBI NO: 15219287 NR Description: arginine/serine-rich protein, putative
EKSFGFPSHSLSLSLLSLVIGARVYRGFRSFLSATTMAKPGRGRRSPSGSVSGSSSRSSSPSDSRSSSRSRSLSRSRSPSRSRSSSPSSSSSSRSSRSRSPPPQRRRSPADATRRGRSPPPQSKRASPPPRKPSPVRESLVLHVEKLSRNVNEGHLKEIFSNFGEVISVELAMDRTVNLPKGYGYVQFKTRGDAEKALLYMDGAQIDGNVIKARFTLPPRQKVSPPPKASAVAPKRDTPRADNASADVDKDGPKRQRESSPRRKPPPSPRRRSPVPRRAGSPRRPDSPRRRADSPVRRRLDSPYRRGGDTPPRRRPVSPGRGRSPSPPRRLRSPARLSPRRIRGSPGRRRSPPPPPRRRSPPRRPRSPPRRSPIGRRRTRSPIRRSARSRSRSFSPRRGRPPVRRGRSSSYSDSPSPRKVSRRSKSRSPRRPLRGRGSSNSSSSSSPPPPPPPPTRKP

SEQ ID NO: 60076 - protein, 422 aa, Glycine max
  peptide (1)..(422): Ceres Seq. ID no. 14315921
  misc_feature (106)..(177): Pfam Name: RNA recognition motif. (a.k.a. RRM, RBD, or RNP domain) Pfam Description: RNA recognition motif. (a.k.a. RRM, RBD, or RNP
  misc_feature (6)..(258): Homolog of NCBI NO: 14733321 NR Description: similar to RNA-binding protein S1, serine-rich
  misc_feature (18)..(258): Homolog of NCBI NO: 8101025 NR Description: SR-related protein LD2 [Homo sapiens]
  misc_feature (8)..(258): Homolog of NCBI NO: 34785364 NR Description: Unknown (protein for MGC:65775) [Danio rerio]
  misc_feature (6)..(258): Homolog of NCBI NO: 3253165 NR Description: SR protein [Homo sapiens]
  misc_feature (6)..(258): Homolog of NCBI NO: 34870512 NR Description: similar to Rnps1 protein [Rattus norvegicus]
  misc_feature (6)..(258): Homolog of NCBI NO: 18032270 NR Description: splicing-related factor RNPS1 [Homo sapiens]
  misc_feature (6)..(258): Homolog of NCBI NO: 6857826 NR Description: RNA-binding protein S1, serine-rich domain; SR
  misc_feature (126)..(387): Homolog of NCBI NO: 34905768 NR Description: P0401G10.10 [Oryza sativa (japonica
  misc_feature (1)..(417): Homolog of NCBI NO: 15027957 NR Description: putative arginine/serine-rich protein
  misc_feature (1)..(417): Homolog of NCBI NO: 15219287 NR Description: arginine/serine-rich protein, putative
MAKPGRGRRSPSGSVSGSSSRSSSPSDSRSSSRSRSLSRSRSPSRSRSSSPSSSSSSRSSRSRSPPPQRRRSPADATRRGRSPPPQSKRASPPPRKPSPVRESLVLHVEKLSRNVNEGHLKEIFSNFGEVISVELAMDRTVNLPKGYGYVQFKTRGDAEKALLYMDGAQIDGNVIKARFTLPPRQKVSPPPKASAVAPKRDTPRADNASADVDKDGPKRQRESSPRRKPPPSPRRRSPVPRRAGSPRRPDSPRRRADSPVRRRLDSPYRRGGDTPPRRRPVSPGRGRSPSPPRRLRSPARLSPRRIRGSPGRRRSPPPPPRRRSPPRRPRSPPRRSPIGRRRTRSPIRRSARSRSRSFSPRRGRPPVRRGRSSSYSDSPSPRKVSRRSKSRSPRRPLRGRGSSNSSSSSSPPPPPPPPTRKP

SEQ ID NO: 60077 - protein, 286 aa, Glycine max
  peptide (1)..(286): Ceres Seq. ID no. 14315922
  misc_feature (81)..(284): Pfam Name: Formin Homology 2 Domain Pfam Description: Formin Homology 2 Domain
  misc_feature (1)..(122): Homolog of NCBI NO: 14733321 NR Description: similar to RNA-binding protein S1, serine-rich
  misc_feature (1)..(122): Homolog of NCBI NO: 8101025 NR Description: SR-related protein LD2 [Homo sapiens]
  misc_feature (1)..(122): Homolog of NCBI NO: 34785364 NR Description: Unknown (protein for MGC:65775) [Danio rerio]
  misc_feature (1)..(122): Homolog of NCBI NO: 3253165 NR Description: SR protein [Homo sapiens]
  misc_feature (1)..(122): Homolog of NCBI NO: 34870512 NR Description: similar to Rnps1 protein [Rattus norvegicus]
  misc_feature (1)..(122): Homolog of NCBI NO: 18032270 NR Description: splicing-related factor RNPS1 [Homo sapiens]
  misc_feature (1)..(122): Homolog of NCBI NO: 6857826 NR Description: RNA-binding protein S1, serine-rich domain; SR
  misc_feature (1)..(251): Homolog of NCBI NO: 34905768 NR Description: P0401G10.10 [Oryza sativa (japonica
  misc_feature (1)..(281): Homolog of NCBI NO: 15027957 NR Description: putative arginine/serine-rich protein
  misc_feature (1)..(281): Homolog of NCBI NO: 15219287 NR Description: arginine/serine-rich protein, putative
MDRTVNLPKGYGYVQFKTRGDAEKALLYMDGAQIDGNVIKARFTLPPRQKVSPPPKASAVAPKRDTPRADNASADVDKDGPKRQRESSPRRKPPPSPRRRSPVPRRAGSPRRPDSPRRRADSPVRRRLDSPYRRGGDTPPRRRPVSPGRGRSPSPPRRLRSPARLSPRRIRGSPGRRRSPPPPPRRRSPPRRPRSPPRRSPIGRRRTRSPIRRSARSRSRSFSPRRGRPPVRRGRSSSYSDSPSPRKVSRRSKSRSPRRPLRGRGSSNSSSSSSPPPPPPPPTRKP

SEQ ID NO: 60078 - DNA, 1073 bp, Glycine max
  misc_feature (1)..(1073): Ceres Seq. ID no. 14316416
atcgcaaatttttctttttcttctcccctttagatgagtaacgccacagactccgccggcaaaatcccaccggagacgaggcccgccgagagcgacagtggtggtgatagtgggccccggcccacgatcaagatcaatgttatgcacggatcctctcaacacgagttccacctcccggcccaatcaacttttggggatgttaagaaactccttgttaataaaactggtttagagcctgtagagcaacgacttttcttcagagggatagaaaagggtgataacctacatttgcaccttgaaggtgtaaaggataagtcaaagcttttgcttttggagggcactgctagcaaagagaggaaacttgaggaaaccagaaaacaaaacgtaatgtctaaagcttttgaggctattgctggtgttagagctgaggtggacaagctctcaaatagggtgacttccatagaagtagctattaatggggggaacaaagcatccgagaaagagtttcttgtgctgacagagctgcttatgagtcaattgctgaaactggatggtattgaggctgaaggtgaagcaaagttgcagagaaaagctgaggtgaatcgtgtgcagaaccttgtggataaattagattctctaaaggcaaggaacgccaacccttttagcaacagtagcaatgctgtcaaagtaacaacccaatgggaaacctttgactctggaatggaaagcttggatgctccatccgataacccgtcttccacaaaagtaactcaagaatgggagcggtttgattagctcggaaaccgtttttggaacatctaagttataaatgttgtacaacatcatattactggcccttcatcatattagaggtcttggcacaacgatgttgccttgtgatatggtaggctgaaattttaattgcagaaatgttctctccgctgaggtaaagttgcatatgtttgatctatctcgtgcacttatttttaggcaaaatatgtaaaccaaattgtattcttgttacttgaatatattattgcatcttccgatcatttggtttgtcttctgtttgc

SEQ ID NO: 60079 - protein, 253 aa, Glycine max
  peptide (1)..(253): Ceres Seq. ID no. 14316417
  misc_feature (122)..(203): Pfam Name: BAG domain Pfam Description: BAG domain
  misc_feature (20)..(253): Homolog of NCBI NO: 21537107 NR Description: unknown [Arabidopsis thaliana]
  misc_feature (28)..(228): Homolog of NCBI NO: 38344334 NR Description: OSJNBa0058K23.16 [Oryza sativa (japonica
  misc_feature (28)..(228): Homolog of NCBI NO: 6624711 NR Description: hypothetical protein [Oryza sativa (indica
  misc_feature (28)..(222): Homolog of NCBI NO: 15242267 NR Description: BAG domain containing protein [Arabidopsis
  misc_feature (28)..(253): Homolog of NCBI NO: 34898024 NR Description: ESTs AU082174(S13676),AU032395(R3986) correspond a region of the predicted gene.~Similar to Arabidopsis thaliana
  misc_feature (28)..(253): Homolog of NCBI NO: 25553557 NR Description: OSJNBa0038F22.4 [Oryza sativa (japonica
  misc_feature (54)..(253): Homolog of NCBI NO: 34907972 NR Description: P0446G04.18 [Oryza sativa (japonica
  misc_feature (16)..(253): Homolog of NCBI NO: 21554254 NR Description: unknown [Arabidopsis thaliana]
  misc_feature (16)..(253): Homolog of NCBI NO: 19699283 NR Description: At3g51780/ORF3 [Arabidopsis thaliana]
  misc_feature (16)..(253): Homolog of NCBI NO: 15231035 NR Description: expressed protein [Arabidopsis thaliana]
MSNATDSAGKIPPETRPAESDSGGDSGPRPTIKINVMHGSSQHEFHLPAQSTFGDVKKLLVNKTGLEPVEQRLFFRGIEKGDNLHLHLEGVKDKSKLLLLEGTASKERKLEETRKQNVMSKAFEAIAGVRAEVDKLSNRVTSIEVAINGGNKASEKEFLVLTELLMSQLLKLDGIEAEGEAKLQRKAEVNRVQNLVDKLDSLKARNANPFSNSSNAVKVTTQWETFDSGMESLDAPSDNPSSTKVTQEWERFD

SEQ ID NO: 60080 - protein, 217 aa, Glycine max
  peptide (1)..(217): Ceres Seq. ID no. 14316418
  misc_feature (86)..(167): Pfam Name: BAG domain Pfam Description: BAG domain
  misc_feature (1)..(217): Homolog of NCBI NO: 21537107 NR Description: unknown [Arabidopsis thaliana]
  misc_feature (1)..(192): Homolog of NCBI NO: 38344334 NR Description: OSJNBa0058K23.16 [Oryza sativa (japonica
  misc_feature (1)..(192): Homolog of NCBI NO: 6624711 NR Description: hypothetical protein [Oryza sativa (indica
  misc_feature (1)..(186): Homolog of NCBI NO: 15242267 NR Description: BAG domain containing protein [Arabidopsis
  misc_feature (1)..(217): Homolog of NCBI NO: 34898024 NR Description: ESTs AU082174(S13676),AU032395(R3986) correspond a region of the predicted gene.~Similar to Arabidopsis thaliana
  misc_feature (1)..(217): Homolog of NCBI NO: 25553557 NR Description: OSJNBa0038F22.4 [Oryza sativa (japonica
  misc_feature (18)..(217): Homolog of NCBI NO: 34907972 NR Description: P0446G04.18 [Oryza sativa (japonica
  misc_feature (1)..(217): Homolog of NCBI NO: 19699283 NR Description: At3g51780/ORF3 [Arabidopsis thaliana]
  misc_feature (1)..(217): Homolog of NCBI NO: 21554254 NR Description: unknown [Arabidopsis thaliana]
  misc_feature (1)..(217): Homolog of NCBI NO: 15231035 NR Description: expressed protein [Arabidopsis thaliana]
MHGSSQHEFHLPAQSTFGDVKKLLVNKTGLEPVEQRLFFRGIEKGDNLHLHLEGVKDKSKLLLLEGTASKERKLEETRKQNVMSKAFEAIAGVRAEVDKLSNRVTSIEVAINGGNKASEKEFLVLTELLMSQLLKLDGIEAEGEAKLQRKAEVNRVQNLVDKLDSLKARNANPFSNSSNAVKVTTQWETFDSGMESLDAPSDNPSSTKVTQEWERFD

SEQ ID NO: 60081 - protein, 135 aa, Glycine max
  peptide (1)..(135): Ceres Seq. ID no. 14316419
  misc_feature (4)..(85): Pfam Name: BAG domain Pfam Description: BAG domain
  misc_feature (1)..(135): Homolog of NCBI NO: 21537107 NR Description: unknown [Arabidopsis thaliana]
  misc_feature (1)..(110): Homolog of NCBI NO: 38344334 NR Description: OSJNBa0058K23.16 [Oryza sativa (japonica
  misc_feature (1)..(110): Homolog of NCBI NO: 6624711 NR Description: hypothetical protein [Oryza sativa (indica
  misc_feature (1)..(104): Homolog of NCBI NO: 15242267 NR Description: BAG domain containing protein [Arabidopsis
  misc_feature (1)..(135): Homolog of NCBI NO: 34898024 NR Description: ESTs AU082174(S13676),AU032395(R3986) correspond a region of the predicted gene.~Similar to Arabidopsis thaliana
  misc_feature (1)..(135): Homolog of NCBI NO: 25553557 NR Description: OSJNBa0038F22.4 [Oryza sativa (japonica
  misc_feature (1)..(135): Homolog of NCBI NO: 34907972 NR Description: P0446G04.18 [Oryza sativa (japonica
  misc_feature (1)..(135): Homolog of NCBI NO: 21554254 NR Description: unknown [Arabidopsis thaliana]
  misc_feature (1)..(135): Homolog of NCBI NO: 19699283 NR Description: At3g51780/ORF3 [Arabidopsis thaliana]
  misc_feature (1)..(135): Homolog of NCBI NO: 15231035 NR Description: expressed protein [Arabidopsis thaliana]
MSKAFEAIAGVRAEVDKLSNRVTSIEVAINGGNKASEKEFLVLTELLMSQLLKLDGIEAEGEAKLQRKAEVNRVQNLVDKLDSLKARNANPFSNSSNAVKVTTQWETFDSGMESLDAPSDNPSSTKVTQEWERFD

SEQ ID NO: 60082 - DNA, 1839 bp, Glycine max
  misc_feature (1)..(1839): Ceres Seq. ID no. 14316269
atcacaattcctcaacaacacaacacacaaacacaaaatccccttcaaaacctttcgctttctctctctctctaaagcaaaaacaaaaaagcttccctcgaattgcagaaaatggcaacaatgtccgcatctccaatgaacctcaacatgattgactctaacttcgaagtcgacaagctcacctacgaaatcttctccattctcgagaacaatttcctcttcggctacggcgacaccgaaaatcgcaccaattcgattaattttccgccgagagacgcgaaaccggcgaaacacgccgccggcaaggtccgcatcctctgcattgacggcgccggcgccactgacggcatcctcgccgcgaagtccctcgcgcacctcgaggcctgcctccgccgcaagtcaggcgacgcgaacgcgcgcgtcgccgatttcttcgacgccgccgccggctccggggtcggtggcgtcctcgccgcgctgcttttcactcgcggcaaggacggaaggccgctgtgcagcgccgagggggcgctgcggttcctcaccgacaaccgccgcaggatttcgcggcgggcggggctcctccggcgagtgctccggcctgcggcaaaggcggagaagctcttccgcaagacgttcggggagtgcacgctgaaggacacggtgaagcccgtgctgatcccctgctacgacctcgtcacgcgcgcggcgttcgttttctcgcgcgccgacgcgcttgaagtggacggctacgatttcaagatgcgcgatgtgtgcgccgccacgtcagcggacccatcctctgcccccacagagatgcggtccgtcgacggcaggaccaggatcatggccgtcgacggaggcgtcgccatgaacaatccaacggctgccgccatcacgcacgtgctcaataacaaacatgagttcccgttctgtaacggcgtttccgacctcctcgtactctccctcggtaacggagagtcagactttaacgccgttaagtcctcctctggcttcgtaaggatcgccggcgaaggagcttccgatatggtggatcaagccgtatcgatggcatttggtgagtgtcggacgagcaattatgtgcggattcagtcaaacgggatcatggcaaacaagagcacagaggccaagtcctgcaaaacggcgtcggatttgtttgccatgtcggaggagatgttggcccagaagaacgttgagtccattttgttcagggggaagaaggtggcggagaacaccaacatggacaagttagagttgtttgggggagagttaattaaggagcaagagagaagaaaaacaagcattttagcaacggtggtgttgaagaacaataatgcctcaccctcacccagcagaacttcctctgccactaccttgtccactttgtcctccagtagttaaaaccagaaacagacaagggagattagagggaagaaatccaaagttagatttttcattgtggggttgaatttttatgccagtttttcttttttattttaagtttgtggtgttggggtagctgccgcttgggaccaaattaaggcaaattgagagactgagctgtgcagagccgaatccttaattactactattactattactacctacattatatttattttttttatttttctttagtttttttgggggtatatattacatttttatgtaatgatagtgatttgtgtatatggttattgccatggcatgatttttggtttaatgttagagctgtgcttgatttgtgagaattgtactgttcggtaagaacatcatcatctgatagttaaatagtattgtgactgaatgcagaacact

SEQ ID NO: 60083 - protein, 436 aa, Glycine max
  peptide (1)..(436): Ceres Seq. ID no. 14316270
  misc_feature (69)..(262): Pfam Name: Patatin-like phospholipase Pfam Description: Patatin-like phospholipase
  misc_feature (12)..(421): Homolog of NCBI NO: 15233136 NR Description: patatin-related [Arabidopsis thaliana]
  misc_feature (7)..(41): Homolog of NCBI NO: 7486230 NR Description: hypothetical protein F27B13.40 - Arabidopsis
  misc_feature (47)..(147): Homolog of NCBI NO: 7486230 NR Description: hypothetical protein F27B13.40 - Arabidopsis
  misc_feature (161)..(423): Homolog of NCBI NO: 7486230 NR Description: hypothetical protein F27B13.40 - Arabidopsis
  misc_feature (60)..(414): Homolog of NCBI NO: 15225054 NR Description: patatin family [Arabidopsis thaliana]
  misc_feature (7)..(41): Homolog of NCBI NO: 30688454 NR Description: patatin-related [Arabidopsis thaliana]
  misc_feature (47)..(147): Homolog of NCBI NO: 30688454 NR Description: patatin-related [Arabidopsis thaliana]
  misc_feature (161)..(433): Homolog of NCBI NO: 30688454 NR Description: patatin-related [Arabidopsis thaliana]
  misc_feature (21)..(405): Homolog of NCBI NO: 34899642 NR Description: contains ESTs
  misc_feature (19)..(426): Homolog of NCBI NO: 34897124 NR Description: putative lipid acyl hydrolase [Oryza sativa]
MATMSASPMNLNMIDSNFEVDKLTYEIFSILENNFLFGYGDTENRTNSINFPPRDAKPAKHAAGKVRILCIDGAGATDGILAAKSLAHLEACLRRKSGDANARVADFFDAAAGSGVGGVLAALLFTRGKDGRPLCSAEGALRFLTDNRRRISRRAGLLRRVLRPAAKAEKLFRKTFGECTLKDTVKPVLIPCYDLVTRAAFVFSRADALEVDGYDFKMRDVCAATSADPSSAPTEMRSVDGRTRIMAVDGGVAMNNPTAAAITHVLNNKHEFPFCNGVSDLLVLSLGNGESDFNAVKSSSGFVRIAGEGASDMVDQAVSMAFGECRTSNYVRIQSNGIMANKSTEAKSCKTASDLFAMSEEMLAQKNVESILFRGKKVAENTNMDKLELFGGELIKEQERRKTSILATVVLKNNNASPSPSRTSSATTLSTLSSSS

SEQ ID NO: 60084 - protein, 433 aa, Glycine max
  peptide (1)..(433): Ceres Seq. ID no. 14316271
  misc_feature (66)..(259): Pfam Name: Patatin-like phospholipase Pfam Description: Patatin-like phospholipase
  misc_feature (9)..(418): Homolog of NCBI NO: 15233136 NR Description: patatin-related [Arabidopsis thaliana]
  misc_feature (4)..(38): Homolog of NCBI NO: 7486230 NR Description: hypothetical protein F27B13.40 - Arabidopsis
  misc_feature (44)..(144): Homolog of NCBI NO: 7486230 NR Description: hypothetical protein F27B13.40 - Arabidopsis
  misc_feature (158)..(420): Homolog of NCBI NO: 7486230 NR Description: hypothetical protein F27B13.40 - Arabidopsis
  misc_feature (57)..(411): Homolog of NCBI NO: 15225054 NR Description: patatin family [Arabidopsis thaliana]
  misc_feature (4)..(38): Homolog of NCBI NO: 30688454 NR Description: patatin-related [Arabidopsis thaliana]
  misc_feature (44)..(144): Homolog of NCBI NO: 30688454 NR Description: patatin-related [Arabidopsis thaliana]
  misc_feature (158)..(430): Homolog of NCBI NO: 30688454 NR Description: patatin-related [Arabidopsis thaliana]
  misc_feature (18)..(402): Homolog of NCBI NO: 34899642 NR Description: contains ESTs
  misc_feature (16)..(423): Homolog of NCBI NO: 34897124 NR Description: putative lipid acyl hydrolase [Oryza sativa]
MSASPMNLNMIDSNFEVDKLTYEIFSILENNFLFGYGDTENRTNSINFPPRDAKPAKHAAGKVRILCIDGAGATDGILAAKSLAHLEACLRRKSGDANARVADFFDAAAGSGVGGVLAALLFTRGKDGRPLCSAEGALRFLTDNRRRISRRAGLLRRVLRPAAKAEKLFRKTFGECTLKDTVKPVLIPCYDLVTRAAFVFSRADALEVDGYDFKMRDVCAATSADPSSAPTEMRSVDGRTRIMAVDGGVAMNNPTAAAITHVLNNKHEFPFCNGVSDLLVLSLGNGESDFNAVKSSSGFVRIAGEGASDMVDQAVSMAFGECRTSNYVRIQSNGIMANKSTEAKSCKTASDLFAMSEEMLAQKNVESILFRGKKVAENTNMDKLELFGGELIKEQERRKTSILATVVLKNNNASPSPSRTSSATTLSTLSSSS

SEQ ID NO: 60085 - protein, 428 aa, Glycine max
  peptide (1)..(428): Ceres Seq. ID no. 14316272
  misc_feature (61)..(254): Pfam Name: Patatin-like phospholipase Pfam Description: Patatin-like phospholipase
  misc_feature (4)..(413): Homolog of NCBI NO: 15233136 NR Description: patatin-related [Arabidopsis thaliana]
  misc_feature (1)..(33): Homolog of NCBI NO: 7486230 NR Description: hypothetical protein F27B13.40 - Arabidopsis
  misc_feature (39)..(139): Homolog of NCBI NO: 7486230 NR Description: hypothetical protein F27B13.40 - Arabidopsis
  misc_feature (153)..(415): Homolog of NCBI NO: 7486230 NR Description: hypothetical protein F27B13.40 - Arabidopsis
  misc_feature (52)..(406): Homolog of NCBI NO: 15225054 NR Description: patatin family [Arabidopsis thaliana]
  misc_feature (1)..(33): Homolog of NCBI NO: 30688454 NR Description: patatin-related [Arabidopsis thaliana]
  misc_feature (39)..(139): Homolog of NCBI NO: 30688454 NR Description: patatin-related [Arabidopsis thaliana]
  misc_feature (153)..(425): Homolog of NCBI NO: 30688454 NR Description: patatin-related [Arabidopsis thaliana]
  misc_feature (13)..(397): Homolog of NCBI NO: 34899642 NR Description: contains ESTs
  misc_feature (11)..(418): Homolog of NCBI NO: 34897124 NR Description: putative lipid acyl hydrolase [Oryza sativa]
MNLNMIDSNFEVDKLTYEIFSILENNFLFGYGDTENRTNSINFPPRDAKPAKHAAGKVRILCIDGAGATDGILAAKSLAHLEACLRRKSGDANARVADFFDAAAGSGVGGVLAALLFTRGKDGRPLCSAEGALRFLTDNRRRISRRAGLLRRVLRPAAKAEKLFRKTFGECTLKDTVKPVLIPCYDLVTRAAFVFSRADALEVDGYDFKMRDVCAATSADPSSAPTEMRSVDGRTRIMAVDGGVAMNNPTAAAITHVLNNKHEFPFCNGVSDLLVLSLGNGESDFNAVKSSSGFVRIAGEGASDMVDQAVSMAFGECRTSNYVRIQSNGIMANKSTEAKSCKTASDLFAMSEEMLAQKNVESILFRGKKVAENTNMDKLELFGGELIKEQERRKTSILATVVLKNNNASPSPSRTSSATTLSTLSSSS

SEQ ID NO: 60086 - DNA, 854 bp, Glycine max
  misc_feature (1)..(854): Ceres Seq. ID no. 14315878
tccctttggttcccgtatcagtatcaaagtccaggacgatgtcgtttgggtcctctctgttgtctcattcgcatgcccttcgattcttgtccaacaacaacagaaacagaacctcccgcttcaaagccactgccaaagttcccgatttcctctctgcagattggtttgaatcgcgcaagaaaataccctttggaccacgattagattttagtgcagaagatgcggtgcattaccagcttgaagccttgaagtataatgaccagcctcgtccagactatggaatcgaggttatgtacaggtttgctggatttgatccctttgaaaggtctccctattttggccctttctttgatttgggccagtttgaacggtttaggcgaatttttcaccattctacttatcgggtcttactaggtcacaaggagagaaagatcatgagcactttgttcgtcgaggagaacaaatacaagcagcgggtttggattcgtggaagtcgaccagaggaagaggagatatttcaacttacaatggtttagaaggttggaggatgctgggatggttactggttaacagagtctctgcttcacgatacggatacatttgccggtggattagcatattgaaagtcatctaatgcaggaatcaggctcgtgaggttccactgtcaaaagcatgaaatgatctgcattcctgcaactactatcctaatctgtaaaatttgtgtacatatgtaagaaattcagctgttaatatgtgtatataattggtcctcgctaatcaaatgtaaacattcttgtatattttgctgaatgttgcaggagctagcatactttaatgcttatgctcacatctgt

SEQ ID NO: 60087 - protein, 177 aa, Glycine max
  peptide (1)..(177): Ceres Seq. ID no. 14315879
  misc_feature (13)..(177): Homolog of NCBI NO: 30682820 NR Description: expressed protein [Arabidopsis thaliana]
PLVPVSVSKSRTMSFGSSLLSHSHALRFLSNNNRNRTSRFKATAKVPDFLSADWFESRKKIPFGPRLDFSAEDAVHYQLEALKYNDQPRPDYGIEVMYRFAGFDPFERSPYFGPFFDLGQFERFRRIFHHSTYRVLLGHKERKIMSTLFVEENKYKQRVWIRGSRPEEEEIFQLTMV

SEQ ID NO: 60088 - protein, 165 aa, Glycine max
  peptide (1)..(165): Ceres Seq. ID no. 14315880
  misc_feature (1)..(165): Homolog of NCBI NO: 30682820 NR Description: expressed protein [Arabidopsis thaliana]
MSFGSSLLSHSHALRFLSNNNRNRTSRFKATAKVPDFLSADWFESRKKIPFGPRLDFSAEDAVHYQLEALKYNDQPRPDYGIEVMYRFAGFDPFERSPYFGPFFDLGQFERFRRIFHHSTYRVLLGHKERKIMSTLFVEENKYKQRVWIRGSRPEEEEIFQLTMV

SEQ ID NO: 60089 - DNA, 1045 bp, Glycine max
  misc_feature (1)..(1045): Ceres Seq. ID no. 14305540
agtctctgaatctgaaattgcaatgcttcacccggcggcactgatagcatcgtgtccttatccttatccttatcctgggcggcatgagttaccctcagcctcagcgtcagcgacagccagagtcgctgttccaatgccaaatctgagaggcaaagcggttgttggtgttggttccagaatgataaggtgcatggctaaccccagaagagttcaaatggtggccaagcaaattaggagagagctttctcatatgcttctcaccgataaagtcttgcagtatgctgttcttcccgaagcctccttaggagccgaccgttacctctcttctctcaccaccatcaccgacgtccaagtctccgccgacttgcaggttgttaaggtgtatgtttctgtttttggagatgaaagaggtaaagaagtcgccattgccggcttgaaatctaaggctaaatatgttcgcagcgagttgggcaagcgtatcaagttgcgcttaactcctgagatacgctttcttgaggatgattcttttgagagaggaagcagggtcattgcaatactagataaaataaagaatgacaaaagccaatacaaggcggagttggattcgtcaccaaatgaggatcacgacgatgattgggatggtgaagatcctgaagaaggcatcatttatgtggaatagatgtctccctatgtaactctatcactactgtgcatctttcatatggacaaacctttcactgttgatagtgatcggaaacacttcactaaaatgcttgctggacagacgctgttctagatttgtagttgtgacaagtcacaattgacaacattatctcaacacaaagaccttcttgcgttgtctatccccaagtgatgtgatgtagaccaattttggggttttctctccttttatatgccttaacccaggatcttactatacaagagggtttgctgtataaagttcttttcctgctttacttattcctgtaagtggaatttataatgtttactattgctatgctattcgaattcggctgtcttcaac

SEQ ID NO: 60090 - protein, 225 aa, Glycine max
  peptide (1)..(225): Ceres Seq. ID no. 14305541
  misc_feature (69)..(189): Pfam Name: Ribosome-binding factor A Pfam Description: Ribosome-binding factor A
  misc_feature (112)..(193): Homolog of NCBI NO: 16078728 NR Description: ribosome-binding factor A [Bacillus subtilis]
  misc_feature (104)..(193): Homolog of NCBI NO: 28210962 NR Description: ribosome-binding factor A [Clostridium tetani
  misc_feature (64)..(203): Homolog of NCBI NO: 16331339 NR Description: hypothetical protein [Synechocystis sp. PCC 6803]
  misc_feature (64)..(194): Homolog of NCBI NO: 22299172 NR Description: ribosome binding factor A [Thermosynechococcus
  misc_feature (64)..(210): Homolog of NCBI NO: 23039367 NR Description: hypothetical protein [Trichodesmium erythraeum
  misc_feature (64)..(207): Homolog of NCBI NO: 17227559 NR Description: ribosome binding facror A [Nostoc sp. PCC 7120]
  misc_feature (64)..(211): Homolog of NCBI NO: 23127176 NR Description: hypothetical protein [Nostoc punctiforme]
  misc_feature (81)..(225): Homolog of NCBI NO: 3914555 NR Description: Putative ribosome-binding factor A, chloroplast
  misc_feature (59)..(218): Homolog of NCBI NO: 3914555 NR Description: Putative ribosome-binding factor A, chloroplast
  misc_feature (59)..(225): Homolog of NCBI NO: 30690114 NR Description: expressed protein [Arabidopsis thaliana]
VSESEIAMLHPAALIASCPYPYPYPGRHELPSASASATARVAVPMPNLRGKAVVGVGSRMIRCMANPRRVQMVAKQIRRELSHMLLTDKVLQYAVLPEASLGADRYLSSLTTITDVQVSADLQVVKVYVSVFGDERGKEVAIAGLKSKAKYVRSELGKRIKLRLTPEIRFLEDDSFERGSRVIAILDKIKNDKSQYKAELDSSPNEDHDDDWDGEDPEEGIIYVE

SEQ ID NO: 60091 - protein, 218 aa, Glycine max
  peptide (1)..(218): Ceres Seq. ID no. 14305542
  misc_feature (62)..(182): Pfam Name: Ribosome-binding factor A Pfam Description: Ribosome-binding factor A
  misc_feature (105)..(186): Homolog of NCBI NO: 16078728 NR Description: ribosome-binding factor A [Bacillus subtilis]
  misc_feature (97)..(186): Homolog of NCBI NO: 28210962 NR Description: ribosome-binding factor A [Clostridium tetani
  misc_feature (57)..(196): Homolog of NCBI NO: 16331339 NR Description: hypothetical protein [Synechocystis sp. PCC 6803]
  misc_feature (57)..(187): Homolog of NCBI NO: 22299172 NR Description: ribosome binding factor A [Thermosynechococcus
  misc_feature (57)..(203): Homolog of NCBI NO: 23039367 NR Description: hypothetical protein [Trichodesmium erythraeum
  misc_feature (57)..(200): Homolog of NCBI NO: 17227559 NR Description: ribosome binding facror A [Nostoc sp. PCC 7120]
  misc_feature (57)..(204): Homolog of NCBI NO: 23127176 NR Description: hypothetical protein [Nostoc punctiforme]
  misc_feature (74)..(218): Homolog of NCBI NO: 3914555 NR Description: Putative ribosome-binding factor A, chloroplast
  misc_feature (52)..(211): Homolog of NCBI NO: 3914555 NR Description: Putative ribosome-binding factor A, chloroplast
  misc_feature (52)..(218): Homolog of NCBI NO: 30690114 NR Description: expressed protein [Arabidopsis thaliana]
MLHPAALIASCPYPYPYPGRHELPSASASATARVAVPMPNLRGKAVVGVGSRMIRCMANPRRVQMVAKQIRRELSHMLLTDKVLQYAVLPEASLGADRYLSSLTTITDVQVSADLQVVKVYVSVFGDERGKEVAIAGLKSKAKYVRSELGKRIKLRLTPEIRFLEDDSFERGSRVIAILDKIKNDKSQYKAELDSSPNEDHDDDWDGEDPEEGIIYVE

SEQ ID NO: 60092 - protein, 181 aa, Glycine max
  peptide (1)..(181): Ceres Seq. ID no. 14305543
  misc_feature (25)..(145): Pfam Name: Ribosome-binding factor A Pfam Description: Ribosome-binding factor A
  misc_feature (68)..(149): Homolog of NCBI NO: 16078728 NR Description: ribosome-binding factor A [Bacillus subtilis]
  misc_feature (60)..(149): Homolog of NCBI NO: 28210962 NR Description: ribosome-binding factor A [Clostridium tetani
  misc_feature (20)..(159): Homolog of NCBI NO: 16331339 NR Description: hypothetical protein [Synechocystis sp. PCC 6803]
  misc_feature (20)..(150): Homolog of NCBI NO: 22299172 NR Description: ribosome binding factor A [Thermosynechococcus
  misc_feature (20)..(166): Homolog of NCBI NO: 23039367 NR Description: hypothetical protein [Trichodesmium erythraeum
  misc_feature (20)..(163): Homolog of NCBI NO: 17227559 NR Description: ribosome binding facror A [Nostoc sp. PCC 7120]
  misc_feature (20)..(167): Homolog of NCBI NO: 23127176 NR Description: hypothetical protein [Nostoc punctiforme]
  misc_feature (37)..(181): Homolog of NCBI NO: 3914555 NR Description: Putative ribosome-binding factor A, chloroplast
  misc_feature (15)..(174): Homolog of NCBI NO: 3914555 NR Description: Putative ribosome-binding factor A, chloroplast
  misc_feature (15)..(181): Homolog of NCBI NO: 30690114 NR Description: expressed protein [Arabidopsis thaliana]
MPNLRGKAVVGVGSRMIRCMANPRRVQMVAKQIRRELSHMLLTDKVLQYAVLPEASLGADRYLSSLTTITDVQVSADLQVVKVYVSVFGDERGKEVAIAGLKSKAKYVRSELGKRIKLRLTPEIRFLEDDSFERGSRVIAILDKIKNDKSQYKAELDSSPNEDHDDDWDGEDPEEGIIYVE

SEQ ID NO: 60093 - DNA, 1239 bp, Glycine max
  misc_feature (1)..(1239): Ceres Seq. ID no. 15171139
atgcacacacatatcagcataagaacaaatgatcatgaagtgaagtgaagtgaagtgtatataaaatactttggaagtgtcgtgaagagccaataacggttttttgtgtgtttctttctctctcatgttgtagtatctcacttgtgtttttcattcgtttctgaaccacacaaacatcaccaccgaacaatgccgacggggttaccggcggcgaattccttagtggcgccggacgaagaggggtgggtgtgggggcagatcaaggcggaggcgcgccgcgacgccgagtcggagcctgctttggcgagctacctctactcgacgatcctctcgcactcgtcgctcgagcgttctctgtcttttcacctcggaaataagctctgttcctccacgcttctctcgacgctcctttacgacctgttcctcaacgccttctcctccgacccctccctccgctccgccgccgtcgccgatctccgcgctgcccgcgaacgcgaccccgcctgcgtctcctactcccactgcctcctcaattacaaaggcttcctcgcttgccaggcgcaccgtgtggcgcatctgttgtggcggcaatcacggcggccgttggctttagcgctgcactctcgcatcgcagatgtgtttgcggtggacattcacccggcggcaaggattgggaaggggattctgttcgaccatgccactggggtggtggtaggggagacagcggtaatcgggaacaatgtgtcgatcctgcaccatgttactctgggtgggactggcaaggttggtggagaccggcatcctaagattggggatggggtgcttattggtgctggtgctaccattctggggaatattaagattggggaaggtgcaaaggttggtgctggttcagtggttttaattgatgtgccaccacggacaacagcagttgggaacccggcgaggttggttggtgggaaggagaagccctctaagcatgaggatgtgcctggggagtctatggaccatacttcctttatctctgagtggtcagattatatcatttgaatttctaaggttaatcaattaatgaatgaatacttcaaatcaaatgctatgtgttctgctgttctagagttttgtaattttatatttggattgagattttgtagagaccacactctgcttaattatactgtattatgactggaaattttggcagcctgcaatatagtgacatattgtgcaacagattat

SEQ ID NO: 60094 - protein, 286 aa, Glycine max
  peptide (1)..(286): Ceres Seq. ID no. 15171140
MPTGLPAANSLVAPDEEGWVWGQIKAEARRDAESEPALASYLYSTILSHSSLERSLSFHLGNKLCSSTLLSTLLYDLFLNAFSSDPSLRSAAVADLRAARERDPACVSYSHCLLNYKGFLACQAHRVAHLLWRQSRRPLALALHSRIADVFAVDIHPAARIGKGILFDHATGVVVGETAVIGNNVSILHHVTLGGTGKVGGDRHPKIGDGVLIGAGATILGNIKIGEGAKVGAGSVVLIDVPPRTTAVGNPARLVGGKEKPSKHEDVPGESMDHTSFISEWSDYII

SEQ ID NO: 60095 - DNA, 1730 bp, Glycine max
  misc_feature (1)..(1730): Ceres Seq. ID no. 15168502
cttcttggtcttcttctcttaatcctctccaccacattcgaagggaacgttacaaaaaaatcaccattttttctcattgttaatcaagttaagataagatcattcctctctatcaacaaacctttattgtgtatatatatatatattcccacaattcacatcactcttgtccttcactcattcactctatatatccacttcatataatttcctccacattgtgcaccgttcatggtgatggcaaaactaaagcacccttcattggtggcacttcttctagtactagcgtgtctttttattgctccaacatcctcaacatccagaaaaacaagtttcaagcagcagcacccttgcccaacaacaaatgggttccgagtcatgcttcgccacgtcgattcgggaaaaaacttaaccaaactagagcgtgtccaacacgggatcaagcgtggaaagagcaggcttcagaagcttaatgcaatggtgttggcagcatcatcaacacctgattctgaagatcagttagaagcccctattcacgcaggaaatggagagtacttaatagagttagccattggaacaccaccagtgtcttaccctgcggttttggacactggcagtgaccttatatggacacagtgcaagccttgcacacggtgttacaaacaaccaacacccatttttgatcccaagaagtcctcttctttttccaaggtttcatgcggtagtagcttgtgcagtgctttgccttcttcaacatgcagtgatgggtgtgagtatgtttattcatacggtgattattcaatgacacaaggcgttttggctaccgagactttcacttttgggaagtctaagaacaaggtttccgttcacaacattggttttggttgtggggaggacaatgaaggtgatggatttgaacaagcttcagggctggttggtcttggacgtggtcctttgtctttggtttctcaactcaaggaacaaagattttcttattgtttgaccccaattgatgacacaaaagaaagtgttttgttgttggggtctttgggtaaagtgaaagatgcaaaagaagtggtgacaacacctcttctcaaaaaccctttgcaaccttctttttactatctttctcttgaagctatctctgttggggacactcgattgtccattgagaagtccacttttgaagtgggggatgatgggaatggtggtgtgatcatagactctggcaccacaatcacctacgttcaacaaaaggcctatgaggcactcaaaaaagagttcatttctcaaaccaaacttgctttggacaaaactagctcaacagggttggatctttgtttctccttgccatcagggtcaacacaagtggagattccaaagcttgttttccatttcaagggtggggatttggagcttcctgctgagaactacatgattggtgactccaatttgggagtggcttgtttggccatgggtgcttctagtggaatgtctatatttggaaatgttcaacagcagaacattttggtgaaccatgatcttgaaaaggagaccatttcttttgttcctacgtcgtgtgatcagttgtgagagtgtgtgatatatttactgattagtgtatgtttttattgctttgtttgtttgataattttctgttgccggacttgtgttgttatgattgaatctcttagttgttgcaataatatgaacatttttattctctgttc

SEQ ID NO: 60096 - protein, 453 aa, Glycine max
  peptide (1)..(453): Ceres Seq. ID no. 15168503
  misc_feature (110)..(448): Pfam Name: Eukaryotic aspartyl protease Pfam Description: Eukaryotic aspartyl protease
  misc_feature (104)..(450): Homolog of NCBI NO: 19424106 NR Description: putative chloroplast nucleoid DNA-binding protein
  misc_feature (104)..(450): Homolog of NCBI NO: 15229656 NR Description: chloroplast nucleoid DNA-binding protein -related
  misc_feature (73)..(450): Homolog of NCBI NO: 34895664 NR Description: nucleoid DNA-binding protein cnd41-like protein
  misc_feature (48)..(450): Homolog of NCBI NO: 15222611 NR Description: expressed protein [Arabidopsis thaliana]
  misc_feature (16)..(450): Homolog of NCBI NO: 15228618 NR Description: expressed protein [Arabidopsis thaliana]
  misc_feature (46)..(453): Homolog of NCBI NO: 34898762 NR Description: OJ1131_E05.5 [Oryza sativa (japonica
  misc_feature (44)..(453): Homolog of NCBI NO: 34898756 NR Description: OJ1131_E05.2 [Oryza sativa (japonica
  misc_feature (46)..(453): Homolog of NCBI NO: 38344829 NR Description: OSJNBa0064H22.10 [Oryza sativa (japonica
  misc_feature (110)..(453): Homolog of NCBI NO: 20197342 NR Description: putative chloroplast nucleoid DNA binding protein
  misc_feature (3)..(453): Homolog of NCBI NO: 30678047 NR Description: chloroplast nucleoid DNA binding protein -related
MVMAKLKHPSLVALLLVLACLFIAPTSSTSRKTSFKQQHPCPTTNGFRVMLRHVDSGKNLTKLERVQHGIKRGKSRLQKLNAMVLAASSTPDSEDQLEAPIHAGNGEYLIELAIGTPPVSYPAVLDTGSDLIWTQCKPCTRCYKQPTPIFDPKKSSSFSKVSCGSSLCSALPSSTCSDGCEYVYSYGDYSMTQGVLATETFTFGKSKNKVSVHNIGFGCGEDNEGDGFEQASGLVGLGRGPLSLVSQLKEQRFSYCLTPIDDTKESVLLLGSLGKVKDAKEVVTTPLLKNPLQPSFYYLSLEAISVGDTRLSIEKSTFEVGDDGNGGVIIDSGTTITYVQQKAYEALKKEFISQTKLALDKTSSTGLDLCFSLPSGSTQVEIPKLVFHFKGGDLELPAENYMIGDSNLGVACLAMGASSGMSIFGNVQQQNILVNHDLEKETISFVPTSCDQL

SEQ ID NO: 60097 - protein, 451 aa, Glycine max
  peptide (1)..(451): Ceres Seq. ID no. 15168504
  misc_feature (108)..(446): Pfam Name: Eukaryotic aspartyl protease Pfam Description: Eukaryotic aspartyl protease
  misc_feature (102)..(448): Homolog of NCBI NO: 19424106 NR Description: putative chloroplast nucleoid DNA-binding protein
  misc_feature (102)..(448): Homolog of NCBI NO: 15229656 NR Description: chloroplast nucleoid DNA-binding protein -related
  misc_feature (71)..(448): Homolog of NCBI NO: 34895664 NR Description: nucleoid DNA-binding protein cnd41-like protein
  misc_feature (46)..(448): Homolog of NCBI NO: 15222611 NR Description: expressed protein [Arabidopsis thaliana]
  misc_feature (14)..(448): Homolog of NCBI NO: 15228618 NR Description: expressed protein [Arabidopsis thaliana]
  misc_feature (44)..(451): Homolog of NCBI NO: 34898762 NR Description: OJ1131_E05.5 [Oryza sativa (japonica
  misc_feature (42)..(451): Homolog of NCBI NO: 34898756 NR Description: OJ1131_E05.2 [Oryza sativa (japonica
  misc_feature (44)..(451): Homolog of NCBI NO: 38344829 NR Description: OSJNBa0064H22.10 [Oryza sativa (japonica
  misc_feature (108)..(451): Homolog of NCBI NO: 20197342 NR Description: putative chloroplast nucleoid DNA binding protein
  misc_feature (1)..(451): Homolog of NCBI NO: 30678047 NR Description: chloroplast nucleoid DNA binding protein -related
MAKLKHPSLVALLLVLACLFIAPTSSTSRKTSFKQQHPCPTTNGFRVMLRHVDSGKNLTKLERVQHGIKRGKSRLQKLNAMVLAASSTPDSEDQLEAPIHAGNGEYLIELAIGTPPVSYPAVLDTGSDLIWTQCKPCTRCYKQPTPIFDPKKSSSFSKVSCGSSLCSALPSSTCSDGCEYVYSYGDYSMTQGVLATETFTFGKSKNKVSVHNIGFGCGEDNEGDGFEQASGLVGLGRGPLSLVSQLKEQRFSYCLTPIDDTKESVLLLGSLGKVKDAKEVVTTPLLKNPLQPSFYYLSLEAISVGDTRLSIEKSTFEVGDDGNGGVIIDSGTTITYVQQKAYEALKKEFISQTKLALDKTSSTGLDLCFSLPSGSTQVEIPKLVFHFKGGDLELPAENYMIGDSNLGVACLAMGASSGMSIFGNVQQQNILVNHDLEKETISFVPTSCDQL

SEQ ID NO: 60098 - protein, 404 aa, Glycine max
  peptide (1)..(404): Ceres Seq. ID no. 15168505
  misc_feature (61)..(399): Pfam Name: Eukaryotic aspartyl protease Pfam Description: Eukaryotic aspartyl protease
  misc_feature (55)..(401): Homolog of NCBI NO: 19424106 NR Description: putative chloroplast nucleoid DNA-binding protein
  misc_feature (55)..(401): Homolog of NCBI NO: 15229656 NR Description: chloroplast nucleoid DNA-binding protein -related
  misc_feature (24)..(401): Homolog of NCBI NO: 34895664 NR Description: nucleoid DNA-binding protein cnd41-like protein
  misc_feature (1)..(401): Homolog of NCBI NO: 15222611 NR Description: expressed protein [Arabidopsis thaliana]
  misc_feature (1)..(401): Homolog of NCBI NO: 15228618 NR Description: expressed protein [Arabidopsis thaliana]
  misc_feature (1)..(404): Homolog of NCBI NO: 34898762 NR Description: OJ1131_E05.5 [Oryza sativa (japonica
  misc_feature (1)..(404): Homolog of NCBI NO: 34898756 NR Description: OJ1131_E05.2 [Oryza sativa (japonica
  misc_feature (1)..(404): Homolog of NCBI NO: 38344829 NR Description: OSJNBa0064H22.10 [Oryza sativa (japonica
  misc_feature (61)..(404): Homolog of NCBI NO: 20197342 NR Description: putative chloroplast nucleoid DNA binding protein
  misc_feature (1)..(404): Homolog of NCBI NO: 30678047 NR Description: chloroplast nucleoid DNA binding protein -related
MLRHVDSGKNLTKLERVQHGIKRGKSRLQKLNAMVLAASSTPDSEDQLEAPIHAGNGEYLIELAIGTPPVSYPAVLDTGSDLIWTQCKPCTRCYKQPTPIFDPKKSSSFSKVSCGSSLCSALPSSTCSDGCEYVYSYGDYSMTQGVLATETFTFGKSKNKVSVHNIGFGCGEDNEGDGFEQASGLVGLGRGPLSLVSQLKEQRFSYCLTPIDDTKESVLLLGSLGKVKDAKEVVTTPLLKNPLQPSFYYLSLEAISVGDTRLSIEKSTFEVGDDGNGGVIIDSGTTITYVQQKAYEALKKEFISQTKLALDKTSSTGLDLCFSLPSGSTQVEIPKLVFHFKGGDLELPAENYMIGDSNLGVACLAMGASSGMSIFGNVQQQNILVNHDLEKETISFVPTSCDQL

SEQ ID NO: 60099 - DNA, 983 bp, Glycine max
  misc_feature (1)..(983): Ceres Seq. ID no. 15168530
actttgggatttaaatacttttccatatgggtacttcgaaagttctcagcattgttttcttcgtgctattgggcgtaggcatatgctccgctgcaagaacactcctcaccattggtggaggtgtgcatggtgagataggtgttggtgttggtgtaggaggttatggtggtggtggaggttcaggtggaggtggaggatatggaggcgcgggagggcatggtgtaggtagtgacgaaggttcaaccactccaacgataaccgaatgctacgagccgagcgaggcgagcatcgagtggagcgtgaccaccgcggagggacacgacgacgccgtttccaacggcgtcgtcgtcgaagaaaagtggaagcggaaaggtggaaacggtttgttggtgagctgtcggagccagaaggcggttagcgtggggccgcaaccggtgaaatgtggatcagagggacaaagaaatgccacgtcatcgttatcatcacatgtgaacgtgattgggagtgtaaataagccaccacttgctcatgctaggggtcaccgcaacgcacctcgcgtgtcgcttgctttcgcgacatagccatttgcgttgcgcgcgcgcgcattcatgcaccttctcttcttctctcccaaacaaacaagaccccgagaataacgtccgcgcgcgctttttccgttttgtttgttccttcctccgttttgaattattctgtcgccttttgttttcctgttccatttatatatatccgttggggtcacgttcttttctggatagaatgtcgttgtttatgagatatgatgtttttttttttatgttgcaaacaattttaatttgagagttatgcttataaagtgtaaacagccattccttgaactaccataggtgatttgtgattgatcagatgattatctaagatccttgtattataagtagataattttttctctctcggctaaaatataattttcatttcattccact

SEQ ID NO: 60100 - protein, 184 aa, Glycine max
  peptide (1)..(184): Ceres Seq. ID no. 15168531
  misc_feature (1)..(71): Homolog of NCBI NO: 30695026 NR Description: glycine-rich protein [Arabidopsis thaliana]
  misc_feature (1)..(71): Homolog of NCBI NO: 9758509 NR Description: gene_id:MZA15.15~unknown protein [Arabidopsis
  misc_feature (8)..(72): Homolog of NCBI NO: 121632 NR Description: GLYCINE-RICH CELL WALL STRUCTURAL PROTEIN 1.8
  misc_feature (1)..(71): Homolog of NCBI NO: 37534900 NR Description: putative glycine-rich protein
  misc_feature (1)..(71): Homolog of NCBI NO: 232183 NR Description: Glycine-rich cell wall structural protein 2
  misc_feature (1)..(71): Homolog of NCBI NO: 37534902 NR Description: putative glycine-rich protein
  misc_feature (1)..(71): Homolog of NCBI NO: 24417424 NR Description: unknown [Arabidopsis thaliana]
  misc_feature (1)..(72): Homolog of NCBI NO: 15228967 NR Description: glycine-rich protein [Arabidopsis thaliana]
  misc_feature (1)..(71): Homolog of NCBI NO: 32479346 NR Description: glycine-rich protein TomR2 [Lycopersicon
  misc_feature (1)..(72): Homolog of NCBI NO: 121628 NR Description: GLYCINE-RICH CELL WALL STRUCTURAL PROTEIN 1.0
MGTSKVLSIVFFVLLGVGICSAARTLLTIGGGVHGEIGVGVGVGGYGGGGGSGGGGGYGGAGGHGVGSDEGSTTPTITECYEPSEASIEWSVTTAEGHDDAVSNGVVVEEKWKRKGGNGLLVSCRSQKAVSVGPQPVKCGSEGQRNATSSLSSHVNVIGSVNKPPLAHARGHRNAPRVSLAFAT

SEQ ID NO: 60101 - protein, 102 aa, Glycine max
  peptide (1)..(102): Ceres Seq. ID no. 15168532
MLGVTATHLACRLLSRHSHLRCARAHSCTFSSSLPNKQDPENNVRARFFRFVCSFLRFELFCRLLFSCSIYIYPLGSRSFLDRMSLFMRYDVFFFMLQTILI

SEQ ID NO: 60102 - DNA, 1435 bp, Glycine max
  misc_feature (1)..(1435): Ceres Seq. ID no. 13528157
aaacaacagaagcagcaggttcaaacttcaattcatggaagtgtgattctaatctccacaacaaacctaaccctaaaaagctaacccttttttttttttttttaaatattgnttctttttttacttaccctanatgttagagccatggacataaccccaacaacaacgatcaacaacaacaacactactcccagtgcaacaacaaaatccccagaaaatgaaacagaaacaccgaccaggatcaccacccccatcactcccacaacgacaaaaacctcatctttctcgaatggtgtcctcaaacgcacccaccaccaccaccacctccaccaccctatccctccggtggttacctacaaagaatgcctcaaaaatcacgccgccaacttgggtggccacgccttagatggctgcggcgagttcatgccctctccgaccgccaccgctgccgaccccagctccataaaatgcgccgcctgcggctgccaccgcaacttccaccgccgcgagccggaggagccccccatcgcctccaccaccacgcacgtcatcgagtatcagccccaccaccgccaccaccctcccccgccgctgcacgcggcggcggtagccacccgcagccccaattctgcttccccaccgccgatctcctcgtcgtactacccctccgcgccgcacatgctcctcgccctctccgccggactggcggctccgccggagagcaccgccgcgcctgccgccgcgcccacgagaaagcggttccgcacgaagttcagccaagagcagaaggagaagatgcacaagttcgcggagaaagtagggtggaagattcagaagcgcgacgaggatttgattcacgaaatttgcaacgaagttggcgttgatagaagcgttctcaaggtttggatgcataacaacaaaaacacctttgccaaaaaggataacaataatattgttactagtaatgatattaatattactactaaaaataatatttctactgataatgatgcaaatgggagtgatgtcaaggtttttgaaaaccctaacaatgatggtggtgaagatcgcgctgaagatccgagtagtaatcnctatgatggggtgaacgttgttggtgctaatggatcttctagttcttgatctaagggggaagaaaataataatgtattagataggttaatgatgattatgatgatgatgatgatgctacaaggttaattaatcagctgtttttaatttcttttcttttcttttttttgtttttaattgtttagtttttatattgttaatgagagcatgatgatcaatcagtttaatgggagagaatgttatatccggaagagaatttattttgcttttaatggttttatgctgaattaagttagcttttagttgttaccncttgttatgaatgtatattatgtttatcttt

SEQ ID NO: 60103 - protein, 332 aa, Glycine max
  peptide (1)..(332): Ceres Seq. ID no. 13528158
  misc_feature (69)..(125): Pfam Name: ZF-HD protein dimerisation region Pfam Description: ZF-HD protein dimerisation region
  misc_feature (2)..(288): Homolog of NCBI NO: 20148768 NR Description: hypothetical protein At2g02540/T822.16
  misc_feature (2)..(291): Homolog of NCBI NO: 15226993 NR Description: expressed protein [Arabidopsis thaliana]
  misc_feature (69)..(293): Homolog of NCBI NO: 15222382 NR Description: hypothetical protein [Arabidopsis thaliana]
  misc_feature (1)..(332): Homolog of NCBI NO: 13277220 NR Description: ZF-HD homeobox protein [Flaveria bidentis]
  misc_feature (39)..(292): Homolog of NCBI NO: 13277216 NR Description: ZF-HD homeobox protein [Flaveria trinervia]
  misc_feature (58)..(292): Homolog of NCBI NO: 13277218 NR Description: ZF-HD homeobox protein [Flaveria bidentis]
  misc_feature (1)..(271): Homolog of NCBI NO: 15242243 NR Description: expressed protein [Arabidopsis thaliana]
  misc_feature (1)..(332): Homolog of NCBI NO: 21592512 NR Description: unknown [Arabidopsis thaliana]
  misc_feature (1)..(332): Homolog of NCBI NO: 18421904 NR Description: expressed protein [Arabidopsis thaliana]
  misc_feature (19)..(331): Homolog of NCBI NO: 15228530 NR Description: expressed protein [Arabidopsis thaliana]
  misc_feature (317)..(317): Xaa is any aa, unknown or other
MDITPTTTINNNNTTPSATTKSPENETETPTRITTPITPTTTKTSSFSNGVLKRTHHHHHLHHPIPPVVTYKECLKNHAANLGGHALDGCGEFMPSPTATAADPSSIKCAACGCHRNFHRREPEEPPIASTTTHVIEYQPHHRHHPPPPLHAAAVATRSPNSASPPPISSSYYPSAPHMLLALSAGLAAPPESTAAPAAAPTRKRFRTKFSQEQKEKMHKFAEKVGWKIQKRDEDLIHEICNEVGVDRSVLKVWMHNNKNTFAKKDNNNIVTSNDINITTKNNISTDNDANGSDVKVFENPNNDGGEDRAEDPSSNXYDGVNVVGANGSSSS

SEQ ID NO: 60104 - protein, 239 aa, Glycine max
  peptide (1)..(239): Ceres Seq. ID no. 13528159
  misc_feature (1)..(195): Homolog of NCBI NO: 20148768 NR Description: hypothetical protein At2g02540/T822.16
  misc_feature (1)..(198): Homolog of NCBI NO: 15226993 NR Description: expressed protein [Arabidopsis thaliana]
  misc_feature (1)..(200): Homolog of NCBI NO: 15222382 NR Description: hypothetical protein [Arabidopsis thaliana]
  misc_feature (1)..(239): Homolog of NCBI NO: 13277220 NR Description: ZF-HD homeobox protein [Flaveria bidentis]
  misc_feature (1)..(199): Homolog of NCBI NO: 13277216 NR Description: ZF-HD homeobox protein [Flaveria trinervia]
  misc_feature (1)..(199): Homolog of NCBI NO: 13277218 NR Description: ZF-HD homeobox protein [Flaveria bidentis]
  misc_feature (1)..(178): Homolog of NCBI NO: 15242243 NR Description: expressed protein [Arabidopsis thaliana]
  misc_feature (1)..(239): Homolog of NCBI NO: 21592512 NR Description: unknown [Arabidopsis thaliana]
  misc_feature (1)..(239): Homolog of NCBI NO: 18421904 NR Description: expressed protein [Arabidopsis thaliana]
  misc_feature (1)..(238): Homolog of NCBI NO: 15228530 NR Description: expressed protein [Arabidopsis thaliana]
  misc_feature (224)..(224): Xaa is any aa, unknown or other
MPSPTATAADPSSIKCAACGCHRNFHRREPEEPPIASTTTHVIEYQPHHRHHPPPPLHAAAVATRSPNSASPPPISSSYYPSAPHMLLALSAGLAAPPESTAAPAAAPTRKRFRTKFSQEQKEKMHKFAEKVGWKIQKRDEDLIHEICNEVGVDRSVLKVWMHNNKNTFAKKDNNNIVTSNDINITTKNNISTDNDANGSDVKVFENPNNDGGEDRAEDPSSNXYDGVNVVGANGSSSS

SEQ ID NO: 60105 - protein, 173 aa, Glycine max
  peptide (1)..(173): Ceres Seq. ID no. 13528160
MPQKSRRQLGWPRLRWLRRVHALSDRHRCRPQLHKMRRLRLPPQLPPPRAGGAPHRLHHHARHRVSAPPPPPPSPAAARGGGSHPQPQFCFPTADLLVVLPLRAAHAPRPLRRTGGSAGEHRRACRRAHEKAVPHEVQPRAEGEDAQVRGESRVEDSEARRGFDSRNLQRSWR

SEQ ID NO: 60106 - DNA, 1590 bp, Glycine max
  misc_feature (1)..(1590): Ceres Seq. ID no. 15171614
aattcaatcattagtttcatttcataattcccatctcatggccatctcaaacaataatcatcatgctcttctacttgcttcaccaggaatgggtcacataatccctgccctagaacttgccaagcgtttagtcactcacaaaatcatttccaaactcaccttcttttgtggttcaatcaaaacctctactccatcaaaagctgagacacaaattctccaatcagccataaaggaaaaccttttcgatctaattcaactcccccccattgatctcaccatccatgttagtcctcgtgacaccttagaaaccaaaatagcaattataatgcatgaaatcccactactttttgtgtccacaatatccagcatgaacctcaacccaaccatgatcatcactgacttcttcttcagccaagttatacctctagccaaaaacctaaacctacccacatttgcttttgcaccaaccaatgcatggctcgtcgcacttggtcttcacacccccactttggataaagaaatagaaggagaatatatcaatgaaagcaaaccgatctcaatcccaggttgcaaatccattcacccccttgatatgtttggtatgttgcgtgacaggacacaaaggatctaccatgaatatgttggcgcgtgtgaaggggcagcacttgctgatgggatctttgtgaacacgtttcatgagttggagccaaagacacttgaagcacttggtagtggacacattattaccaaggtgcccgtgtacccggttgggcctattgtaagggatcaaagaagccctaatggtagcaatgaggggaaaataggtgatgtttttgggtggctggacaaacaagaagaagagtcagtggtgtatgtgtcacttgggagtggatacacaatgtcatttgaggaaattaaagagatggctttggggttggagctgagtggaaaaaaatttgtttggtctgtgcgcccacctgccaccaaatctggcactggcaactatctcacagcaggtgaggaaggagaaaccagaactatccttgggtctaataatgaaccatcaaactcttttcctgatgagttctaccgcatacaaaccaatggaattgtgatcacagattgggcaccacaattggatattttgaagcacccatcttttggtggttttgtgtctcattgtgggtggaactcattaatggagagtgtttcatgtggggtgccaataattggattgcctctttatgcagagcaaatgatgaatgctgcgatgctaatggaggaagttggcaatgcaattcgagtagaggtgtcaccatctaccaacatggttggaagggaggagttatcaaaagcaataaggaagataatggataaggatgacaaagaagggtgtgtaatgagggaaagggctaaagagcttaagcacatagcagaaagagcttggtttcatgatggtccttcttatttagcactttcaaaaatcactcactcaaatagggtgtgataactcatttatggtggttaaaataagtactcactttggtacaagaaaattctattctagaataaacaatcattattattgtc

SEQ ID NO: 60107 - protein, 501 aa, Glycine max
  peptide (1)..(501): Ceres Seq. ID no. 15171615
  misc_feature (21)..(495): Pfam Name: UDP-glucoronosyl and UDP-glucosyl transferase Pfam Description: UDP-glucoronosyl and UDP-glucosyl transferase
  misc_feature (109)..(492): Homolog of NCBI NO: 30680413 NR Description: UDP-glucosyltransferase family [Arabidopsis
  misc_feature (24)..(496): Homolog of NCBI NO: 21553566 NR Description: UTP-glucose glucosyltransferase [Arabidopsis
  misc_feature (21)..(496): Homolog of NCBI NO: 15240051 NR Description: UDP-glycosyltransferase family [Arabidopsis
  misc_feature (21)..(496): Homolog of NCBI NO: 15240305 NR Description: UDP-glycosyltransferase family [Arabidopsis
  misc_feature (24)..(495): Homolog of NCBI NO: 7433913 NR Description: UTP-glucose glucosyltransferase-like protein -
  misc_feature (21)..(75): Homolog of NCBI NO: 25286815 NR Description: probable flavonol 3-O-glucosyltransferase
  misc_feature (109)..(492): Homolog of NCBI NO: 25286815 NR Description: probable flavonol 3-O-glucosyltransferase
  misc_feature (58)..(492): Homolog of NCBI NO: 25286819 NR Description: probable flavonol 3-O-glucosyltransferase
  misc_feature (21)..(495): Homolog of NCBI NO: 18409172 NR Description: UDP-glycosyltransferase family [Arabidopsis
  misc_feature (17)..(495): Homolog of NCBI NO: 2501494 NR Description: Flavonol 3-O-glucosyltransferase 5 (UDP-glucose
IQSLVSFHNSHLMAISNNNHHALLLASPGMGHIIPALELAKRLVTHKIISKLTFFCGSIKTSTPSKAETQILQSAIKENLFDLIQLPPIDLTIHVSPRDTLETKIAIIMHEIPLLFVSTISSMNLNPTMIITDFFFSQVIPLAKNLNLPTFAFAPTNAWLVALGLHTPTLDKEIEGEYINESKPISIPGCKSIHPLDMFGMLRDRTQRIYHEYVGACEGAALADGIFVNTFHELEPKTLEALGSGHIITKVPVYPVGPIVRDQRSPNGSNEGKIGDVFGWLDKQEEESVVYVSLGSGYTMSFEEIKEMALGLELSGKKFVWSVRPPATKSGTGNYLTAGEEGETRTILGSNNEPSNSFPDEFYRIQTNGIVITDWAPQLDILKHPSFGGFVSHCGWNSLMESVSCGVPIIGLPLYAEQMMNAAMLMEEVGNAIRVEVSPSTNMVGREELSKAIRKIMDKDDKEGCVMRERAKELKHIAERAWFHDGPSYLALSKITHSNRV

SEQ ID NO: 60108 - protein, 489 aa, Glycine max
  peptide (1)..(489): Ceres Seq. ID no. 15171616
  misc_feature (9)..(483): Pfam Name: UDP-glucoronosyl and UDP-glucosyl transferase Pfam Description: UDP-glucoronosyl and UDP-glucosyl transferase
  misc_feature (97)..(480): Homolog of NCBI NO: 30680413 NR Description: UDP-glucosyltransferase family [Arabidopsis
  misc_feature (12)..(484): Homolog of NCBI NO: 21553566 NR Description: UTP-glucose glucosyltransferase [Arabidopsis
  misc_feature (9)..(484): Homolog of NCBI NO: 15240051 NR Description: UDP-glycosyltransferase family [Arabidopsis
  misc_feature (9)..(484): Homolog of NCBI NO: 15240305 NR Description: UDP-glycosyltransferase family [Arabidopsis
  misc_feature (12)..(483): Homolog of NCBI NO: 7433913 NR Description: UTP-glucose glucosyltransferase-like protein -
  misc_feature (9)..(63): Homolog of NCBI NO: 25286815 NR Description: probable flavonol 3-O-glucosyltransferase
  misc_feature (97)..(480): Homolog of NCBI NO: 25286815 NR Description: probable flavonol 3-O-glucosyltransferase
  misc_feature (46)..(480): Homolog of NCBI NO: 25286819 NR Description: probable flavonol 3-O-glucosyltransferase
  misc_feature (9)..(483): Homolog of NCBI NO: 18409172 NR Description: UDP-glycosyltransferase family [Arabidopsis
  misc_feature (5)..(483): Homolog of NCBI NO: 2501494 NR Description: Flavonol 3-O-glucosyltransferase 5 (UDP-glucose
MAISNNNHHALLLASPGMGHIIPALELAKRLVTHKIISKLTFFCGSIKTSTPSKAETQILQSAIKENLFDLIQLPPIDLTIHVSPRDTLETKIAIIMHEIPLLFVSTISSMNLNPTMIITDFFFSQVIPLAKNLNLPTFAFAPTNAWLVALGLHTPTLDKEIEGEYINESKPISIPGCKSIHPLDMFGMLRDRTQRIYHEYVGACEGAALADGIFVNTFHELEPKTLEALGSGHIITKVPVYPVGPIVRDQRSPNGSNEGKIGDVFGWLDKQEEESVVYVSLGSGYTMSFEEIKEMALGLELSGKKFVWSVRPPATKSGTGNYLTAGEEGETRTILGSNNEPSNSFPDEFYRIQTNGIVITDWAPQLDILKHPSFGGFVSHCGWNSLMESVSCGVPIIGLPLYAEQMMNAAMLMEEVGNAIRVEVSPSTNMVGREELSKAIRKIMDKDDKEGCVMRERAKELKHIAERAWFHDGPSYLALSKITHSNRV

SEQ ID NO: 60109 - protein, 472 aa, Glycine max
  peptide (1)..(472): Ceres Seq. ID no. 15171617
  misc_feature (1)..(466): Pfam Name: UDP-glucoronosyl and UDP-glucosyl transferase Pfam Description: UDP-glucoronosyl and UDP-glucosyl transferase
  misc_feature (80)..(463): Homolog of NCBI NO: 30680413 NR Description: UDP-glucosyltransferase family [Arabidopsis
  misc_feature (1)..(467): Homolog of NCBI NO: 21553566 NR Description: UTP-glucose glucosyltransferase [Arabidopsis
  misc_feature (1)..(467): Homolog of NCBI NO: 15240051 NR Description: UDP-glycosyltransferase family [Arabidopsis
  misc_feature (1)..(467): Homolog of NCBI NO: 15240305 NR Description: UDP-glycosyltransferase family [Arabidopsis
  misc_feature (1)..(466): Homolog of NCBI NO: 7433913 NR Description: UTP-glucose glucosyltransferase-like protein -
  misc_feature (1)..(46): Homolog of NCBI NO: 25286815 NR Description: probable flavonol 3-O-glucosyltransferase
  misc_feature (80)..(463): Homolog of NCBI NO: 25286815 NR Description: probable flavonol 3-O-glucosyltransferase
  misc_feature (29)..(463): Homolog of NCBI NO: 25286819 NR Description: probable flavonol 3-O-glucosyltransferase
  misc_feature (1)..(466): Homolog of NCBI NO: 18409172 NR Description: UDP-glycosyltransferase family [Arabidopsis
  misc_feature (1)..(466): Homolog of NCBI NO: 2501494 NR Description: Flavonol 3-O-glucosyltransferase 5 (UDP-glucose
MGHIIPALELAKRLVTHKIISKLTFFCGSIKTSTPSKAETQILQSAIKENLFDLIQLPPIDLTIHVSPRDTLETKIAIIMHEIPLLFVSTISSMNLNPTMIITDFFFSQVIPLAKNLNLPTFAFAPTNAWLVALGLHTPTLDKEIEGEYINESKPISIPGCKSIHPLDMFGMLRDRTQRIYHEYVGACEGAALADGIFVNTFHELEPKTLEALGSGHIITKVPVYPVGPIVRDQRSPNGSNEGKIGDVFGWLDKQEEESVVYVSLGSGYTMSFEEIKEMALGLELSGKKFVWSVRPPATKSGTGNYLTAGEEGETRTILGSNNEPSNSFPDEFYRIQTNGIVITDWAPQLDILKHPSFGGFVSHCGWNSLMESVSCGVPIIGLPLYAEQMMNAAMLMEEVGNAIRVEVSPSTNMVGREELSKAIRKIMDKDDKEGCVMRERAKELKHIAERAWFHDGPSYLALSKITHSNRV

SEQ ID NO: 60110 - DNA, 1304 bp, Glycine max
  misc_feature (1)..(1304): Ceres Seq. ID no. 13594301
gcaatttttttgtcaatttagctgttgcaactgatactctaacagtgttttattctatgcatctctttaccaaattgcccctgctcaaagttgaaattctatagtcactttttaatttttttttttgttctgggtgtttttcttatctgtgttttgtttcaattgcgcgaggtgggtttttctagggtttggaggctatgccgaaagcgggttgaataagctcaggtgaagaaaatgattctcacaaagcagtaccgatgcatacactcagctagctgtcaatgtactaaagggcatttaagtgaagatgtgatattcttagtatttcataatttgaattggaatcccaagctaattgctactctatcatgtgtgtgcaaatggtttgatgatcttgccaagcgagttctatggaaagagttttgtagaacaagagctccgaaaatgttgtgtgatctgcaatctaatgggagccacattgttgatgggaactggagggccctagggaagcttcttatatactgttcaggatgcacaaaaggtggcttgttcaatagcattcagatccctggtcactttgtttatcagacacgattttctagaacatcaggaaagagctttcttttgccacaatgcagaactgatgttttgtatgtgtctgatccttgtgagcatcttgaccaaggtgaagaaggagatgtaggattcttccgtggcattttcaagtcatttgcaacctcaaaggtcaggaagatgcttattaataaaggtgccaagctccatccaacagaagtctgcccttattgtaaggcaaagttgtggagcatgctgcaagccaaaatgatccctcaaagtgctagttgcaggttgggttcttatgatgattgtattgagtattatgtgtgcctcaacggccacatgcttgggatatgtacactgttaccattgtctgattcagaagaggcatctgaattggagtaatacctaaatgattttcaggttggcagtaaatcttcacaagttggctaaacactgctggtatactccaggctcaattcaactaatcagcacctaaaatatgccattaacttaccctcaagcttgatgctgcaatctcacccaacccaagccacaatttccaaggaaggacggagatgatcaatttttagtatgaatcgttatactgaagtttgttactgtgaactatgtgatatcccatgtagattgatacgcggtgtctctacctgtgacaaatatgcgtgtgtaataattcatacttgttcaatataatcaggattcattct

SEQ ID NO: 60111 - protein, 248 aa, Glycine max
  peptide (1)..(248): Ceres Seq. ID no. 13594302
  misc_feature (23)..(243): Homolog of NCBI NO: 18412596 NR Description: expressed protein [Arabidopsis thaliana]
  misc_feature (23)..(243): Homolog of NCBI NO: 11281127 NR Description: hypothetical protein T20O10.160 - Arabidopsis
  misc_feature (20)..(242): Homolog of NCBI NO: 34908976 NR Description: putative circadian clock coupling factor ZGT
  misc_feature (20)..(246): Homolog of NCBI NO: 14210079 NR Description: circadian clock coupling factor ZGT [Nicotiana
  misc_feature (1)..(246): Homolog of NCBI NO: 34393587 NR Description: unknown protein [Oryza sativa (japonica
  misc_feature (1)..(244): Homolog of NCBI NO: 15242296 NR Description: expressed protein [Arabidopsis thaliana]
  misc_feature (1)..(248): Homolog of NCBI NO: 15241717 NR Description: expressed protein [Arabidopsis thaliana]
MILTKQYRCIHSASCQCTKGHLSEDVIFLVFHNLNWNPKLIATLSCVCKWFDDLAKRVLWKEFCRTRAPKMLCDLQSNGSHIVDGNWRALGKLLIYCSGCTKGGLFNSIQIPGHFVYQTRFSRTSGKSFLLPQCRTDVLYVSDPCEHLDQGEEGDVGFFRGIFKSFATSKVRKMLINKGAKLHPTEVCPYCKAKLWSMLQAKMIPQSASCRLGSYDDCIEYYVCLNGHMLGICTLLPLSDSEEASELE

SEQ ID NO: 60112 - protein, 178 aa, Glycine max
  peptide (1)..(178): Ceres Seq. ID no. 13594303
  misc_feature (1)..(173): Homolog of NCBI NO: 18412596 NR Description: expressed protein [Arabidopsis thaliana]
  misc_feature (1)..(173): Homolog of NCBI NO: 11281127 NR Description: hypothetical protein T20O10.160 - Arabidopsis
  misc_feature (1)..(172): Homolog of NCBI NO: 34908976 NR Description: putative circadian clock coupling factor ZGT
  misc_feature (1)..(176): Homolog of NCBI NO: 14210079 NR Description: circadian clock coupling factor ZGT [Nicotiana
  misc_feature (1)..(176): Homolog of NCBI NO: 34393587 NR Description: unknown protein [Oryza sativa (japonica
  misc_feature (1)..(174): Homolog of NCBI NO: 15242296 NR Description: expressed protein [Arabidopsis thaliana]
  misc_feature (1)..(178): Homolog of NCBI NO: 15241717 NR Description: expressed protein [Arabidopsis thaliana]
MLCDLQSNGSHIVDGNWRALGKLLIYCSGCTKGGLFNSIQIPGHFVYQTRFSRTSGKSFLLPQCRTDVLYVSDPCEHLDQGEEGDVGFFRGIFKSFATSKVRKMLINKGAKLHPTEVCPYCKAKLWSMLQAKMIPQSASCRLGSYDDCIEYYVCLNGHMLGICTLLPLSDSEEASELE

SEQ ID NO: 60113 - DNA, 1196 bp, Glycine max
  misc_feature (1)..(1196): Ceres Seq. ID no. 14316371
atctaccattggggtttcactgttcagtgtaactctcaagccatgtctccgggtcccgttattgacgcagccaccgaccccggcgccgaccaacaaattccctccgtcgacgacgcaatcctcaagaagaaagctcacccccaggttccccccatttccattcttttttctactttactttatctcttattcgcttccacgatcttttttttctcaggaagatgacgctcccattgtcgaggacgtcaaggacgatgacaaagaggaaaccgaagacgaggatgaggacgatgacgacgatgacaaggaagatgacgcccaaggtggtgctgagggtgggaagcagagcagaagtgagaagaagagccgaaaagcaatgttgaagttgggactgaaacctgttactggcgttagtagggtcacaatcaagaggacaaagaatattctttttttcatctcaaaacctgatgtcttcaagagtccaaattctgagacctacatcatatttggggaggcaaaaatagaggacttgagctctcagttgcagacacaggctgctcaacagttcaggatgccagatgtgggatccgtactggcaaaacaagatcaagatgctgcagctgcagcggcacagcctgaagaagaggaggaggaggttgatgaaactggtgtcgagccccatgacattgatttggtgatgacacaggcaggagtgtcaagaagcaaggctgtcaaggcccttaagactcacaatggggacattgtcggtgccattatggagctcactacttagtttcggtttatgttccatttgtagtttttgatttttggggatgattttggaactagtgccatcgtttttgtggtagtcaaaccatatatttggtccatatggttgtgcttaccttataatttcttgtggtacgatgtgatgatcaatgatcatattattttgttgtctttacttatagtagccttcttttagctctatatctttttgcccttaagttaacgtctagccctaaaattcgttggtttaaactttaggtatatatggttggtttgttgtatctgtacctgcaacactaaaggttcatgtcccgtggcctttggaaaatgggggccattgagctaggaatttttgtatcttaggctatattgatgattggattaaattgaattaattttaaaatttg

SEQ ID NO: 60114 - protein, 263 aa, Glycine max
  peptide (1)..(263): Ceres Seq. ID no. 14316372
  misc_feature (117)..(176): Pfam Name: NAC domain Pfam Description: NAC domain
  misc_feature (72)..(263): Homolog of NCBI NO: 6752882 NR Description: nascent polypeptide associated complex alpha
  misc_feature (75)..(263): Homolog of NCBI NO: 15230476 NR Description: nascent polypeptide associated complex alpha
  misc_feature (73)..(262): Homolog of NCBI NO: 34907258 NR Description: putative nascent polypeptide associated complex
  misc_feature (73)..(263): Homolog of NCBI NO: 32352154 NR Description: nascent polypeptide associated complex alpha
  misc_feature (72)..(263): Homolog of NCBI NO: 21536597 NR Description: putative alpha NAC [Arabidopsis thaliana]
  misc_feature (72)..(263): Homolog of NCBI NO: 18398710 NR Description: expressed protein [Arabidopsis thaliana]
  misc_feature (72)..(263): Homolog of NCBI NO: 15235122 NR Description: alpha NAC -related [Arabidopsis thaliana]
  misc_feature (73)..(263): Homolog of NCBI NO: 13899101 NR Description: alpha NAC-like protein [Arabidopsis thaliana]
  misc_feature (73)..(262): Homolog of NCBI NO: 34902238 NR Description: Putative nascent polypeptide associated complex
  misc_feature (73)..(263): Homolog of NCBI NO: 15229149 NR Description: alpha NAC-related protein [Arabidopsis thaliana]
STIGVSLFSVTLKPCLRVPLLTQPPTPAPTNKFPPSTTQSSRRKLTPRFPPFPFFFLLYFISYSLPRSFFSQEDDAPIVEDVKDDDKEETEDEDEDDDDDDKEDDAQGGAEGGKQSRSEKKSRKAMLKLGLKPVTGVSRVTIKRTKNILFFISKPDVFKSPNSETYIIFGEAKIEDLSSQLQTQAAQQFRMPDVGSVLAKQDQDAAAAAAQPEEEEEEVDETGVEPHDIDLVMTQAGVSRSKAVKALKTHNGDIVGAIMELTT

SEQ ID NO: 60115 - protein, 138 aa, Glycine max
  peptide (1)..(138): Ceres Seq. ID no. 14316373
  misc_feature (1)..(51): Pfam Name: NAC domain Pfam Description: NAC domain
  misc_feature (1)..(138): Homolog of NCBI NO: 6752882 NR Description: nascent polypeptide associated complex alpha
  misc_feature (1)..(138): Homolog of NCBI NO: 15230476 NR Description: nascent polypeptide associated complex alpha
  misc_feature (1)..(137): Homolog of NCBI NO: 34907258 NR Description: putative nascent polypeptide associated complex
  misc_feature (1)..(138): Homolog of NCBI NO: 32352154 NR Description: nascent polypeptide associated complex alpha
  misc_feature (1)..(138): Homolog of NCBI NO: 21536597 NR Description: putative alpha NAC [Arabidopsis thaliana]
  misc_feature (1)..(138): Homolog of NCBI NO: 18398710 NR Description: expressed protein [Arabidopsis thaliana]
  misc_feature (1)..(138): Homolog of NCBI NO: 15235122 NR Description: alpha NAC -related [Arabidopsis thaliana]
  misc_feature (1)..(138): Homolog of NCBI NO: 13899101 NR Description: alpha NAC-like protein [Arabidopsis thaliana]
  misc_feature (1)..(137): Homolog of NCBI NO: 34902238 NR Description: Putative nascent polypeptide associated complex
  misc_feature (1)..(138): Homolog of NCBI NO: 15229149 NR Description: alpha NAC-related protein [Arabidopsis thaliana]
MLKLGLKPVTGVSRVTIKRTKNILFFISKPDVFKSPNSETYIIFGEAKIEDLSSQLQTQAAQQFRMPDVGSVLAKQDQDAAAAAAQPEEEEEEVDETGVEPHDIDLVMTQAGVSRSKAVKALKTHNGDIVGAIMELTT

SEQ ID NO: 60116 - DNA, 1259 bp, Glycine max
  misc_feature (1)..(1259): Ceres Seq. ID no. 14316390
aaagaggtgtccgaatcgaacaggagcaagcaaagtcaaagaaaaagagagaggagagagagaaacaacaatcatcatcggccagaagcgaacacgacagacacatctgagaaaccaaacctgatagagatgtcgagtggaggaaaccttagttgcgtgttggtagctgtggatggcagcgaggaaagcatgaacgcgctgcgttgggcactgaacaacctcaagctccgatcccctgcacccgattccaccgatgctccttccttcaccgtcttccacgtccaatccccgccctccatcgccactggcctcaatcccggtgccatccccttcggtggccccagtgatctcgaagttcctgctttcactgcagccattgaagcgcaccaaaagcgcatcaccaacgccgtactcgatcacgccctcggaatttgctccgaattcaacctcaccagtaaggtcagaacccatgttcttgtaggagatccaaaggagaagatttgtgaagcagttcaggatttgaatgctgatgtgcttgtgatggggtctcgtgcttttggccccattaagaggatgttcctgggaagtgtaagcaactactgcgcccaccattctccatgccctgtcattattatcaaggaaaaggacattgtcaataagagaaactgatgcacttctactatgctaccatgattcttgtctcttgatcagtaggttctttaggtgggttgtcagtgccatatttcagttgctgacgctgcatccttgcttgccaaattaattatgtcgaaggctttttcgtcttgcaatttgcttgctttgttagaccagtgttgtacctcagctttgaagcttgtgtcttttgttgagccaatgctagccagaccctgcttcaagtacgtgttttcactttctgtggacaattctgctgtgtgtgtgaaattcttggagttaaagagtgctttataactgtgctgtcacaacgtcaattgttgtcccaaatggttcaaagagatatttgcctccaggtttgtattcgttctgaatttatacaatgttgtacagaaatgttgcattactattgctccttggtcagagccagttctagttgtgattgtgatatgcaacaaactggccatttgacatttgtcatgtacaaattttcaaattgagaatccagctagtgttggctgcagtgtgtcttactgttgcattattgacagtgtcctgcttaaataaatatttatatgatttatgac

SEQ ID NO: 60117 - protein, 222 aa, Glycine max
  peptide (1)..(222): Ceres Seq. ID no. 14316391
  misc_feature (50)..(213): Pfam Name: Universal stress protein family Pfam Description: Universal stress protein family
  misc_feature (191)..(213): Homolog of NCBI NO: 30681959 NR Description: ethylene-responsive protein -related [Arabidopsis
  misc_feature (27)..(200): Homolog of NCBI NO: 30681959 NR Description: ethylene-responsive protein -related [Arabidopsis
  misc_feature (27)..(213): Homolog of NCBI NO: 21594903 NR Description: ethylene-responsive protein, putative
  misc_feature (45)..(213): Homolog of NCBI NO: 40539010 NR Description: putative stress-related protein
  misc_feature (27)..(213): Homolog of NCBI NO: 30681955 NR Description: ethylene-responsive protein -related [Arabidopsis
  misc_feature (27)..(213): Homolog of NCBI NO: 18399413 NR Description: ethylene-responsive protein -related [Arabidopsis
  misc_feature (47)..(216): Homolog of NCBI NO: 34914610 NR Description: P0520B06.18 [Oryza sativa (japonica
  misc_feature (44)..(216): Homolog of NCBI NO: 30681321 NR Description: ER6 protein -related [Arabidopsis thaliana]
  misc_feature (44)..(216): Homolog of NCBI NO: 25402571 NR Description: hypothetical protein [imported] - Arabidopsis
  misc_feature (50)..(213): Homolog of NCBI NO: 5669654 NR Description: ER6 protein [Lycopersicon esculentum]
KEVSESNRSKQSQRKRERRERNNNHHRPEANTTDTSEKPNLIEMSSGGNLSCVLVAVDGSEESMNALRWALNNLKLRSPAPDSTDAPSFTVFHVQSPPSIATGLNPGAIPFGGPSDLEVPAFTAAIEAHQKRITNAVLDHALGICSEFNLTSKVRTHVLVGDPKEKICEAVQDLNADVLVMGSRAFGPIKRMFLGSVSNYCAHHSPCPVIIIKEKDIVNKRN

SEQ ID NO: 60118 - protein, 179 aa, Glycine max
  peptide (1)..(179): Ceres Seq. ID no. 14316392
  misc_feature (7)..(170): Pfam Name: Universal stress protein family Pfam Description: Universal stress protein family
  misc_feature (148)..(170): Homolog of NCBI NO: 30681959 NR Description: ethylene-responsive protein -related [Arabidopsis
  misc_feature (1)..(157): Homolog of NCBI NO: 30681959 NR Description: ethylene-responsive protein -related [Arabidopsis
  misc_feature (1)..(170): Homolog of NCBI NO: 21594903 NR Description: ethylene-responsive protein, putative
  misc_feature (2)..(170): Homolog of NCBI NO: 40539010 NR Description: putative stress-related protein
  misc_feature (1)..(170): Homolog of NCBI NO: 30681955 NR Description: ethylene-responsive protein -related [Arabidopsis
  misc_feature (1)..(170): Homolog of NCBI NO: 18399413 NR Description: ethylene-responsive protein -related [Arabidopsis
  misc_feature (4)..(173): Homolog of NCBI NO: 34914610 NR Description: P0520B06.18 [Oryza sativa (japonica
  misc_feature (1)..(173): Homolog of NCBI NO: 30681321 NR Description: ER6 protein -related [Arabidopsis thaliana]
  misc_feature (1)..(173): Homolog of NCBI NO: 25402571 NR Description: hypothetical protein [imported] - Arabidopsis
  misc_feature (7)..(170): Homolog of NCBI NO: 5669654 NR Description: ER6 protein [Lycopersicon esculentum]
MSSGGNLSCVLVAVDGSEESMNALRWALNNLKLRSPAPDSTDAPSFTVFHVQSPPSIATGLNPGAIPFGGPSDLEVPAFTAAIEAHQKRITNAVLDHALGICSEFNLTSKVRTHVLVGDPKEKICEAVQDLNADVLVMGSRAFGPIKRMFLGSVSNYCAHHSPCPVIIIKEKDIVNKRN

SEQ ID NO: 60119 - protein, 159 aa, Glycine max
  peptide (1)..(159): Ceres Seq. ID no. 14316393
  misc_feature (1)..(150): Pfam Name: Universal stress protein family Pfam Description: Universal stress protein family
  misc_feature (128)..(150): Homolog of NCBI NO: 30681959 NR Description: ethylene-responsive protein -related [Arabidopsis
  misc_feature (1)..(137): Homolog of NCBI NO: 30681959 NR Description: ethylene-responsive protein -related [Arabidopsis
  misc_feature (1)..(150): Homolog of NCBI NO: 21594903 NR Description: ethylene-responsive protein, putative
  misc_feature (1)..(150): Homolog of NCBI NO: 40539010 NR Description: putative stress-related protein
  misc_feature (1)..(150): Homolog of NCBI NO: 30681955 NR Description: ethylene-responsive protein -related [Arabidopsis
  misc_feature (1)..(150): Homolog of NCBI NO: 18399413 NR Description: ethylene-responsive protein -related [Arabidopsis
  misc_feature (1)..(153): Homolog of NCBI NO: 34914610 NR Description: P0520B06.18 [Oryza sativa (japonica
  misc_feature (1)..(153): Homolog of NCBI NO: 30681321 NR Description: ER6 protein -related [Arabidopsis thaliana]
  misc_feature (1)..(153): Homolog of NCBI NO: 25402571 NR Description: hypothetical protein [imported] - Arabidopsis
  misc_feature (1)..(150): Homolog of NCBI NO: 5669654 NR Description: ER6 protein [Lycopersicon esculentum]
MNALRWALNNLKLRSPAPDSTDAPSFTVFHVQSPPSIATGLNPGAIPFGGPSDLEVPAFTAAIEAHQKRITNAVLDHALGICSEFNLTSKVRTHVLVGDPKEKICEAVQDLNADVLVMGSRAFGPIKRMFLGSVSNYCAHHSPCPVIIIKEKDIVNKRN

SEQ ID NO: 60120 - DNA, 2318 bp, Glycine max
  misc_feature (1)..(2318): Ceres Seq. ID no. 14316344
ctcttctctctttctgtgtctcaaacccaaagaacacggagttggcggcgaccctttctctctctgatttcgatcatggcagctgttgctccttcttctgacaaaactgcagatttattgcagaatttgaccctggactctgagtccaaacccattggagttgctgagcctgcgaagaagaatggacccactttttccagtggtgcagctaaagggagggccaagccattcaatccaaattcatgctttgttccaaatggatacccttctgcgtattattatggaggttatgatgggcaaggtgattggaatgcttattccagatatatgaaccttgatggagggatggctcaaggtgtttatggggataactgctcttatatgtaccatcaaggttatggttatgcaccatatggaacatatgcatctcccaattcctcttctccaatgattcaacaggatggtcagcagtacgggctgcaacagtaccagtatccatgttcttattacaaatctccagcttctgctgatgtgtcatttactaccaacaaaatcagtcttccacaaggagaaatatcaactactgttgatgttgctgattgtgtttcttcaacaaatgctatgaataaaggaaacaatgttaacgtgggcaatagtaatttcactgataaaaatgggttaaatccatttttaactagttcacagcacacatctttgaatacaaatgattcttatcaaggggctagcttgccagcttatgctcctttgtcaggatatcagggtccaagaagcacccatggtacacaactgccagtcccttcggatgcgtccttagtatctgacggacaggccaaacatggagccaaggttggattatcttcatcagtagtgcctgtcaaagatttttcatctcaaagaaatcaaagacttcctcagccacttccccaatactcaaacatgagtggttccagacatccttctggacttgacctggtttctggattcatgaacgggatgtatccgagcaacaggatgtacagccaatatggaaacacattcaggcctaattctcatttcggatctgctgcgtatggatctagaatgggctctttcgatagcaaacataatggtgcagggtatggctgcggtcttaaccattttaaaaaaagtatggatggtttcagcgagctaaataagggacccagagctgccaagagttctgataataaaaacatcaaaagtcttggacctgtcacattattacacaagggacagaacctttcagtgaagagtgacaacaaagaagttcctttggttcccgacaaggaacagtacaatgggaaagatttggctgagaattattctgatgccaagttttttgtcatcaaatcctatagtgaggatgatattcataaaagcataaaatacagcgcttgggcaagcacccctaacggcaacaaaaagctggattcggcatatcaggaagccaaggagaagcccggtggctgtcccatatttttgttattttcggtcaacactagtgggcaatttgttggtttagccgagatgttgggtcctgttgattttggtaaaaccgtagattattggcagcaggacaggtggactggttgcttttctgtgaagtggcatgtcatcaaggatatcccaaatagcgtgttgaggcacataacgcttgaaaacaatgaaaacaaacctgtaacaaatagtagggatactcaggaggttaagtttgagaagggtgttcaacttgtcaaaatattcaaggagcattcaagccaaacatgcatcttggatgattttgggttctacgaggatcgtgaaaaggtgactcaggagaaaaagtctaaggaacagcagttaccaaaacagatcagcaagcccagtgatttcacatttgggacggttacatttccgaagtctcttgatgcaaccttgatcaatgaatctgctacagcaaatgcagcagagggaagaatgaatgcagaagggctgttagaagggaatggatcgactacagcacttgaagatgcttctaagagctgttaaagcaatgatagtcattggctgatttttgttttggtttgtttattccctattgctttagtcatctagtgagtggtggtgtttttcagtttcaaattatctgttatgtgatcttggtcttggtttggagtggagcatctaattttagcatttttctttggtctcgttcaataaaatgtgattgtttttagtagttataagtttcatggtaggtcaaaggaagttttaatcaaaatatattgtgttattgtagt

SEQ ID NO: 60121 - protein, 688 aa, Glycine max
  peptide (1)..(688): Ceres Seq. ID no. 14316345
  misc_feature (507)..(597): Pfam Name: YT521-B-like family Pfam Description: YT521-B-like family
  misc_feature (316)..(669): Homolog of NCBI NO: 15912287 NR Description: AT5g61020/maf19_20 [Arabidopsis thaliana]
  misc_feature (7)..(198): Homolog of NCBI NO: 30682438 NR Description: expressed protein [Arabidopsis thaliana]
  misc_feature (311)..(628): Homolog of NCBI NO: 30682438 NR Description: expressed protein [Arabidopsis thaliana]
  misc_feature (128)..(642): Homolog of NCBI NO: 18405397 NR Description: expressed protein [Arabidopsis thaliana]
  misc_feature (85)..(630): Homolog of NCBI NO: 25372787 NR Description: Rubisco subunit binding-protein beta subunit
  misc_feature (35)..(630): Homolog of NCBI NO: 18087662 NR Description: putative RNA-binding protein [Oryza sativa]
  misc_feature (27)..(686): Homolog of NCBI NO: 22773231 NR Description: Putative RNA-binding protein
  misc_feature (26)..(677): Homolog of NCBI NO: 30682683 NR Description: expressed protein [Arabidopsis thaliana]
  misc_feature (26)..(677): Homolog of NCBI NO: 30682679 NR Description: expressed protein [Arabidopsis thaliana]
  misc_feature (26)..(677): Homolog of NCBI NO: 25084169 NR Description: Unknown protein [Arabidopsis thaliana]
LFSLSVSQTQRTRSWRRPFLSLISIMAAVAPSSDKTADLLQNLTLDSESKPIGVAEPAKKNGPTFSSGAAKGRAKPFNPNSCFVPNGYPSAYYYGGYDGQGDWNAYSRYMNLDGGMAQGVYGDNCSYMYHQGYGYAPYGTYASPNSSSPMIQQDGQQYGLQQYQYPCSYYKSPASADVSFTTNKISLPQGEISTTVDVADCVSSTNAMNKGNNVNVGNSNFTDKNGLNPFLTSSQHTSLNTNDSYQGASLPAYAPLSGYQGPRSTHGTQLPVPSDASLVSDGQAKHGAKVGLSSSVVPVKDFSSQRNQRLPQPLPQYSNMSGSRHPSGLDLVSGFMNGMYPSNRMYSQYGNTFRPNSHFGSAAYGSRMGSFDSKHNGAGYGCGLNHFKKSMDGFSELNKGPRAAKSSDNKNIKSLGPVTLLHKGQNLSVKSDNKEVPLVPDKEQYNGKDLAENYSDAKFFVIKSYSEDDIHKSIKYSAWASTPNGNKKLDSAYQEAKEKPGGCPIFLLFSVNTSGQFVGLAEMLGPVDFGKTVDYWQQDRWTGCFSVKWHVIKDIPNSVLRHITLENNENKPVTNSRDTQEVKFEKGVQLVKIFKEHSSQTCILDDFGFYEDREKVTQEKKSKEQQLPKQISKPSDFTFGTVTFPKSLDATLINESATANAAEGRMNAEGLLEGNGSTTALEDASKSC

SEQ ID NO: 60122 - protein, 663 aa, Glycine max
  peptide (1)..(663): Ceres Seq. ID no. 14316346
  misc_feature (482)..(572): Pfam Name: YT521-B-like family Pfam Description: YT521-B-like family
  misc_feature (291)..(644): Homolog of NCBI NO: 15912287 NR Description: AT5g61020/maf19_20 [Arabidopsis thaliana]
  misc_feature (1)..(173): Homolog of NCBI NO: 30682438 NR Description: expressed protein [Arabidopsis thaliana]
  misc_feature (286)..(603): Homolog of NCBI NO: 30682438 NR Description: expressed protein [Arabidopsis thaliana]
  misc_feature (103)..(617): Homolog of NCBI NO: 18405397 NR Description: expressed protein [Arabidopsis thaliana]
  misc_feature (60)..(605): Homolog of NCBI NO: 25372787 NR Description: Rubisco subunit binding-protein beta subunit
  misc_feature (10)..(605): Homolog of NCBI NO: 18087662 NR Description: putative RNA-binding protein [Oryza sativa]
  misc_feature (2)..(661): Homolog of NCBI NO: 22773231 NR Description: Putative RNA-binding protein
  misc_feature (1)..(652): Homolog of NCBI NO: 30682683 NR Description: expressed protein [Arabidopsis thaliana]
  misc_feature (1)..(652): Homolog of NCBI NO: 30682679 NR Description: expressed protein [Arabidopsis thaliana]
  misc_feature (1)..(652): Homolog of NCBI NO: 25084169 NR Description: Unknown protein [Arabidopsis thaliana]
MAAVAPSSDKTADLLQNLTLDSESKPIGVAEPAKKNGPTFSSGAAKGRAKPFNPNSCFVPNGYPSAYYYGGYDGQGDWNAYSRYMNLDGGMAQGVYGDNCSYMYHQGYGYAPYGTYASPNSSSPMIQQDGQQYGLQQYQYPCSYYKSPASADVSFTTNKISLPQGEISTTVDVADCVSSTNAMNKGNNVNVGNSNFTDKNGLNPFLTSSQHTSLNTNDSYQGASLPAYAPLSGYQGPRSTHGTQLPVPSDASLVSDGQAKHGAKVGLSSSVVPVKDFSSQRNQRLPQPLPQYSNMSGSRHPSGLDLVSGFMNGMYPSNRMYSQYGNTFRPNSHFGSAAYGSRMGSFDSKHNGAGYGCGLNHFKKSMDGFSELNKGPRAAKSSDNKNIKSLGPVTLLHKGQNLSVKSDNKEVPLVPDKEQYNGKDLAENYSDAKFFVIKSYSEDDIHKSIKYSAWASTPNGNKKLDSAYQEAKEKPGGCPIFLLFSVNTSGQFVGLAEMLGPVDFGKTVDYWQQDRWTGCFSVKWHVIKDIPNSVLRHITLENNENKPVTNSRDTQEVKFEKGVQLVKIFKEHSSQTCILDDFGFYEDREKVTQEKKSKEQQLPKQISKPSDFTFGTVTFPKSLDATLINESATANAAEGRMNAEGLLEGNGSTTALEDASKSC

SEQ ID NO: 60123 - protein, 579 aa, Glycine max
  peptide (1)..(579): Ceres Seq. ID no. 14316347
  misc_feature (398)..(488): Pfam Name: YT521-B-like family Pfam Description: YT521-B-like family
  misc_feature (207)..(560): Homolog of NCBI NO: 15912287 NR Description: AT5g61020/maf19_20 [Arabidopsis thaliana]
  misc_feature (1)..(89): Homolog of NCBI NO: 30682438 NR Description: expressed protein [Arabidopsis thaliana]
  misc_feature (202)..(519): Homolog of NCBI NO: 30682438 NR Description: expressed protein [Arabidopsis thaliana]
  misc_feature (19)..(533): Homolog of NCBI NO: 18405397 NR Description: expressed protein [Arabidopsis thaliana]
  misc_feature (1)..(521): Homolog of NCBI NO: 25372787 NR Description: Rubisco subunit binding-protein beta subunit
  misc_feature (1)..(521): Homolog of NCBI NO: 18087662 NR Description: putative RNA-binding protein [Oryza sativa]
  misc_feature (1)..(577): Homolog of NCBI NO: 22773231 NR Description: Putative RNA-binding protein
  misc_feature (1)..(568): Homolog of NCBI NO: 30682683 NR Description: expressed protein [Arabidopsis thaliana]
  misc_feature (1)..(568): Homolog of NCBI NO: 30682679 NR Description: expressed protein [Arabidopsis thaliana]
  misc_feature (1)..(568): Homolog of NCBI NO: 25084169 NR Description: Unknown protein [Arabidopsis thaliana]
MNLDGGMAQGVYGDNCSYMYHQGYGYAPYGTYASPNSSSPMIQQDGQQYGLQQYQYPCSYYKSPASADVSFTTNKISLPQGEISTTVDVADCVSSTNAMNKGNNVNVGNSNFTDKNGLNPFLTSSQHTSLNTNDSYQGASLPAYAPLSGYQGPRSTHGTQLPVPSDASLVSDGQAKHGAKVGLSSSVVPVKDFSSQRNQRLPQPLPQYSNMSGSRHPSGLDLVSGFMNGMYPSNRMYSQYGNTFRPNSHFGSAAYGSRMGSFDSKHNGAGYGCGLNHFKKSMDGFSELNKGPRAAKSSDNKNIKSLGPVTLLHKGQNLSVKSDNKEVPLVPDKEQYNGKDLAENYSDAKFFVIKSYSEDDIHKSIKYSAWASTPNGNKKLDSAYQEAKEKPGGCPIFLLFSVNTSGQFVGLAEMLGPVDFGKTVDYWQQDRWTGCFSVKWHVIKDIPNSVLRHITLENNENKPVTNSRDTQEVKFEKGVQLVKIFKEHSSQTCILDDFGFYEDREKVTQEKKSKEQQLPKQISKPSDFTFGTVTFPKSLDATLINESATANAAEGRMNAEGLLEGNGSTTALEDASKSC

SEQ ID NO: 60124 - DNA, 1725 bp, Glycine max
  misc_feature (1)..(1725): Ceres Seq. ID no. 15171693
atattccgataaacagaaacaccaccgttgaatttgagaatcccggcgaggcatgttcttgctccgagtccactcggtggaagaggaccaccctctggatccccaaaccatcttccaatcccaatcccaatcccaatcccaatcccaatccaacaaccctaaattcagcgaacgcagaggcgcactccacttgttccgaacctcttcccattcctcgctcccaacccagacctctctttcttctctcctcttcatcctcgccgtccccaactacctctccttccacgacttcattcccttctgtggaccccacctcgaccgtttccaccaccttctcttcatcagaaacgacggcaccgaagatcgctatagcgtcctcatcgagttcgccgatcactttgccgccgacgcattttttaccaatttcaatgccaagaagttttctcctgccgaggcagaggtgtgccatattttgtttctgcaatccgtggagtattctgaatatgcagaagttgctgggactccgcctcctggttgtacggaaataccaacttgtcctgtttgtcttgagaggttggacccagatacgagtgggattctcacaacactttgcgaccactcatttgattgcccttgtgtttcaaagtggacgtacttgtcttgccaggtttgtcaattctgtcagcaacaggatgagaagccaacctgttttatttgtggaacattagatgatctctgggtttgtatgatttgtggatttgttggatgtggaagatataaagaaggacatgccattcagcattggaaagatactcagcattgctattctcttgattttaaaacacagcaaatttgggattatgtgggtgacagttatgtccatcgactgaaccaggaccagtctaaaattgatggcaagttggaggagatgaattttcgctgtatgtcactggaaggagattgtggtatgtgcgaatgccgtgaagatttgggaattaatggggcccttttcaacagcaaagttgaaacgattgtggatgaatacaaccgtcttcttacatctcagttggagacacaaagacaatattatgaatctttactagtggaggcaaaaagtaaaatggaaagttccatgtctgaagcagtggagaaagctgcagcttctgaaatgcaggatatccaaaatgaactggaaaagtgtacagaagaaagaaatgccattgctgaggtcaatcagaaactcataaaaaatcaagagatttggcggaagaagtttaaagaagctgaagagagggaagctaaatcaattaaattgatgaatgagaggataattgatttggaggaacagattagagatatcaagatttttctagaagcacaaaaaacaattgataaaatgtcagattcaaatgggatcaaggagggaacagtcctgccggtggcttatgagcaatcttctccaggccacagtaagagaaacaaaaagtctggccgaaggaggaattagttgcaacctcaaccagaacacaatattcgaacttatgggtagtctgctttttaggagggaaggacactgcttctgattattacactgatacttgttgatatatagaggcagttccaactcgtggccatggattgctgtctgcatattttagatgttgtatagtttattcttgtaaacagttagtttaacgaatttcgtggtcctaaccctttcctctc

SEQ ID NO: 60125 - protein, 484 aa, Glycine max
  peptide (1)..(484): Ceres Seq. ID no. 15171694
  misc_feature (219)..(292): Pfam Name: Zn-finger in ubiquitin-hydrolases and other protein Pfam Description: Zn-finger in ubiquitin-hydrolases and other
  misc_feature (33)..(478): Homolog of NCBI NO: 21356581 NR Description: CG5555-PA [Drosophila melanogaster]
  misc_feature (45)..(482): Homolog of NCBI NO: 17998683 NR Description: BRCA1 associated protein [Mus musculus]
  misc_feature (33)..(449): Homolog of NCBI NO: 3252872 NR Description: BRCA1-associated protein 2 [Homo sapiens]
  misc_feature (33)..(482): Homolog of NCBI NO: 13492095 NR Description: BRAP2 variant 2 [Mus musculus]
  misc_feature (33)..(482): Homolog of NCBI NO: 13492093 NR Description: BRAP2 variant 1 [Mus musculus]
  misc_feature (33)..(483): Homolog of NCBI NO: 10800417 NR Description: BRCA1 associated protein [Homo sapiens]
  misc_feature (33)..(483): Homolog of NCBI NO: 24637027 NR Description: BRAP2 [Squalus acanthias]
  misc_feature (33)..(483): Homolog of NCBI NO: 15225236 NR Description: hypothetical protein [Arabidopsis thaliana]
  misc_feature (66)..(484): Homolog of NCBI NO: 38345493 NR Description: OSJNBa0010D21.6 [Oryza sativa (japonica
  misc_feature (1)..(483): Homolog of NCBI NO: 15227893 NR Description: expressed protein [Arabidopsis thaliana]
MFLLRVHSVEEDHPLDPQTIFQSQSQSQSQSQSNNPKFSERRGALHLFRTSSHSSLPTQTSLSSLLFILAVPNYLSFHDFIPFCGPHLDRFHHLLFIRNDGTEDRYSVLIEFADHFAADAFFTNFNAKKFSPAEAEVCHILFLQSVEYSEYAEVAGTPPPGCTEIPTCPVCLERLDPDTSGILTTLCDHSFDCPCVSKWTYLSCQVCQFCQQQDEKPTCFICGTLDDLWVCMICGFVGCGRYKEGHAIQHWKDTQHCYSLDFKTQQIWDYVGDSYVHRLNQDQSKIDGKLEEMNFRCMSLEGDCGMCECREDLGINGALFNSKVETIVDEYNRLLTSQLETQRQYYESLLVEAKSKMESSMSEAVEKAAASEMQDIQNELEKCTEERNAIAEVNQKLIKNQEIWRKKFKEAEEREAKSIKLMNERIIDLEEQIRDIKIFLEAQKTIDKMSDSNGIKEGTVLPVAYEQSSPGHSKRNKKSGRRRN

SEQ ID NO: 60126 - protein, 253 aa, Glycine max
  peptide (1)..(253): Ceres Seq. ID no. 15171695
  misc_feature (1)..(61): Pfam Name: Zn-finger in ubiquitin-hydrolases and other protein Pfam Description: Zn-finger in ubiquitin-hydrolases and other
  misc_feature (1)..(247): Homolog of NCBI NO: 21356581 NR Description: CG5555-PA [Drosophila melanogaster]
  misc_feature (1)..(251): Homolog of NCBI NO: 17998683 NR Description: BRCA1 associated protein [Mus musculus]
  misc_feature (1)..(218): Homolog of NCBI NO: 3252872 NR Description: BRCA1-associated protein 2 [Homo sapiens]
  misc_feature (1)..(251): Homolog of NCBI NO: 13492095 NR Description: BRAP2 variant 2 [Mus musculus]
  misc_feature (1)..(251): Homolog of NCBI NO: 13492093 NR Description: BRAP2 variant 1 [Mus musculus]
  misc_feature (1)..(252): Homolog of NCBI NO: 10800417 NR Description: BRCA1 associated protein [Homo sapiens]
  misc_feature (1)..(252): Homolog of NCBI NO: 24637027 NR Description: BRAP2 [Squalus acanthias]
  misc_feature (1)..(252): Homolog of NCBI NO: 15225236 NR Description: hypothetical protein [Arabidopsis thaliana]
  misc_feature (1)..(253): Homolog of NCBI NO: 38345493 NR Description: OSJNBa0010D21.6 [Oryza sativa (japonica
  misc_feature (1)..(252): Homolog of NCBI NO: 15227893 NR Description: expressed protein [Arabidopsis thaliana]
MICGFVGCGRYKEGHAIQHWKDTQHCYSLDFKTQQIWDYVGDSYVHRLNQDQSKIDGKLEEMNFRCMSLEGDCGMCECREDLGINGALFNSKVETIVDEYNRLLTSQLETQRQYYESLLVEAKSKMESSMSEAVEKAAASEMQDIQNELEKCTEERNAIAEVNQKLIKNQEIWRKKFKEAEEREAKSIKLMNERIIDLEEQIRDIKIFLEAQKTIDKMSDSNGIKEGTVLPVAYEQSSPGHSKRNKKSGRRRN

SEQ ID NO: 60127 - DNA, 750 bp, Glycine max
  misc_feature (1)..(750): Ceres Seq. ID no. 15175191
atttctctctctctctctctctcttctccgtcaatgccttctcctctcacagtcacagggtctgtttgttagggtttcctttttttccatttcccccctttctcccacactatctctttccgcattttcccaattaggatgtgtcattgagacagaagaagaagaagaaattggagggggtgtgtgatcgggtcctcaggtgaagatctgaggctgttggtgtctcttttcttttctccgagttccaaagatgagcgcttctaggttcatcaagtgcgtcactgttggggatggtgctgtgggcaaaacctgtttgcttatttcctacaccagcagtgacgcacttgatgaaccttgaagctcagctgagaaaaattgaggaacaactagagaaaaagaaagcagaatatggtgaaaaaatgaaaaacaaaatagccttagttcacaagcaagcagaggagaagagagcaatggttgaagccaagcgtggtgaagaaattctcaaggcagaggaaatagctgcaaaacaccgtgcaactggaacctctccaaagaaggcctttggatgcttttaaatttttattcctttttttgttgttgtgcttttgtgcctgatgtcatagcaataatgaaatttttgtctataatattttcatgtttgttttttaaatgttgtttatgtgtgtacgaaatggaaagggggacactatgaagtttgtgacatacagaacagcctctagatctttttgt

SEQ ID NO: 60128 - protein, 94 aa, Glycine max
  peptide (1)..(94): Ceres Seq. ID no. 15175192
  misc_feature (21)..(89): Pfam Name: Remorin, C-terminal region Pfam Description: Remorin, C-terminal region
  misc_feature (21)..(94): Homolog of NCBI NO: 15229057 NR Description: remorin -related protein [Arabidopsis thaliana]
  misc_feature (17)..(93): Homolog of NCBI NO: 4883530 NR Description: remorin 2 [Lycopersicon esculentum]
  misc_feature (22)..(94): Homolog of NCBI NO: 601843 NR Description: DNA-binding protein
  misc_feature (22)..(94): Homolog of NCBI NO: 15233068 NR Description: DNA-binding protein -related [Arabidopsis
  misc_feature (22)..(94): Homolog of NCBI NO: 15225899 NR Description: remorin [Arabidopsis thaliana]
  misc_feature (21)..(94): Homolog of NCBI NO: 4731573 NR Description: remorin 1 [Lycopersicon esculentum]
  misc_feature (22)..(93): Homolog of NCBI NO: 21555669 NR Description: remorin [Arabidopsis thaliana]
  misc_feature (22)..(93): Homolog of NCBI NO: 15237822 NR Description: expressed protein [Arabidopsis thaliana]
  misc_feature (21)..(94): Homolog of NCBI NO: 34925093 NR Description: Remorin (pp34)
  misc_feature (17)..(94): Homolog of NCBI NO: 32489830 NR Description: OSJNBb0039L24.13 [Oryza sativa (japonica
MVLWAKPVCLFPTPAVTHLMNLEAQLRKIEEQLEKKKAEYGEKMKNKIALVHKQAEEKRAMVEAKRGEEILKAEEIAAKHRATGTSPKKAFGCF

SEQ ID NO: 60129 - protein, 75 aa, Glycine max
  peptide (1)..(75): Ceres Seq. ID no. 15175193
  misc_feature (2)..(70): Pfam Name: Remorin, C-terminal region Pfam Description: Remorin, C-terminal region
  misc_feature (2)..(75): Homolog of NCBI NO: 15229057 NR Description: remorin -related protein [Arabidopsis thaliana]
  misc_feature (1)..(74): Homolog of NCBI NO: 4883530 NR Description: remorin 2 [Lycopersicon esculentum]
  misc_feature (3)..(75): Homolog of NCBI NO: 601843 NR Description: DNA-binding protein
  misc_feature (3)..(75): Homolog of NCBI NO: 15233068 NR Description: DNA-binding protein -related [Arabidopsis
  misc_feature (3)..(75): Homolog of NCBI NO: 15225899 NR Description: remorin [Arabidopsis thaliana]
  misc_feature (2)..(75): Homolog of NCBI NO: 4731573 NR Description: remorin 1 [Lycopersicon esculentum]
  misc_feature (3)..(74): Homolog of NCBI NO: 21555669 NR Description: remorin [Arabidopsis thaliana]
  misc_feature (3)..(74): Homolog of NCBI NO: 15237822 NR Description: expressed protein [Arabidopsis thaliana]
  misc_feature (2)..(75): Homolog of NCBI NO: 34925093 NR Description: Remorin (pp34)
  misc_feature (1)..(75): Homolog of NCBI NO: 32489830 NR Description: OSJNBb0039L24.13 [Oryza sativa (japonica
MNLEAQLRKIEEQLEKKKAEYGEKMKNKIALVHKQAEEKRAMVEAKRGEEILKAEEIAAKHRATGTSPKKAFGCF

SEQ ID NO: 60130 - protein, 61 aa, Glycine max
  peptide (1)..(61): Ceres Seq. ID no. 15175194
FLSLSLSLLRQCLLLSQSQGLFVRVSFFSISPLSPTLSLSAFSQLGCVIETEEEEEIGGGV

SEQ ID NO: 60131 - DNA, 1480 bp, Glycine max
  misc_feature (1)..(1480): Ceres Seq. ID no. 15168421
acacagaaaaacaaatccttcaaacatcgttttatttttcttctctctaaactaaaaaaaatgaagggcaccatagttctacaccctgccatgagtaggggacacctagtccccatggtagaacttggcaagttcatatacactcaccaccaccaaaacctccccatcaaaatcctcctcccttcgccgcccaactccaccacccttcaatacatcgccgccgtctccgccaccacgccttcgatcaccttccaccacctctcaccctcacaacacttactccacgtcctccaaaccctcatctcccaatcttccaaacccaaagccttcatcctagacttcttcaaccactccgctgctgatgtcacacgaaccctaaaaatccccacctactattacttccccaactccgcgagttgcgtcgctctcttcctttacaccccaaccatccactacaacaccaagaaaggcttttccagttacagcgacacgcttcgccgcatccccggtttgccgccactgtcgccggaggacatgcccacctccctcctcgaccgccggagcttcgagtccttcgccaacatgtcgattcaaatgagaaaaacagatggaataatcgttaacacgttcgagaagcttgagaataaagctttcttcgcgttgaagaatgggatctgcatgtcattagaaacacataagtctcattcttcaacgccagaaacacgtaacccacgtgtcttttgcatgggcccacttgtttctaacggtggaggtgaacatgataatgatgatagtggttgcatgagttggctcgactcgcaaccgagtcgaaccgttgtgtttttaagctttggaagctacggaaggttctcgaagagtcagataagggagatagcgttagggttagagaggagtggacaaaggtttttgtgggttatgaggaacccatatgagagaagtgaattgattttggaggaattgttgccaaaagggtttttggaaagaactaaagagaggggaatggtgatgaagaattgggcgccacaagttaagattctgagtcatgactcggtgggtgggttcgtgactcactgcgggtggaactcggtgttggaagcggtctcttggggtgtgcctatggtgtcgtggcctttgtatgcggaacaaaggttgaatagggtggttatggttgaggagatgaaggtggctttggcgttgaaggagaacgaagatgggtttgttagggctagtgagttggaagagcgagttagggagcttatggactcggagagagggagagggaaagaggttagagagagagttttgagcgcgagatatgatgctgtagctgcactcagcgatggtggatcttcacgggttgagttgaatgacttggttgagttgtggatgcaatgatgcttaaaagagtattattttttttcctgcttttattttaagtcaactgggtcaaccagttcac

SEQ ID NO: 60132 - protein, 471 aa, Glycine max
  peptide (1)..(471): Ceres Seq. ID no. 15168422
  misc_feature (109)..(467): Homolog of NCBI NO: 34910204 NR Description: putative flavonol glucosyltransferase
  misc_feature (25)..(87): Homolog of NCBI NO: 22535568 NR Description: putative glucosyltransferase
  misc_feature (105)..(471): Homolog of NCBI NO: 22535568 NR Description: putative glucosyltransferase
  misc_feature (25)..(454): Homolog of NCBI NO: 30684106 NR Description: glycosyltransferase family [Arabidopsis thaliana]
  misc_feature (25)..(454): Homolog of NCBI NO: 18401155 NR Description: glycosyltransferase family [Arabidopsis thaliana]
  misc_feature (25)..(469): Homolog of NCBI NO: 18401158 NR Description: glycosyltransferase family [Arabidopsis thaliana]
  misc_feature (66)..(469): Homolog of NCBI NO: 19911189 NR Description: glucosyltransferase-3 [Vigna angularis]
  misc_feature (25)..(469): Homolog of NCBI NO: 21593785 NR Description: putative glucosyltransferase [Arabidopsis
  misc_feature (21)..(469): Homolog of NCBI NO: 19911193 NR Description: glucosyltransferase-5 [Vigna angularis]
  misc_feature (90)..(471): Homolog of NCBI NO: 19911185 NR Description: glucosyltransferase-1 [Vigna angularis]
TQKNKSFKHRFIFLLSKLKKMKGTIVLHPAMSRGHLVPMVELGKFIYTHHHQNLPIKILLPSPPNSTTLQYIAAVSATTPSITFHHLSPSQHLLHVLQTLISQSSKPKAFILDFFNHSAADVTRTLKIPTYYYFPNSASCVALFLYTPTIHYNTKKGFSSYSDTLRRIPGLPPLSPEDMPTSLLDRRSFESFANMSIQMRKTDGIIVNTFEKLENKAFFALKNGICMSLETHKSHSSTPETRNPRVFCMGPLVSNGGGEHDNDDSGCMSWLDSQPSRTVVFLSFGSYGRFSKSQIREIALGLERSGQRFLWVMRNPYERSELILEELLPKGFLERTKERGMVMKNWAPQVKILSHDSVGGFVTHCGWNSVLEAVSWGVPMVSWPLYAEQRLNRVVMVEEMKVALALKENEDGFVRASELEERVRELMDSERGRGKEVRERVLSARYDAVAALSDGGSSRVELNDLVELWMQ

SEQ ID NO: 60133 - protein, 451 aa, Glycine max
  peptide (1)..(451): Ceres Seq. ID no. 15168423
  misc_feature (89)..(447): Homolog of NCBI NO: 34910204 NR Description: putative flavonol glucosyltransferase
  misc_feature (5)..(67): Homolog of NCBI NO: 22535568 NR Description: putative glucosyltransferase
  misc_feature (85)..(451): Homolog of NCBI NO: 22535568 NR Description: putative glucosyltransferase
  misc_feature (5)..(434): Homolog of NCBI NO: 30684106 NR Description: glycosyltransferase family [Arabidopsis thaliana]
  misc_feature (5)..(434): Homolog of NCBI NO: 18401155 NR Description: glycosyltransferase family [Arabidopsis thaliana]
  misc_feature (5)..(449): Homolog of NCBI NO: 18401158 NR Description: glycosyltransferase family [Arabidopsis thaliana]
  misc_feature (46)..(449): Homolog of NCBI NO: 19911189 NR Description: glucosyltransferase-3 [Vigna angularis]
  misc_feature (5)..(449): Homolog of NCBI NO: 21593785 NR Description: putative glucosyltransferase [Arabidopsis
  misc_feature (1)..(449): Homolog of NCBI NO: 19911193 NR Description: glucosyltransferase-5 [Vigna angularis]
  misc_feature (70)..(451): Homolog of NCBI NO: 19911185 NR Description: glucosyltransferase-1 [Vigna angularis]
MKGTIVLHPAMSRGHLVPMVELGKFIYTHHHQNLPIKILLPSPPNSTTLQYIAAVSATTPSITFHHLSPSQHLLHVLQTLISQSSKPKAFILDFFNHSAADVTRTLKIPTYYYFPNSASCVALFLYTPTIHYNTKKGFSSYSDTLRRIPGLPPLSPEDMPTSLLDRRSFESFANMSIQMRKTDGIIVNTFEKLENKAFFALKNGICMSLETHKSHSSTPETRNPRVFCMGPLVSNGGGEHDNDDSGCMSWLDSQPSRTVVFLSFGSYGRFSKSQIREIALGLERSGQRFLWVMRNPYERSELILEELLPKGFLERTKERGMVMKNWAPQVKILSHDSVGGFVTHCGWNSVLEAVSWGVPMVSWPLYAEQRLNRVVMVEEMKVALALKENEDGFVRASELEERVRELMDSERGRGKEVRERVLSARYDAVAALSDGGSSRVELNDLVELWMQ

SEQ ID NO: 60134 - protein, 441 aa, Glycine max
  peptide (1)..(441): Ceres Seq. ID no. 15168424
  misc_feature (79)..(437): Homolog of NCBI NO: 34910204 NR Description: putative flavonol glucosyltransferase
  misc_feature (1)..(57): Homolog of NCBI NO: 22535568 NR Description: putative glucosyltransferase
  misc_feature (75)..(441): Homolog of NCBI NO: 22535568 NR Description: putative glucosyltransferase
  misc_feature (1)..(424): Homolog of NCBI NO: 30684106 NR Description: glycosyltransferase family [Arabidopsis thaliana]
  misc_feature (1)..(424): Homolog of NCBI NO: 18401155 NR Description: glycosyltransferase family [Arabidopsis thaliana]
  misc_feature (1)..(439): Homolog of NCBI NO: 18401158 NR Description: glycosyltransferase family [Arabidopsis thaliana]
  misc_feature (36)..(439): Homolog of NCBI NO: 19911189 NR Description: glucosyltransferase-3 [Vigna angularis]
  misc_feature (1)..(439): Homolog of NCBI NO: 21593785 NR Description: putative glucosyltransferase [Arabidopsis
  misc_feature (1)..(439): Homolog of NCBI NO: 19911193 NR Description: glucosyltransferase-5 [Vigna angularis]
  misc_feature (60)..(441): Homolog of NCBI NO: 19911185 NR Description: glucosyltransferase-1 [Vigna angularis]
MSRGHLVPMVELGKFIYTHHHQNLPIKILLPSPPNSTTLQYIAAVSATTPSITFHHLSPSQHLLHVLQTLISQSSKPKAFILDFFNHSAADVTRTLKIPTYYYFPNSASCVALFLYTPTIHYNTKKGFSSYSDTLRRIPGLPPLSPEDMPTSLLDRRSFESFANMSIQMRKTDGIIVNTFEKLENKAFFALKNGICMSLETHKSHSSTPETRNPRVFCMGPLVSNGGGEHDNDDSGCMSWLDSQPSRTVVFLSFGSYGRFSKSQIREIALGLERSGQRFLWVMRNPYERSELILEELLPKGFLERTKERGMVMKNWAPQVKILSHDSVGGFVTHCGWNSVLEAVSWGVPMVSWPLYAEQRLNRVVMVEEMKVALALKENEDGFVRASELEERVRELMDSERGRGKEVRERVLSARYDAVAALSDGGSSRVELNDLVELWMQ

SEQ ID NO: 60135 - DNA, 1253 bp, Glycine max
  misc_feature (1)..(1253): Ceres Seq. ID no. 14316365
tccacaacctcgtatttctattctctcctctttctctctctatggcttccttgctttaatcgcaattttactcttttttttaatcggccgatcattcgattggatctgatttcatattaaaatcttatctttttgctaattgtcgctttcccaattcgtaattatctgaagtttggatttgggtgctttctttgcccctttatcgttgattgaatggttttgatccgggactgtgatttacgctctatcggggcagttgctggtcttgctgttgcaattgttttcacatggaggctcttgagatctccttctgggtctcaacggaggcaacagaaacggcaaggtccttcatctagtaatcctggagtcggtacaaattcaaattcaaatgcgtcggtggttccttcggatgcttgttcaccctcagatgattcaagggcgcaaaatgttgttgatgagttctttcagccagtcaagccaaccttggggcagatagttaggcagaagttgagtgaaggaagaaaggtaacttgtcgccttcttggagtgatccttgaggaaagtagtccagaggagctgcagaaacaagctactgtgaggtcctctgtgctagaagtactattggaagtaacaaaattttgtgatttatatctcatggaacgagttctggatgatgaaagcgagaaaagagttcttgtagcattggaagaagcaggggtattcacttcaggtggtctggtcaaggacaaggttctgttctgcagcacagagaatgggcggtcatcgtttgttcggcaattggaacctgattggcatattgattcaaatcctgaaattgtcactcagttggctaggtttatcaagtatcaacttcatgtatctccttacaaaactgaaagaactgctgcaaatgtgttcagtgctccatctctggaacagttctttggatccatatgaaactaaaaccactacaaatcagatgttattcataaatatctcctagtttatttctatgtgcatcttggtttccacattcaccatatgttttttttccagcttttctagatgtatgagaacaaggttagattttttttgaagttttaaggttctcactctaggtaggtgaaagaccttatgtgtatgatgctttgaagaagttttactattttcttttttcttctttgttttgaaatttgtgcattacattgtatcccatccagacattttaaactggcaaggtgacaatttttatt

SEQ ID NO: 60136 - protein, 247 aa, Glycine max
  peptide (1)..(247): Ceres Seq. ID no. 14316366
  misc_feature (90)..(243): Homolog of NCBI NO: 23508674 NR Description: hypothetical protein [Plasmodium falciparum 3D7]
  misc_feature (109)..(243): Homolog of NCBI NO: 23481990 NR Description: hypothetical protein [Plasmodium yoelii yoelii]
  misc_feature (148)..(247): Homolog of NCBI NO: 18403177 NR Description: expressed protein [Arabidopsis thaliana]
  misc_feature (103)..(221): Homolog of NCBI NO: 39546241 NR Description: OSJNBa0089N06.11 [Oryza sativa (japonica
  misc_feature (73)..(244): Homolog of NCBI NO: 38345629 NR Description: OSJNBb0004A17.10 [Oryza sativa (japonica
  misc_feature (97)..(247): Homolog of NCBI NO: 21618311 NR Description: unknown [Arabidopsis thaliana]
  misc_feature (4)..(247): Homolog of NCBI NO: 17381010 NR Description: unknown protein [Arabidopsis thaliana]
MVLIRDCDLRSIGAVAGLAVAIVFTWRLLRSPSGSQRRQQKRQGPSSSNPGVGTNSNSNASVVPSDACSPSDDSRAQNVVDEFFQPVKPTLGQIVRQKLSEGRKVTCRLLGVILEESSPEELQKQATVRSSVLEVLLEVTKFCDLYLMERVLDDESEKRVLVALEEAGVFTSGGLVKDKVLFCSTENGRSSFVRQLEPDWHIDSNPEIVTQLARFIKYQLHVSPYKTERTAANVFSAPSLEQFFGSI

SEQ ID NO: 60137 - DNA, 660 bp, Glycine max
  misc_feature (1)..(660): Ceres Seq. ID no. 15172800
atccccaaatgccccatccaaaacgagacactgaacactgatactctcttcactctcagtgctatcagcaaggaaaaccagagtacccaaagaaaaactaatgatttcactacgaccctataacacatgtcttgaaacaacaacgtttctcttcaacccttcaaagcttggaatctctagacaaacccaaacatgcatgatagcacaaaggaaagcaacaccacgtagaatagaagtcaaatgcagtggtgcagaaaataagggtgagagaacgtttttgacactggaggaagctggtttggttgagatatcaggcttgagcacacatgaacgctttctatgccgtttaacgatatcgtcgttgaacttgctaagagtgatatcggagcaagaagggtgtccaattgaggagctcaatgctgccaagatatgtgattggttcctcaaagataagctcaaaagagaacagaacttaggctctgcggttcttcaatgggatgataattccgactacaaattttaattttctatttactacttgtttctttcttaagtcacgagttttctaggattatgttaatcgagaaaggggtgacaccttttttcggtattggattctaaaattcttatggtaaatgattcggattgttgacgctgctc

SEQ ID NO: 60138 - protein, 140 aa, Glycine max
  peptide (1)..(140): Ceres Seq. ID no. 15172801
  misc_feature (59)..(132): Homolog of NCBI NO: 16332247 NR Description: unknown protein [Synechocystis sp. PCC 6803]
  misc_feature (59)..(132): Homolog of NCBI NO: 23129621 NR Description: hypothetical protein [Nostoc punctiforme]
  misc_feature (59)..(132): Homolog of NCBI NO: 17229982 NR Description: hypothetical protein [Nostoc sp. PCC 7120]
  misc_feature (18)..(140): Homolog of NCBI NO: 22328854 NR Description: receptor-interacting protein (PRIP) -related
  misc_feature (21)..(134): Homolog of NCBI NO: 38344806 NR Description: OSJNBa0043L09.26 [Oryza sativa (japonica
MISLRPYNTCLETTTFLFNPSKLGISRQTQTCMIAQRKATPRRIEVKCSGAENKGERTFLTLEEAGLVEISGLSTHERFLCRLTISSLNLLRVISEQEGCPIEELNAAKICDWFLKDKLKREQNLGSAVLQWDDNSDYKF

SEQ ID NO: 60139 - protein, 108 aa, Glycine max
  peptide (1)..(108): Ceres Seq. ID no. 15172802
  misc_feature (27)..(100): Homolog of NCBI NO: 16332247 NR Description: unknown protein [Synechocystis sp. PCC 6803]
  misc_feature (27)..(100): Homolog of NCBI NO: 23129621 NR Description: hypothetical protein [Nostoc punctiforme]
  misc_feature (27)..(100): Homolog of NCBI NO: 17229982 NR Description: hypothetical protein [Nostoc sp. PCC 7120]
  misc_feature (1)..(108): Homolog of NCBI NO: 22328854 NR Description: receptor-interacting protein (PRIP) -related
  misc_feature (1)..(102): Homolog of NCBI NO: 38344806 NR Description: OSJNBa0043L09.26 [Oryza sativa (japonica
MIAQRKATPRRIEVKCSGAENKGERTFLTLEEAGLVEISGLSTHERFLCRLTISSLNLLRVISEQEGCPIEELNAAKICDWFLKDKLKREQNLGSAVLQWDDNSDYKF

SEQ ID NO: 60140 - DNA, 888 bp, Glycine max
  misc_feature (1)..(888): Ceres Seq. ID no. 12612244
gtcgctggcaagtttcgatatcccacgcaacggtatctccttattcgtgttttttaaaaatttgagctggtttttttgtcgcgtttgtttataacgttggtgtttcttgactcgtgtactagtactagtactacccccaacacaacactcaccaaaccacgctccgattcaaattccaactccgaatcaaaccctagtacaacaatccaacgaaaccttcttcttctcaattctccgatcccatcctcaatggaaaacccggattcctctcttcctctctccatcaagaaggagaacgtcactcccattacctctaaaatcgcggaacttaatgaatcgagatcggagcttctgggcagagttcagagtttgaaacaggatttgcaaagttggaggtcgaagttagatacacaagtcaaggtctatcgcgacgagctgtcagaacttaagaaaacacttaatgttgaagtggaccaacttcgagcagaatttcaagatctgaggactacccttcagcagcaacaagaggatgtcactgctagcttaagaaacttggggcttcaggatgcctcagatgtcaagcatgctccgtcgcaggagacaaagattgaaaaaattgtcaaggaagaacaggtggtggtacctgaagaagataatagcagcaaagtagctgaaacttaaatagctttttaatttgagtatttgctgctcgctgtgtacaccctagagaagctgaatgactctgtattatggtagatatttgatgtgtttgattactactgttgggtataatgcgggacttaagaatcaatggtaaatttcccgttacccttcctcgggtataatcgatattaattgaacaaattatggtatgctttcatttcttcc

SEQ ID NO: 60141 - protein, 143 aa, Glycine max
  peptide (1)..(143): Ceres Seq. ID no. 12612245
  misc_feature (20)..(114): Homolog of NCBI NO: 22831125 NR Description: contains ESTs
  misc_feature (7)..(112): Homolog of NCBI NO: 7485072 NR Description: hypothetical protein - Arabidopsis thaliana
  misc_feature (1)..(109): Homolog of NCBI NO: 29370843 NR Description: unknown [Oryza sativa (japonica cultivar-group)]
  misc_feature (7)..(142): Homolog of NCBI NO: 21592347 NR Description: unknown [Arabidopsis thaliana]
  misc_feature (7)..(142): Homolog of NCBI NO: 30683404 NR Description: expressed protein [Arabidopsis thaliana]
  misc_feature (7)..(142): Homolog of NCBI NO: 18175846 NR Description: unknown protein [Arabidopsis thaliana]
MENPDSSLPLSIKKENVTPITSKIAELNESRSELLGRVQSLKQDLQSWRSKLDTQVKVYRDELSELKKTLNVEVDQLRAEFQDLRTTLQQQQEDVTASLRNLGLQDASDVKHAPSQETKIEKIVKEEQVVVPEEDNSSKVAET

SEQ ID NO: 60142 - DNA, 1017 bp, Glycine max
  misc_feature (1)..(1017): Ceres Seq. ID no. 15168314
actcttgtactgtcttagatctcgtttctctcttcgactcgtccacactttgtcgtcgttcccaatcgcaggccatatcgccgggggcattcccgccgtatcatccttgcctcttaccgaacactgaaacggggaattactcaggagagcttcgcaatcccactaacagctgctacccgcggttttggttttttcgctagtatcaatctattcttcatccctgttgatcaagaatgcaattctttggggggtctgagattagtccttcacctcctgctccgacagcttcaggaaacaatggccatatgatgtatgtgttcaataggaatggtgtgtgcctgctctatagggagtggaatcgtcccttgcggacattggatgcccagcaagaccaaaagttaatgtttggtctacttttctctctgaagtcattaactgccaagatggaccccactagtgctgttgagaaaggaaaccttggtatgccacagttacctggccaaggttgttcatttcacagtttccgcactaatacgtacaaacttagtttcatggaaagtccttctggaataaagatcatcttggtgactcatcctagaactggtgatctacgggaatccttaaagtatatctacaatttgtatgttgaatatgttgtcaagaatccgctctatacacctggatctcctattaggtgtgagctgttcaatacaacgttggaccagtatgtgagaggcatttcatagatgctgagttgtttccaatcaatagtgtggtttttacgccttgttttgcatggtgtatgtgagaggcattgcatagaagccgagttgtttccattcaacactattgatgacttgtgtggtgtaacgccttgtttgtcatggtggtcactacattgttgttagtcagaaacttttagggagttttcttaagcttgagctgtaccttttttgttacagataacactagtgatactccattttaattgaatcctacaatttatgttgccctgtt

SEQ ID NO: 60143 - protein, 170 aa, Glycine max
  peptide (1)..(170): Ceres Seq. ID no. 15168315
  misc_feature (24)..(169): Pfam Name: Sybindin-like family Pfam Description: Sybindin-like family
  misc_feature (53)..(166): Homolog of NCBI NO: 40740926 NR Description: hypothetical protein AN8828.2 [Aspergillus
  misc_feature (13)..(134): Homolog of NCBI NO: 31200485 NR Description: ENSANGP00000018747 [Anopheles gambiae]
  misc_feature (94)..(170): Homolog of NCBI NO: 19115000 NR Description: conserved hypothetical protein
  misc_feature (24)..(170): Homolog of NCBI NO: 19114985 NR Description: hypothetical protein [Schizosaccharomyces pombe]
  misc_feature (52)..(167): Homolog of NCBI NO: 28828451 NR Description: similar to Homo sapiens (Human). MUM2 protein
  misc_feature (26)..(167): Homolog of NCBI NO: 24651330 NR Description: CG1359-PA [Drosophila melanogaster]
  misc_feature (24)..(169): Homolog of NCBI NO: 10864021 NR Description: MUM2 protein [Homo sapiens]
  misc_feature (24)..(169): Homolog of NCBI NO: 20881775 NR Description: similar to MUM2 protein [Homo sapiens] [Mus
  misc_feature (8)..(167): Homolog of NCBI NO: 34914656 NR Description: P0504D03.19 [Oryza sativa (japonica
  misc_feature (1)..(170): Homolog of NCBI NO: 15223752 NR Description: expressed protein [Arabidopsis thaliana]
MQFFGGSEISPSPPAPTASGNNGHMMYVFNRNGVCLLYREWNRPLRTLDAQQDQKLMFGLLFSLKSLTAKMDPTSAVEKGNLGMPQLPGQGCSFHSFRTNTYKLSFMESPSGIKIILVTHPRTGDLRESLKYIYNLYVEYVVKNPLYTPGSPIRCELFNTTLDQYVRGIS

SEQ ID NO: 60144 - protein, 146 aa, Glycine max
  peptide (1)..(146): Ceres Seq. ID no. 15168316
  misc_feature (1)..(145): Pfam Name: Sybindin-like family Pfam Description: Sybindin-like family
  misc_feature (29)..(142): Homolog of NCBI NO: 40740926 NR Description: hypothetical protein AN8828.2 [Aspergillus
  misc_feature (1)..(110): Homolog of NCBI NO: 31200485 NR Description: ENSANGP00000018747 [Anopheles gambiae]
  misc_feature (70)..(146): Homolog of NCBI NO: 19115000 NR Description: conserved hypothetical protein
  misc_feature (1)..(146): Homolog of NCBI NO: 19114985 NR Description: hypothetical protein [Schizosaccharomyces pombe]
  misc_feature (28)..(143): Homolog of NCBI NO: 28828451 NR Description: similar to Homo sapiens (Human). MUM2 protein
  misc_feature (2)..(143): Homolog of NCBI NO: 24651330 NR Description: CG1359-PA [Drosophila melanogaster]
  misc_feature (1)..(145): Homolog of NCBI NO: 10864021 NR Description: MUM2 protein [Homo sapiens]
  misc_feature (1)..(145): Homolog of NCBI NO: 20881775 NR Description: similar to MUM2 protein [Homo sapiens] [Mus
  misc_feature (1)..(143): Homolog of NCBI NO: 34914656 NR Description: P0504D03.19 [Oryza sativa (japonica
  misc_feature (1)..(146): Homolog of NCBI NO: 15223752 NR Description: expressed protein [Arabidopsis thaliana]
MMYVFNRNGVCLLYREWNRPLRTLDAQQDQKLMFGLLFSLKSLTAKMDPTSAVEKGNLGMPQLPGQGCSFHSFRTNTYKLSFMESPSGIKIILVTHPRTGDLRESLKYIYNLYVEYVVKNPLYTPGSPIRCELFNTTLDQYVRGIS

SEQ ID NO: 60145 - protein, 145 aa, Glycine max
  peptide (1)..(145): Ceres Seq. ID no. 15168317
  misc_feature (1)..(144): Pfam Name: Sybindin-like family Pfam Description: Sybindin-like family
  misc_feature (28)..(141): Homolog of NCBI NO: 40740926 NR Description: hypothetical protein AN8828.2 [Aspergillus
  misc_feature (1)..(109): Homolog of NCBI NO: 31200485 NR Description: ENSANGP00000018747 [Anopheles gambiae]
  misc_feature (69)..(145): Homolog of NCBI NO: 19115000 NR Description: conserved hypothetical protein
  misc_feature (1)..(145): Homolog of NCBI NO: 19114985 NR Description: hypothetical protein [Schizosaccharomyces pombe]
  misc_feature (27)..(142): Homolog of NCBI NO: 28828451 NR Description: similar to Homo sapiens (Human). MUM2 protein
  misc_feature (1)..(142): Homolog of NCBI NO: 24651330 NR Description: CG1359-PA [Drosophila melanogaster]
  misc_feature (1)..(144): Homolog of NCBI NO: 10864021 NR Description: MUM2 protein [Homo sapiens]
  misc_feature (1)..(144): Homolog of NCBI NO: 20881775 NR Description: similar to MUM2 protein [Homo sapiens] [Mus
  misc_feature (1)..(142): Homolog of NCBI NO: 34914656 NR Description: P0504D03.19 [Oryza sativa (japonica
  misc_feature (1)..(145): Homolog of NCBI NO: 15223752 NR Description: expressed protein [Arabidopsis thaliana]
MYVFNRNGVCLLYREWNRPLRTLDAQQDQKLMFGLLFSLKSLTAKMDPTSAVEKGNLGMPQLPGQGCSFHSFRTNTYKLSFMESPSGIKIILVTHPRTGDLRESLKYIYNLYVEYVVKNPLYTPGSPIRCELFNTTLDQYVRGIS

SEQ ID NO: 60146 - DNA, 1058 bp, Glycine max
  misc_feature (1)..(1058): Ceres Seq. ID no. 15168326
accaaacaacacatcaacagagaagccatgaaaactctgatttgtgcaccaaacgcagccttcaatctctcaaaactttctccatggaaaccaaacttccaagcttatcatcatcaccctacacacaaactcaactaccccttcaccacattaaagccacgtgctagtgccaaaggcttttcttccacggggcctccaactgttgcaagtgataatgccaatactactaagaagcccatgagaagaaaaaacaatgatgatgatgatgatgagcttccccaggaagttatgtacaggctaataggtaggatcttgttctctgttggggtgccaatggggttgggtttggccttgttgggcctttttggagagctcaaggaaaagcatgtgtgggatgcaccactgtggttaccctttttgacaacactcttgacttttggagcttcctctcttgggattgcgtatggagcactttccacaagtttggatgctgaaaaggaaggttcttttcttggggtggaacagcttcagaaaaattgggtagagatgtggcaggagaaacaagaggatgaaaactaggcagcctaatcaaggagaaattattagctaggtagtctccgaccaccatcacgtgtttatggcccccaccaatctctacatggcacacatgacacgagtttttcaatttatatgaaagaattaatagcattgaattatgtgttatgtgatgattagttgagattatgatggtccccgaggatgtagtaattcctgcttaatagtgataattttgcaaatgccaaatgggttcatgatgttgcatgagataaattagttctgtacatcaacatacccaagtggtaattttgcaccatataagaagtcagaaccataattattgttgtagttgttattataagtggtgaaagatttgagtagtttgtactaggtcttaggtttaaactttgttgctatcattgcataaaagaaaattgctcttctaagtgaaaatagattgtagtattggtctaccttgccatacgacaattttattcaat

SEQ ID NO: 60147 - protein, 192 aa, Glycine max
  peptide (1)..(192): Ceres Seq. ID no. 15168327
  misc_feature (92)..(189): Homolog of NCBI NO: 23127194 NR Description: hypothetical protein [Nostoc punctiforme]
  misc_feature (47)..(189): Homolog of NCBI NO: 17228243 NR Description: hypothetical protein [Nostoc sp. PCC 7120]
  misc_feature (47)..(186): Homolog of NCBI NO: 23041124 NR Description: hypothetical protein [Trichodesmium erythraeum
  misc_feature (40)..(189): Homolog of NCBI NO: 16329473 NR Description: unknown protein [Synechocystis sp. PCC 6803]
  misc_feature (56)..(185): Homolog of NCBI NO: 7487141 NR Description: hypothetical protein T18B16.70 - Arabidopsis
  misc_feature (86)..(189): Homolog of NCBI NO: 37536396 NR Description: hypothetical protein [Oryza sativa (japonica
  misc_feature (10)..(188): Homolog of NCBI NO: 15237263 NR Description: expressed protein [Arabidopsis thaliana]
TKQHINREAMKTLICAPNAAFNLSKLSPWKPNFQAYHHHPTHKLNYPFTTLKPRASAKGFSSTGPPTVASDNANTTKKPMRRKNNDDDDDELPQEVMYRLIGRILFSVGVPMGLGLALLGLFGELKEKHVWDAPLWLPFLTTLLTFGASSLGIAYGALSTSLDAEKEGSFLGVEQLQKNWVEMWQEKQEDEN

SEQ ID NO: 60148 - protein, 183 aa, Glycine max
  peptide (1)..(183): Ceres Seq. ID no. 15168328
  misc_feature (83)..(180): Homolog of NCBI NO: 23127194 NR Description: hypothetical protein [Nostoc punctiforme]
  misc_feature (38)..(180): Homolog of NCBI NO: 17228243 NR Description: hypothetical protein [Nostoc sp. PCC 7120]
  misc_feature (38)..(177): Homolog of NCBI NO: 23041124 NR Description: hypothetical protein [Trichodesmium erythraeum
  misc_feature (31)..(180): Homolog of NCBI NO: 16329473 NR Description: unknown protein [Synechocystis sp. PCC 6803]
  misc_feature (47)..(176): Homolog of NCBI NO: 7487141 NR Description: hypothetical protein T18B16.70 - Arabidopsis
  misc_feature (77)..(180): Homolog of NCBI NO: 37536396 NR Description: hypothetical protein [Oryza sativa (japonica
  misc_feature (1)..(179): Homolog of NCBI NO: 15237263 NR Description: expressed protein [Arabidopsis thaliana]
MKTLICAPNAAFNLSKLSPWKPNFQAYHHHPTHKLNYPFTTLKPRASAKGFSSTGPPTVASDNANTTKKPMRRKNNDDDDDELPQEVMYRLIGRILFSVGVPMGLGLALLGLFGELKEKHVWDAPLWLPFLTTLLTFGASSLGIAYGALSTSLDAEKEGSFLGVEQLQKNWVEMWQEKQEDEN

SEQ ID NO: 60149 - protein, 113 aa, Glycine max
  peptide (1)..(113): Ceres Seq. ID no. 15168329
  misc_feature (13)..(110): Homolog of NCBI NO: 23127194 NR Description: hypothetical protein [Nostoc punctiforme]
  misc_feature (1)..(110): Homolog of NCBI NO: 17228243 NR Description: hypothetical protein [Nostoc sp. PCC 7120]
  misc_feature (1)..(107): Homolog of NCBI NO: 23041124 NR Description: hypothetical protein [Trichodesmium erythraeum
  misc_feature (1)..(110): Homolog of NCBI NO: 16329473 NR Description: unknown protein [Synechocystis sp. PCC 6803]
  misc_feature (1)..(106): Homolog of NCBI NO: 7487141 NR Description: hypothetical protein T18B16.70 - Arabidopsis
  misc_feature (7)..(110): Homolog of NCBI NO: 37536396 NR Description: hypothetical protein [Oryza sativa (japonica
  misc_feature (1)..(109): Homolog of NCBI NO: 15237263 NR Description: expressed protein [Arabidopsis thaliana]
MRRKNNDDDDDELPQEVMYRLIGRILFSVGVPMGLGLALLGLFGELKEKHVWDAPLWLPFLTTLLTFGASSLGIAYGALSTSLDAEKEGSFLGVEQLQKNWVEMWQEKQEDEN

SEQ ID NO: 60150 - DNA, 809 bp, Glycine max
  misc_feature (1)..(809): Ceres Seq. ID no. 15175411
aatttctggtctatttggttacgatggaatatcaattccaccatagtttaggttcgaacgccgttgccaaaaaatagatacttgtttcttattcacgtagtattttaatacttagtcaaacacgatagcatgaacccaaaatttttgacaattgtttctcaacaagagagattttgattttagcagaaaagcaatggcaagtgcgttgggtagcagagttgaatctgttcgaaactctcacttactaagcttttcgctcaactccattagatccttgagttcttcttcttcatccgccgtttcttctgctcagaaccctaagactaagaaatcgaagcgaagaaagaagaacttgttcgatgtggctcagttcttacctaactggggaatcggctaccacatggccaagactcactggaatgaagtttcttacgaaatcactaaaatcaatctctacaaggatggaagacatggaaaagcatggggggttgcttttaaaaatggcttgccattagcagatgctccaaaaaaaattagtggagttcacaagcgctgttggagatacctaccaaatgtagtaaaagaattagaaagttcaacaaacttaatgagttccgcagacagtgactttgggtttttaggtcatcgacattagcccgtccatgtcttttcaatttggcttagttgttttcgataatggtatcgtttcttagtagatcatgtaatattccttacgcattcatgcaaggtgcttaattaagtttctttctttttgatttttaattagataaatgaactctcgaccatgc

SEQ ID NO: 60151 - protein, 153 aa, Glycine max
  peptide (1)..(153): Ceres Seq. ID no. 15175412
  misc_feature (7)..(137): Homolog of NCBI NO: 18423383 NR Description: expressed protein [Arabidopsis thaliana]
  misc_feature (7)..(136): Homolog of NCBI NO: 15237795 NR Description: expressed protein [Arabidopsis thaliana]
MASALGSRVESVRNSHLLSFSLNSIRSLSSSSSSAVSSAQNPKTKKSKRRKKNLFDVAQFLPNWGIGYHMAKTHWNEVSYEITKINLYKDGRHGKAWGVAFKNGLPLADAPKKISGVHKRCWRYLPNVVKELESSTNLMSSADSDFGFLGHRH

SEQ ID NO: 60152 - protein, 84 aa, Glycine max
  peptide (1)..(84): Ceres Seq. ID no. 15175413
  misc_feature (1)..(68): Homolog of NCBI NO: 18423383 NR Description: expressed protein [Arabidopsis thaliana]
  misc_feature (1)..(67): Homolog of NCBI NO: 15237795 NR Description: expressed protein [Arabidopsis thaliana]
MAKTHWNEVSYEITKINLYKDGRHGKAWGVAFKNGLPLADAPKKISGVHKRCWRYLPNVVKELESSTNLMSSADSDFGFLGHRH

SEQ ID NO: 60153 - DNA, 805 bp, Glycine max
  misc_feature (1)..(805): Ceres Seq. ID no. 13594418
agaaaatgtaaagatttcttaatggagaagtgagcggtgagaggaaacagaagagagaagagcaatcggtgagtgaatggaatggattcaggtcctccggcgaacgatttgtgttcagtgtgccatggcaactttcatattccatgccaagccaattgttctcactggttttgcggaaattgcataatgcttgtgtggcagcacggatcagtgggttgttcatgcaagtgcccactgtgtcgtcgagccatcagtctcttagtccccacagaagagtctctgaggcaacagcaggaccccgaagtttcccagattctgtcaaagattcatgcctataaccgtttcttcggtggccaacccaccactctctatcagagactgcgagatcttccctttctcttgcacaggctgctcagggaattcctccaccctcacagatcccttcctcttctcattcgcgctcgcgtctttgttgttatgatagcgagtgttatatacctcttcagccctattgacatcattcctgaagggatattaggagtagttggtttcttagatgatctcctaattgtgctcatctgcttcctacatgttgctgccctttatagatcagtactctacctccgtcatgggggttcctgaacatgttctacaattttacaggtaaaatgagatgatgatgcctagataggtgccggatatggatagtgggcattattctttcattttcaaaattgaactactttgttttctatgtacatagacaagttcaatttcaaatagtggaattagtaatggaaattac

SEQ ID NO: 60154 - protein, 186 aa, Glycine max
  peptide (1)..(186): Ceres Seq. ID no. 13594419
  misc_feature (11)..(53): Pfam Name: Zinc finger, C3HC4 type (RING finger) Pfam Description: Zinc finger, C3HC4 type (RING finger)
  misc_feature (11)..(182): Homolog of NCBI NO: 26334893 NR Description: unnamed protein product [Mus musculus]
  misc_feature (1)..(176): Homolog of NCBI NO: 26453304 NR Description: unknown protein [Arabidopsis thaliana]
  misc_feature (1)..(176): Homolog of NCBI NO: 21553438 NR Description: unknown [Arabidopsis thaliana]
  misc_feature (1)..(176): Homolog of NCBI NO: 18418331 NR Description: zinc finger (C3HC4-type RING finger) protein
  misc_feature (11)..(185): Homolog of NCBI NO: 33604158 NR Description: Unknown (protein for MGC:65779) [Danio rerio]
  misc_feature (59)..(186): Homolog of NCBI NO: 25518502 NR Description: hypothetical protein F12K8.14 - Arabidopsis
  misc_feature (5)..(185): Homolog of NCBI NO: 28376707 NR Description: unknown protein [Oryza sativa (japonica
  misc_feature (3)..(186): Homolog of NCBI NO: 18410010 NR Description: zinc finger (C3HC4-type RING finger) protein
  misc_feature (3)..(186): Homolog of NCBI NO: 21554064 NR Description: unknown [Arabidopsis thaliana]
  misc_feature (3)..(186): Homolog of NCBI NO: 18395127 NR Description: zinc finger (C3HC4-type RING finger) protein
MDSGPPANDLCSVCHGNFHIPCQANCSHWFCGNCIMLVWQHGSVGCSCKCPLCRRAISLLVPTEESLRQQQDPEVSQILSKIHAYNRFFGGQPTTLYQRLRDLPFLLHRLLREFLHPHRSLPLLIRARVFVVMIASVIYLFSPIDIIPEGILGVVGFLDDLLIVLICFLHVAALYRSVLYLRHGGS

SEQ ID NO: 60155 - protein, 151 aa, Glycine max
  peptide (1)..(151): Ceres Seq. ID no. 13594420
  misc_feature (1)..(147): Homolog of NCBI NO: 26334893 NR Description: unnamed protein product [Mus musculus]
  misc_feature (1)..(141): Homolog of NCBI NO: 26453304 NR Description: unknown protein [Arabidopsis thaliana]
  misc_feature (1)..(141): Homolog of NCBI NO: 21553438 NR Description: unknown [Arabidopsis thaliana]
  misc_feature (1)..(141): Homolog of NCBI NO: 18418331 NR Description: zinc finger (C3HC4-type RING finger) protein
  misc_feature (1)..(150): Homolog of NCBI NO: 33604158 NR Description: Unknown (protein for MGC:65779) [Danio rerio]
  misc_feature (24)..(151): Homolog of NCBI NO: 25518502 NR Description: hypothetical protein F12K8.14 - Arabidopsis
  misc_feature (1)..(150): Homolog of NCBI NO: 28376707 NR Description: unknown protein [Oryza sativa (japonica
  misc_feature (1)..(151): Homolog of NCBI NO: 18410010 NR Description: zinc finger (C3HC4-type RING finger) protein
  misc_feature (1)..(151): Homolog of NCBI NO: 21554064 NR Description: unknown [Arabidopsis thaliana]
  misc_feature (1)..(151): Homolog of NCBI NO: 18395127 NR Description: zinc finger (C3HC4-type RING finger) protein
MLVWQHGSVGCSCKCPLCRRAISLLVPTEESLRQQQDPEVSQILSKIHAYNRFFGGQPTTLYQRLRDLPFLLHRLLREFLHPHRSLPLLIRARVFVVMIASVIYLFSPIDIIPEGILGVVGFLDDLLIVLICFLHVAALYRSVLYLRHGGS

SEQ ID NO: 60156 - DNA, 876 bp, Glycine max
  misc_feature (1)..(876): Ceres Seq. ID no. 13594355
agtttatcaatggcacttctccacccaaatcttcttcccactttcaattccaacactcttacctttccttccatcaaactcaaaccctcactctcgcacgtgccttctccaacccccacacgcttcagtctctctgtttccgcggcggaaaccaccgcttttgccgcccctcccactccccaacctgagaagcttggagttgtagttaagccaacggagaagccgagacttgtgttgaagttcatatggatggagaagaacattggaattgcgcttgaccagatggtaccgggccatggcaccattcctctgagcccatattacttttggccccgaaaagatgcctgggaagagctcaaggagttgcttgagaacaagccttggcatatgccttctcccatcagtggaggccaaactgtagccagtattttggtcaggcttcttatagccttggtaaggaaagttggggttggagctggaccgagcgttgggttgcggcacgtccttgggaagttcgggttcgaggtcagaccaccaaaacaacaaaactcaacggccatgggcaggtgcaaaaaaccaaattagacaagatgaaccaaaatgaaagcaaagtagccttggctaaacctacactatcaaacgggaaggaaaggaaaacggtacttcagggctgtcaaagaacaatgtatccaaatagcccattctaatttgatggtttatggtttcttcttgcacttctttgggggtttattttccatattttgcttggtgagaatctaccttttggtgtgtacgttccactaggagagacttcacttattgtctgcttttgcatggtgcatatgattatgaatatgaattccctagttttggttg

SEQ ID NO: 60157 - protein, 194 aa, Glycine max
  peptide (1)..(194): Ceres Seq. ID no. 13594356
  misc_feature (66)..(128): Homolog of NCBI NO: 33861996 NR Description: conserved hypothetical protein
  misc_feature (75)..(128): Homolog of NCBI NO: 11467621 NR Description: unknown [Guillardia theta]
  misc_feature (76)..(128): Homolog of NCBI NO: 11465817 NR Description: ORF99 [Porphyra purpurea]
  misc_feature (76)..(128): Homolog of NCBI NO: 11466424 NR Description: hypothetical chloroplast RF65 [Mesostigma viride]
  misc_feature (61)..(128): Homolog of NCBI NO: 38344967 NR Description: OSJNBa0072F16.12 [Oryza sativa (japonica
  misc_feature (61)..(128): Homolog of NCBI NO: 6136559 NR Description: Plastid-specific 30S ribosomal protein 3,
  misc_feature (3)..(128): Homolog of NCBI NO: 18409071 NR Description: expressed protein [Arabidopsis thaliana]
  misc_feature (9)..(128): Homolog of NCBI NO: 15242377 NR Description: ribosomal protein 3 precursor-related protein
  misc_feature (3)..(128): Homolog of NCBI NO: 21554275 NR Description: plastid-specific ribosomal protein 3 precursor
  misc_feature (63)..(128): Homolog of NCBI NO: 28380123 NR Description: Plastid-specific 30S ribosomal protein 3,
SLSMALLHPNLLPTFNSNTLTFPSIKLKPSLSHVPSPTPTRFSLSVSAAETTAFAAPPTPQPEKLGVVVKPTEKPRLVLKFIWMEKNIGIALDQMVPGHGTIPLSPYYFWPRKDAWEELKELLENKPWHMPSPISGGQTVASILVRLLIALVRKVGVGAGPSVGLRHVLGKFGFEVRPPKQQNSTAMGRCKKPN

SEQ ID NO: 60158 - protein, 191 aa, Glycine max
  peptide (1)..(191): Ceres Seq. ID no. 13594357
  misc_feature (63)..(125): Homolog of NCBI NO: 33861996 NR Description: conserved hypothetical protein
  misc_feature (72)..(125): Homolog of NCBI NO: 11467621 NR Description: unknown [Guillardia theta]
  misc_feature (73)..(125): Homolog of NCBI NO: 11465817 NR Description: ORF99 [Porphyra purpurea]
  misc_feature (73)..(125): Homolog of NCBI NO: 11466424 NR Description: hypothetical chloroplast RF65 [Mesostigma viride]
  misc_feature (58)..(125): Homolog of NCBI NO: 38344967 NR Description: OSJNBa0072F16.12 [Oryza sativa (japonica
  misc_feature (58)..(125): Homolog of NCBI NO: 6136559 NR Description: Plastid-specific 30S ribosomal protein 3,
  misc_feature (1)..(125): Homolog of NCBI NO: 18409071 NR Description: expressed protein [Arabidopsis thaliana]
  misc_feature (6)..(125): Homolog of NCBI NO: 15242377 NR Description: ribosomal protein 3 precursor-related protein
  misc_feature (1)..(125): Homolog of NCBI NO: 21554275 NR Description: plastid-specific ribosomal protein 3 precursor
  misc_feature (60)..(125): Homolog of NCBI NO: 28380123 NR Description: Plastid-specific 30S ribosomal protein 3,
MALLHPNLLPTFNSNTLTFPSIKLKPSLSHVPSPTPTRFSLSVSAAETTAFAAPPTPQPEKLGVVVKPTEKPRLVLKFIWMEKNIGIALDQMVPGHGTIPLSPYYFWPRKDAWEELKELLENKPWHMPSPISGGQTVASILVRLLIALVRKVGVGAGPSVGLRHVLGKFGFEVRPPKQQNSTAMGRCKKPN

SEQ ID NO: 60159 - protein, 111 aa, Glycine max
  peptide (1)..(111): Ceres Seq. ID no. 13594358
  misc_feature (1)..(45): Homolog of NCBI NO: 33861996 NR Description: conserved hypothetical protein
  misc_feature (1)..(45): Homolog of NCBI NO: 11467621 NR Description: unknown [Guillardia theta]
  misc_feature (1)..(45): Homolog of NCBI NO: 11465817 NR Description: ORF99 [Porphyra purpurea]
  misc_feature (1)..(45): Homolog of NCBI NO: 11466424 NR Description: hypothetical chloroplast RF65 [Mesostigma viride]
  misc_feature (1)..(45): Homolog of NCBI NO: 38344967 NR Description: OSJNBa0072F16.12 [Oryza sativa (japonica
  misc_feature (1)..(45): Homolog of NCBI NO: 6136559 NR Description: Plastid-specific 30S ribosomal protein 3,
  misc_feature (1)..(45): Homolog of NCBI NO: 18409071 NR Description: expressed protein [Arabidopsis thaliana]
  misc_feature (1)..(45): Homolog of NCBI NO: 15242377 NR Description: ribosomal protein 3 precursor-related protein
  misc_feature (1)..(45): Homolog of NCBI NO: 21554275 NR Description: plastid-specific ribosomal protein 3 precursor
  misc_feature (1)..(45): Homolog of NCBI NO: 28380123 NR Description: Plastid-specific 30S ribosomal protein 3,
MEKNIGIALDQMVPGHGTIPLSPYYFWPRKDAWEELKELLENKPWHMPSPISGGQTVASILVRLLIALVRKVGVGAGPSVGLRHVLGKFGFEVRPPKQQNSTAMGRCKKPN

SEQ ID NO: 60160 - DNA, 586 bp, Glycine max
  misc_feature (1)..(586): Ceres Seq. ID no. 13638406
acatcctaatcgaaaaactttacaaccttttaagcaactccttttgctttattgatgtattcttcattttaagcaccatcatcttcctattttgttttccaatattgctgtttgttgtggtaaatttttctgtagttcatcatcatgctagaaggcaaggctgtgattggtgagactgacatgcttcagaccatgcagcaagatgctatggatttagcatccaaagcactcgatttctttgatgtcactgaagccattaagattgctcgatttataaagaaggagtttgataggatgcatggacctggttggcagtgtattgtaggcactgattttggttcgtttgtgactcactgttgtggctgtttcatctatttctgcttaggcaacttggcaattttgctattcagaggctcggctgctccagaggcacatgaaaatcggttctcagcactagatgcagccaaagcataatttcattgcctaattaattttccctctcttttgacttttctatatatatttttgttcattccatgtaatgtaatgataatgtagaaagaaatggaaggttttagagaaaagc

SEQ ID NO: 60161 - protein, 109 aa, Glycine max
  peptide (1)..(109): Ceres Seq. ID no. 13638407
  misc_feature (1)..(91): Pfam Name: Dynein light chain type 1 Pfam Description: Dynein light chain type 1
  misc_feature (1)..(89): Homolog of NCBI NO: 17933574 NR Description: cut up CG6998-PA [Drosophila melanogaster]
  misc_feature (1)..(89): Homolog of NCBI NO: 17552836 NR Description: Dynein light chain DLC-1 (10.3 kD) (dlc-1)
  misc_feature (1)..(89): Homolog of NCBI NO: 17137630 NR Description: Cytoplasmic dynein light chain 2 CG5450-PA
  misc_feature (1)..(89): Homolog of NCBI NO: 2811014 NR Description: DYNEIN LIGHT CHAIN LC6, FLAGELLAR OUTER ARM
  misc_feature (1)..(89): Homolog of NCBI NO: 34785679 NR Description: Unknown (protein for MGC:68763) [Xenopus laevis]
  misc_feature (1)..(94): Homolog of NCBI NO: 15218189 NR Description: dynein light chain -related [Arabidopsis
  misc_feature (1)..(93): Homolog of NCBI NO: 34909728 NR Description: putative dynein light chain
  misc_feature (1)..(91): Homolog of NCBI NO: 15233288 NR Description: dynein light chain protein -related [Arabidopsis
  misc_feature (8)..(103): Homolog of NCBI NO: 7486801 NR Description: hypothetical protein M4I22.170 - Arabidopsis
  misc_feature (1)..(103): Homolog of NCBI NO: 22328970 NR Description: expressed protein [Arabidopsis thaliana]
MLEGKAVIGETDMLQTMQQDAMDLASKALDFFDVTEAIKIARFIKKEFDRMHGPGWQCIVGTDFGSFVTHCCGCFIYFCLGNLAILLFRGSAAPEAHENRFSALDAAKA

SEQ ID NO: 60162 - protein, 97 aa, Glycine max
  peptide (1)..(97): Ceres Seq. ID no. 13638408
  misc_feature (1)..(79): Pfam Name: Dynein light chain type 1 Pfam Description: Dynein light chain type 1
  misc_feature (1)..(77): Homolog of NCBI NO: 17933574 NR Description: cut up CG6998-PA [Drosophila melanogaster]
  misc_feature (1)..(77): Homolog of NCBI NO: 17552836 NR Description: Dynein light chain DLC-1 (10.3 kD) (dlc-1)
  misc_feature (1)..(77): Homolog of NCBI NO: 17137630 NR Description: Cytoplasmic dynein light chain 2 CG5450-PA
  misc_feature (1)..(77): Homolog of NCBI NO: 2811014 NR Description: DYNEIN LIGHT CHAIN LC6, FLAGELLAR OUTER ARM
  misc_feature (1)..(77): Homolog of NCBI NO: 34785679 NR Description: Unknown (protein for MGC:68763) [Xenopus laevis]
  misc_feature (1)..(82): Homolog of NCBI NO: 15218189 NR Description: dynein light chain -related [Arabidopsis
  misc_feature (1)..(81): Homolog of NCBI NO: 34909728 NR Description: putative dynein light chain
  misc_feature (1)..(79): Homolog of NCBI NO: 15233288 NR Description: dynein light chain protein -related [Arabidopsis
  misc_feature (1)..(91): Homolog of NCBI NO: 7486801 NR Description: hypothetical protein M4I22.170 - Arabidopsis
  misc_feature (1)..(91): Homolog of NCBI NO: 22328970 NR Description: expressed protein [Arabidopsis thaliana]
MLQTMQQDAMDLASKALDFFDVTEAIKIARFIKKEFDRMHGPGWQCIVGTDFGSFVTHCCGCFIYFCLGNLAILLFRGSAAPEAHENRFSALDAAKA

SEQ ID NO: 60163 - protein, 93 aa, Glycine max
  peptide (1)..(93): Ceres Seq. ID no. 13638409
  misc_feature (1)..(75): Pfam Name: Dynein light chain type 1 Pfam Description: Dynein light chain type 1
  misc_feature (1)..(73): Homolog of NCBI NO: 17933574 NR Description: cut up CG6998-PA [Drosophila melanogaster]
  misc_feature (1)..(73): Homolog of NCBI NO: 17552836 NR Description: Dynein light chain DLC-1 (10.3 kD) (dlc-1)
  misc_feature (1)..(73): Homolog of NCBI NO: 17137630 NR Description: Cytoplasmic dynein light chain 2 CG5450-PA
  misc_feature (1)..(73): Homolog of NCBI NO: 2811014 NR Description: DYNEIN LIGHT CHAIN LC6, FLAGELLAR OUTER ARM
  misc_feature (1)..(73): Homolog of NCBI NO: 34785679 NR Description: Unknown (protein for MGC:68763) [Xenopus laevis]
  misc_feature (1)..(78): Homolog of NCBI NO: 15218189 NR Description: dynein light chain -related [Arabidopsis
  misc_feature (1)..(77): Homolog of NCBI NO: 34909728 NR Description: putative dynein light chain
  misc_feature (1)..(75): Homolog of NCBI NO: 15233288 NR Description: dynein light chain protein -related [Arabidopsis
  misc_feature (1)..(87): Homolog of NCBI NO: 7486801 NR Description: hypothetical protein M4I22.170 - Arabidopsis
  misc_feature (1)..(87): Homolog of NCBI NO: 22328970 NR Description: expressed protein [Arabidopsis thaliana]
MQQDAMDLASKALDFFDVTEAIKIARFIKKEFDRMHGPGWQCIVGTDFGSFVTHCCGCFIYFCLGNLAILLFRGSAAPEAHENRFSALDAAKA

SEQ ID NO: 60164 - DNA, 732 bp, Glycine max
  misc_feature (1)..(732): Ceres Seq. ID no. 13594425
acacaattaagctcaaatcaaaagtccctttgcatactatctatcacttatcagttatcacaaagcaaattcattaagtcttttgccatggcctccaacagctgcttcatcttggcttttttcattgctatttccttctcatgcatggattttggcctagcagctcgccatcttatgcaaacaagtactgcaccaaatttgcctttgccaaaaccaacattgccacctttgccttcacttccaacactgcctcagggcaatgttccacctttgcctacaatcccatctcttccaaccattccaactgttccacaggtcactcttccaccacttgctgccactttacttccaaacttccccacagtcccaaccactattccttccttccccttcttctccccaccaccttcagccaccactccctaaatgaagctactctgcttattggatacataggcactcgtatccttggagtttggttctggctttcagtgatcgttggctgcatttcgtgttgtttttatgttatacatgtgatggtgatatatattgtacgttgtccatttattgccggggaatatttatagtaatctttcattttcctttgttcttccatcttgtattgtatggataggattattgttttttcttcctcctccttacttcatgtacttggggatcatctattgttataggatatacgctatatataataaataatccatgttccct

SEQ ID NO: 60165 - protein, 148 aa, Glycine max
  peptide (1)..(148): Ceres Seq. ID no. 13594426
MHGFWPSSSPSYANKYCTKFAFAKTNIATFAFTSNTASGQCSTFAYNPISSNHSNCSTGHSSTTCCHFTSKLPHSPNHYSFLPLLLPTTFSHHSLNEATLLIGYIGTRILGVWFWLSVIVGCISCCFYVIHVMVIYIVRCPFIAGEYL

SEQ ID NO: 60166 - protein, 141 aa, Glycine max
  peptide (1)..(141): Ceres Seq. ID no. 13594427
  misc_feature (65)..(138): Homolog of NCBI NO: 34899594 NR Description: contains ESTs
  misc_feature (65)..(138): Homolog of NCBI NO: 34393335 NR Description: early nodulin 75 precursor-like protein
  misc_feature (52)..(141): Homolog of NCBI NO: 34899600 NR Description: hypothetical protein~predicted by GeneMark.hmm
  misc_feature (29)..(137): Homolog of NCBI NO: 15233688 NR Description: proline-rich protein family [Arabidopsis
  misc_feature (30)..(141): Homolog of NCBI NO: 34899598 NR Description: early nodulin 75 precursor-like protein
  misc_feature (54)..(137): Homolog of NCBI NO: 15227226 NR Description: proline-rich protein family [Arabidopsis
  misc_feature (30)..(141): Homolog of NCBI NO: 34899594 NR Description: contains ESTs
  misc_feature (30)..(141): Homolog of NCBI NO: 34393335 NR Description: early nodulin 75 precursor-like protein
  misc_feature (61)..(140): Homolog of NCBI NO: 8778315 NR Description: F14J16.29 [Arabidopsis thaliana]
  misc_feature (30)..(140): Homolog of NCBI NO: 8778315 NR Description: F14J16.29 [Arabidopsis thaliana]
TQLSSNQKSLCILSITYQLSQSKFIKSFAMASNSCFILAFFIAISFSCMDFGLAARHLMQTSTAPNLPLPKPTLPPLPSLPTLPQGNVPPLPTIPSLPTIPTVPQVTLPPLAATLLPNFPTVPTTIPSFPFFSPPPSATTP

SEQ ID NO: 60167 - protein, 112 aa, Glycine max
  peptide (1)..(112): Ceres Seq. ID no. 13594428
  misc_feature (36)..(109): Homolog of NCBI NO: 34899594 NR Description: contains ESTs
  misc_feature (36)..(109): Homolog of NCBI NO: 34393335 NR Description: early nodulin 75 precursor-like protein
  misc_feature (23)..(112): Homolog of NCBI NO: 34899600 NR Description: hypothetical protein~predicted by GeneMark.hmm
  misc_feature (1)..(108): Homolog of NCBI NO: 15233688 NR Description: proline-rich protein family [Arabidopsis
  misc_feature (1)..(112): Homolog of NCBI NO: 34899598 NR Description: early nodulin 75 precursor-like protein
  misc_feature (25)..(108): Homolog of NCBI NO: 15227226 NR Description: proline-rich protein family [Arabidopsis
  misc_feature (1)..(112): Homolog of NCBI NO: 34899594 NR Description: contains ESTs
  misc_feature (1)..(112): Homolog of NCBI NO: 34393335 NR Description: early nodulin 75 precursor-like protein
  misc_feature (32)..(111): Homolog of NCBI NO: 8778315 NR Description: F14J16.29 [Arabidopsis thaliana]
  misc_feature (1)..(111): Homolog of NCBI NO: 8778315 NR Description: F14J16.29 [Arabidopsis thaliana]
MASNSCFILAFFIAISFSCMDFGLAARHLMQTSTAPNLPLPKPTLPPLPSLPTLPQGNVPPLPTIPSLPTIPTVPQVTLPPLAATLLPNFPTVPTTIPSFPFFSPPPSATTP

SEQ ID NO: 60168 - DNA, 941 bp, Glycine max
  misc_feature (1)..(941): Ceres Seq. ID no. 12782126
gcatccgaatgtttcgctcctcgtatcctcctcatccttttatgcgtgtcttcccccaacgaaaccagcgagaccaaacgtggtaacgctttgaatctttgaattcattcaaagatcccccttctgtctccctctctacgcatatcagggcactatggctgccacggtgaaacaaatgtctttgatcgtgtcactgttcggcgtggtgtccttcattttgggtgttgttgctgaaaacaagaagcctgcggcaggaacacccgtgcctggtttggatggtgtctctgtcacctgcaagtacccagctgatccaactgttgcattggggtatctttctacagcatttcttgttgcatccactgtgactggatatctgtctttgttttacccttacaaaggaaagtctattccacaaggggttctgtttaagcacaccactttcacagtgttcttcaacatttctttgttcaccactggattagctgcagctatgctgttatggccaacaatcaccgaacacattcacctgacacgcaatgtgcaccgcaatatcaactatgaatgtcctacagctaaaactggtctacttggaggtggtgcctttctatcacttgattcatctctcctttggttgattgcccttatgctagctgacaatgctcgcgaggacttctttgaagaagaaggagaagatggtgacaagggtgaatttggcacagcctcctctgatgcttattatgatgctgattcaggaccgaaggctagttcctgaagtatgctacaagtagaaataagtgttgcacctggtatttctgtagtttccttttaatcacgctgaacaattccgtgaaataatgaatgtacatatatttaaaatggttgttctcggtgaacatttattgtgcttaagcactactgcagaaaaaaacatagttgtttgc

SEQ ID NO: 60169 - protein, 205 aa, Glycine max
  peptide (1)..(205): Ceres Seq. ID no. 12782127
  misc_feature (1)..(204): Homolog of NCBI NO: 8099143 NR Description: hypothetical protein [Oryza sativa]
  misc_feature (1)..(176): Homolog of NCBI NO: 15235839 NR Description: putative protein
MAATVKQMSLIVSLFGVVSFILGVVAENKKPAAGTPVPGLDGVSVTCKYPADPTVALGYLSTAFLVASTVTGYLSLFYPYKGKSIPQGVLFKHTTFTVFFNISLFTTGLAAAMLLWPTITEHIHLTRNVHRNINYECPTAKTGLLGGGAFLSLDSSLLWLIALMLADNAREDFFEEEGEDGDKGEFGTASSDAYYDADSGPKASS

SEQ ID NO: 60170 - protein, 198 aa, Glycine max
  peptide (1)..(198): Ceres Seq. ID no. 12782128
  misc_feature (1)..(197): Homolog of NCBI NO: 8099143 NR Description: hypothetical protein [Oryza sativa]
  misc_feature (1)..(169): Homolog of NCBI NO: 15235839 NR Description: putative protein
MSLIVSLFGVVSFILGVVAENKKPAAGTPVPGLDGVSVTCKYPADPTVALGYLSTAFLVASTVTGYLSLFYPYKGKSIPQGVLFKHTTFTVFFNISLFTTGLAAAMLLWPTITEHIHLTRNVHRNINYECPTAKTGLLGGGAFLSLDSSLLWLIALMLADNAREDFFEEEGEDGDKGEFGTASSDAYYDADSGPKASS

SEQ ID NO: 60171 - DNA, 1231 bp, Glycine max
  misc_feature (1)..(1231): Ceres Seq. ID no. 15177031
aaaaaagttgaagaatatgagcagcagtgcagggaagttggtgtgtgtcaccggtgctgccggttatattgcttcatggattgtcaagttcctacttgaacgtggttacactgtcagggccactgttcgaaacccaaatgatcacacgaaggtagaacatttgctaaaacttgaaggtgcaaaggagagactgcacctttttaaggcagatcttttgggtgaaaattcttttgactccattgttgagggctgtgatggcgtctttcatactgcttctccttttattatcaacgtcaaagacccacaggctgacctacttgacccagcagtgaagggaactcttaacgttcttaaatcatgtgtaaaatcgccatctgtgaaacgagtcatcttaacatcttctgtggctgcagttgcatataataaaaggcctaaaagtcctgaagttgtagttgatgaaacctggtggtctgatccagattactgtaaggaattaaagctgtggtatttactttcaaagactttggctgaagatgctgcctggaaatttgccaaagaaaacgaccttgacttggttgttgttaacccagcaatggttgtagggcctcttttgcaagcagagcttaacactagtgctgctattattttaaacctaataaatggttcagaaactttttcaaatgatacatatggatggatcaatgtgaaagatgttgcaaacgcccatattcaggcatatgagattgcttcagctagtggaagatattgtttagttgagagagtggcacactactctgaactcgccaggattttacgtgatcagtacccgacatatcaaattccagaaaagtctgcagacgataagccttatgtaccaacatttcaggtttccaaagaaaaggcaaagaccttggggattgaatttattcctttggaagtgagtcttagagagacagtggaaactttgaaagaaaagaactttgccaacttttagtctctgatatctctgcttgatcaggagtgaacacgttgagaatctcaacggtgtttcgtttgtggttctggttttagaatctcattgcttgaaaataaactattgtactgaaatgtcaagcttgtgtgttgtaataaaacaagattaattgttggttttatttcggtttgtactcatgaaggaaaccaacgtgtggtataaaaagataataattaagtatcaggctatttctagtcc

SEQ ID NO: 60172 - protein, 330 aa, Glycine max
  peptide (1)..(330): Ceres Seq. ID no. 15177032
  misc_feature (10)..(245): Pfam Name: 3-beta hydroxysteroid dehydrogenase/isomerase family Pfam Description: 3-beta hydroxysteroid dehydrogenase/isomerase
  misc_feature (1)..(330): Homolog of NCBI NO: 34913420 NR Description: putative cinnamyl-alcohol dehydrogenase
  misc_feature (7)..(330): Homolog of NCBI NO: 21594240 NR Description: cinnamyl-alcohol dehydrogenase-like protein
  misc_feature (7)..(330): Homolog of NCBI NO: 15239741 NR Description: cinnamyl-alcohol dehydrogenase (CAD), putative
  misc_feature (12)..(330): Homolog of NCBI NO: 25405464 NR Description: hypothetical protein F5D21.12 [imported] -
  misc_feature (6)..(330): Homolog of NCBI NO: 7431406 NR Description: probable cinnamyl-alcohol dehydrogenase (EC
  misc_feature (6)..(330): Homolog of NCBI NO: 30694964 NR Description: cinnamyl-alcohol dehydrogenase (CAD), putative
  misc_feature (6)..(330): Homolog of NCBI NO: 37029996 NR Description: NADPH-dependent cinnamyl alcohol dehydrogenase
  misc_feature (6)..(327): Homolog of NCBI NO: 5852203 NR Description: aldehyde reductase [Vigna radiata]
  misc_feature (7)..(330): Homolog of NCBI NO: 7431409 NR Description: cinnamyl-alcohol dehydrogenase (EC 1.1.1.195) -
  misc_feature (6)..(330): Homolog of NCBI NO: 7488627 NR Description: probable cinnamyl-alcohol dehydrogenase (EC
KKLKNMSSSAGKLVCVTGAAGYIASWIVKFLLERGYTVRATVRNPNDHTKVEHLLKLEGAKERLHLFKADLLGENSFDSIVEGCDGVFHTASPFIINVKDPQADLLDPAVKGTLNVLKSCVKSPSVKRVILTSSVAAVAYNKRPKSPEVVVDETWWSDPDYCKELKLWYLLSKTLAEDAAWKFAKENDLDLVVVNPAMVVGPLLQAELNTSAAIILNLINGSETFSNDTYGWINVKDVANAHIQAYEIASASGRYCLVERVAHYSELARILRDQYPTYQIPEKSADDKPYVPTFQVSKEKAKTLGIEFIPLEVSLRETVETLKEKNFANF

SEQ ID NO: 60173 - protein, 325 aa, Glycine max
  peptide (1)..(325): Ceres Seq. ID no. 15177033
  misc_feature (5)..(240): Pfam Name: 3-beta hydroxysteroid dehydrogenase/isomerase family Pfam Description: 3-beta hydroxysteroid dehydrogenase/isomerase
  misc_feature (1)..(325): Homolog of NCBI NO: 34913420 NR Description: putative cinnamyl-alcohol dehydrogenase
  misc_feature (2)..(325): Homolog of NCBI NO: 21594240 NR Description: cinnamyl-alcohol dehydrogenase-like protein
  misc_feature (2)..(325): Homolog of NCBI NO: 15239741 NR Description: cinnamyl-alcohol dehydrogenase (CAD), putative
  misc_feature (7)..(325): Homolog of NCBI NO: 25405464 NR Description: hypothetical protein F5D21.12 [imported] -
  misc_feature (1)..(325): Homolog of NCBI NO: 7431406 NR Description: probable cinnamyl-alcohol dehydrogenase (EC
  misc_feature (1)..(325): Homolog of NCBI NO: 30694964 NR Description: cinnamyl-alcohol dehydrogenase (CAD), putative
  misc_feature (1)..(325): Homolog of NCBI NO: 37029996 NR Description: NADPH-dependent cinnamyl alcohol dehydrogenase
  misc_feature (1)..(322): Homolog of NCBI NO: 5852203 NR Description: aldehyde reductase [Vigna radiata]
  misc_feature (2)..(325): Homolog of NCBI NO: 7431409 NR Description: cinnamyl-alcohol dehydrogenase (EC 1.1.1.195) -
  misc_feature (1)..(325): Homolog of NCBI NO: 7488627 NR Description: probable cinnamyl-alcohol dehydrogenase (EC
MSSSAGKLVCVTGAAGYIASWIVKFLLERGYTVRATVRNPNDHTKVEHLLKLEGAKERLHLFKADLLGENSFDSIVEGCDGVFHTASPFIINVKDPQADLLDPAVKGTLNVLKSCVKSPSVKRVILTSSVAAVAYNKRPKSPEVVVDETWWSDPDYCKELKLWYLLSKTLAEDAAWKFAKENDLDLVVVNPAMVVGPLLQAELNTSAAIILNLINGSETFSNDTYGWINVKDVANAHIQAYEIASASGRYCLVERVAHYSELARILRDQYPTYQIPEKSADDKPYVPTFQVSKEKAKTLGIEFIPLEVSLRETVETLKEKNFANF

SEQ ID NO: 60174 - DNA, 625 bp, Glycine max
  misc_feature (1)..(625): Ceres Seq. ID no. 15172828
aatttatctttggggaggcgggccgggattggagacagagcccacaaggcaacaacaaagtgcgcgtgagaaatcaacaagcggtgcttgccgagaagagagagagagagatggcggcgtcggcggcgacggcaacggcggcggcggtgggggcgggggaggtgatctccgtccacaccctggagcagtggaccatgcagatcgaggaggccaacgccgccaagaagctggtggtggttgacttcactgcatcatggtgtggaccatgccgcatcatggctccagttttcgctgatctcgccaagaagttcccaaatgctgttttcctcaaggtcgatgtcgatgaactgaagcccattgcggagcaattcagcgttgaggccatgccaaccttcctgttcattaaggaaggagatgtcaaggacagggttgtgggagctatcaaggaggaactgacgaacaaggttgggctacacgcggcggcccagtaatcacctagcggagtagtattcgcctaaataaaattgtggctcaagaagcggtgcctctaatggcaccttatatcctgtgtactgcttgttacttgttggttggatgatggtgaatcaagtgtgactttattcgg

SEQ ID NO: 60175 - protein, 162 aa, Glycine max
  peptide (1)..(162): Ceres Seq. ID no. 15172829
  misc_feature (54)..(160): Pfam Name: Thioredoxin Pfam Description: Thioredoxin
  misc_feature (52)..(158): Homolog of NCBI NO: 15239136 NR Description: thioredoxin H-type 3 (TRX-H-3) [Arabidopsis
  misc_feature (52)..(160): Homolog of NCBI NO: 27466894 NR Description: thioredoxin h [Pisum sativum]
  misc_feature (52)..(160): Homolog of NCBI NO: 15230385 NR Description: thioredoxin H-type 1 (TRX-H-1) [Arabidopsis
  misc_feature (50)..(158): Homolog of NCBI NO: 15219537 NR Description: thioredoxin H-type 5 (TRX-H-5) [Arabidopsis
  misc_feature (50)..(158): Homolog of NCBI NO: 1388084 NR Description: thioredoxin h
  misc_feature (37)..(160): Homolog of NCBI NO: 12082335 NR Description: thioredoxin h [Oryza sativa (japonica
  misc_feature (41)..(162): Homolog of NCBI NO: 32186042 NR Description: thioredoxin h isoform 2; HvTrxh2 [Hordeum vulgare
  misc_feature (38)..(161): Homolog of NCBI NO: 2995380 NR Description: thioredoxin H [Triticum turgidum subsp. durum]
  misc_feature (37)..(160): Homolog of NCBI NO: 11135126 NR Description: Thioredoxin H-type (TRX-H) (TrxTa)
  misc_feature (37)..(160): Homolog of NCBI NO: 8980491 NR Description: thioredoxin h [Triticum aestivum]
FIFGEAGRDWRQSPQGNNKVRVRNQQAVLAEKREREMAASAATATAAAVGAGEVISVHTLEQWTMQIEEANAAKKLVVVDFTASWCGPCRIMAPVFADLAKKFPNAVFLKVDVDELKPIAEQFSVEAMPTFLFIKEGDVKDRVVGAIKEELTNKVGLHAAAQ

SEQ ID NO: 60176 - protein, 126 aa, Glycine max
  peptide (1)..(126): Ceres Seq. ID no. 15172830
  misc_feature (18)..(124): Pfam Name: Thioredoxin Pfam Description: Thioredoxin
  misc_feature (16)..(122): Homolog of NCBI NO: 15239136 NR Description: thioredoxin H-type 3 (TRX-H-3) [Arabidopsis
  misc_feature (16)..(124): Homolog of NCBI NO: 27466894 NR Description: thioredoxin h [Pisum sativum]
  misc_feature (16)..(124): Homolog of NCBI NO: 15230385 NR Description: thioredoxin H-type 1 (TRX-H-1) [Arabidopsis
  misc_feature (14)..(122): Homolog of NCBI NO: 15219537 NR Description: thioredoxin H-type 5 (TRX-H-5) [Arabidopsis
  misc_feature (14)..(122): Homolog of NCBI NO: 1388084 NR Description: thioredoxin h
  misc_feature (1)..(124): Homolog of NCBI NO: 12082335 NR Description: thioredoxin h [Oryza sativa (japonica
  misc_feature (5)..(126): Homolog of NCBI NO: 32186042 NR Description: thioredoxin h isoform 2; HvTrxh2 [Hordeum vulgare
  misc_feature (2)..(125): Homolog of NCBI NO: 2995380 NR Description: thioredoxin H [Triticum turgidum subsp. durum]
  misc_feature (1)..(124): Homolog of NCBI NO: 11135126 NR Description: Thioredoxin H-type (TRX-H) (TrxTa)
  misc_feature (1)..(124): Homolog of NCBI NO: 8980491 NR Description: thioredoxin h [Triticum aestivum]
MAASAATATAAAVGAGEVISVHTLEQWTMQIEEANAAKKLVVVDFTASWCGPCRIMAPVFADLAKKFPNAVFLKVDVDELKPIAEQFSVEAMPTFLFIKEGDVKDRVVGAIKEELTNKVGLHAAAQ

SEQ ID NO: 60177 - protein, 98 aa, Glycine max
  peptide (1)..(98): Ceres Seq. ID no. 15172831
  misc_feature (1)..(96): Pfam Name: Thioredoxin Pfam Description: Thioredoxin
  misc_feature (1)..(94): Homolog of NCBI NO: 15239136 NR Description: thioredoxin H-type 3 (TRX-H-3) [Arabidopsis
  misc_feature (1)..(96): Homolog of NCBI NO: 27466894 NR Description: thioredoxin h [Pisum sativum]
  misc_feature (1)..(96): Homolog of NCBI NO: 15230385 NR Description: thioredoxin H-type 1 (TRX-H-1) [Arabidopsis
  misc_feature (1)..(94): Homolog of NCBI NO: 15219537 NR Description: thioredoxin H-type 5 (TRX-H-5) [Arabidopsis
  misc_feature (1)..(94): Homolog of NCBI NO: 1388084 NR Description: thioredoxin h
  misc_feature (1)..(96): Homolog of NCBI NO: 12082335 NR Description: thioredoxin h [Oryza sativa (japonica
  misc_feature (1)..(98): Homolog of NCBI NO: 32186042 NR Description: thioredoxin h isoform 2; HvTrxh2 [Hordeum vulgare
  misc_feature (1)..(97): Homolog of NCBI NO: 2995380 NR Description: thioredoxin H [Triticum turgidum subsp. durum]
  misc_feature (1)..(96): Homolog of NCBI NO: 11135126 NR Description: Thioredoxin H-type (TRX-H) (TrxTa)
  misc_feature (1)..(96): Homolog of NCBI NO: 8980491 NR Description: thioredoxin h [Triticum aestivum]
MQIEEANAAKKLVVVDFTASWCGPCRIMAPVFADLAKKFPNAVFLKVDVDELKPIAEQFSVEAMPTFLFIKEGDVKDRVVGAIKEELTNKVGLHAAAQ

SEQ ID NO: 60178 - DNA, 908 bp, Glycine max
  misc_feature (1)..(908): Ceres Seq. ID no. 13638318
agaaaatttgaacatatgttccttttttgttacaacgttgttgtttccaacggtacaacggtagatgatgggaacgctatctacgcaatttcgttccatcaaacgcccaaatccaaaccctaaactatccaaatcgtcatctcctacaaaatcagaaattaaattcatcgctaaaccaaaaccaaaatcagagtcagagtcagagtcatggtctgtttatctcatcctctccaccaaccatcctatcaaaacctacgttggaattacaaacaatttccctcgccgtttgaagcagcataacggtgaacttaaaggtggtgcaaaggcatcccgtgctggaagaccttggatttgtgcatgcataatttgtggttttacagaccgaagtgaagctagtgtatttgaatcaaaatggaaaactttctcaaggagagctccccgcaaaaatcaaaatgacaatctctccaagcaaagtgaagattcatcattaccactgctgcgacacagacaagcggctctgaatagagtgaaaggttcactcgactgcgctcacttagaaattatttggcatttggatccattgtgatccaactgccacaatgtatgtgttttgattatgtaattgtaataagttcaaatagcaaaacataggccataagagaaatattaagaacacattttgtgttattagttaaaatttattgaaaattataaaattataagtggatttcattaagtaaaaagtgagatcctccaaattttataattttttataataaagaatattaaaaagagtgcgtagctagcatttttctatatttgatagtactagcaaattgtaccagacattgattggttcttgtagtaaggtctttgtatagtatataagtgacgaaaggttataattt

SEQ ID NO: 60179 - protein, 173 aa, Glycine max
  peptide (1)..(173): Ceres Seq. ID no. 13638319
  misc_feature (69)..(101): Homolog of NCBI NO: 9294275 NR Description: gene_id:MZN14.8~unknown protein [Arabidopsis
  misc_feature (52)..(118): Homolog of NCBI NO: 19114332 NR Description: conserved hypothetical protein
  misc_feature (1)..(170): Homolog of NCBI NO: 15239808 NR Description: expressed protein [Arabidopsis thaliana]
MMGTLSTQFRSIKRPNPNPKLSKSSSPTKSEIKFIAKPKPKSESESESWSVYLILSTNHPIKTYVGITNNFPRRLKQHNGELKGGAKASRAGRPWICACIICGFTDRSEASVFESKWKTFSRRAPRKNQNDNLSKQSEDSSLPLLRHRQAALNRVKGSLDCAHLEIIWHLDPL

SEQ ID NO: 60180 - protein, 172 aa, Glycine max
  peptide (1)..(172): Ceres Seq. ID no. 13638320
  misc_feature (68)..(100): Homolog of NCBI NO: 9294275 NR Description: gene_id:MZN14.8~unknown protein [Arabidopsis
  misc_feature (51)..(117): Homolog of NCBI NO: 19114332 NR Description: conserved hypothetical protein
  misc_feature (1)..(169): Homolog of NCBI NO: 15239808 NR Description: expressed protein [Arabidopsis thaliana]
MGTLSTQFRSIKRPNPNPKLSKSSSPTKSEIKFIAKPKPKSESESESWSVYLILSTNHPIKTYVGITNNFPRRLKQHNGELKGGAKASRAGRPWICACIICGFTDRSEASVFESKWKTFSRRAPRKNQNDNLSKQSEDSSLPLLRHRQAALNRVKGSLDCAHLEIIWHLDPL

SEQ ID NO: 60181 - DNA, 1255 bp, Glycine max
  misc_feature (1)..(1255): Ceres Seq. ID no. 13594430
aaaaattgaataagaccataaaagttcgacatagttggtgttcactgctttttctcttttttcccgtggatcatcccaaagctctctgctttttggtggcacagatcccttgctgggtttaagttcctcactttggattctcccccaaatgggttcctttgatcgattgtttaaccgccaaagaggtcttcatgagatccttggtggtggtcaagttgcagatttaattctgtggaggcgtaagaaccttactgtggggatattgttggtcacactaggtgtttgggttgtgtttgagagatctggttatactcttctgtctcttatttctaatgttctccttctcctcattgtcattctctttctttgggccaaatcagcagatattctcaacagacctgctccacctctaccacagctgcgtctctcagaggaaatggcaaatgaagcgaagacttttatctgcacaagagttaatgatctgttgtcagtttctcaagatattgctctcggaaaagactcgaggctgtttctcaaagtagctgcatacctctggttaatttctattattggtggcttaactgatttccttaccctggcatacaccagtcttcttttggttcttacagtaccagcaatctatgaaagatatgaagattacatagatatgtatatcttgaagggttacagaaaattatgcctattgcatgttaaaataaatgagggatatgtcagcaaagtccacaactggattctggagaagaaaaagctaagctgagtttgtgtttttcgcattcattttgataagttctcttattattcttctaaagtatttcttacaggatcactggtgagattgtaattgtgagtttgagggacaacaatagtgatcttctccccccaaaaatgagtgtcttcctttttgcattttccatcttcaatgatggatcccttttttggtacataatgatgaaactcttacgttggactggttcatgtagtccactaagtatttaagatttcttcttaggttaacaaagaaaaaatataggtgtcactacctatacacaatataaaatgtgtttgccaagtatttgtacatgtaaataatataggtacaattattattnnnnaaaaaaaaaaaaaaaaaaaaaaaaaaaaaaaaaaaaaaaaaaaaaaaaaaaatttaaaaaaaaaaaaaaaagggtttttcgttcccgccaccctcgggggggggcccggaccccatttcccc

SEQ ID NO: 60182 - protein, 209 aa, Glycine max
  peptide (1)..(209): Ceres Seq. ID no. 15221352
  misc_feature (6)..(207): Homolog of NCBI NO: 15236556 NR Description: expressed protein [Arabidopsis thaliana]
  misc_feature (1)..(207): Homolog of NCBI NO: 15238125 NR Description: expressed protein [Arabidopsis thaliana]
  misc_feature (6)..(207): Homolog of NCBI NO: 34904202 NR Description: P0492F05.25 [Oryza sativa (japonica
  misc_feature (6)..(207): Homolog of NCBI NO: 26450318 NR Description: unknown protein [Arabidopsis thaliana]
  misc_feature (14)..(173): Homolog of NCBI NO: 21593206 NR Description: unknown [Arabidopsis thaliana]
  misc_feature (14)..(173): Homolog of NCBI NO: 18402246 NR Description: expressed protein [Arabidopsis thaliana]
  misc_feature (11)..(173): Homolog of NCBI NO: 38345298 NR Description: OSJNBa0043A12.26 [Oryza sativa (japonica
  misc_feature (147)..(197): Homolog of NCBI NO: 38344513 NR Description: OSJNBa0016N04.6 [Oryza sativa (japonica
  misc_feature (28)..(153): Homolog of NCBI NO: 38344513 NR Description: OSJNBa0016N04.6 [Oryza sativa (japonica
  misc_feature (3)..(172): Homolog of NCBI NO: 15232423 NR Description: expressed protein [Arabidopsis thaliana]
MGSFDRLFNRQRGLHEILGGGQVADLILWRRKNLTVGILLVTLGVWVVFERSGYTLLSLISNVLLLLIVILFLWAKSADILNRPAPPLPQLRLSEEMANEAKTFICTRVNDLLSVSQDIALGKDSRLFLKVAAYLWLISIIGGLTDFLTLAYTSLLLVLTVPAIYERYEDYIDMYILKGYRKLCLLHVKINEGYVSKVHNWILEKKKLS

SEQ ID NO: 60183 - protein, 113 aa, Glycine max
  peptide (1)..(113): Ceres Seq. ID no. 15221353
  misc_feature (1)..(111): Homolog of NCBI NO: 15236556 NR Description: expressed protein [Arabidopsis thaliana]
  misc_feature (1)..(111): Homolog of NCBI NO: 15238125 NR Description: expressed protein [Arabidopsis thaliana]
  misc_feature (1)..(111): Homolog of NCBI NO: 34904202 NR Description: P0492F05.25 [Oryza sativa (japonica
  misc_feature (1)..(111): Homolog of NCBI NO: 26450318 NR Description: unknown protein [Arabidopsis thaliana]
  misc_feature (1)..(77): Homolog of NCBI NO: 21593206 NR Description: unknown [Arabidopsis thaliana]
  misc_feature (1)..(77): Homolog of NCBI NO: 18402246 NR Description: expressed protein [Arabidopsis thaliana]
  misc_feature (1)..(77): Homolog of NCBI NO: 38345298 NR Description: OSJNBa0043A12.26 [Oryza sativa (japonica
  misc_feature (51)..(101): Homolog of NCBI NO: 38344513 NR Description: OSJNBa0016N04.6 [Oryza sativa (japonica
  misc_feature (1)..(57): Homolog of NCBI NO: 38344513 NR Description: OSJNBa0016N04.6 [Oryza sativa (japonica
  misc_feature (1)..(76): Homolog of NCBI NO: 15232423 NR Description: expressed protein [Arabidopsis thaliana]
MANEAKTFICTRVNDLLSVSQDIALGKDSRLFLKVAAYLWLISIIGGLTDFLTLAYTSLLLVLTVPAIYERYEDYIDMYILKGYRKLCLLHVKINEGYVSKVHNWILEKKKLS

SEQ ID NO: 60184 - DNA, 1455 bp, Glycine max
  misc_feature (1)..(1455): Ceres Seq. ID no. 13639636
tcctaatcgaaaaaaaacctaatagtaatagtagcaagtttctttcttttttgctctctctctctccatggacttccatctgaagcaatggagaaaccagcacgagtcagaggaacaacattctacaaagatgccaaaacttctccctgaatcccatcaacaacaacagccatcagcctctgcactccctttgtttgtacctgaacccaacagcagcaaagtcagcaccctgtcagattcaacattagcttctgctacaatgacttctaccaccactaacagattatttcccaggatggggagctacttcagcttgtctcagtggcaggagcttgagttgcaggctttgatattcaggtacatgttggctggtgctgctgttcctcctgaactccttcaaccaatcaagaaaagccttcttcattctccacactattacctccatcaccctctccaacattaccaaccttctgctttgttgcaatcagggtattggggtagaggagcgatggatccggagccagggcggtgccggagaaccgacggcaagaagtggcgctgttcgagggacgtggtggctgggcaaaagtactgtgagcgccacatgcaccgtggaagaaaccgttcaagaaagcctgtggaactacccacaccaactagtgctattaacaattgtggtgtaactggagttggatccctaggaccaggtgcttcatcatcttccatttgttcaccacccttagcttctgcttcattcaaatctccttttgatcttcatcttgatgaacgttcctctgggaccaagaatgaagacgaagatcatgtgggtggggatggcagatcaggtggaggtggtggccatatgctgaggcatttcttcgatgattggccacgatcactccaagactctgacaacgttgaaaacaatgctgctgctggccgtagcctctctatttcaatgcccggtgcttcctcggatgtgtcattgaaattgtccacgggctatggagaggactcgggcccaggaaatgagaatgtaagcctcgagccagagcagctgcagttgaattgggccggaggatgggcctcgtctaatcaagtggcttcgatgggaggtccacttgctgaggcactcagatcatctacttcaacctcatctcccactagtgttttgcatcgtcacttgcctcgtggatctgagaccagctttattagcacctgaatttagttatagtgggtgccccgattatttttctgtttcttgtttcgaggtttaagttccacttttggagcattcttggaccacggttatgttcttttcaaactgtgtagactacttttgtttctaagtgggcgatgaaaggatatggtcggtccctggttggattaattcgaagtaatactaaattgtcaattaacaatcacattttctttatgaaagtactttagttcctc

SEQ ID NO: 60185 - protein, 384 aa, Glycine max
  peptide (1)..(384): Ceres Seq. ID no. 13639637
  misc_feature (78)..(235): Homolog of NCBI NO: 6573149 NR Description: growth-regulating factor 1 [Oryza sativa]
  misc_feature (81)..(247): Homolog of NCBI NO: 32470646 NR Description: putative growth-regulating factor [Solanum
  misc_feature (81)..(247): Homolog of NCBI NO: 32470630 NR Description: putative growth-regulating factor [Solanum
  misc_feature (6)..(371): Homolog of NCBI NO: 15227652 NR Description: transcription activator (GRL3) [Arabidopsis
  misc_feature (7)..(371): Homolog of NCBI NO: 26449924 NR Description: unknown protein [Arabidopsis thaliana]
  misc_feature (1)..(189): Homolog of NCBI NO: 27808514 NR Description: At3g52910 [Arabidopsis thaliana]
  misc_feature (1)..(199): Homolog of NCBI NO: 26449924 NR Description: unknown protein [Arabidopsis thaliana]
  misc_feature (1)..(199): Homolog of NCBI NO: 15227652 NR Description: transcription activator (GRL3) [Arabidopsis
  misc_feature (1)..(371): Homolog of NCBI NO: 21539886 NR Description: transcription activator [Arabidopsis thaliana]
  misc_feature (1)..(371): Homolog of NCBI NO: 15231708 NR Description: expressed protein [Arabidopsis thaliana]
MDFHLKQWRNQHESEEQHSTKMPKLLPESHQQQQPSASALPLFVPEPNSSKVSTLSDSTLASATMTSTTTNRLFPRMGSYFSLSQWQELELQALIFRYMLAGAAVPPELLQPIKKSLLHSPHYYLHHPLQHYQPSALLQSGYWGRGAMDPEPGRCRRTDGKKWRCSRDVVAGQKYCERHMHRGRNRSRKPVELPTPTSAINNCGVTGVGSLGPGASSSSICSPPLASASFKSPFDLHLDERSSGTKNEDEDHVGGDGRSGGGGGHMLRHFFDDWPRSLQDSDNVENNAAAGRSLSISMPGASSDVSLKLSTGYGEDSGPGNENVSLEPEQLQLNWAGGWASSNQVASMGGPLAEALRSSTSTSSPTSVLHRHLPRGSETSFIST

SEQ ID NO: 60186 - protein, 363 aa, Glycine max
  peptide (1)..(363): Ceres Seq. ID no. 13639638
  misc_feature (57)..(214): Homolog of NCBI NO: 6573149 NR Description: growth-regulating factor 1 [Oryza sativa]
  misc_feature (60)..(226): Homolog of NCBI NO: 32470646 NR Description: putative growth-regulating factor [Solanum
  misc_feature (60)..(226): Homolog of NCBI NO: 32470630 NR Description: putative growth-regulating factor [Solanum
  misc_feature (1)..(350): Homolog of NCBI NO: 15227652 NR Description: transcription activator (GRL3) [Arabidopsis
  misc_feature (1)..(350): Homolog of NCBI NO: 26449924 NR Description: unknown protein [Arabidopsis thaliana]
  misc_feature (1)..(168): Homolog of NCBI NO: 27808514 NR Description: At3g52910 [Arabidopsis thaliana]
  misc_feature (1)..(178): Homolog of NCBI NO: 26449924 NR Description: unknown protein [Arabidopsis thaliana]
  misc_feature (1)..(178): Homolog of NCBI NO: 15227652 NR Description: transcription activator (GRL3) [Arabidopsis
  misc_feature (1)..(350): Homolog of NCBI NO: 21539886 NR Description: transcription activator [Arabidopsis thaliana]
  misc_feature (1)..(350): Homolog of NCBI NO: 15231708 NR Description: expressed protein [Arabidopsis thaliana]
MPKLLPESHQQQQPSASALPLFVPEPNSSKVSTLSDSTLASATMTSTTTNRLFPRMGSYFSLSQWQELELQALIFRYMLAGAAVPPELLQPIKKSLLHSPHYYLHHPLQHYQPSALLQSGYWGRGAMDPEPGRCRRTDGKKWRCSRDVVAGQKYCERHMHRGRNRSRKPVELPTPTSAINNCGVTGVGSLGPGASSSSICSPPLASASFKSPFDLHLDERSSGTKNEDEDHVGGDGRSGGGGGHMLRHFFDDWPRSLQDSDNVENNAAAGRSLSISMPGASSDVSLKLSTGYGEDSGPGNENVSLEPEQLQLNWAGGWASSNQVASMGGPLAEALRSSTSTSSPTSVLHRHLPRGSETSFIST

SEQ ID NO: 60187 - protein, 320 aa, Glycine max
  peptide (1)..(320): Ceres Seq. ID no. 13639639
  misc_feature (14)..(171): Homolog of NCBI NO: 6573149 NR Description: growth-regulating factor 1 [Oryza sativa]
  misc_feature (17)..(183): Homolog of NCBI NO: 32470646 NR Description: putative growth-regulating factor [Solanum
  misc_feature (17)..(183): Homolog of NCBI NO: 32470630 NR Description: putative growth-regulating factor [Solanum
  misc_feature (1)..(307): Homolog of NCBI NO: 15227652 NR Description: transcription activator (GRL3) [Arabidopsis
  misc_feature (1)..(307): Homolog of NCBI NO: 26449924 NR Description: unknown protein [Arabidopsis thaliana]
  misc_feature (1)..(125): Homolog of NCBI NO: 27808514 NR Description: At3g52910 [Arabidopsis thaliana]
  misc_feature (1)..(135): Homolog of NCBI NO: 26449924 NR Description: unknown protein [Arabidopsis thaliana]
  misc_feature (1)..(135): Homolog of NCBI NO: 15227652 NR Description: transcription activator (GRL3) [Arabidopsis
  misc_feature (1)..(307): Homolog of NCBI NO: 21539886 NR Description: transcription activator [Arabidopsis thaliana]
  misc_feature (1)..(307): Homolog of NCBI NO: 15231708 NR Description: expressed protein [Arabidopsis thaliana]
MTSTTTNRLFPRMGSYFSLSQWQELELQALIFRYMLAGAAVPPELLQPIKKSLLHSPHYYLHHPLQHYQPSALLQSGYWGRGAMDPEPGRCRRTDGKKWRCSRDVVAGQKYCERHMHRGRNRSRKPVELPTPTSAINNCGVTGVGSLGPGASSSSICSPPLASASFKSPFDLHLDERSSGTKNEDEDHVGGDGRSGGGGGHMLRHFFDDWPRSLQDSDNVENNAAAGRSLSISMPGASSDVSLKLSTGYGEDSGPGNENVSLEPEQLQLNWAGGWASSNQVASMGGPLAEALRSSTSTSSPTSVLHRHLPRGSETSFIST

SEQ ID NO: 60188 - DNA, 1326 bp, Glycine max
  misc_feature (1)..(1326): Ceres Seq. ID no. 13528075
catggaggaccacaccccatttctctagcactgattaaacaataatctttgatttttttggtcctccggtcatccttgatgtgttcacaggaggtatgctctggtattttatatgacttaattagttcattttaaatgaatttaatttaatttaccaaattcagtaatgaaattgaatcagctaaattcaaccatgtatgaggtttcttgtagaattagcatgcagccaaccatatgcttcttagaatcttagtgacaacctgtagatgaagtgtgtcatatctttatcatttgttgtttctgttaactgatgatgatctactctgtaagttgtaactgtaatatagtaacattccttatttcatgttcctcttccaaccctaattgctttatctttctggtcatccagtggctagtatagaagaaccataagcactgagggaaaaagtgattagtactttagccaacaaattaaaaatggctgtcaccaaggtctacattgtgtattactccttatatggacatgtagacaccatggctagagaagtacacagaggggctgctacagttgaaggtgttgaagcaacactttggagggtacctgagatgctttcggaactaatattggataagttgaaggcccctcctaaaccaaatgatgtaccagacataatgccagaacaacttgtggaggctgatggtttgatatttggttttccttctcgttttgggatgatgccgagccagctcaaggccttctttgatgcaactagtgagctatgggcatcccaagcacttgccggcaaacctgctggaatcttctggagtactggtttttatggtggaggccaagaactatcagcattgacagctataactcaattagctcatcatggtatgctttttgttcctcttggatacacctttggaagtggcatgtttgagatagatgaggtaaaaggaggatctgcatatggtgctggaacttttgcaggagatggatctcgtcaacctacagaactagaactgcagcaggcattttaccagggtaaatatcttgccgaagtaacaaaaaagctgaaaagctaacttctctgcctaacaaatacatgacaggatactatgaactgtgatgtgctacattatctataacatttgattgaagactcgatgattatttttaccggtaagacaagatagaaagacctcatgtggcttttctttttctgggttctgttgttgcaacaatgtatatcttctgttatctctttcagaaaactctcaaattattccaatgaaatgataaacaagatattcagtatttcc

SEQ ID NO: 60189 - protein, 203 aa, Glycine max
  peptide (1)..(203): Ceres Seq. ID no. 13528076
  misc_feature (1)..(201): Homolog of NCBI NO: 15234512 NR Description: quinone reductase family [Arabidopsis thaliana]
  misc_feature (4)..(202): Homolog of NCBI NO: 7445353 NR Description: hypothetical protein M4I22.80 - Arabidopsis
  misc_feature (5)..(202): Homolog of NCBI NO: 38636776 NR Description: putative quinone-oxidoreductase QR2
  misc_feature (4)..(202): Homolog of NCBI NO: 12484052 NR Description: quinone-oxidoreductase QR2 [Triphysaria
  misc_feature (1)..(202): Homolog of NCBI NO: 34910128 NR Description: putative 1,4-benzoquinone reductase
  misc_feature (4)..(202): Homolog of NCBI NO: 5031275 NR Description: unknown [Prunus armeniaca]
  misc_feature (1)..(202): Homolog of NCBI NO: 21068664 NR Description: putative quinone oxidoreductase [Cicer arietinum]
  misc_feature (4)..(202): Homolog of NCBI NO: 30687535 NR Description: quinone reductase family [Arabidopsis thaliana]
  misc_feature (4)..(202): Homolog of NCBI NO: 15239652 NR Description: quinone reductase, putative [Arabidopsis
  misc_feature (1)..(202): Homolog of NCBI NO: 22327957 NR Description: quinone reductase family [Arabidopsis thaliana]
MAVTKVYIVYYSLYGHVDTMAREVHRGAATVEGVEATLWRVPEMLSELILDKLKAPPKPNDVPDIMPEQLVEADGLIFGFPSRFGMMPSQLKAFFDATSELWASQALAGKPAGIFWSTGFYGGGQELSALTAITQLAHHGMLFVPLGYTFGSGMFEIDEVKGGSAYGAGTFAGDGSRQPTELELQQAFYQGKYLAEVTKKLKS

SEQ ID NO: 60190 - protein, 184 aa, Glycine max
  peptide (1)..(184): Ceres Seq. ID no. 13528077
  misc_feature (1)..(182): Homolog of NCBI NO: 15234512 NR Description: quinone reductase family [Arabidopsis thaliana]
  misc_feature (1)..(183): Homolog of NCBI NO: 7445353 NR Description: hypothetical protein M4I22.80 - Arabidopsis
  misc_feature (1)..(183): Homolog of NCBI NO: 38636776 NR Description: putative quinone-oxidoreductase QR2
  misc_feature (1)..(183): Homolog of NCBI NO: 12484052 NR Description: quinone-oxidoreductase QR2 [Triphysaria
  misc_feature (1)..(183): Homolog of NCBI NO: 34910128 NR Description: putative 1,4-benzoquinone reductase
  misc_feature (1)..(183): Homolog of NCBI NO: 5031275 NR Description: unknown [Prunus armeniaca]
  misc_feature (1)..(183): Homolog of NCBI NO: 21068664 NR Description: putative quinone oxidoreductase [Cicer arietinum]
  misc_feature (1)..(183): Homolog of NCBI NO: 30687535 NR Description: quinone reductase family [Arabidopsis thaliana]
  misc_feature (1)..(183): Homolog of NCBI NO: 15239652 NR Description: quinone reductase, putative [Arabidopsis
  misc_feature (1)..(183): Homolog of NCBI NO: 22327957 NR Description: quinone reductase family [Arabidopsis thaliana]
MAREVHRGAATVEGVEATLWRVPEMLSELILDKLKAPPKPNDVPDIMPEQLVEADGLIFGFPSRFGMMPSQLKAFFDATSELWASQALAGKPAGIFWSTGFYGGGQELSALTAITQLAHHGMLFVPLGYTFGSGMFEIDEVKGGSAYGAGTFAGDGSRQPTELELQQAFYQGKYLAEVTKKLKS

SEQ ID NO: 60191 - protein, 160 aa, Glycine max
  peptide (1)..(160): Ceres Seq. ID no. 13528078
  misc_feature (1)..(158): Homolog of NCBI NO: 15234512 NR Description: quinone reductase family [Arabidopsis thaliana]
  misc_feature (1)..(159): Homolog of NCBI NO: 7445353 NR Description: hypothetical protein M4I22.80 - Arabidopsis
  misc_feature (1)..(159): Homolog of NCBI NO: 38636776 NR Description: putative quinone-oxidoreductase QR2
  misc_feature (1)..(159): Homolog of NCBI NO: 12484052 NR Description: quinone-oxidoreductase QR2 [Triphysaria
  misc_feature (1)..(159): Homolog of NCBI NO: 34910128 NR Description: putative 1,4-benzoquinone reductase
  misc_feature (1)..(159): Homolog of NCBI NO: 5031275 NR Description: unknown [Prunus armeniaca]
  misc_feature (1)..(159): Homolog of NCBI NO: 21068664 NR Description: putative quinone oxidoreductase [Cicer arietinum]
  misc_feature (1)..(159): Homolog of NCBI NO: 30687535 NR Description: quinone reductase family [Arabidopsis thaliana]
  misc_feature (1)..(159): Homolog of NCBI NO: 15239652 NR Description: quinone reductase, putative [Arabidopsis
  misc_feature (1)..(159): Homolog of NCBI NO: 22327957 NR Description: quinone reductase family [Arabidopsis thaliana]
MLSELILDKLKAPPKPNDVPDIMPEQLVEADGLIFGFPSRFGMMPSQLKAFFDATSELWASQALAGKPAGIFWSTGFYGGGQELSALTAITQLAHHGMLFVPLGYTFGSGMFEIDEVKGGSAYGAGTFAGDGSRQPTELELQQAFYQGKYLAEVTKKLKS

SEQ ID NO: 60192 - DNA, 949 bp, Glycine max
  misc_feature (1)..(949): Ceres Seq. ID no. 12608620
accccattttggaaaataaccttatttcttggtctgcaaaacatcatggcagaagcgagtttctttgttggagtcataggtaacatcatctcaattctcatgtttctttctcctgtacctacgttttggaaaataaagaagcacggatccaccgaagatttctcaagccttccttatatttgcacattgcttaattgctccctctggacttactatggaatcataaaagctggagagtaccttgtggccactgttaatggctttggcattctcatggagacaatctacattattctatttctcatatatgcaccaaaagggataaggggtaggactgctattttggctttgattttggatgtggtaatcttgacggcaataataattattactcaattagcattagaaggagagactcgtagtggtgctgttggtgttatgggagcaggcttaaatattgttatgtattcctcacctctgtcggtcatgaaaacagtggtgactacaaaaagcgtggagtatatgccattcttgctttcttttttcttctttttcaacggtgccgtttggttgttgtatgctgttctcgttcgtgatgttatcctcggggtgccaaacggtactggatttttactgggagcgatgcaattagtgctatacgcgatctacagaaatgggaagcgtgtttcaaataacagattggaagaaggattacaacatgagcctctcatctcagagccgaataatgagtcacatcagagtgaagacaggcccatctagtttgtcctcaagttttaaagctatatatgcatgctagctcgaccattgttatttgatattttcaatataaaaagagataagttaaatgttcaattgattagtttattcgattaaagtatgtttttaccgatcaagtgcatgaaataattaatgtgaaattatttcaatt

SEQ ID NO: 60193 - protein, 259 aa, Glycine max
  peptide (1)..(259): Ceres Seq. ID no. 12608621
  misc_feature (21)..(106): Pfam Name: MtN3/saliva family Pfam Description: MtN3/saliva family
  misc_feature (23)..(223): Homolog of NCBI NO: 34912454 NR Description: P0681B11.31 [Oryza sativa (japonica
  misc_feature (20)..(239): Homolog of NCBI NO: 21593422 NR Description: senescence-associated protein (SAG29)
  misc_feature (20)..(231): Homolog of NCBI NO: 15237803 NR Description: MtN3-like protein
  misc_feature (23)..(223): Homolog of NCBI NO: 34912462 NR Description: MtN3-like protein [Oryza sativa (japonica
  misc_feature (20)..(226): Homolog of NCBI NO: 1619602 NR Description: MtN3 [Medicago truncatula]
  misc_feature (20)..(224): Homolog of NCBI NO: 15229019 NR Description: MTN3-like protein
  misc_feature (19)..(227): Homolog of NCBI NO: 34907420 NR Description: P0018C10.36 [Oryza sativa (japonica
  misc_feature (16)..(245): Homolog of NCBI NO: 30684193 NR Description: nodulin MtN3 family protein [Arabidopsis
  misc_feature (16)..(241): Homolog of NCBI NO: 30683457 NR Description: nodulin MtN3 family protein [Arabidopsis thaliana]
  misc_feature (16)..(241): Homolog of NCBI NO: 27754697 NR Description: putative cytochrome c oxidoreductase [Arabidopsis
TPFWKITLFLGLQNIMAEASFFVGVIGNIISILMFLSPVPTFWKIKKHGSTEDFSSLPYICTLLNCSLWTYYGIIKAGEYLVATVNGFGILMETIYIILFLIYAPKGIRGRTAILALILDVVILTAIIIITQLALEGETRSGAVGVMGAGLNIVMYSSPLSVMKTVVTTKSVEYMPFLLSFFFFFNGAVWLLYAVLVRDVILGVPNGTGFLLGAMQLVLYAIYRNGKRVSNNRLEEGLQHEPLISEPNNESHQSEDRPI

SEQ ID NO: 60194 - protein, 244 aa, Glycine max
  peptide (1)..(244): Ceres Seq. ID no. 12608622
  misc_feature (6)..(91): Pfam Name: MtN3/saliva family Pfam Description: MtN3/saliva family
  misc_feature (8)..(208): Homolog of NCBI NO: 34912454 NR Description: P0681B11.31 [Oryza sativa (japonica
  misc_feature (5)..(224): Homolog of NCBI NO: 21593422 NR Description: senescence-associated protein (SAG29)
  misc_feature (5)..(216): Homolog of NCBI NO: 15237803 NR Description: MtN3-like protein
  misc_feature (8)..(208): Homolog of NCBI NO: 34912462 NR Description: MtN3-like protein [Oryza sativa (japonica
  misc_feature (5)..(211): Homolog of NCBI NO: 1619602 NR Description: MtN3 [Medicago truncatula]
  misc_feature (5)..(209): Homolog of NCBI NO: 15229019 NR Description: MTN3-like protein
  misc_feature (4)..(212): Homolog of NCBI NO: 34907420 NR Description: P0018C10.36 [Oryza sativa (japonica
  misc_feature (1)..(230): Homolog of NCBI NO: 30684193 NR Description: nodulin MtN3 family protein [Arabidopsis
  misc_feature (1)..(226): Homolog of NCBI NO: 30683457 NR Description: nodulin MtN3 family protein [Arabidopsis thaliana]
  misc_feature (1)..(226): Homolog of NCBI NO: 27754697 NR Description: putative cytochrome c oxidoreductase [Arabidopsis
MAEASFFVGVIGNIISILMFLSPVPTFWKIKKHGSTEDFSSLPYICTLLNCSLWTYYGIIKAGEYLVATVNGFGILMETIYIILFLIYAPKGIRGRTAILALILDVVILTAIIIITQLALEGETRSGAVGVMGAGLNIVMYSSPLSVMKTVVTTKSVEYMPFLLSFFFFFNGAVWLLYAVLVRDVILGVPNGTGFLLGAMQLVLYAIYRNGKRVSNNRLEEGLQHEPLISEPNNESHQSEDRPI

SEQ ID NO: 60195 - protein, 226 aa, Glycine max
  peptide (1)..(226): Ceres Seq. ID no. 12608623
  misc_feature (1)..(73): Pfam Name: MtN3/saliva family Pfam Description: MtN3/saliva family
  misc_feature (1)..(190): Homolog of NCBI NO: 34912454 NR Description: P0681B11.31 [Oryza sativa (japonica
  misc_feature (1)..(206): Homolog of NCBI NO: 21593422 NR Description: senescence-associated protein (SAG29)
  misc_feature (1)..(198): Homolog of NCBI NO: 15237803 NR Description: MtN3-like protein
  misc_feature (1)..(190): Homolog of NCBI NO: 34912462 NR Description: MtN3-like protein [Oryza sativa (japonica
  misc_feature (1)..(193): Homolog of NCBI NO: 1619602 NR Description: MtN3 [Medicago truncatula]
  misc_feature (1)..(191): Homolog of NCBI NO: 15229019 NR Description: MTN3-like protein
  misc_feature (1)..(194): Homolog of NCBI NO: 34907420 NR Description: P0018C10.36 [Oryza sativa (japonica
  misc_feature (1)..(212): Homolog of NCBI NO: 30684193 NR Description: nodulin MtN3 family protein [Arabidopsis
  misc_feature (1)..(208): Homolog of NCBI NO: 30683457 NR Description: nodulin MtN3 family protein [Arabidopsis thaliana]
  misc_feature (1)..(208): Homolog of NCBI NO: 27754697 NR Description: putative cytochrome c oxidoreductase [Arabidopsis
MFLSPVPTFWKIKKHGSTEDFSSLPYICTLLNCSLWTYYGIIKAGEYLVATVNGFGILMETIYIILFLIYAPKGIRGRTAILALILDVVILTAIIIITQLALEGETRSGAVGVMGAGLNIVMYSSPLSVMKTVVTTKSVEYMPFLLSFFFFFNGAVWLLYAVLVRDVILGVPNGTGFLLGAMQLVLYAIYRNGKRVSNNRLEEGLQHEPLISEPNNESHQSEDRPI

SEQ ID NO: 60196 - DNA, 1338 bp, Glycine max
  misc_feature (1)..(1338): Ceres Seq. ID no. 15177059
ataacataacttgcctcttcccccaagacccaagttttctcttttcctcataaccccctctctccctaccaaatttcaatttcctctttcctcccttaggttatggatccattggggaaacgccctgccgccgaggacgattccctaatttccgattgcgagagcggggtttccgctggagacacgccgccgccgttcgtcgaaaacgccgacctcgtccggaccagattcgttcgtggcctcgtcgcgcactgcttcaaacccgaggttctggcagttcgcagaaacgtgtgttcctccgtcatggccctggcgcgtcaacattcctttcacgtcttcgcgcgtgccgtggccgaattgcgcggcggcaatgccaacgtgaagttcgcctggtacggtgcgtccagtaaggaagagataaatgacatcattcagcacggtttcggtcacgctcacagtaacggcctgcgtctctctccacaagattctccacttgaaagtgtgaagagttccgttgtggacgaagacggtttgaggcacttgttgctgtgccgcgttatcttggggaagacggaggtggttccacgtggctcctaccaatgccgttcgagttctcaagagtttgattctggggtggatgatctttccaatcccaaggagtatgttatttggtgtaaccagatcaacactcatgttttgcccgaatatgttttgagtttcagacttccttcaccattgaaagggattgtgaagattggggaacctttgaggccttcttcgccgtggatggcattcccagctttgatttcgatgctttcgaagattttgcctccgtccgaggttgcctccattgccaagtttcacaaggattatagagaaaagaggatttctcgacatgagctgatacagaaagtgagagtaatagcaggcgacaaattgctactttccgtcatcaaatctttcagagccaagaaaatacctgcaaactttaaagatgacaaggcgaaagaatggcaagcggacagccagcagcttgaacggaatgattgttcatatgggagttctattagctattacaggaagtgaatagaatacttgaagaaacacaatgctcatactaaccaaaacttacattgagggtgcaagtgcaaccactgcttaagaagtagagcgtcatttgagaccttttaaattgtttttagggtgatatactgatataggtgatttgttttgatgttgacggacgatagtgtagcaaaagaaatcactttctctttctggttggttacagttactggttgaaataaatatacttcggttcggacgtttatcatagtt

SEQ ID NO: 60197 - protein, 327 aa, Glycine max
  peptide (1)..(327): Ceres Seq. ID no. 15177060
  misc_feature (221)..(293): Homolog of NCBI NO: 29126336 NR Description: putative CEO protein [Oryza sativa (japonica
  misc_feature (33)..(209): Homolog of NCBI NO: 29126336 NR Description: putative CEO protein [Oryza sativa (japonica
  misc_feature (56)..(258): Homolog of NCBI NO: 27311235 NR Description: Unknown protein [Oryza sativa (japonica
  misc_feature (37)..(274): Homolog of NCBI NO: 7485680 NR Description: hypothetical protein F17O7.2 - Arabidopsis
  misc_feature (37)..(288): Homolog of NCBI NO: 15223159 NR Description: hypothetical protein [Arabidopsis thaliana]
  misc_feature (55)..(290): Homolog of NCBI NO: 15228235 NR Description: hypothetical protein [Arabidopsis thaliana]
  misc_feature (75)..(295): Homolog of NCBI NO: 8778582 NR Description: F28C11.18 [Arabidopsis thaliana]
  misc_feature (37)..(295): Homolog of NCBI NO: 15220787 NR Description: hypothetical protein [Arabidopsis thaliana]
  misc_feature (37)..(286): Homolog of NCBI NO: 21592445 NR Description: unknown [Arabidopsis thaliana]
  misc_feature (37)..(286): Homolog of NCBI NO: 15241862 NR Description: expressed protein [Arabidopsis thaliana]
MDPLGKRPAAEDDSLISDCESGVSAGDTPPPFVENADLVRTRFVRGLVAHCFKPEVLAVRRNVCSSVMALARQHSFHVFARAVAELRGGNANVKFAWYGASSKEEINDIIQHGFGHAHSNGLRLSPQDSPLESVKSSVVDEDGLRHLLLCRVILGKTEVVPRGSYQCRSSSQEFDSGVDDLSNPKEYVIWCNQINTHVLPEYVLSFRLPSPLKGIVKIGEPLRPSSPWMAFPALISMLSKILPPSEVASIAKFHKDYREKRISRHELIQKVRVIAGDKLLLSVIKSFRAKKIPANFKDDKAKEWQADSQQLERNDCSYGSSISYYRK

SEQ ID NO: 60198 - protein, 260 aa, Glycine max
  peptide (1)..(260): Ceres Seq. ID no. 15177061
  misc_feature (154)..(226): Homolog of NCBI NO: 29126336 NR Description: putative CEO protein [Oryza sativa (japonica
  misc_feature (1)..(142): Homolog of NCBI NO: 29126336 NR Description: putative CEO protein [Oryza sativa (japonica
  misc_feature (1)..(191): Homolog of NCBI NO: 27311235 NR Description: Unknown protein [Oryza sativa (japonica
  misc_feature (1)..(207): Homolog of NCBI NO: 7485680 NR Description: hypothetical protein F17O7.2 - Arabidopsis
  misc_feature (1)..(221): Homolog of NCBI NO: 15223159 NR Description: hypothetical protein [Arabidopsis thaliana]
  misc_feature (1)..(223): Homolog of NCBI NO: 15228235 NR Description: hypothetical protein [Arabidopsis thaliana]
  misc_feature (8)..(228): Homolog of NCBI NO: 8778582 NR Description: F28C11.18 [Arabidopsis thaliana]
  misc_feature (1)..(228): Homolog of NCBI NO: 15220787 NR Description: hypothetical protein [Arabidopsis thaliana]
  misc_feature (1)..(219): Homolog of NCBI NO: 21592445 NR Description: unknown [Arabidopsis thaliana]
  misc_feature (1)..(219): Homolog of NCBI NO: 15241862 NR Description: expressed protein [Arabidopsis thaliana]
MALARQHSFHVFARAVAELRGGNANVKFAWYGASSKEEINDIIQHGFGHAHSNGLRLSPQDSPLESVKSSVVDEDGLRHLLLCRVILGKTEVVPRGSYQCRSSSQEFDSGVDDLSNPKEYVIWCNQINTHVLPEYVLSFRLPSPLKGIVKIGEPLRPSSPWMAFPALISMLSKILPPSEVASIAKFHKDYREKRISRHELIQKVRVIAGDKLLLSVIKSFRAKKIPANFKDDKAKEWQADSQQLERNDCSYGSSISYYRK

SEQ ID NO: 60199 - DNA, 1258 bp, Glycine max
  misc_feature (1)..(1258): Ceres Seq. ID no. 15168366
atttttcacctctccccaaaaccctcgcgccgcatttttatttttctctttcattatttttttaccatttttttatggacctcttcgccggcgaccacttccctgtccccgaccacgtcgctccgttccccgattccggcgacctcgtcttcgccgccgacctcctctcccaccgccccaacccccagaagctccgccctatcaggtccgtccccgccgcccccattgcccaccctcctccgccccctctctcgcacgatccgattccctccgggtcgggtcacgccccatgccacgaatccagctcgtctttagatgctgaggatgaagacgatgacgacaattcatcagcaagtacggaaggacatggccctataaagaagaggagaaagacggtgaggaagctcgaagattttttgaaggatttgatggcgaaggtgatggaaaagcaagagcagatgcacgaacagttattggaaatcatagaaaataaggaaagggaaaggataaagagagaagaagcttggaagaacgaggagatggagagaatcagaaaagatgaagaggctagagcccaagtaaattctcgaaatttggccctcatatccttcattcagaacctgttgggccatgaaattcaaatcccccaacaaccagtagaaccatgcagcaaaagagaagaggatgaagttgaggtgagtgctagaaaggatttgaacaatgatccaagtgacaataatagatggcctgatgttgaagtgcaggcactgatcactgtgagaacttcattggagcacaagtttcgtttcatgggatcaaaagggtcaatatgggaggagatatctgaagcaatgaatggcatggggtacaaccgctcttcaaagaagtgtaaggagaagtgggaaaacattaacaagtactataaaaggacaatagggagtggcaagaaaaggcgtcaaaacagtaaaacttgcccttactttgatgagttggacattttgtatagaaatggtcttctaagtattggaaatgccttgagcaataccagcgatgttccccagattgaagtaaaggagttgactgaaacttgaatattagtaattgatagtcatagatacagcttatgtaaaagttccttcgtttcagcatttatttagccattcttcctttcaattttctcactgatgactttagtgtacaataccatcctctaactctgcatttaaaattttaaatattaagttcattgggttgatat

SEQ ID NO: 60200 - protein, 362 aa, Glycine max
  peptide (1)..(362): Ceres Seq. ID no. 15168367
  misc_feature (260)..(304): Pfam Name: Myb-like DNA-binding domain Pfam Description: Myb-like DNA-binding domain
  misc_feature (243)..(342): Homolog of NCBI NO: 38344985 NR Description: OSJNBa0011L07.15 [Oryza sativa (japonica
  misc_feature (59)..(215): Homolog of NCBI NO: 38344985 NR Description: OSJNBa0011L07.15 [Oryza sativa (japonica
  misc_feature (217)..(353): Homolog of NCBI NO: 9665169 NR Description: Putative GTL1 [Arabidopsis thaliana]
  misc_feature (58)..(221): Homolog of NCBI NO: 9665169 NR Description: Putative GTL1 [Arabidopsis thaliana]
  misc_feature (217)..(353): Homolog of NCBI NO: 15217472 NR Description: DNA-binding factor -related [Arabidopsis thaliana]
  misc_feature (58)..(221): Homolog of NCBI NO: 15217472 NR Description: DNA-binding factor -related [Arabidopsis thaliana]
  misc_feature (217)..(353): Homolog of NCBI NO: 25403172 NR Description: protein trihelix DNA-binding protein (GTL1)
  misc_feature (217)..(353): Homolog of NCBI NO: 2664198 NR Description: GTL1 [Arabidopsis thaliana]
  misc_feature (58)..(221): Homolog of NCBI NO: 25403172 NR Description: protein trihelix DNA-binding protein (GTL1)
  misc_feature (58)..(221): Homolog of NCBI NO: 2664198 NR Description: GTL1 [Arabidopsis thaliana]
FSPLPKTLAPHFYFSLSLFFYHFFMDLFAGDHFPVPDHVAPFPDSGDLVFAADLLSHRPNPQKLRPIRSVPAAPIAHPPPPPLSHDPIPSGSGHAPCHESSSSLDAEDEDDDDNSSASTEGHGPIKKRRKTVRKLEDFLKDLMAKVMEKQEQMHEQLLEIIENKERERIKREEAWKNEEMERIRKDEEARAQVNSRNLALISFIQNLLGHEIQIPQQPVEPCSKREEDEVEVSARKDLNNDPSDNNRWPDVEVQALITVRTSLEHKFRFMGSKGSIWEEISEAMNGMGYNRSSKKCKEKWENINKYYKRTIGSGKKRRQNSKTCPYFDELDILYRNGLLSIGNALSNTSDVPQIEVKELTET

SEQ ID NO: 60201 - protein, 338 aa, Glycine max
  peptide (1)..(338): Ceres Seq. ID no. 15168368
  misc_feature (236)..(280): Pfam Name: Myb-like DNA-binding domain Pfam Description: Myb-like DNA-binding domain
  misc_feature (219)..(318): Homolog of NCBI NO: 38344985 NR Description: OSJNBa0011L07.15 [Oryza sativa (japonica
  misc_feature (35)..(191): Homolog of NCBI NO: 38344985 NR Description: OSJNBa0011L07.15 [Oryza sativa (japonica
  misc_feature (193)..(329): Homolog of NCBI NO: 9665169 NR Description: Putative GTL1 [Arabidopsis thaliana]
  misc_feature (34)..(197): Homolog of NCBI NO: 9665169 NR Description: Putative GTL1 [Arabidopsis thaliana]
  misc_feature (193)..(329): Homolog of NCBI NO: 15217472 NR Description: DNA-binding factor -related [Arabidopsis thaliana]
  misc_feature (34)..(197): Homolog of NCBI NO: 15217472 NR Description: DNA-binding factor -related [Arabidopsis thaliana]
  misc_feature (193)..(329): Homolog of NCBI NO: 25403172 NR Description: protein trihelix DNA-binding protein (GTL1)
  misc_feature (193)..(329): Homolog of NCBI NO: 2664198 NR Description: GTL1 [Arabidopsis thaliana]
  misc_feature (34)..(197): Homolog of NCBI NO: 25403172 NR Description: protein trihelix DNA-binding protein (GTL1)
  misc_feature (34)..(197): Homolog of NCBI NO: 2664198 NR Description: GTL1 [Arabidopsis thaliana]
MDLFAGDHFPVPDHVAPFPDSGDLVFAADLLSHRPNPQKLRPIRSVPAAPIAHPPPPPLSHDPIPSGSGHAPCHESSSSLDAEDEDDDDNSSASTEGHGPIKKRRKTVRKLEDFLKDLMAKVMEKQEQMHEQLLEIIENKERERIKREEAWKNEEMERIRKDEEARAQVNSRNLALISFIQNLLGHEIQIPQQPVEPCSKREEDEVEVSARKDLNNDPSDNNRWPDVEVQALITVRTSLEHKFRFMGSKGSIWEEISEAMNGMGYNRSSKKCKEKWENINKYYKRTIGSGKKRRQNSKTCPYFDELDILYRNGLLSIGNALSNTSDVPQIEVKELTET

SEQ ID NO: 60202 - protein, 220 aa, Glycine max
  peptide (1)..(220): Ceres Seq. ID no. 15168369
  misc_feature (118)..(162): Pfam Name: Myb-like DNA-binding domain Pfam Description: Myb-like DNA-binding domain
  misc_feature (101)..(200): Homolog of NCBI NO: 38344985 NR Description: OSJNBa0011L07.15 [Oryza sativa (japonica
  misc_feature (1)..(73): Homolog of NCBI NO: 38344985 NR Description: OSJNBa0011L07.15 [Oryza sativa (japonica
  misc_feature (75)..(211): Homolog of NCBI NO: 9665169 NR Description: Putative GTL1 [Arabidopsis thaliana]
  misc_feature (1)..(79): Homolog of NCBI NO: 9665169 NR Description: Putative GTL1 [Arabidopsis thaliana]
  misc_feature (75)..(211): Homolog of NCBI NO: 15217472 NR Description: DNA-binding factor -related [Arabidopsis thaliana]
  misc_feature (1)..(79): Homolog of NCBI NO: 15217472 NR Description: DNA-binding factor -related [Arabidopsis thaliana]
  misc_feature (75)..(211): Homolog of NCBI NO: 25403172 NR Description: protein trihelix DNA-binding protein (GTL1)
  misc_feature (75)..(211): Homolog of NCBI NO: 2664198 NR Description: GTL1 [Arabidopsis thaliana]
  misc_feature (1)..(79): Homolog of NCBI NO: 25403172 NR Description: protein trihelix DNA-binding protein (GTL1)
  misc_feature (1)..(79): Homolog of NCBI NO: 2664198 NR Description: GTL1 [Arabidopsis thaliana]
MAKVMEKQEQMHEQLLEIIENKERERIKREEAWKNEEMERIRKDEEARAQVNSRNLALISFIQNLLGHEIQIPQQPVEPCSKREEDEVEVSARKDLNNDPSDNNRWPDVEVQALITVRTSLEHKFRFMGSKGSIWEEISEAMNGMGYNRSSKKCKEKWENINKYYKRTIGSGKKRRQNSKTCPYFDELDILYRNGLLSIGNALSNTSDVPQIEVKELTET

SEQ ID NO: 60203 - DNA, 1052 bp, Glycine max
  misc_feature (1)..(1052): Ceres Seq. ID no. 13595775
acacccaacccaacctcacgcacccactccaataatattaacaacaaccacaaccctttgtttttgttccttacacaccacacaccttcctcatcaatcaatggcgacccccccaaacgacgccgcatcgacaaagaagccccagcccataccatggacccaccaggagaccgtgcacctcatccgcgcctaccaggagaagtggtatgcccttaagcggggcccactccgccacaaccagtgggaggaggtcgccgtcgttgtcgccgcccgctgcggctatgacctcgcccaccccgctaagtccgccctccagtgccgccacaagatggaaaagctccgccagcgccaccgtgccgagaagaagcaacaacacaccgcggccgccctccgccctggcgcgtggcagtacaacaccctcatggacgacctcgagcgcggccccctccccatctccgccctcgcccctctcgacacctttgaagaagaagacgaaaacaacgacgacaccattgacgatcgaaacgactatgatggcgacgggagttttattaacatcaagtcgaagagtattaactgtatcctcagcgagaggcctgtgagaatgagaagcaacaaaagagggtttttgagagagcacgttgttgttaaagaagaagaggagaatgaaaacgaagacgacgacgttttggggttgtcgacggagatgagggctttcgcggagaggtttattgggatggagagtttgaagatggagatgatgaaggagacggagaggtgtaggttggagatggagaagaagcggatccagatgattctggaaacgcaaaggaggatcgttgattccattgggagggcgtttgggtctaacaagaggatcaagattactcaacaaaactgaaaagggtttcatttcttttcttttctaaattgtaattttgattgagtttaatttctatgcattgtgtaagaagttttaatcaagaggtaccacttatacatgacagaatgtgatgggatgacaatgaatacatgcactatttactcagttt

SEQ ID NO: 60204 - protein, 299 aa, Glycine max
  peptide (1)..(299): Ceres Seq. ID no. 13595776
  misc_feature (32)..(144): Homolog of NCBI NO: 38344545 NR Description: OSJNBa0027P08.13 [Oryza sativa (japonica
  misc_feature (41)..(232): Homolog of NCBI NO: 26451533 NR Description: unknown protein [Arabidopsis thaliana]
  misc_feature (35)..(157): Homolog of NCBI NO: 37536908 NR Description: hypothetical protein [Oryza sativa (japonica
  misc_feature (148)..(285): Homolog of NCBI NO: 37536908 NR Description: hypothetical protein [Oryza sativa (japonica
  misc_feature (206)..(286): Homolog of NCBI NO: 15224948 NR Description: expressed protein [Arabidopsis thaliana]
  misc_feature (5)..(181): Homolog of NCBI NO: 15224948 NR Description: expressed protein [Arabidopsis thaliana]
  misc_feature (30)..(289): Homolog of NCBI NO: 15230214 NR Description: proline-rich protein family [Arabidopsis
HPTQPHAPTPIILTTTTTLCFCSLHTTHLPHQSMATPPNDAASTKKPQPIPWTHQETVHLIRAYQEKWYALKRGPLRHNQWEEVAVVVAARCGYDLAHPAKSALQCRHKMEKLRQRHRAEKKQQHTAAALRPGAWQYNTLMDDLERGPLPISALAPLDTFEEEDENNDDTIDDRNDYDGDGSFINIKSKSINCILSERPVRMRSNKRGFLREHVVVKEEEENENEDDDVLGLSTEMRAFAERFIGMESLKMEMMKETERCRLEMEKKRIQMILETQRRIVDSIGRAFGSNKRIKITQQN

SEQ ID NO: 60205 - protein, 266 aa, Glycine max
  peptide (1)..(266): Ceres Seq. ID no. 13595777
  misc_feature (1)..(111): Homolog of NCBI NO: 38344545 NR Description: OSJNBa0027P08.13 [Oryza sativa (japonica
  misc_feature (8)..(199): Homolog of NCBI NO: 26451533 NR Description: unknown protein [Arabidopsis thaliana]
  misc_feature (2)..(124): Homolog of NCBI NO: 37536908 NR Description: hypothetical protein [Oryza sativa (japonica
  misc_feature (115)..(252): Homolog of NCBI NO: 37536908 NR Description: hypothetical protein [Oryza sativa (japonica
  misc_feature (173)..(253): Homolog of NCBI NO: 15224948 NR Description: expressed protein [Arabidopsis thaliana]
  misc_feature (1)..(148): Homolog of NCBI NO: 15224948 NR Description: expressed protein [Arabidopsis thaliana]
  misc_feature (1)..(256): Homolog of NCBI NO: 15230214 NR Description: proline-rich protein family [Arabidopsis
MATPPNDAASTKKPQPIPWTHQETVHLIRAYQEKWYALKRGPLRHNQWEEVAVVVAARCGYDLAHPAKSALQCRHKMEKLRQRHRAEKKQQHTAAALRPGAWQYNTLMDDLERGPLPISALAPLDTFEEEDENNDDTIDDRNDYDGDGSFINIKSKSINCILSERPVRMRSNKRGFLREHVVVKEEEENENEDDDVLGLSTEMRAFAERFIGMESLKMEMMKETERCRLEMEKKRIQMILETQRRIVDSIGRAFGSNKRIKITQQN

SEQ ID NO: 60206 - protein, 190 aa, Glycine max
  peptide (1)..(190): Ceres Seq. ID no. 13595778
  misc_feature (1)..(35): Homolog of NCBI NO: 38344545 NR Description: OSJNBa0027P08.13 [Oryza sativa (japonica
  misc_feature (1)..(123): Homolog of NCBI NO: 26451533 NR Description: unknown protein [Arabidopsis thaliana]
  misc_feature (1)..(48): Homolog of NCBI NO: 37536908 NR Description: hypothetical protein [Oryza sativa (japonica
  misc_feature (39)..(176): Homolog of NCBI NO: 37536908 NR Description: hypothetical protein [Oryza sativa (japonica
  misc_feature (97)..(177): Homolog of NCBI NO: 15224948 NR Description: expressed protein [Arabidopsis thaliana]
  misc_feature (1)..(72): Homolog of NCBI NO: 15224948 NR Description: expressed protein [Arabidopsis thaliana]
  misc_feature (1)..(180): Homolog of NCBI NO: 15230214 NR Description: proline-rich protein family [Arabidopsis
MEKLRQRHRAEKKQQHTAAALRPGAWQYNTLMDDLERGPLPISALAPLDTFEEEDENNDDTIDDRNDYDGDGSFINIKSKSINCILSERPVRMRSNKRGFLREHVVVKEEEENENEDDDVLGLSTEMRAFAERFIGMESLKMEMMKETERCRLEMEKKRIQMILETQRRIVDSIGRAFGSNKRIKITQQN

SEQ ID NO: 60207 - DNA, 1522 bp, Glycine max
  misc_feature (1)..(1522): Ceres Seq. ID no. 14315862
gttttcattcaccgccgcattttgttcttgttgttgctctttcaacaggaaactcctccttcaacagattatgagtgcggttcattactcttgaagcaaggtttggtgggggggaataagatcatgcctggcattctctcaaggctgaatgcaaccatttactgtcgcattcgggaagcaataacaaggcaacaaggagtgccgacatccttgtacagaagttcagctttgcctctttgttcgctcacttcaagtcacacacttcacacaaaatcaatgattactgcctcacattccaatgctatgctgggagatgtttatgcttatggcttaatctcaggtcgtggtagtgtgcgagacttcacaaagcctgctgtaggttgcttgaggggtagtgtgaatctaaggagactacaaccattgtatggtcctttgagttttgggtgttctacttttgatgctaataggaggatccgggattcgagtttgctgcatggatcatggctcaagaatttctcagcctcttcttctgcttgctactcagccggggctgcacatgctgtctcatttgatggaagccctcctgatgaacagcttgcaaattcctctttttcgcctgacccaactattgttggtggtaagcccttgaagatgttgtcaggatcttgttacctaccacatccagataaggaggagacaggaggagaggatgctcattttatttgcacggatgaacaagcaattggtgttgctgatggtgtaggtggctgggcggatgttggcgttaatgcaggactgtttgcacaggaacttatatccaatttagtgagagcaattcaaaaggagcctaaaggttcttttaatctgacaagagtgttaagggaagctcacgcaaatacaaaggtcaagggttcatcaacagcttgtattgttgctcttactgacaagggactacattctattaatttgggtgacagtggattcattgtggttagagatggatgcaccattttcgagtccccttctcaacagcatgacttcaatttcccatatcagttggagagtgggaatggcgctgatctacccagctctggtgaggtttttaccatacccgttgcttcaggagatgtggtcatttctggaacagatggtttatttgacaatttgtacaacagtgagatcactggagttgttgaacatgcaattagggctggactagagccccaagtaactgctcagaagatagcagcactggctcgtcagcgagcactgtccaagagtagtcggacaccattttctaccctgctgaaaaagctggattctgttattatggtggcaaacttgatgacataactgttgttgtctcatacatatcaggttcagtgagtgagtgagtctcatttttgttctacatgtttgaactggtggaagagaatgaaatgtaacgatattatggtccattttttttggattggtataacgaagatgagatataatggaaactagtagtgaaatttattct

SEQ ID NO: 60208 - protein, 450 aa, Glycine max
  peptide (1)..(450): Ceres Seq. ID no. 14315863
  misc_feature (225)..(427): Pfam Name: Protein phosphatase 2C Pfam Description: Protein phosphatase 2C
  misc_feature (216)..(398): Homolog of NCBI NO: 18402284 NR Description: expressed protein [Arabidopsis thaliana]
  misc_feature (209)..(433): Homolog of NCBI NO: 31198213 NR Description: ENSANGP00000019458 [Anopheles gambiae]
  misc_feature (216)..(433): Homolog of NCBI NO: 7487482 NR Description: hypothetical protein At2g30170 [imported] -
  misc_feature (173)..(433): Homolog of NCBI NO: 34896100 NR Description: B1189A09.35 [Oryza sativa (japonica
  misc_feature (230)..(433): Homolog of NCBI NO: 37533570 NR Description: putative protein phosphatase 2C
  misc_feature (206)..(438): Homolog of NCBI NO: 7485658 NR Description: hypothetical protein F17M5.260 - Arabidopsis
  misc_feature (220)..(438): Homolog of NCBI NO: 18418226 NR Description: protein phosphatase 2C (PP2C) -related
  misc_feature (91)..(434): Homolog of NCBI NO: 15240071 NR Description: expressed protein [Arabidopsis thaliana]
  misc_feature (170)..(434): Homolog of NCBI NO: 30683717 NR Description: expressed protein [Arabidopsis thaliana]
  misc_feature (154)..(434): Homolog of NCBI NO: 25366932 NR Description: hypothetical protein dl4315c [imported] -
VFIHRRILFLLLLFQQETPPSTDYECGSLLLKQGLVGGNKIMPGILSRLNATIYCRIREAITRQQGVPTSLYRSSALPLCSLTSSHTLHTKSMITASHSNAMLGDVYAYGLISGRGSVRDFTKPAVGCLRGSVNLRRLQPLYGPLSFGCSTFDANRRIRDSSLLHGSWLKNFSASSSACYSAGAAHAVSFDGSPPDEQLANSSFSPDPTIVGGKPLKMLSGSCYLPHPDKEETGGEDAHFICTDEQAIGVADGVGGWADVGVNAGLFAQELISNLVRAIQKEPKGSFNLTRVLREAHANTKVKGSSTACIVALTDKGLHSINLGDSGFIVVRDGCTIFESPSQQHDFNFPYQLESGNGADLPSSGEVFTIPVASGDVVISGTDGLFDNLYNSEITGVVEHAIRAGLEPQVTAQKIAALARQRALSKSSRTPFSTLLKKLDSVIMVANLMT

SEQ ID NO: 60209 - protein, 409 aa, Glycine max
  peptide (1)..(409): Ceres Seq. ID no. 14315864
  misc_feature (184)..(386): Pfam Name: Protein phosphatase 2C Pfam Description: Protein phosphatase 2C
  misc_feature (175)..(357): Homolog of NCBI NO: 18402284 NR Description: expressed protein [Arabidopsis thaliana]
  misc_feature (168)..(392): Homolog of NCBI NO: 31198213 NR Description: ENSANGP00000019458 [Anopheles gambiae]
  misc_feature (175)..(392): Homolog of NCBI NO: 7487482 NR Description: hypothetical protein At2g30170 [imported] -
  misc_feature (132)..(392): Homolog of NCBI NO: 34896100 NR Description: B1189A09.35 [Oryza sativa (japonica
  misc_feature (189)..(392): Homolog of NCBI NO: 37533570 NR Description: putative protein phosphatase 2C
  misc_feature (165)..(397): Homolog of NCBI NO: 7485658 NR Description: hypothetical protein F17M5.260 - Arabidopsis
  misc_feature (179)..(397): Homolog of NCBI NO: 18418226 NR Description: protein phosphatase 2C (PP2C) -related
  misc_feature (50)..(393): Homolog of NCBI NO: 15240071 NR Description: expressed protein [Arabidopsis thaliana]
  misc_feature (129)..(393): Homolog of NCBI NO: 30683717 NR Description: expressed protein [Arabidopsis thaliana]
  misc_feature (113)..(393): Homolog of NCBI NO: 25366932 NR Description: hypothetical protein dl4315c [imported] -
MPGILSRLNATIYCRIREAITRQQGVPTSLYRSSALPLCSLTSSHTLHTKSMITASHSNAMLGDVYAYGLISGRGSVRDFTKPAVGCLRGSVNLRRLQPLYGPLSFGCSTFDANRRIRDSSLLHGSWLKNFSASSSACYSAGAAHAVSFDGSPPDEQLANSSFSPDPTIVGGKPLKMLSGSCYLPHPDKEETGGEDAHFICTDEQAIGVADGVGGWADVGVNAGLFAQELISNLVRAIQKEPKGSFNLTRVLREAHANTKVKGSSTACIVALTDKGLHSINLGDSGFIVVRDGCTIFESPSQQHDFNFPYQLESGNGADLPSSGEVFTIPVASGDVVISGTDGLFDNLYNSEITGVVEHAIRAGLEPQVTAQKIAALARQRALSKSSRTPFSTLLKKLDSVIMVANLMT

SEQ ID NO: 60210 - protein, 358 aa, Glycine max
  peptide (1)..(358): Ceres Seq. ID no. 14315865
  misc_feature (133)..(335): Pfam Name: Protein phosphatase 2C Pfam Description: Protein phosphatase 2C
  misc_feature (124)..(306): Homolog of NCBI NO: 18402284 NR Description: expressed protein [Arabidopsis thaliana]
  misc_feature (117)..(341): Homolog of NCBI NO: 31198213 NR Description: ENSANGP00000019458 [Anopheles gambiae]
  misc_feature (124)..(341): Homolog of NCBI NO: 7487482 NR Description: hypothetical protein At2g30170 [imported] -
  misc_feature (81)..(341): Homolog of NCBI NO: 34896100 NR Description: B1189A09.35 [Oryza sativa (japonica
  misc_feature (138)..(341): Homolog of NCBI NO: 37533570 NR Description: putative protein phosphatase 2C
  misc_feature (114)..(346): Homolog of NCBI NO: 7485658 NR Description: hypothetical protein F17M5.260 - Arabidopsis
  misc_feature (128)..(346): Homolog of NCBI NO: 18418226 NR Description: protein phosphatase 2C (PP2C) -related
  misc_feature (1)..(342): Homolog of NCBI NO: 15240071 NR Description: expressed protein [Arabidopsis thaliana]
  misc_feature (78)..(342): Homolog of NCBI NO: 30683717 NR Description: expressed protein [Arabidopsis thaliana]
  misc_feature (62)..(342): Homolog of NCBI NO: 25366932 NR Description: hypothetical protein dl4315c [imported] -
MITASHSNAMLGDVYAYGLISGRGSVRDFTKPAVGCLRGSVNLRRLQPLYGPLSFGCSTFDANRRIRDSSLLHGSWLKNFSASSSACYSAGAAHAVSFDGSPPDEQLANSSFSPDPTIVGGKPLKMLSGSCYLPHPDKEETGGEDAHFICTDEQAIGVADGVGGWADVGVNAGLFAQELISNLVRAIQKEPKGSFNLTRVLREAHANTKVKGSSTACIVALTDKGLHSINLGDSGFIVVRDGCTIFESPSQQHDFNFPYQLESGNGADLPSSGEVFTIPVASGDVVISGTDGLFDNLYNSEITGVVEHAIRAGLEPQVTAQKIAALARQRALSKSSRTPFSTLLKKLDSVIMVANLMT

SEQ ID NO: 60211 - DNA, 1362 bp, Glycine max
  misc_feature (1)..(1362): Ceres Seq. ID no. 13639675
attcttcataatgattaaagaacttgtgaaatttatgtcaatcctactcttatcccgtggaaagtttttatagccagtctacatcgattaagatttgcttttgcctacagcgctcaaaagcttaagcaaatcttcacacttcctggagaaaacatgggtgcagcactagagaagtttttcttcagcactttggaaaggaatggaaaaggagaaagggcagatgttggggttccggttgctccatttggtactggaagattcgaagagcctgtccttaatggagattgtgaaaattactgtggtggctcacaatatgttcagttgtatcataattatgccatgccagtaattgtagattccagttctctagctttgcctgatgatatccttgcatcatcaacgcagcaaaactggagtctgttttatcatggtggtaccgatgtatatatcccgagacatacactctatcatccaacttacaaccttgaaggaggagggaaatcacgtggaacaggcacatacatacctgacttgaattacaattcctactgggatatgagcaccaaggcacctaggccaaggagatttccttcttcaaagcacaatgcatttcccagatcacgtctgaaaaagaaacaagtggaagaggttcattctgagatagacataaatgctaattcagattcaaggttgtttgagttcttaaatgaagatttccccgttcttccatgcaattccaaggctataccgccaacacaagccgaagagtctacgccattagaaaagtttcattctgagacagacatggatggtacttctcggtcatttgagttctcaaatgaagatttcccccttcttccaaaggtttgttctgagacacacatggatggtaattcaaggtcatttgggctttcaaagaaagattccccccttcttcaaagcgctcgcaagaccatcctgtcagggtctgctaatttaactaagcaagccaagagtttcccattctctaaagtgtctaaactgaaaaatattgagtttggaactttcaagaaatcacaatcattgacagaaccaagtgtgtcaacaaaggatgagaaagaagattccgatatttcattatctaaaaaaaactgtgcttgtattttcgaaggtggcgatagagaggaaagattaatctcttgaaagcaatgaaaagatggatcaacaatgttaacatagatattttgagggatattaaggatgtgtgtgtgtgtttgtttaagagagactggttgctagtgatagcctcaaacttctaggaacataatgatatcttgaacttgtacatttgtttaagttaaatcttttaatcatgtatgggtc

SEQ ID NO: 60212 - protein, 342 aa, Glycine max
  peptide (1)..(342): Ceres Seq. ID no. 13639676
  misc_feature (1)..(132): Homolog of NCBI NO: 25408709 NR Description: hypothetical protein At2g40520 [imported] -
  misc_feature (1)..(148): Homolog of NCBI NO: 21805733 NR Description: hypothetical protein [Arabidopsis thaliana]
  misc_feature (1)..(148): Homolog of NCBI NO: 30688308 NR Description: expressed protein [Arabidopsis thaliana]
  misc_feature (1)..(134): Homolog of NCBI NO: 30725328 NR Description: At3g56320 [Arabidopsis thaliana]
  misc_feature (1)..(134): Homolog of NCBI NO: 15228893 NR Description: expressed protein [Arabidopsis thaliana]
MGAALEKFFFSTLERNGKGERADVGVPVAPFGTGRFEEPVLNGDCENYCGGSQYVQLYHNYAMPVIVDSSSLALPDDILASSTQQNWSLFYHGGTDVYIPRHTLYHPTYNLEGGGKSRGTGTYIPDLNYNSYWDMSTKAPRPRRFPSSKHNAFPRSRLKKKQVEEVHSEIDINANSDSRLFEFLNEDFPVLPCNSKAIPPTQAEESTPLEKFHSETDMDGTSRSFEFSNEDFPLLPKVCSETHMDGNSRSFGLSKKDSPLLQSARKTILSGSANLTKQAKSFPFSKVSKLKNIEFGTFKKSQSLTEPSVSTKDEKEDSDISLSKKNCACIFEGGDREERLIS

SEQ ID NO: 60213 - protein, 280 aa, Glycine max
  peptide (1)..(280): Ceres Seq. ID no. 13639677
  misc_feature (1)..(70): Homolog of NCBI NO: 25408709 NR Description: hypothetical protein At2g40520 [imported] -
  misc_feature (1)..(86): Homolog of NCBI NO: 21805733 NR Description: hypothetical protein [Arabidopsis thaliana]
  misc_feature (1)..(86): Homolog of NCBI NO: 30688308 NR Description: expressed protein [Arabidopsis thaliana]
  misc_feature (1)..(72): Homolog of NCBI NO: 30725328 NR Description: At3g56320 [Arabidopsis thaliana]
  misc_feature (1)..(72): Homolog of NCBI NO: 15228893 NR Description: expressed protein [Arabidopsis thaliana]
MPVIVDSSSLALPDDILASSTQQNWSLFYHGGTDVYIPRHTLYHPTYNLEGGGKSRGTGTYIPDLNYNSYWDMSTKAPRPRRFPSSKHNAFPRSRLKKKQVEEVHSEIDINANSDSRLFEFLNEDFPVLPCNSKAIPPTQAEESTPLEKFHSETDMDGTSRSFEFSNEDFPLLPKVCSETHMDGNSRSFGLSKKDSPLLQSARKTILSGSANLTKQAKSFPFSKVSKLKNIEFGTFKKSQSLTEPSVSTKDEKEDSDISLSKKNCACIFEGGDREERLIS

SEQ ID NO: 60214 - protein, 208 aa, Glycine max
  peptide (1)..(208): Ceres Seq. ID no. 13639678
  misc_feature (1)..(14): Homolog of NCBI NO: 21805733 NR Description: hypothetical protein [Arabidopsis thaliana]
  misc_feature (1)..(14): Homolog of NCBI NO: 30688308 NR Description: expressed protein [Arabidopsis thaliana]
MSTKAPRPRRFPSSKHNAFPRSRLKKKQVEEVHSEIDINANSDSRLFEFLNEDFPVLPCNSKAIPPTQAEESTPLEKFHSETDMDGTSRSFEFSNEDFPLLPKVCSETHMDGNSRSFGLSKKDSPLLQSARKTILSGSANLTKQAKSFPFSKVSKLKNIEFGTFKKSQSLTEPSVSTKDEKEDSDISLSKKNCACIFEGGDREERLIS

SEQ ID NO: 60215 - DNA, 688 bp, Glycine max
  misc_feature (1)..(688): Ceres Seq. ID no. 15226128
atattaataataaccaaaacagcagagagaagagaagggctacacaaacacaatctctaatggcactcaggatgtgggcttcttccactgccaatgcactcaaactctcttctgtctccagacctcatctcttgcctcctttttctttctccagatgcttatcttccgtcttggatggacttaagtacgctgattcacatgaatgggtcaagcacgaaggctcagtcgccaccattggtatcactgaccatgcccaggaccatcttggagaggttgtgtatgtggagctgccagaaccaggtggcacagtttccaagaagtctggcttcggagccgttgaaagtgttaaagcaacaagtgatataaactctccaatctcgggggagatcgttgaggttaacaaaaagctcacagaaacgcctggcctggtcaactcaagcccatacgaagatggatggatgatcaaagtaaagccaagcgatccatctgaattagattccttgatgggtccaaaggagtacacaaaattttgtgaggaagaagatgcaagtcattaaagtttgaattgaattggctcctgcagttatgtgtgggactgactgttcttcatatgtttatgatcttattaccttctgaacagttttttaatatgcaacagaactgtttctttccaaaaaaaaaaaaaaaa

SEQ ID NO: 60216 - protein, 184 aa, Glycine max
  peptide (1)..(184): Ceres Seq. ID no. 15226129
  misc_feature (60)..(180): Pfam Name: Glycine cleavage H-protein Pfam Description: Glycine cleavage H-protein
  misc_feature (21)..(184): Homolog of NCBI NO: 2119600 NR Description: glycine cleavage system protein H precursor
  misc_feature (20)..(184): Homolog of NCBI NO: 15226973 NR Description: glycine decarboxylase complex H-protein
  misc_feature (20)..(184): Homolog of NCBI NO: 121080 NR Description: Glycine cleavage system H protein, mitochondrial
  misc_feature (20)..(183): Homolog of NCBI NO: 1362140 NR Description: H-protein precursor - Flaveria trinervia
  misc_feature (20)..(184): Homolog of NCBI NO: 3688309 NR Description: H-Protein precursor [Flaveria pringlei]
  misc_feature (20)..(184): Homolog of NCBI NO: 15223217 NR Description: glycine cleavage system H protein precursor
  misc_feature (20)..(184): Homolog of NCBI NO: 1346118 NR Description: Glycine cleavage system H protein, mitochondrial
  misc_feature (20)..(184): Homolog of NCBI NO: 2887286 NR Description: H protein [Flaveria anomala]
  misc_feature (20)..(184): Homolog of NCBI NO: 2499417 NR Description: Glycine cleavage system H protein, mitochondrial
  misc_feature (20)..(184): Homolog of NCBI NO: 2147453 NR Description: glycine cleavage system protein H precursor
INNNQNSREKRRATQTQSLMALRMWASSTANALKLSSVSRPHLLPPFSFSRCLSSVLDGLKYADSHEWVKHEGSVATIGITDHAQDHLGEVVYVELPEPGGTVSKKSGFGAVESVKATSDINSPISGEIVEVNKKLTETPGLVNSSPYEDGWMIKVKPSDPSELDSLMGPKEYTKFCEEEDASH

SEQ ID NO: 60217 - protein, 165 aa, Glycine max
  peptide (1)..(165): Ceres Seq. ID no. 15226130
  misc_feature (41)..(161): Pfam Name: Glycine cleavage H-protein Pfam Description: Glycine cleavage H-protein
  misc_feature (2)..(165): Homolog of NCBI NO: 2119600 NR Description: glycine cleavage system protein H precursor
  misc_feature (1)..(165): Homolog of NCBI NO: 15226973 NR Description: glycine decarboxylase complex H-protein
  misc_feature (1)..(165): Homolog of NCBI NO: 121080 NR Description: Glycine cleavage system H protein, mitochondrial
  misc_feature (1)..(164): Homolog of NCBI NO: 1362140 NR Description: H-protein precursor - Flaveria trinervia
  misc_feature (1)..(165): Homolog of NCBI NO: 3688309 NR Description: H-Protein precursor [Flaveria pringlei]
  misc_feature (1)..(165): Homolog of NCBI NO: 15223217 NR Description: glycine cleavage system H protein precursor
  misc_feature (1)..(165): Homolog of NCBI NO: 1346118 NR Description: Glycine cleavage system H protein, mitochondrial
  misc_feature (1)..(165): Homolog of NCBI NO: 2887286 NR Description: H protein [Flaveria anomala]
  misc_feature (1)..(165): Homolog of NCBI NO: 2499417 NR Description: Glycine cleavage system H protein, mitochondrial
  misc_feature (1)..(165): Homolog of NCBI NO: 2147453 NR Description: glycine cleavage system protein H precursor
MALRMWASSTANALKLSSVSRPHLLPPFSFSRCLSSVLDGLKYADSHEWVKHEGSVATIGITDHAQDHLGEVVYVELPEPGGTVSKKSGFGAVESVKATSDINSPISGEIVEVNKKLTETPGLVNSSPYEDGWMIKVKPSDPSELDSLMGPKEYTKFCEEEDASH

SEQ ID NO: 60218 - protein, 161 aa, Glycine max
  peptide (1)..(161): Ceres Seq. ID no. 15226131
  misc_feature (37)..(157): Pfam Name: Glycine cleavage H-protein Pfam Description: Glycine cleavage H-protein
  misc_feature (1)..(161): Homolog of NCBI NO: 2119600 NR Description: glycine cleavage system protein H precursor
  misc_feature (1)..(161): Homolog of NCBI NO: 15226973 NR Description: glycine decarboxylase complex H-protein
  misc_feature (1)..(161): Homolog of NCBI NO: 121080 NR Description: Glycine cleavage system H protein, mitochondrial
  misc_feature (1)..(160): Homolog of NCBI NO: 1362140 NR Description: H-protein precursor - Flaveria trinervia
  misc_feature (1)..(161): Homolog of NCBI NO: 3688309 NR Description: H-Protein precursor [Flaveria pringlei]
  misc_feature (1)..(161): Homolog of NCBI NO: 15223217 NR Description: glycine cleavage system H protein precursor
  misc_feature (1)..(161): Homolog of NCBI NO: 1346118 NR Description: Glycine cleavage system H protein, mitochondrial
  misc_feature (1)..(161): Homolog of NCBI NO: 2887286 NR Description: H protein [Flaveria anomala]
  misc_feature (1)..(161): Homolog of NCBI NO: 2499417 NR Description: Glycine cleavage system H protein, mitochondrial
  misc_feature (1)..(161): Homolog of NCBI NO: 2147453 NR Description: glycine cleavage system protein H precursor
MWASSTANALKLSSVSRPHLLPPFSFSRCLSSVLDGLKYADSHEWVKHEGSVATIGITDHAQDHLGEVVYVELPEPGGTVSKKSGFGAVESVKATSDINSPISGEIVEVNKKLTETPGLVNSSPYEDGWMIKVKPSDPSELDSLMGPKEYTKFCEEEDASH

SEQ ID NO: 60219 - DNA, 498 bp, Glycine max
  misc_feature (1)..(498): Ceres Seq. ID no. 13581730
atcctaatcgaaaaacatacacatttattccgctaaataataataataaaaaagaacgacacacaccaaagaaaaatttattagagcttttcgaagatatttgagatttgtgtttcatttgatatggagaagaagagtggtagcagctggtcctttaagaagatgagcaaagagttgtggccacggaggttgtcgtcgtcttttcgcagcaaacggcttcacttacccaccatgaccatcatcgttgacaacgttgttttcaagattgtctcggtggtagagggtgttgtaattgtttccacgctttgtgtattctacctttgttgtggttgtcacatttgaaatattctatgtatgtttgatgatcttcaaattcatttgttcgttcattttttgagggctagttaaagttcatcaataacagtctgagtttgtgttaagttgttaccatcctatgtagattgtccatgcaataaataacaattttgttttgttttt

SEQ ID NO: 60220 - protein, 72 aa, Glycine max
  peptide (1)..(72): Ceres Seq. ID no. 13581731
  misc_feature (1)..(72): Homolog of NCBI NO: 12003398 NR Description: Avr9/Cf-9 rapidly elicited protein 180 [Nicotiana
MEKKSGSSWSFKKMSKELWPRRLSSSFRSKRLHLPTMTIIVDNVVFKIVSVVEGVVIVSTLCVFYLCCGCHI

SEQ ID NO: 60221 - protein, 59 aa, Glycine max
  peptide (1)..(59): Ceres Seq. ID no. 13581732
  misc_feature (1)..(59): Homolog of NCBI NO: 12003398 NR Description: Avr9/Cf-9 rapidly elicited protein 180 [Nicotiana
MSKELWPRRLSSSFRSKRLHLPTMTIIVDNVVFKIVSVVEGVVIVSTLCVFYLCCGCHI

SEQ ID NO: 60222 - protein, 36 aa, Glycine max
  peptide (1)..(36): Ceres Seq. ID no. 13581733
  misc_feature (1)..(36): Homolog of NCBI NO: 12003398 NR Description: Avr9/Cf-9 rapidly elicited protein 180 [Nicotiana
MTIIVDNVVFKIVSVVEGVVIVSTLCVFYLCCGCHI

SEQ ID NO: 60223 - DNA, 1721 bp, Glycine max
  misc_feature (1)..(1721): Ceres Seq. ID no. 14311175
aatatcaaattctttgtcccacaaaagatggggttcactcccacaagtactgcaacatgctttctcataatagcacctctggttgtgctatggtgttggaagctactaaagtgggtgtggctgaggccaaagagattggagagagcattaagggcacagggccttcaggggaatccctacagcctcttgattggggacactaaggaaatgtacacagtgctcatgcaagctgccagatctcaacaatctacaagttcttttctctctaaggataaggatgcagcaccacatatcacaacctttaaccatcacattgtcaacaaattcggcaagaattcatttttttgggaaggtaccaaaccaaaagtggtaatcactgaccctgagcaaatcaaagaagtcttcaacaagatccaagactttgagaaacccaagttgagtcctattgtcaagttgttgggctctggacttgcaaatttagaaggcgagaaatggcgtacacatcgaaagattattaaccctgctttccatttagaaaaattgaaggttatgttaccaatatttcttgaatgttgtgacgatatggtttccaaatgggaaaggttgttgtcttcaaatgacaaatccgaaattgatgtgtggcctttccttcaaaatttaacatgtgatattatatctagaacagcatttggaagcagttatgaagatgggaaacgtatatttgaacttctgaaagagcaaactggacttatgatgaaattgcagaacgcttacattccaggatggtggttgctgccaacaactacaaataagaggatgaaaaaaattgatactgagatacgagcattacttaaaggtgtcatcaacaaacgagagaatgcaatgaaggctggtgaagtcttgaacaatgacttgttgggcatgcttttggaatcaaaccgtatggaaatacaagatcatggaaagaataacattattgcaatgactagcctagaggtaattgaggaatgcaatgcattctacatagcaggacaagaaaccacatcggttttactagtttggacaatggtgttattgagtagatatcctcattggcaagaacgtgcaagggaggaagtattgcatgtttttggtaaccaaaagccagactataatgggctaagtcaccttaaaattgtgaccatgattttatacgaggttcttaggttatacccacctttaatttattttgctcgagcgatcaagaatgatgtgaaacttggaaacctttccctacctgcgggagtgcaagtttccttaccaatactattgattcaccaggatcgtgatatttggggtgatgatgctacagagttcaacccagaaagatttgctgaaggagtagcaaaggcaacaaaaggccaagttgtgtttttcccatttggatggggtcctagagtgtgcttaggccaaaattttgctttattagaagcgaagttggttttgtcattactcttacaacgcttctcatttgagctttctcctacctatgcacatgctccagtcactgtgctcactcttaatccaaaatttggtgctcatatcatcttacataagttgtagtgtcatctattaatttgtatcctgcacacctaattatctccattcctttcttatgttctaatctcttgtatttatagagggaaacctctttattatattgaatgctatttttatttcct

SEQ ID NO: 60224 - protein, 533 aa, Glycine max
  peptide (1)..(533): Ceres Seq. ID no. 14311176
  misc_feature (118)..(533): Homolog of NCBI NO: 9294385 NR Description: cytochrome P450-like protein [Arabidopsis
  misc_feature (25)..(533): Homolog of NCBI NO: 13661772 NR Description: putative cytochrome P450 [Lolium rigidum]
  misc_feature (24)..(533): Homolog of NCBI NO: 7430703 NR Description: cytochrome P450 - Madagascar periwinkle
  misc_feature (25)..(533): Homolog of NCBI NO: 13661774 NR Description: putative cytochrome P450 [Lolium rigidum]
  misc_feature (16)..(533): Homolog of NCBI NO: 15231903 NR Description: cytochrome P450, putative [Arabidopsis thaliana]
  misc_feature (25)..(533): Homolog of NCBI NO: 21842133 NR Description: cytochrome P450 monooxygenase CYP72A16 [Zea mays
  misc_feature (24)..(533): Homolog of NCBI NO: 15231897 NR Description: cytochrome P450, putative [Arabidopsis thaliana]
  misc_feature (16)..(533): Homolog of NCBI NO: 15231907 NR Description: cytochrome P450, putative [Arabidopsis thaliana]
  misc_feature (17)..(533): Homolog of NCBI NO: 15231906 NR Description: cytochrome P450, putative [Arabidopsis thaliana]
  misc_feature (16)..(533): Homolog of NCBI NO: 15231889 NR Description: cytochrome P450, putative [Arabidopsis thaliana]
NIKFFVPQKMGFTPTSTATCFLIIAPLVVLWCWKLLKWVWLRPKRLERALRAQGLQGNPYSLLIGDTKEMYTVLMQAARSQQSTSSFLSKDKDAAPHITTFNHHIVNKFGKNSFFWEGTKPKVVITDPEQIKEVFNKIQDFEKPKLSPIVKLLGSGLANLEGEKWRTHRKIINPAFHLEKLKVMLPIFLECCDDMVSKWERLLSSNDKSEIDVWPFLQNLTCDIISRTAFGSSYEDGKRIFELLKEQTGLMMKLQNAYIPGWWLLPTTTNKRMKKIDTEIRALLKGVINKRENAMKAGEVLNNDLLGMLLESNRMEIQDHGKNNIIAMTSLEVIEECNAFYIAGQETTSVLLVWTMVLLSRYPHWQERAREEVLHVFGNQKPDYNGLSHLKIVTMILYEVLRLYPPLIYFARAIKNDVKLGNLSLPAGVQVSLPILLIHQDRDIWGDDATEFNPERFAEGVAKATKGQVVFFPFGWGPRVCLGQNFALLEAKLVLSLLLQRFSFELSPTYAHAPVTVLTLNPKFGAHIILHKL

SEQ ID NO: 60225 - protein, 524 aa, Glycine max
  peptide (1)..(524): Ceres Seq. ID no. 14311177
  misc_feature (109)..(524): Homolog of NCBI NO: 9294385 NR Description: cytochrome P450-like protein [Arabidopsis
  misc_feature (16)..(524): Homolog of NCBI NO: 13661772 NR Description: putative cytochrome P450 [Lolium rigidum]
  misc_feature (15)..(524): Homolog of NCBI NO: 7430703 NR Description: cytochrome P450 - Madagascar periwinkle
  misc_feature (16)..(524): Homolog of NCBI NO: 13661774 NR Description: putative cytochrome P450 [Lolium rigidum]
  misc_feature (7)..(524): Homolog of NCBI NO: 15231903 NR Description: cytochrome P450, putative [Arabidopsis thaliana]
  misc_feature (16)..(524): Homolog of NCBI NO: 21842133 NR Description: cytochrome P450 monooxygenase CYP72A16 [Zea mays
  misc_feature (15)..(524): Homolog of NCBI NO: 15231897 NR Description: cytochrome P450, putative [Arabidopsis thaliana]
  misc_feature (7)..(524): Homolog of NCBI NO: 15231907 NR Description: cytochrome P450, putative [Arabidopsis thaliana]
  misc_feature (8)..(524): Homolog of NCBI NO: 15231906 NR Description: cytochrome P450, putative [Arabidopsis thaliana]
  misc_feature (7)..(524): Homolog of NCBI NO: 15231889 NR Description: cytochrome P450, putative [Arabidopsis thaliana]
MGFTPTSTATCFLIIAPLVVLWCWKLLKWVWLRPKRLERALRAQGLQGNPYSLLIGDTKEMYTVLMQAARSQQSTSSFLSKDKDAAPHITTFNHHIVNKFGKNSFFWEGTKPKVVITDPEQIKEVFNKIQDFEKPKLSPIVKLLGSGLANLEGEKWRTHRKIINPAFHLEKLKVMLPIFLECCDDMVSKWERLLSSNDKSEIDVWPFLQNLTCDIISRTAFGSSYEDGKRIFELLKEQTGLMMKLQNAYIPGWWLLPTTTNKRMKKIDTEIRALLKGVINKRENAMKAGEVLNNDLLGMLLESNRMEIQDHGKNNIIAMTSLEVIEECNAFYIAGQETTSVLLVWTMVLLSRYPHWQERAREEVLHVFGNQKPDYNGLSHLKIVTMILYEVLRLYPPLIYFARAIKNDVKLGNLSLPAGVQVSLPILLIHQDRDIWGDDATEFNPERFAEGVAKATKGQVVFFPFGWGPRVCLGQNFALLEAKLVLSLLLQRFSFELSPTYAHAPVTVLTLNPKFGAHIILHKL

SEQ ID NO: 60226 - protein, 464 aa, Glycine max
  peptide (1)..(464): Ceres Seq. ID no. 14311178
  misc_feature (49)..(464): Homolog of NCBI NO: 9294385 NR Description: cytochrome P450-like protein [Arabidopsis
  misc_feature (1)..(464): Homolog of NCBI NO: 13661772 NR Description: putative cytochrome P450 [Lolium rigidum]
  misc_feature (1)..(464): Homolog of NCBI NO: 7430703 NR Description: cytochrome P450 - Madagascar periwinkle
  misc_feature (1)..(464): Homolog of NCBI NO: 13661774 NR Description: putative cytochrome P450 [Lolium rigidum]
  misc_feature (1)..(464): Homolog of NCBI NO: 15231903 NR Description: cytochrome P450, putative [Arabidopsis thaliana]
  misc_feature (1)..(464): Homolog of NCBI NO: 21842133 NR Description: cytochrome P450 monooxygenase CYP72A16 [Zea mays
  misc_feature (1)..(464): Homolog of NCBI NO: 15231897 NR Description: cytochrome P450, putative [Arabidopsis thaliana]
  misc_feature (1)..(464): Homolog of NCBI NO: 15231907 NR Description: cytochrome P450, putative [Arabidopsis thaliana]
  misc_feature (1)..(464): Homolog of NCBI NO: 15231906 NR Description: cytochrome P450, putative [Arabidopsis thaliana]
  misc_feature (1)..(464): Homolog of NCBI NO: 15231889 NR Description: cytochrome P450, putative [Arabidopsis thaliana]
MYTVLMQAARSQQSTSSFLSKDKDAAPHITTFNHHIVNKFGKNSFFWEGTKPKVVITDPEQIKEVFNKIQDFEKPKLSPIVKLLGSGLANLEGEKWRTHRKIINPAFHLEKLKVMLPIFLECCDDMVSKWERLLSSNDKSEIDVWPFLQNLTCDIISRTAFGSSYEDGKRIFELLKEQTGLMMKLQNAYIPGWWLLPTTTNKRMKKIDTEIRALLKGVINKRENAMKAGEVLNNDLLGMLLESNRMEIQDHGKNNIIAMTSLEVIEECNAFYIAGQETTSVLLVWTMVLLSRYPHWQERAREEVLHVFGNQKPDYNGLSHLKIVTMILYEVLRLYPPLIYFARAIKNDVKLGNLSLPAGVQVSLPILLIHQDRDIWGDDATEFNPERFAEGVAKATKGQVVFFPFGWGPRVCLGQNFALLEAKLVLSLLLQRFSFELSPTYAHAPVTVLTLNPKFGAHIILHKL

SEQ ID NO: 60227 - DNA, 1389 bp, Glycine max
  misc_feature (1)..(1389): Ceres Seq. ID no. 15171144
attagggattccctccctcctccgcctcttgtcactcacacagaaaagaccgttgaatttcaaacctcagccatgcccgctctcagaaagcgaaatcgattgtcggagttcgatgccatatccaaccacgacacacctcatgaacagaagaagaatatgtctgagtacgagctgtcgagagagcagagaatccgcgaaaaccgcgagagaatgggaaagctgggaatcttggacctttccctcactctcaagctcaacaacaaaaacaaaagatcctattcctctcacaaaccccaaacccctccttctcttccaaactcctccgtccccgttcgccgctcttccaggttgcagaatgtgactcctgttagttactccgaagttcccccaaagaaagacgagtttaagaaaaatggaagggtggtcattgaacaaggtgccaagccagaggtgtactctgaagaacacgagaagctgttgggaaacaccgacaagccctggacgctcttcgtcgatggtgttggcaaagatgggaaacgaatttatgactccgtccatggcaaaacttgccatcagtgcaggcaaaagactcttggttatcggacaagttgtagccaatgcaacatggtccaggggcagttttgtggagattgcttgtatatgagatatggggagcatgtactcgaagccttgcagaatccaacttggctatgccctgtttgtcgtggaatttgcaactgtagcttatgtcgtcaagcaaaaggatgggccccaactggcactctatataaaaagatatcaacattgggttacaaatcagttgcacactaccttattcaaacccggcgctcagaaatagatgtgaagaaaaatgcagatccttccaacccagtttcagcaaaaaggtcgctacccttctctgatgtggacaagtctcttgaggttaacgagaatcatctggaatcattgaagcctctagctgaatctgaaggtgatgatgctgaggtttcagcaaagagattgcttttctctgataagcaaaatcagcttgaaaaagttgagtgttcagataccccaaaacctcttcagcttgaaaaaaatgagtgttcaggtaccaagaagccacttgcttcttcctccaaacctagctctgacagcattgctggaagacttaggtccaggcttaaaaaaccatgagacttttttttatctttttcttagtctaacctgggatacatgtgcttactttccaagaaacacattatgaattgggataactggagttggtaatttggcatttgtcatagtaacggtaatatatgctttctcttttaattaccaaccggatttggtaatttggtataaaatcctttttgtcatagtaatggt

SEQ ID NO: 60228 - protein, 398 aa, Glycine max
  peptide (1)..(398): Ceres Seq. ID no. 15171145
  misc_feature (179)..(289): Homolog of NCBI NO: 21313220 NR Description: RIKEN cDNA 2310021G01 [Mus musculus]
  misc_feature (180)..(278): Homolog of NCBI NO: 22122529 NR Description: cDNA sequence BC006933 [Mus musculus]
  misc_feature (179)..(289): Homolog of NCBI NO: 22027514 NR Description: cell division cycle associated protein 7 isoform 2
  misc_feature (179)..(289): Homolog of NCBI NO: 15929382 NR Description: Unknown (protein for IMAGE:3829029) [Homo sapiens]
  misc_feature (31)..(287): Homolog of NCBI NO: 31542537 NR Description: transcription factor RAM2 [Homo sapiens]
  misc_feature (31)..(287): Homolog of NCBI NO: 27651995 NR Description: transcription factor RAM2 splice variant b [Homo
  misc_feature (180)..(287): Homolog of NCBI NO: 11360288 NR Description: hypothetical protein DKFZp762L0311.1 - human
  misc_feature (48)..(383): Homolog of NCBI NO: 15227848 NR Description: hypothetical protein [Arabidopsis thaliana]
  misc_feature (131)..(366): Homolog of NCBI NO: 25407788 NR Description: hypothetical protein AT4g37110 [imported] -
  misc_feature (48)..(366): Homolog of NCBI NO: 30690864 NR Description: expressed protein [Arabidopsis thaliana]
IRDSLPPPPLVTHTEKTVEFQTSAMPALRKRNRLSEFDAISNHDTPHEQKKNMSEYELSREQRIRENRERMGKLGILDLSLTLKLNNKNKRSYSSHKPQTPPSLPNSSVPVRRSSRLQNVTPVSYSEVPPKKDEFKKNGRVVIEQGAKPEVYSEEHEKLLGNTDKPWTLFVDGVGKDGKRIYDSVHGKTCHQCRQKTLGYRTSCSQCNMVQGQFCGDCLYMRYGEHVLEALQNPTWLCPVCRGICNCSLCRQAKGWAPTGTLYKKISTLGYKSVAHYLIQTRRSEIDVKKNADPSNPVSAKRSLPFSDVDKSLEVNENHLESLKPLAESEGDDAEVSAKRLLFSDKQNQLEKVECSDTPKPLQLEKNECSGTKKPLASSSKPSSDSIAGRLRSRLKKP

SEQ ID NO: 60229 - protein, 374 aa, Glycine max
  peptide (1)..(374): Ceres Seq. ID no. 15171146
  misc_feature (155)..(265): Homolog of NCBI NO: 21313220 NR Description: RIKEN cDNA 2310021G01 [Mus musculus]
  misc_feature (156)..(254): Homolog of NCBI NO: 22122529 NR Description: cDNA sequence BC006933 [Mus musculus]
  misc_feature (155)..(265): Homolog of NCBI NO: 22027514 NR Description: cell division cycle associated protein 7 isoform 2
  misc_feature (155)..(265): Homolog of NCBI NO: 15929382 NR Description: Unknown (protein for IMAGE:3829029) [Homo sapiens]
  misc_feature (7)..(263): Homolog of NCBI NO: 31542537 NR Description: transcription factor RAM2 [Homo sapiens]
  misc_feature (7)..(263): Homolog of NCBI NO: 27651995 NR Description: transcription factor RAM2 splice variant b [Homo
  misc_feature (156)..(263): Homolog of NCBI NO: 11360288 NR Description: hypothetical protein DKFZp762L0311.1 - human
  misc_feature (24)..(359): Homolog of NCBI NO: 15227848 NR Description: hypothetical protein [Arabidopsis thaliana]
  misc_feature (107)..(342): Homolog of NCBI NO: 25407788 NR Description: hypothetical protein AT4g37110 [imported] -
  misc_feature (24)..(342): Homolog of NCBI NO: 30690864 NR Description: expressed protein [Arabidopsis thaliana]
MPALRKRNRLSEFDAISNHDTPHEQKKNMSEYELSREQRIRENRERMGKLGILDLSLTLKLNNKNKRSYSSHKPQTPPSLPNSSVPVRRSSRLQNVTPVSYSEVPPKKDEFKKNGRVVIEQGAKPEVYSEEHEKLLGNTDKPWTLFVDGVGKDGKRIYDSVHGKTCHQCRQKTLGYRTSCSQCNMVQGQFCGDCLYMRYGEHVLEALQNPTWLCPVCRGICNCSLCRQAKGWAPTGTLYKKISTLGYKSVAHYLIQTRRSEIDVKKNADPSNPVSAKRSLPFSDVDKSLEVNENHLESLKPLAESEGDDAEVSAKRLLFSDKQNQLEKVECSDTPKPLQLEKNECSGTKKPLASSSKPSSDSIAGRLRSRLKKP

SEQ ID NO: 60230 - protein, 346 aa, Glycine max
  peptide (1)..(346): Ceres Seq. ID no. 15171147
  misc_feature (127)..(237): Homolog of NCBI NO: 21313220 NR Description: RIKEN cDNA 2310021G01 [Mus musculus]
  misc_feature (128)..(226): Homolog of NCBI NO: 22122529 NR Description: cDNA sequence BC006933 [Mus musculus]
  misc_feature (127)..(237): Homolog of NCBI NO: 22027514 NR Description: cell division cycle associated protein 7 isoform 2
  misc_feature (127)..(237): Homolog of NCBI NO: 15929382 NR Description: Unknown (protein for IMAGE:3829029) [Homo sapiens]
  misc_feature (1)..(235): Homolog of NCBI NO: 31542537 NR Description: transcription factor RAM2 [Homo sapiens]
  misc_feature (1)..(235): Homolog of NCBI NO: 27651995 NR Description: transcription factor RAM2 splice variant b [Homo
  misc_feature (128)..(235): Homolog of NCBI NO: 11360288 NR Description: hypothetical protein DKFZp762L0311.1 - human
  misc_feature (1)..(331): Homolog of NCBI NO: 15227848 NR Description: hypothetical protein [Arabidopsis thaliana]
  misc_feature (79)..(314): Homolog of NCBI NO: 25407788 NR Description: hypothetical protein AT4g37110 [imported] -
  misc_feature (1)..(314): Homolog of NCBI NO: 30690864 NR Description: expressed protein [Arabidopsis thaliana]
MSEYELSREQRIRENRERMGKLGILDLSLTLKLNNKNKRSYSSHKPQTPPSLPNSSVPVRRSSRLQNVTPVSYSEVPPKKDEFKKNGRVVIEQGAKPEVYSEEHEKLLGNTDKPWTLFVDGVGKDGKRIYDSVHGKTCHQCRQKTLGYRTSCSQCNMVQGQFCGDCLYMRYGEHVLEALQNPTWLCPVCRGICNCSLCRQAKGWAPTGTLYKKISTLGYKSVAHYLIQTRRSEIDVKKNADPSNPVSAKRSLPFSDVDKSLEVNENHLESLKPLAESEGDDAEVSAKRLLFSDKQNQLEKVECSDTPKPLQLEKNECSGTKKPLASSSKPSSDSIAGRLRSRLKKP

SEQ ID NO: 60231 - DNA, 833 bp, Glycine max
  misc_feature (1)..(833): Ceres Seq. ID no. 12608429
actctctcttttgtttcctctcttaacttctcttctcacaccacttactttctctctcctctccatgtcttcttcacgtcaaacgtagaatatctttttctttttccccttttttaatcttaacccaatttttactctcgcaaagtggtgtatttgaggaagtttgatttgggaaatgaacaaaggacagtcaccggagcctcttgatttcttcatctggactgttgaggatgttggcttgtggctggagactataaatcttggtagttacagccaaatttttaaagaaaatggtgttaatggagaatacctggaaggcatgtccatgtttacgactgaacagatcctacgttttataagacgttgccacatgaagtggggagacttcatcacattatgcaaggaattaagacggattaaagtggcttgtctgaaaggggagcagaaggtgcggcggccatggtgggcaccggcttgcctatctacagtgttcttaaaggttgcaaaatccaacagacaatcaagagttgtttccttgaagctggaaccatgataatacaataagttaaacctctgcatatgtgtaccagtgtacgtatagcaaatttctttttgcctagaaaacaaaagataggaaagaactttttctagcccccttttttattttattttatttttcttttgattccaaaacctggttgtttcttctcctctggagaactgaactgttatgcagttgaaggtccttgtgcactaatttccggtgctgtgtaattatgtattctcttatatgtgaacgaaaatacgatatatgtcgtttctcttcaggttcc

SEQ ID NO: 60232 - protein, 125 aa, Glycine max
  peptide (1)..(125): Ceres Seq. ID no. 12608430
  misc_feature (13)..(42): Pfam Name: SAM domain (Sterile alpha motif) Pfam Description: SAM domain (Sterile alpha motif)
  misc_feature (1)..(124): Homolog of NCBI NO: 18398048 NR Description: auxin-regulated protein
  misc_feature (1)..(124): Homolog of NCBI NO: 6466959 NR Description: unknown protein [Arabidopsis thaliana]
MNKGQSPEPLDFFIWTVEDVGLWLETINLGSYSQIFKENGVNGEYLEGMSMFTTEQILRFIRRCHMKWGDFITLCKELRRIKVACLKGEQKVRRPWWAPACLSTVFLKVAKSNRQSRVVSLKLEP

SEQ ID NO: 60233 - protein, 77 aa, Glycine max
  peptide (1)..(77): Ceres Seq. ID no. 12608431
  misc_feature (1)..(76): Homolog of NCBI NO: 18398048 NR Description: auxin-regulated protein
  misc_feature (1)..(76): Homolog of NCBI NO: 6466959 NR Description: unknown protein [Arabidopsis thaliana]
MSMFTTEQILRFIRRCHMKWGDFITLCKELRRIKVACLKGEQKVRRPWWAPACLSTVFLKVAKSNRQSRVVSLKLEP

SEQ ID NO: 60234 - protein, 75 aa, Glycine max
  peptide (1)..(75): Ceres Seq. ID no. 12608432
  misc_feature (1)..(74): Homolog of NCBI NO: 18398048 NR Description: auxin-regulated protein
  misc_feature (1)..(74): Homolog of NCBI NO: 6466959 NR Description: unknown protein [Arabidopsis thaliana]
MFTTEQILRFIRRCHMKWGDFITLCKELRRIKVACLKGEQKVRRPWWAPACLSTVFLKVAKSNRQSRVVSLKLEP

SEQ ID NO: 60235 - DNA, 1026 bp, Glycine max
  misc_feature (1)..(1026): Ceres Seq. ID no. 15168588
acacaagacactcaaattacatggtcatagtgtacacctagttaggcaaacacaccaaacaccaaacaccaaactagttggctcaattctctttgaatggctttggaggctttgaattcaccaacagcagccaccactccgttccgtggctaccaagaagaggaggaggacgaggaggctgaccttcacttacgtgagccttgggctaaaaggaaacgctccaaacgaccgcgttttgagacggaggaagagtacctcgctctttgcctcatcatgctcgcacaaagcggtaacaccagaaacatccacaacaacaacacccaattaccgtcttcttcactgtcagacaaagaagcgtcgccgccggtgaaactaacacacaggtgcaccgtttgcaacaaggcctttggttcttatcaagcactcggtggacacaaggccagccaccgcaaggcctcgtcggaatccaaccccaccgcctccgtctctgccctagccaacgacagcgtttctgcttccaccgtcggcggcggaaggatgcacgagtgttccatctgtcacaagagtttccctaccggtcaggccctgggtggccacaagcgctgccactacgacggcgggaacaaccacagtaacagcaacgccaacggaaacaacagcagcggcgccactacctccgacggcggcgctgcctcctcctcccacacgctccgtgggtttgacctgaaccttccggcgccgctgacggagttctggtcgccgatggggtttgatttcgggaagaagaaggtaggcggtgaacaagaggtggaaagcccgttgccggtaaccgccaagaggccgcgtttgtttacaggggaagatgatgaaaccgcgtagatttgtttgcagaattttattttaaattgattgaaattgaatttgttgctggtatatcgcgaatatgattatgaattcaaaccagttagtttaattttcattttatgtttttttttagtatataggtgggattgggattttgtttct

SEQ ID NO: 60236 - protein, 260 aa, Glycine max
  peptide (1)..(260): Ceres Seq. ID no. 15168589
  misc_feature (149)..(171): Pfam Name: Zinc finger, C2H2 type Pfam Description: Zinc finger, C2H2 type
  misc_feature (1)..(252): Homolog of NCBI NO: 7228329 NR Description: putative TFIIIA (or kruppel)-like zinc finger
  misc_feature (1)..(251): Homolog of NCBI NO: 439493 NR Description: zinc-finger protein [Petunia x hybrida]
  misc_feature (1)..(251): Homolog of NCBI NO: 33331578 NR Description: zinc finger protein [Capsicum annuum]
  misc_feature (1)..(251): Homolog of NCBI NO: 4666360 NR Description: zinc-finger protein 1 [Datisca glomerata]
MALEALNSPTAATTPFRGYQEEEEDEEADLHLREPWAKRKRSKRPRFETEEEYLALCLIMLAQSGNTRNIHNNNTQLPSSSLSDKEASPPVKLTHRCTVCNKAFGSYQALGGHKASHRKASSESNPTASVSALANDSVSASTVGGGRMHECSICHKSFPTGQALGGHKRCHYDGGNNHSNSNANGNNSSGATTSDGGAASSSHTLRGFDLNLPAPLTEFWSPMGFDFGKKKVGGEQEVESPLPVTAKRPRLFTGEDDETA

SEQ ID NO: 60237 - protein, 201 aa, Glycine max
  peptide (1)..(201): Ceres Seq. ID no. 15168590
  misc_feature (90)..(112): Pfam Name: Zinc finger, C2H2 type Pfam Description: Zinc finger, C2H2 type
  misc_feature (1)..(193): Homolog of NCBI NO: 7228329 NR Description: putative TFIIIA (or kruppel)-like zinc finger
  misc_feature (1)..(192): Homolog of NCBI NO: 439493 NR Description: zinc-finger protein [Petunia x hybrida]
  misc_feature (1)..(192): Homolog of NCBI NO: 33331578 NR Description: zinc finger protein [Capsicum annuum]
  misc_feature (1)..(192): Homolog of NCBI NO: 4666360 NR Description: zinc-finger protein 1 [Datisca glomerata]
MLAQSGNTRNIHNNNTQLPSSSLSDKEASPPVKLTHRCTVCNKAFGSYQALGGHKASHRKASSESNPTASVSALANDSVSASTVGGGRMHECSICHKSFPTGQALGGHKRCHYDGGNNHSNSNANGNNSSGATTSDGGAASSSHTLRGFDLNLPAPLTEFWSPMGFDFGKKKVGGEQEVESPLPVTAKRPRLFTGEDDETA

SEQ ID NO: 60238 - DNA, 1773 bp, Glycine max
  misc_feature (1)..(1773): Ceres Seq. ID no. 12608463
aaccacaatgcaccaaaacaactctttttcttcttcttcttcttcaccattctcaattcttttcttcttcttctaacatgggaccctcttccacgcacactcctcgttcccctacgtacttaattccctgcgttatagctcttgccctcttctccctcactggactcctcctctacaaggtggacgacgtcgcttcgcgcaccggaacggtggtgggtcacaacctagaaccgacgccgtggcacgtcttccctcacaagcccttcgacgaggagtcccgccagcagcgcgcgtacaaaatcctacaatgctcctacctgacgtgccgctacgccgctgaagccctcggcggagcacggcggagaaccggcggcggcagggaggagtgccccaagtttttccgggcaatccatcgggacctggcgccgtggtcggagagccggatatcgaaggcgcacgtggcggcggcgcagcggtacgcggcgttcagagtggtgattgttgaagggaaggtgtttgtggattggtactatgcttgtgtgcagagtagggcaatgtttacactgtgggggttgttgcagcttatgaggaggtaccctgggatggtgccagatgtggatatgatgtttgattgcatggataaaccttctgttaataagactgaacaccaagcaatgcctttgcctctatttcggtattgcaccacaaaggaacactttgacatcccttttccggattggtctttctggggttggtcagaaataaacatacgaccctggcaggaagagttcccagatatcaagcgaggttctcgatctgttacttggaaaaataagttaccatgggcatactggaaaggaaaccctgatgttgcatctcctattcgtactgaattaataaattgtaatgattctaggaagtggggagcagagattatgcgccaggattggggggaagcagctagaaatggctttaagcagtcaaaactttcagatcagtgtaatcatcggtataagatctatgctgaagggtatgcatggtctgtgagtttgaaatatattctctcatgtggttctgttgcattgattatatcaccccagtatgaagattttttcagccgtggccttattccaaaccataatttttggcttgttgatcctctaaatctatgtccatctataaagtatgctgtagaatgggggaaccaacacccagtagaggcagaggctatagggaaaagagggcaggatttaatggaaagcttgaacatgaatcgaatttatgaatacatgttccaccttatttctgattactcaaaacttcaagacttcaagcctactccaccaccaactgccctggaagtttgtgtagaatctgtgctttgctttgctgatgagaagcagaggatgttcctcaataaatcatttacattcccttcacataaacctccttgcaatctcaaacctgcctagttatatcacctcttagtttacacaacaaatatactaaaggattttacacatccaagaatatggaaactcccagtgaacattacacgttatttaatagtgtaaaaatatagtgccttttaggttatcatttacaagatttagctttagtaataggccatcatcatttatcagaaaacaacaccacaggaatttcattttcattctcttcccggtcattcttttgttactctgttttttgttttcttatctttgtctttccctttttttattttgcataaatttcttaaatcacaactaaatt

SEQ ID NO: 60239 - protein, 489 aa, Glycine max
  peptide (1)..(489): Ceres Seq. ID no. 12608464
  misc_feature (128)..(484): Pfam Name: Arabidopsis thaliana protein of unknown function Pfam Description: Arabidopsis thaliana protein of unknown
  misc_feature (156)..(489): Homolog of NCBI NO: 30690136 NR Description: expressed protein [Arabidopsis thaliana]
  misc_feature (129)..(488): Homolog of NCBI NO: 38637028 NR Description: unknown protein [Oryza sativa (japonica
  misc_feature (129)..(488): Homolog of NCBI NO: 15233070 NR Description: putative protein; protein id: At3g61270.1
  misc_feature (153)..(488): Homolog of NCBI NO: 21742339 NR Description: OSJNBb0020O11.18 [Oryza sativa (japonica
  misc_feature (75)..(488): Homolog of NCBI NO: 15222413 NR Description: hypothetical protein; protein id: At1g63420.1
  misc_feature (129)..(488): Homolog of NCBI NO: 38346998 NR Description: OSJNBb0039L24.21 [Oryza sativa (japonica
  misc_feature (129)..(489): Homolog of NCBI NO: 7486461 NR Description: hypothetical protein At2g45830 [imported] -
  misc_feature (129)..(488): Homolog of NCBI NO: 15229061 NR Description: putative protein; protein id: At3g48980.1
  misc_feature (129)..(489): Homolog of NCBI NO: 15237842 NR Description: putative protein; protein id: At5g23850.1
  misc_feature (33)..(484): Homolog of NCBI NO: 15222341 NR Description: hypothetical protein; protein id: At1g07220.1
PQCTKTTLFLLLLLHHSQFFSSSSNMGPSSTHTPRSPTYLIPCVIALALFSLTGLLLYKVDDVASRTGTVVGHNLEPTPWHVFPHKPFDEESRQQRAYKILQCSYLTCRYAAEALGGARRRTGGGREECPKFFRAIHRDLAPWSESRISKAHVAAAQRYAAFRVVIVEGKVFVDWYYACVQSRAMFTLWGLLQLMRRYPGMVPDVDMMFDCMDKPSVNKTEHQAMPLPLFRYCTTKEHFDIPFPDWSFWGWSEINIRPWQEEFPDIKRGSRSVTWKNKLPWAYWKGNPDVASPIRTELINCNDSRKWGAEIMRQDWGEAARNGFKQSKLSDQCNHRYKIYAEGYAWSVSLKYILSCGSVALIISPQYEDFFSRGLIPNHNFWLVDPLNLCPSIKYAVEWGNQHPVEAEAIGKRGQDLMESLNMNRIYEYMFHLISDYSKLQDFKPTPPPTALEVCVESVLCFADEKQRMFLNKSFTFPSHKPPCNLKPA

SEQ ID NO: 60240 - protein, 464 aa, Glycine max
  peptide (1)..(464): Ceres Seq. ID no. 12608465
  misc_feature (103)..(459): Pfam Name: Arabidopsis thaliana protein of unknown function Pfam Description: Arabidopsis thaliana protein of unknown
  misc_feature (131)..(464): Homolog of NCBI NO: 30690136 NR Description: expressed protein [Arabidopsis thaliana]
  misc_feature (104)..(463): Homolog of NCBI NO: 38637028 NR Description: unknown protein [Oryza sativa (japonica
  misc_feature (104)..(463): Homolog of NCBI NO: 15233070 NR Description: putative protein; protein id: At3g61270.1
  misc_feature (128)..(463): Homolog of NCBI NO: 21742339 NR Description: OSJNBb0020O11.18 [Oryza sativa (japonica
  misc_feature (50)..(463): Homolog of NCBI NO: 15222413 NR Description: hypothetical protein; protein id: At1g63420.1
  misc_feature (104)..(463): Homolog of NCBI NO: 38346998 NR Description: OSJNBb0039L24.21 [Oryza sativa (japonica
  misc_feature (104)..(464): Homolog of NCBI NO: 7486461 NR Description: hypothetical protein At2g45830 [imported] -
  misc_feature (104)..(463): Homolog of NCBI NO: 15229061 NR Description: putative protein; protein id: At3g48980.1
  misc_feature (104)..(464): Homolog of NCBI NO: 15237842 NR Description: putative protein; protein id: At5g23850.1
  misc_feature (8)..(459): Homolog of NCBI NO: 15222341 NR Description: hypothetical protein; protein id: At1g07220.1
MGPSSTHTPRSPTYLIPCVIALALFSLTGLLLYKVDDVASRTGTVVGHNLEPTPWHVFPHKPFDEESRQQRAYKILQCSYLTCRYAAEALGGARRRTGGGREECPKFFRAIHRDLAPWSESRISKAHVAAAQRYAAFRVVIVEGKVFVDWYYACVQSRAMFTLWGLLQLMRRYPGMVPDVDMMFDCMDKPSVNKTEHQAMPLPLFRYCTTKEHFDIPFPDWSFWGWSEINIRPWQEEFPDIKRGSRSVTWKNKLPWAYWKGNPDVASPIRTELINCNDSRKWGAEIMRQDWGEAARNGFKQSKLSDQCNHRYKIYAEGYAWSVSLKYILSCGSVALIISPQYEDFFSRGLIPNHNFWLVDPLNLCPSIKYAVEWGNQHPVEAEAIGKRGQDLMESLNMNRIYEYMFHLISDYSKLQDFKPTPPPTALEVCVESVLCFADEKQRMFLNKSFTFPSHKPPCNLKPA

SEQ ID NO: 60241 - protein, 305 aa, Glycine max
  peptide (1)..(305): Ceres Seq. ID no. 12608466
  misc_feature (1)..(300): Pfam Name: Arabidopsis thaliana protein of unknown function Pfam Description: Arabidopsis thaliana protein of unknown
  misc_feature (1)..(305): Homolog of NCBI NO: 30690136 NR Description: expressed protein [Arabidopsis thaliana]
  misc_feature (1)..(304): Homolog of NCBI NO: 38637028 NR Description: unknown protein [Oryza sativa (japonica
  misc_feature (1)..(304): Homolog of NCBI NO: 15233070 NR Description: putative protein; protein id: At3g61270.1
  misc_feature (1)..(304): Homolog of NCBI NO: 21742339 NR Description: OSJNBb0020O11.18 [Oryza sativa (japonica
  misc_feature (1)..(304): Homolog of NCBI NO: 15222413 NR Description: hypothetical protein; protein id: At1g63420.1
  misc_feature (1)..(304): Homolog of NCBI NO: 38346998 NR Description: OSJNBb0039L24.21 [Oryza sativa (japonica
  misc_feature (1)..(305): Homolog of NCBI NO: 7486461 NR Description: hypothetical protein At2g45830 [imported] -
  misc_feature (1)..(304): Homolog of NCBI NO: 15229061 NR Description: putative protein; protein id: At3g48980.1
  misc_feature (1)..(305): Homolog of NCBI NO: 15237842 NR Description: putative protein; protein id: At5g23850.1
  misc_feature (1)..(300): Homolog of NCBI NO: 15222341 NR Description: hypothetical protein; protein id: At1g07220.1
MFTLWGLLQLMRRYPGMVPDVDMMFDCMDKPSVNKTEHQAMPLPLFRYCTTKEHFDIPFPDWSFWGWSEINIRPWQEEFPDIKRGSRSVTWKNKLPWAYWKGNPDVASPIRTELINCNDSRKWGAEIMRQDWGEAARNGFKQSKLSDQCNHRYKIYAEGYAWSVSLKYILSCGSVALIISPQYEDFFSRGLIPNHNFWLVDPLNLCPSIKYAVEWGNQHPVEAEAIGKRGQDLMESLNMNRIYEYMFHLISDYSKLQDFKPTPPPTALEVCVESVLCFADEKQRMFLNKSFTFPSHKPPCNLKPA

SEQ ID NO: 60242 - DNA, 1594 bp, Glycine max
  misc_feature (1)..(1594): Ceres Seq. ID no. 15177037
tcgcgcccacaagcaaaacagagagaaaaaagaaagcagaaatgggatcattcccaaaagcaaaacccaacaacactcacaccgacaccaacaccaacacccataacagggttatgggttttctcctagttttctttccggaagagaataacaatacaacaccaaccattgctaccaaaagtaccaaacccaaccttgtatcttcttctccctctccacattccttgaagagaattagttccagttccaacaatgcccttctctccaaagcccagtccactatctcaatatgcttcctcctcctcttcactaccctccttctcttcacactctccacattcgaacccacacaccacaaacctcgctccataccccccaaatccaaactccgcaaaaacacctcctcaagcgacgtcgctttcccctccactgcgctccagcgtatgggcacgctctaccgcagaggcacccgagccatgaacgacatcgtcgtttgccacgtacccgaagacactactcacgacgaattccgaatcttcctcagactcctccaccgctccggcctcacttccaaatccgacgtcgtcttcatcttcgtctctgcctcctcttcaaccactttcgctcacattgtccacgaagagaacacctcattcctctcgctcattaacctccacgctcagttgaactcgactcagtgggccaaaccgtccgagtcgaacttcgacgcgactcgtttcttgaaagctcccaagaaaggagaaccgctctggggaaagaaaattcggacgaattatagtggctcggaaggtgagttgagtcgggcgagttatgggtcggtgcttagttttgatgccaacgaactcgatccagagaactcgttggctggttttttggaccgagttccactcagtttgagaaggtgggcctgttaccccatgttattcgggcgcgtgaggaggaactttaaacacgtgacccttgtggatgtaaaaaatgtggtcatttttaatgacccactcggacgagtcaggaaccagagtcccgagtcggttttcgtgtaccctaatgcaaaacacggtaggaactccgagaggactcagtcgcatcacccggttaactcagtgattctgatgggcggcgcccgcgggatccggcgcgtgtcgcacgccatgctcgttgcgattgttcgggccgcaatgcagccgcacaagaggaagaactcggtgtccgactcggcgattctgagtcaactcgtaaggaacaagtttgcattgaggaacgttcacttaattgtctcgggggagtcgattccggaagcgagttcactcgctgggtcaacatcgttttcggattgtgcaataattcagcggggtacgggtaattattatgacctcaattctattgttaagaagcaaatttgttcttctgtgatggattcttttgtttataacagtgattgtaagcatctggtaaaagtagaacaataatgagaaaataggggggaaaattaacgagaaaattcgtgtatttattgaacttacttgtactagtagttttatagtagcataaattttcccaccgtctctcctct

SEQ ID NO: 60243 - protein, 495 aa, Glycine max
  peptide (1)..(495): Ceres Seq. ID no. 15177038
  misc_feature (38)..(269): Homolog of NCBI NO: 15237180 NR Description: expressed protein [Arabidopsis thaliana]
  misc_feature (180)..(441): Homolog of NCBI NO: 15237180 NR Description: expressed protein [Arabidopsis thaliana]
  misc_feature (28)..(484): Homolog of NCBI NO: 15230285 NR Description: expressed protein [Arabidopsis thaliana]
  misc_feature (28)..(484): Homolog of NCBI NO: 17064822 NR Description: putative protein [Arabidopsis thaliana]
APTSKTERKKKAEMGSFPKAKPNNTHTDTNTNTHNRVMGFLLVFFPEENNNTTPTIATKSTKPNLVSSSPSPHSLKRISSSSNNALLSKAQSTISICFLLLFTTLLLFTLSTFEPTHHKPRSIPPKSKLRKNTSSSDVAFPSTALQRMGTLYRRGTRAMNDIVVCHVPEDTTHDEFRIFLRLLHRSGLTSKSDVVFIFVSASSSTTFAHIVHEENTSFLSLINLHAQLNSTQWAKPSESNFDATRFLKAPKKGEPLWGKKIRTNYSGSEGELSRASYGSVLSFDANELDPENSLAGFLDRVPLSLRRWACYPMLFGRVRRNFKHVTLVDVKNVVIFNDPLGRVRNQSPESVFVYPNAKHGRNSERTQSHHPVNSVILMGGARGIRRVSHAMLVAIVRAAMQPHKRKNSVSDSAILSQLVRNKFALRNVHLIVSGESIPEASSLAGSTSFSDCAIIQRGTGNYYDLNSIVKKQICSSVMDSFVYNSDCKHLVKVEQ

SEQ ID NO: 60244 - protein, 482 aa, Glycine max
  peptide (1)..(482): Ceres Seq. ID no. 15177039
  misc_feature (25)..(256): Homolog of NCBI NO: 15237180 NR Description: expressed protein [Arabidopsis thaliana]
  misc_feature (167)..(428): Homolog of NCBI NO: 15237180 NR Description: expressed protein [Arabidopsis thaliana]
  misc_feature (15)..(471): Homolog of NCBI NO: 15230285 NR Description: expressed protein [Arabidopsis thaliana]
  misc_feature (15)..(471): Homolog of NCBI NO: 17064822 NR Description: putative protein [Arabidopsis thaliana]
MGSFPKAKPNNTHTDTNTNTHNRVMGFLLVFFPEENNNTTPTIATKSTKPNLVSSSPSPHSLKRISSSSNNALLSKAQSTISICFLLLFTTLLLFTLSTFEPTHHKPRSIPPKSKLRKNTSSSDVAFPSTALQRMGTLYRRGTRAMNDIVVCHVPEDTTHDEFRIFLRLLHRSGLTSKSDVVFIFVSASSSTTFAHIVHEENTSFLSLINLHAQLNSTQWAKPSESNFDATRFLKAPKKGEPLWGKKIRTNYSGSEGELSRASYGSVLSFDANELDPENSLAGFLDRVPLSLRRWACYPMLFGRVRRNFKHVTLVDVKNVVIFNDPLGRVRNQSPESVFVYPNAKHGRNSERTQSHHPVNSVILMGGARGIRRVSHAMLVAIVRAAMQPHKRKNSVSDSAILSQLVRNKFALRNVHLIVSGESIPEASSLAGSTSFSDCAIIQRGTGNYYDLNSIVKKQICSSVMDSFVYNSDCKHLVKVEQ

SEQ ID NO: 60245 - protein, 458 aa, Glycine max
  peptide (1)..(458): Ceres Seq. ID no. 15177040
  misc_feature (1)..(232): Homolog of NCBI NO: 15237180 NR Description: expressed protein [Arabidopsis thaliana]
  misc_feature (143)..(404): Homolog of NCBI NO: 15237180 NR Description: expressed protein [Arabidopsis thaliana]
  misc_feature (1)..(447): Homolog of NCBI NO: 15230285 NR Description: expressed protein [Arabidopsis thaliana]
  misc_feature (1)..(447): Homolog of NCBI NO: 17064822 NR Description: putative protein [Arabidopsis thaliana]
MGFLLVFFPEENNNTTPTIATKSTKPNLVSSSPSPHSLKRISSSSNNALLSKAQSTISICFLLLFTTLLLFTLSTFEPTHHKPRSIPPKSKLRKNTSSSDVAFPSTALQRMGTLYRRGTRAMNDIVVCHVPEDTTHDEFRIFLRLLHRSGLTSKSDVVFIFVSASSSTTFAHIVHEENTSFLSLINLHAQLNSTQWAKPSESNFDATRFLKAPKKGEPLWGKKIRTNYSGSEGELSRASYGSVLSFDANELDPENSLAGFLDRVPLSLRRWACYPMLFGRVRRNFKHVTLVDVKNVVIFNDPLGRVRNQSPESVFVYPNAKHGRNSERTQSHHPVNSVILMGGARGIRRVSHAMLVAIVRAAMQPHKRKNSVSDSAILSQLVRNKFALRNVHLIVSGESIPEASSLAGSTSFSDCAIIQRGTGNYYDLNSIVKKQICSSVMDSFVYNSDCKHLVKVEQ

SEQ ID NO: 60246 - DNA, 1362 bp, Glycine max
  misc_feature (1)..(1362): Ceres Seq. ID no. 12777206
attcgttcatcctcttgccaacacaacctcgttgctcatcttcaccgaagcacctcaaccattttcccaaccaaacctccatagaggaaaaaaaatccagactctaggccttcatggatagagaacaagaagagatgcaatttcttgggttctttggcatctacaaagaagcctccaagatcatactttcatggaggagaatcttcacccaaatcacctcaacactaatcctccctctctccttcatcttcctcatccacatggaaatctccaacctcctcttcaggaagattctcatcaacgaaatagtcatggacgaaacaaagcctaacacacctcaatacaacaagctcgatcacatgatctcttcagaaatggtcactcttgtggtcttcaaaatcgcatacttcactctgctcctcatattctccctcctctccacctcggcagtggtctgcaccatcgcctccatctacaccgcaaaagacgtgacattcaagagggtcatgagtgttgtccctaaggtgtggaagaggctcatgttgacctttctatgtgcctttgctgctttcttcgcttacaatatcatgactgcgctagttatgttcttgtccatagtcacaattgggttaagtagtggtgggcttgcggttttggtttcgataacggttttgtacttcattgggtttgtgtacctcaccgtggtgtggcaactagccagcgttgtcactgtgttggaggactcgtggggggttcgagccatggcgaagagcaaggagttgataagggggaagatggttttgtccatattcatctttttcacccttgtggcttcttttgtttccattagggttttgttcaaggtgatggtggtggatggatggagggtgagttctttggacaaaacagcatatggggttctctgtttcttgctattgtcttgtttgttcctctttgggcttgttttgcaaactgtgctctactttgtttgcaagtcctatcaccatgagaatattgacaaatcggctttggcagatcatcttgaagggtatcgtggagagtatgtgccattgacggctaaggatgttcagctggagcagtaccaagtttgatttataatatagcttaattagataaattaaattaatcatcatcatgtgtctagattgatgatgcggttaattatatctgctttggtttcttgatgtctttagaaatatcttttgtgtgtgaaattaaggcaggtgtgaagtgaatttcattactctctatatgattggttatatgtatttaattttctgtttaaaaataggactcttttgcaaaggtgtattaattaatgctatgagatgactttatttc

SEQ ID NO: 60247 - protein, 332 aa, Glycine max
  peptide (1)..(332): Ceres Seq. ID no. 12777207
  misc_feature (16)..(302): Homolog of NCBI NO: 15222319 NR Description: unknown protein; protein id: At1g69430.1
  misc_feature (16)..(302): Homolog of NCBI NO: 27817928 NR Description: P0453E05.2 [Oryza sativa (japonica
  misc_feature (8)..(302): Homolog of NCBI NO: 18398818 NR Description: expressed protein
  misc_feature (70)..(295): Homolog of NCBI NO: 18398816 NR Description: unknown protein; protein id: At2g18680.1
  misc_feature (36)..(295): Homolog of NCBI NO: 25370705 NR Description: hypothetical protein At2g18680 [imported] -
  misc_feature (1)..(328): Homolog of NCBI NO: 34908936 NR Description: P0691E06.20 [Oryza sativa (japonica
  misc_feature (1)..(332): Homolog of NCBI NO: 7485737 NR Description: hypothetical protein F18F4.50 - Arabidopsis
  misc_feature (1)..(332): Homolog of NCBI NO: 15241607 NR Description: putative protein
  misc_feature (1)..(332): Homolog of NCBI NO: 18397813 NR Description: expressed protein
  misc_feature (1)..(332): Homolog of NCBI NO: 30684945 NR Description: expressed protein [Arabidopsis thaliana]
MDREQEEMQFLGFFGIYKEASKIILSWRRIFTQITSTLILPLSFIFLIHMEISNLLFRKILINEIVMDETKPNTPQYNKLDHMISSEMVTLVVFKIAYFTLLLIFSLLSTSAVVCTIASIYTAKDVTFKRVMSVVPKVWKRLMLTFLCAFAAFFAYNIMTALVMFLSIVTIGLSSGGLAVLVSITVLYFIGFVYLTVVWQLASVVTVLEDSWGVRAMAKSKELIRGKMVLSIFIFFTLVASFVSIRVLFKVMVVDGWRVSSLDKTAYGVLCFLLLSCLFLFGLVLQTVLYFVCKSYHHENIDKSALADHLEGYRGEYVPLTAKDVQLEQYQV

SEQ ID NO: 60248 - protein, 325 aa, Glycine max
  peptide (1)..(325): Ceres Seq. ID no. 12777208
  misc_feature (9)..(295): Homolog of NCBI NO: 15222319 NR Description: unknown protein; protein id: At1g69430.1
  misc_feature (9)..(295): Homolog of NCBI NO: 27817928 NR Description: P0453E05.2 [Oryza sativa (japonica
  misc_feature (1)..(295): Homolog of NCBI NO: 18398818 NR Description: expressed protein
  misc_feature (63)..(288): Homolog of NCBI NO: 18398816 NR Description: unknown protein; protein id: At2g18680.1
  misc_feature (29)..(288): Homolog of NCBI NO: 25370705 NR Description: hypothetical protein At2g18680 [imported] -
  misc_feature (1)..(321): Homolog of NCBI NO: 34908936 NR Description: P0691E06.20 [Oryza sativa (japonica
  misc_feature (1)..(325): Homolog of NCBI NO: 7485737 NR Description: hypothetical protein F18F4.50 - Arabidopsis
  misc_feature (1)..(325): Homolog of NCBI NO: 15241607 NR Description: putative protein
  misc_feature (1)..(325): Homolog of NCBI NO: 18397813 NR Description: expressed protein
  misc_feature (1)..(325): Homolog of NCBI NO: 30684945 NR Description: expressed protein [Arabidopsis thaliana]
MQFLGFFGIYKEASKIILSWRRIFTQITSTLILPLSFIFLIHMEISNLLFRKILINEIVMDETKPNTPQYNKLDHMISSEMVTLVVFKIAYFTLLLIFSLLSTSAVVCTIASIYTAKDVTFKRVMSVVPKVWKRLMLTFLCAFAAFFAYNIMTALVMFLSIVTIGLSSGGLAVLVSITVLYFIGFVYLTVVWQLASVVTVLEDSWGVRAMAKSKELIRGKMVLSIFIFFTLVASFVSIRVLFKVMVVDGWRVSSLDKTAYGVLCFLLLSCLFLFGLVLQTVLYFVCKSYHHENIDKSALADHLEGYRGEYVPLTAKDVQLEQYQV

SEQ ID NO: 60249 - protein, 283 aa, Glycine max
  peptide (1)..(283): Ceres Seq. ID no. 12777209
  misc_feature (1)..(253): Homolog of NCBI NO: 15222319 NR Description: unknown protein; protein id: At1g69430.1
  misc_feature (1)..(253): Homolog of NCBI NO: 27817928 NR Description: P0453E05.2 [Oryza sativa (japonica
  misc_feature (1)..(253): Homolog of NCBI NO: 18398818 NR Description: expressed protein
  misc_feature (21)..(246): Homolog of NCBI NO: 18398816 NR Description: unknown protein; protein id: At2g18680.1
  misc_feature (1)..(246): Homolog of NCBI NO: 25370705 NR Description: hypothetical protein At2g18680 [imported] -
  misc_feature (1)..(279): Homolog of NCBI NO: 34908936 NR Description: P0691E06.20 [Oryza sativa (japonica
  misc_feature (1)..(283): Homolog of NCBI NO: 7485737 NR Description: hypothetical protein F18F4.50 - Arabidopsis
  misc_feature (1)..(283): Homolog of NCBI NO: 15241607 NR Description: putative protein
  misc_feature (1)..(283): Homolog of NCBI NO: 18397813 NR Description: expressed protein
  misc_feature (1)..(283): Homolog of NCBI NO: 30684945 NR Description: expressed protein [Arabidopsis thaliana]
MEISNLLFRKILINEIVMDETKPNTPQYNKLDHMISSEMVTLVVFKIAYFTLLLIFSLLSTSAVVCTIASIYTAKDVTFKRVMSVVPKVWKRLMLTFLCAFAAFFAYNIMTALVMFLSIVTIGLSSGGLAVLVSITVLYFIGFVYLTVVWQLASVVTVLEDSWGVRAMAKSKELIRGKMVLSIFIFFTLVASFVSIRVLFKVMVVDGWRVSSLDKTAYGVLCFLLLSCLFLFGLVLQTVLYFVCKSYHHENIDKSALADHLEGYRGEYVPLTAKDVQLEQYQV

SEQ ID NO: 60250 - DNA, 904 bp, Glycine max
  misc_feature (1)..(904): Ceres Seq. ID no. 13594363
aatgactcacacgctggcaagaaacaacacgatgtgcacattagagaagagaggacccctcttcgtcctaaccctaaccagcgaattcgacgaccagcaccgcctcaaccccaccctcctatcttccctcctcgctgcgctctccgaagtcaagtcccaagccaccgccggctccgccctcctcaccgccgcgcacggcagattcttctgcaacggcttcgacttccgctgggcccaggccgccggcgaccagccctccgcccgcctccgcctccgccgcatgtccgacgccctccgccccgtcctcgccgcgctcctctccctccccatccccaccgttgccgccgtctccggccacgccgccgctgccggagcaatcttcgccctcgcgcacgactacgtcctcatgcgcgccgaccgcggtgtgatctactttccggaggtggacctgggaatcactcttccagaatacttcgccgccgtcgccggggcgaagatcccggcggcggcgctgcgtgacgttgtgttggccggaaggaaggttagggcggagggggcggtggagatggggatcgtgcactcggcgcacgatagcgcggagggcaccgtggaggctgcgatgcgcctgggggaggagttagcacggagaaagtgggttggggacgcttatgcggaaatcagaaagagtttgtaccctgaagtgtgtgctgctttgggattaacacccaaaaccatcgtttctaagatctgattacttgtaatttgaattgcacaaacaacaatttaacagtatgagaaaacaaaaaataaaaaatctatgttcgaagaatgaatttgaaatgtgatcaataatacagtgtgtatggttctacaatcatatgatacaagcatttatatttcttgt

SEQ ID NO: 60251 - protein, 249 aa, Glycine max
  peptide (1)..(249): Ceres Seq. ID no. 13594364
  misc_feature (21)..(195): Pfam Name: Enoyl-CoA hydratase/isomerase family Pfam Description: Enoyl-CoA hydratase/isomerase family
  misc_feature (16)..(207): Homolog of NCBI NO: 22968140 NR Description: hypothetical protein [Rhodospirillum rubrum]
  misc_feature (22)..(208): Homolog of NCBI NO: 24214965 NR Description: enoyl-CoA hydratase
  misc_feature (13)..(233): Homolog of NCBI NO: 40739395 NR Description: hypothetical protein AN6767.2 [Aspergillus
  misc_feature (30)..(238): Homolog of NCBI NO: 15828352 NR Description: possible enoyl-CoA hydratase [Mycobacterium
  misc_feature (7)..(242): Homolog of NCBI NO: 23017142 NR Description: hypothetical protein [Thermobifida fusca]
  misc_feature (10)..(236): Homolog of NCBI NO: 34903766 NR Description: unnamed protein product [Oryza sativa (japonica
  misc_feature (11)..(234): Homolog of NCBI NO: 15218713 NR Description: enoyl-CoA hydratase/isomerase family [Arabidopsis
  misc_feature (11)..(247): Homolog of NCBI NO: 15236499 NR Description: enoyl-CoA hydratase/isomerase family [Arabidopsis
  misc_feature (11)..(247): Homolog of NCBI NO: 21555734 NR Description: carnitine racemase like protein [Arabidopsis
  misc_feature (11)..(247): Homolog of NCBI NO: 15236498 NR Description: enoyl-CoA hydratase/isomerase family [Arabidopsis
MTHTLARNNTMCTLEKRGPLFVLTLTSEFDDQHRLNPTLLSSLLAALSEVKSQATAGSALLTAAHGRFFCNGFDFRWAQAAGDQPSARLRLRRMSDALRPVLAALLSLPIPTVAAVSGHAAAAGAIFALAHDYVLMRADRGVIYFPEVDLGITLPEYFAAVAGAKIPAAALRDVVLAGRKVRAEGAVEMGIVHSAHDSAEGTVEAAMRLGEELARRKWVGDAYAEIRKSLYPEVCAALGLTPKTIVSKI

SEQ ID NO: 60252 - protein, 239 aa, Glycine max
  peptide (1)..(239): Ceres Seq. ID no. 13594365
  misc_feature (11)..(185): Pfam Name: Enoyl-CoA hydratase/isomerase family Pfam Description: Enoyl-CoA hydratase/isomerase family
  misc_feature (6)..(197): Homolog of NCBI NO: 22968140 NR Description: hypothetical protein [Rhodospirillum rubrum]
  misc_feature (12)..(198): Homolog of NCBI NO: 24214965 NR Description: enoyl-CoA hydratase
  misc_feature (3)..(223): Homolog of NCBI NO: 40739395 NR Description: hypothetical protein AN6767.2 [Aspergillus
  misc_feature (20)..(228): Homolog of NCBI NO: 15828352 NR Description: possible enoyl-CoA hydratase [Mycobacterium
  misc_feature (1)..(232): Homolog of NCBI NO: 23017142 NR Description: hypothetical protein [Thermobifida fusca]
  misc_feature (1)..(226): Homolog of NCBI NO: 34903766 NR Description: unnamed protein product [Oryza sativa (japonica
  misc_feature (1)..(224): Homolog of NCBI NO: 15218713 NR Description: enoyl-CoA hydratase/isomerase family [Arabidopsis
  misc_feature (1)..(237): Homolog of NCBI NO: 15236499 NR Description: enoyl-CoA hydratase/isomerase family [Arabidopsis
  misc_feature (1)..(237): Homolog of NCBI NO: 21555734 NR Description: carnitine racemase like protein [Arabidopsis
  misc_feature (1)..(237): Homolog of NCBI NO: 15236498 NR Description: enoyl-CoA hydratase/isomerase family [Arabidopsis
MCTLEKRGPLFVLTLTSEFDDQHRLNPTLLSSLLAALSEVKSQATAGSALLTAAHGRFFCNGFDFRWAQAAGDQPSARLRLRRMSDALRPVLAALLSLPIPTVAAVSGHAAAAGAIFALAHDYVLMRADRGVIYFPEVDLGITLPEYFAAVAGAKIPAAALRDVVLAGRKVRAEGAVEMGIVHSAHDSAEGTVEAAMRLGEELARRKWVGDAYAEIRKSLYPEVCAALGLTPKTIVSKI

SEQ ID NO: 60253 - protein, 172 aa, Glycine max
  peptide (1)..(172): Ceres Seq. ID no. 13594366
NDSHAGKKQHDVHIREERTPLRPNPNQRIRRPAPPQPHPPIFPPRCALRSQVPSHRRLRPPHRRARQILLQRLRLPLGPGRRRPALRPPPPPPHVRRPPPRPRRAPLPPHPHRCRRLRPRRRCRSNLRPRARLRPHARRPRCDLLSGGGPGNHSSRILRRRRRGEDPGGGAA

SEQ ID NO: 60254 - DNA, 1473 bp, Glycine max
  misc_feature (1)..(1473): Ceres Seq. ID no. 12608490
gcctgttctacttctgggacttgttcttccacccaacgagtggagttaaattctaacccaacaaacaaacacaacaaattcaaattgtgcgaaaaataaaacagaaagtctcttgaacaaaaacttcgaactcaccaactcaaactcgctgctttcaaacttcaaagtaaaacccaactctatttccttctctcaggtctcagagtggcaaactgtaaagttttgatgcagaatggctgcaaccagggctcgagttagtagcttctctcgcaatgtatcaactgtgacttctcagaatcatggacttaagcatggccctaatgggacaatgttcatttcatctgggattccagatctggacaagattttaggtggtggtttttctctgggtagccttgtcatggttatggaagatcctgaagcacctcatcatatgcttctattgagaaattttatgtctcaaggacttgtgcaaaaacagccactcttgtatgctagtgcatctagagatcctaaaagttttctcggtactttgcctagtccggcgtcacccaaaggggataataaatcttcagatcttagccatgaaaaggatctaagaatcgcttggcaatacaaaaagtattttggtgagcctcagctaaatctgaacactaataatggtggtcagcatgattactgtaatgattttgacttgagaaagcccctggaccggcacttttttagtggcaataatgtagattgtgttagcatcaaagattctcctaaccttactgctcttcaagattgttgtgctggatttctagctaaattctcaagaaatgaaggcagcatttcctctgctggtcgtattgcaattcaatcattctgttctccacaatgcaagtattcaaatgaggagtggcatatgctttcttttattaggtccctaaagggcatggcccggtcttcaaacgctgttattgttgtaacctttccaccttcacttcttcctccatcttgttcaaaaagattgcagcatatggcagacaccttgctttctgtcaaagccattccagatgaggataaggaacttgcaaaactcctcactggttaccaggatatgattgggcttctaaatgtacacaaagttgcacggttaaatacacaggttcctgtgattctggaggccacaacattctccataaaattgcaaaaacgaaggtttttggttttagaatgtctaaatcaagccccagttgatggttcaagtggcagttcgtatggcacatctggcggttgttctgggtcaactaaagctggaccacttgatttttagactataccttatttataactgaaggcttttatcaaccaaaaatacgatatagccatagtgagtcaggctcaatgtttttcttagtgcttgaaatttagccttctaaattgtgttactccttttcttttttgttcttttgatgattaattggttgc

SEQ ID NO: 60255 - protein, 361 aa, Glycine max
  peptide (1)..(361): Ceres Seq. ID no. 12608491
  misc_feature (9)..(361): Pfam Name: PAXNEB protein Pfam Description: PAXNEB protein
  misc_feature (30)..(158): Homolog of NCBI NO: 7020641 NR Description: unnamed protein product [Homo sapiens]
  misc_feature (30)..(158): Homolog of NCBI NO: 31542608 NR Description: elongation protein 4 homolog [Mus musculus]
  misc_feature (30)..(158): Homolog of NCBI NO: 10129788 NR Description: Paxneb protein [Mus musculus]
  misc_feature (30)..(158): Homolog of NCBI NO: 26347749 NR Description: unnamed protein product [Mus musculus]
  misc_feature (30)..(158): Homolog of NCBI NO: 26329633 NR Description: unnamed protein product [Mus musculus]
  misc_feature (1)..(189): Homolog of NCBI NO: 34858115 NR Description: similar to Paxneb protein [Rattus norvegicus]
  misc_feature (30)..(158): Homolog of NCBI NO: 12861422 NR Description: unnamed protein product [Mus musculus]
  misc_feature (1)..(212): Homolog of NCBI NO: 17063185 NR Description: AT3g11220/F11B9_116 [Arabidopsis thaliana]
  misc_feature (1)..(212): Homolog of NCBI NO: 18399153 NR Description: expressed protein
  misc_feature (1)..(361): Homolog of NCBI NO: 12321866 NR Description: hypothetical protein; 53156-50996 [Arabidopsis
MAATRARVSSFSRNVSTVTSQNHGLKHGPNGTMFISSGIPDLDKILGGGFSLGSLVMVMEDPEAPHHMLLLRNFMSQGLVQKQPLLYASASRDPKSFLGTLPSPASPKGDNKSSDLSHEKDLRIAWQYKKYFGEPQLNLNTNNGGQHDYCNDFDLRKPLDRHFFSGNNVDCVSIKDSPNLTALQDCCAGFLAKFSRNEGSISSAGRIAIQSFCSPQCKYSNEEWHMLSFIRSLKGMARSSNAVIVVTFPPSLLPPSCSKRLQHMADTLLSVKAIPDEDKELAKLLTGYQDMIGLLNVHKVARLNTQVPVILEATTFSIKLQKRRFLVLECLNQAPVDGSSGSSYGTSGGCSGSTKAGPLDF

SEQ ID NO: 60256 - protein, 329 aa, Glycine max
  peptide (1)..(329): Ceres Seq. ID no. 12608492
  misc_feature (1)..(329): Pfam Name: PAXNEB protein Pfam Description: PAXNEB protein
  misc_feature (1)..(126): Homolog of NCBI NO: 7020641 NR Description: unnamed protein product [Homo sapiens]
  misc_feature (1)..(126): Homolog of NCBI NO: 31542608 NR Description: elongation protein 4 homolog [Mus musculus]
  misc_feature (1)..(126): Homolog of NCBI NO: 10129788 NR Description: Paxneb protein [Mus musculus]
  misc_feature (1)..(126): Homolog of NCBI NO: 26347749 NR Description: unnamed protein product [Mus musculus]
  misc_feature (1)..(126): Homolog of NCBI NO: 26329633 NR Description: unnamed protein product [Mus musculus]
  misc_feature (1)..(157): Homolog of NCBI NO: 34858115 NR Description: similar to Paxneb protein [Rattus norvegicus]
  misc_feature (1)..(126): Homolog of NCBI NO: 12861422 NR Description: unnamed protein product [Mus musculus]
  misc_feature (1)..(180): Homolog of NCBI NO: 17063185 NR Description: AT3g11220/F11B9_116 [Arabidopsis thaliana]
  misc_feature (1)..(180): Homolog of NCBI NO: 18399153 NR Description: expressed protein
  misc_feature (1)..(329): Homolog of NCBI NO: 12321866 NR Description: hypothetical protein; 53156-50996 [Arabidopsis
MFISSGIPDLDKILGGGFSLGSLVMVMEDPEAPHHMLLLRNFMSQGLVQKQPLLYASASRDPKSFLGTLPSPASPKGDNKSSDLSHEKDLRIAWQYKKYFGEPQLNLNTNNGGQHDYCNDFDLRKPLDRHFFSGNNVDCVSIKDSPNLTALQDCCAGFLAKFSRNEGSISSAGRIAIQSFCSPQCKYSNEEWHMLSFIRSLKGMARSSNAVIVVTFPPSLLPPSCSKRLQHMADTLLSVKAIPDEDKELAKLLTGYQDMIGLLNVHKVARLNTQVPVILEATTFSIKLQKRRFLVLECLNQAPVDGSSGSSYGTSGGCSGSTKAGPLDF

SEQ ID NO: 60257 - protein, 305 aa, Glycine max
  peptide (1)..(305): Ceres Seq. ID no. 12608493
  misc_feature (1)..(305): Pfam Name: PAXNEB protein Pfam Description: PAXNEB protein
  misc_feature (1)..(102): Homolog of NCBI NO: 7020641 NR Description: unnamed protein product [Homo sapiens]
  misc_feature (1)..(102): Homolog of NCBI NO: 31542608 NR Description: elongation protein 4 homolog [Mus musculus]
  misc_feature (1)..(102): Homolog of NCBI NO: 10129788 NR Description: Paxneb protein [Mus musculus]
  misc_feature (1)..(102): Homolog of NCBI NO: 26347749 NR Description: unnamed protein product [Mus musculus]
  misc_feature (1)..(102): Homolog of NCBI NO: 26329633 NR Description: unnamed protein product [Mus musculus]
  misc_feature (1)..(133): Homolog of NCBI NO: 34858115 NR Description: similar to Paxneb protein [Rattus norvegicus]
  misc_feature (1)..(102): Homolog of NCBI NO: 12861422 NR Description: unnamed protein product [Mus musculus]
  misc_feature (1)..(156): Homolog of NCBI NO: 17063185 NR Description: AT3g11220/F11B9_116 [Arabidopsis thaliana]
  misc_feature (1)..(156): Homolog of NCBI NO: 18399153 NR Description: expressed protein
  misc_feature (1)..(305): Homolog of NCBI NO: 12321866 NR Description: hypothetical protein; 53156-50996 [Arabidopsis
MVMEDPEAPHHMLLLRNFMSQGLVQKQPLLYASASRDPKSFLGTLPSPASPKGDNKSSDLSHEKDLRIAWQYKKYFGEPQLNLNTNNGGQHDYCNDFDLRKPLDRHFFSGNNVDCVSIKDSPNLTALQDCCAGFLAKFSRNEGSISSAGRIAIQSFCSPQCKYSNEEWHMLSFIRSLKGMARSSNAVIVVTFPPSLLPPSCSKRLQHMADTLLSVKAIPDEDKELAKLLTGYQDMIGLLNVHKVARLNTQVPVILEATTFSIKLQKRRFLVLECLNQAPVDGSSGSSYGTSGGCSGSTKAGPLDF

SEQ ID NO: 60258 - DNA, 1454 bp, Glycine max
  misc_feature (1)..(1454): Ceres Seq. ID no. 15177935
aacgtacaaggccttttcttatctctctctttctttctcatcttttggggcctcaaaatagtaggtgccactacacaatatgggttccaaagtaaagaccttggttttgctctctttgttttgcttggctctatttgagtccttgcaccaagcaagagcagcaaagtcacataatgatcataatgtgactcgcttgaaggggagaaaggagttaaatagatgtaatttgttcattggaagttgggttattgacccttcacaccctctctatgactcctcaagctgcccctttatagatgctgagtttgattgccaaaagtatgggagacccgataagcagtatctcaaatactcttggaagcctgattcatgtgccttacccaggttcgatggagtgaatttcttgaccaagtggaagggtaagaagataatgtttgtgggagactcattgagtttgaacatgtgggaatcattgtcctgcatgcttcacgcgtcggtgccgaatgccaccaccagctttgtgaggagacaagcactctccactgtgaccttccaggactatggagtaaccatacaactatatcgcacaccatatttggtggacataattcaagaagatgctgggcgagtgctcacactagactccatacaagctggtaatgcttggacaggcatggacatgttgatcttcaactcctggcattggtggacccacaaaggagattctcaaggatgggattacataaggaacggttccaatctagtaaaggatatggatcgtttggatgcatttttcaaagggatgaccacatgggctggatgggttgatcaaaaggttgactctaccaaaactaaagttttctttcaaggcatttctcctactcattatcaaggtcaggagtggaatcaaccaagaaagagttgtagtggagaactagaaccatcagcagggtcaacatatcctgctggtctacctcctgcagcaaacatagtgaacaaagtgttaaagaacatgaagaatcaagtttatctacttgacataacacttctctcacaactacgaaaagatgcccacccttctgcctatggtggcttggatcatacgggtaatgactgcagtcattggtgcctaccaggagtacctgatacttggaatgaacttctatatgcagctctatttatgtgaagttatatattaatgttatattctagtaattaaaggaatggattcaattgtattataggactcttgaagaatagttatgacagacttgcaaactaagttagtcagggtgatcaaattgttacacgtgtccagaaattgggaaaagtactttagaaggggatagtaatgtttattggattacaaattggaattgtactaatgattgattgatgcataattcatattgaatctttcatattaataaaagcttgcaaatttcagttttaag

SEQ ID NO: 60259 - protein, 368 aa, Glycine max
  peptide (1)..(368): Ceres Seq. ID no. 15177936
  misc_feature (40)..(366): Homolog of NCBI NO: 15228743 NR Description: expressed protein [Arabidopsis thaliana]
  misc_feature (39)..(138): Homolog of NCBI NO: 25408325 NR Description: hypothetical protein At2g34070 [imported] -
  misc_feature (200)..(368): Homolog of NCBI NO: 25408325 NR Description: hypothetical protein At2g34070 [imported] -
  misc_feature (8)..(366): Homolog of NCBI NO: 28393769 NR Description: unknown protein [Arabidopsis thaliana]
  misc_feature (8)..(366): Homolog of NCBI NO: 21593142 NR Description: unknown [Arabidopsis thaliana]
  misc_feature (42)..(367): Homolog of NCBI NO: 18406003 NR Description: expressed protein [Arabidopsis thaliana]
  misc_feature (34)..(366): Homolog of NCBI NO: 34911864 NR Description: OSJNBb0032K15.9 [Oryza sativa (japonica
  misc_feature (1)..(368): Homolog of NCBI NO: 25366741 NR Description: F28N24.24 protein - Arabidopsis thaliana
  misc_feature (39)..(368): Homolog of NCBI NO: 18403435 NR Description: expressed protein [Arabidopsis thaliana]
  misc_feature (1)..(368): Homolog of NCBI NO: 18396930 NR Description: expressed protein [Arabidopsis thaliana]
MGSKVKTLVLLSLFCLALFESLHQARAAKSHNDHNVTRLKGRKELNRCNLFIGSWVIDPSHPLYDSSSCPFIDAEFDCQKYGRPDKQYLKYSWKPDSCALPRFDGVNFLTKWKGKKIMFVGDSLSLNMWESLSCMLHASVPNATTSFVRRQALSTVTFQDYGVTIQLYRTPYLVDIIQEDAGRVLTLDSIQAGNAWTGMDMLIFNSWHWWTHKGDSQGWDYIRNGSNLVKDMDRLDAFFKGMTTWAGWVDQKVDSTKTKVFFQGISPTHYQGQEWNQPRKSCSGELEPSAGSTYPAGLPPAANIVNKVLKNMKNQVYLLDITLLSQLRKDAHPSAYGGLDHTGNDCSHWCLPGVPDTWNELLYAALFM

SEQ ID NO: 60260 - protein, 251 aa, Glycine max
  peptide (1)..(251): Ceres Seq. ID no. 15177937
  misc_feature (1)..(249): Homolog of NCBI NO: 15228743 NR Description: expressed protein [Arabidopsis thaliana]
  misc_feature (1)..(21): Homolog of NCBI NO: 25408325 NR Description: hypothetical protein At2g34070 [imported] -
  misc_feature (83)..(251): Homolog of NCBI NO: 25408325 NR Description: hypothetical protein At2g34070 [imported] -
  misc_feature (1)..(249): Homolog of NCBI NO: 28393769 NR Description: unknown protein [Arabidopsis thaliana]
  misc_feature (1)..(249): Homolog of NCBI NO: 21593142 NR Description: unknown [Arabidopsis thaliana]
  misc_feature (1)..(250): Homolog of NCBI NO: 18406003 NR Description: expressed protein [Arabidopsis thaliana]
  misc_feature (1)..(249): Homolog of NCBI NO: 34911864 NR Description: OSJNBb0032K15.9 [Oryza sativa (japonica
  misc_feature (1)..(251): Homolog of NCBI NO: 25366741 NR Description: F28N24.24 protein - Arabidopsis thaliana
  misc_feature (1)..(251): Homolog of NCBI NO: 18403435 NR Description: expressed protein [Arabidopsis thaliana]
  misc_feature (1)..(251): Homolog of NCBI NO: 18396930 NR Description: expressed protein [Arabidopsis thaliana]
MFVGDSLSLNMWESLSCMLHASVPNATTSFVRRQALSTVTFQDYGVTIQLYRTPYLVDIIQEDAGRVLTLDSIQAGNAWTGMDMLIFNSWHWWTHKGDSQGWDYIRNGSNLVKDMDRLDAFFKGMTTWAGWVDQKVDSTKTKVFFQGISPTHYQGQEWNQPRKSCSGELEPSAGSTYPAGLPPAANIVNKVLKNMKNQVYLLDITLLSQLRKDAHPSAYGGLDHTGNDCSHWCLPGVPDTWNELLYAALFM

SEQ ID NO: 60261 - protein, 241 aa, Glycine max
  peptide (1)..(241): Ceres Seq. ID no. 15177938
  misc_feature (1)..(239): Homolog of NCBI NO: 15228743 NR Description: expressed protein [Arabidopsis thaliana]
  misc_feature (1)..(11): Homolog of NCBI NO: 25408325 NR Description: hypothetical protein At2g34070 [imported] -
  misc_feature (73)..(241): Homolog of NCBI NO: 25408325 NR Description: hypothetical protein At2g34070 [imported] -
  misc_feature (1)..(239): Homolog of NCBI NO: 28393769 NR Description: unknown protein [Arabidopsis thaliana]
  misc_feature (1)..(239): Homolog of NCBI NO: 21593142 NR Description: unknown [Arabidopsis thaliana]
  misc_feature (1)..(240): Homolog of NCBI NO: 18406003 NR Description: expressed protein [Arabidopsis thaliana]
  misc_feature (1)..(239): Homolog of NCBI NO: 34911864 NR Description: OSJNBb0032K15.9 [Oryza sativa (japonica
  misc_feature (1)..(241): Homolog of NCBI NO: 25366741 NR Description: F28N24.24 protein - Arabidopsis thaliana
  misc_feature (1)..(241): Homolog of NCBI NO: 18403435 NR Description: expressed protein [Arabidopsis thaliana]
  misc_feature (1)..(241): Homolog of NCBI NO: 18396930 NR Description: expressed protein [Arabidopsis thaliana]
MWESLSCMLHASVPNATTSFVRRQALSTVTFQDYGVTIQLYRTPYLVDIIQEDAGRVLTLDSIQAGNAWTGMDMLIFNSWHWWTHKGDSQGWDYIRNGSNLVKDMDRLDAFFKGMTTWAGWVDQKVDSTKTKVFFQGISPTHYQGQEWNQPRKSCSGELEPSAGSTYPAGLPPAANIVNKVLKNMKNQVYLLDITLLSQLRKDAHPSAYGGLDHTGNDCSHWCLPGVPDTWNELLYAALFM

SEQ ID NO: 60262 - DNA, 1743 bp, Glycine max
  misc_feature (1)..(1743): Ceres Seq. ID no. 15168476
atcaaattgggatgttcttctcaggaaggtccaaaaagtcagtgcagcgaaaacggacgatccgaagaatacccttttcatctctctctacaataatcatcatcttcctcttcttcttcagtaaattattgtacctgacgatcttctcggtttgatcttatatcaatggaatttttttagacagaactcggattcacagggaaatctgattgcataggaacaaaaaagacaacacctttttatctctacacaagtgattatggcggttgctgagaatgttggggccaaaatcggttcttccagtcaaaatttggaaaacaatgtagtgtcatcgaactcaggcgaggttgagcaatcaaaacccagaagtgggtccatcaacgacgatcagaagctgaacaacggtgtcttcaaccaccaagatagagttcctggcactatgccagtgcccaatagcaattataactacgaggcccaaatgggtcagatgcacacaaatggggtgaacaatgatgggtatggaatgaatggggtcatttgtggggagaatgggggtgagagtttcaagcgtgatatgagggatttggaagagcttttgtcaaagttgaatcccatggctgaggaatttgtgcccccatcactaaccaatactcatggctacctacctggacctggtgccggtgctggtgccgggtttggttaccctaataattttatactgctcaataactttggtgatgctaacggtcaaactaacagaaggaggaagaatggctataatcatgggaagcgaagagtgaatcataaaatggatatggagaagagagaagagatgattaggaggactgtttatgtgtcagacattgatcaactggttactgaagagcagttggcggggctctttcttaactgtggccaggtcgttgattgccgtgtttgtggggatcctaattctattctgaggtttgccttcgttgagtttacagatgaagatggtgcaagggctgctttgaacctgtctggaaccatgcttggatattacccgttgagagtactaccttcgaaaactgctattgcccctgttaatccaacatttttgcccaggtctgaagatgaaagggagatgtgttcaagaacaatttattgcacaaatattgacaagaagcttactcaagctgatgtcaaacacttctttgaatctatttgcggagaggttcaacggttgaggcttcttggagattaccatcattcaactcgaattgcttttgttgagttcacagtggctgagagtgcaattgcagctctaagctgtagtggggtgattttgggttcactgcccataagggtaagtccatcgaagacaccagttcgttcacgtgctcctcgtccttctatgcactgaatcaactttccatgtttctggggttgattgctgctgagatatatttacatatatacatacatagaaacagctatgttctaaggaacatgtggcatttagttggtacttttgtcctcatgtcttacagtatggttactttgctccccttgggggattatgggtctctgttttagcatgtagagtcgaatcgtacttcgaggatcttgatggcttaatttatgatgcacaatgtgtcgtgttgatcatgcaaggagagaagtttatggttgttgggtgtttctaacatctggaattcattttaaagaaacatgttacaaagccttcgttttcgttaaaaaaag

SEQ ID NO: 60263 - protein, 380 aa, Glycine max
  peptide (1)..(380): Ceres Seq. ID no. 15168477
  misc_feature (197)..(265): Pfam Name: RNA recognition motif. (a.k.a. RRM, RBD, or RNP domain) Pfam Description: RNA recognition motif. (a.k.a. RRM, RBD, or RNP
  misc_feature (108)..(371): Homolog of NCBI NO: 15238531 NR Description: RNA-binding protein, putative [Arabidopsis
  misc_feature (112)..(363): Homolog of NCBI NO: 8671859 NR Description: Contains similarity to RNA-binding protein from thaliana gi|2129727 and contains RNA recognition PF|00076 domain.
  misc_feature (84)..(377): Homolog of NCBI NO: 15231858 NR Description: RNA-binding protein, putative [Arabidopsis
  misc_feature (180)..(380): Homolog of NCBI NO: 14030687 NR Description: At1g32790 [Arabidopsis thaliana]
  misc_feature (106)..(378): Homolog of NCBI NO: 15220902 NR Description: RNA-binding protein, putative [Arabidopsis
  misc_feature (1)..(86): Homolog of NCBI NO: 15229132 NR Description: RNA-binding protein, putative [Arabidopsis
  misc_feature (89)..(376): Homolog of NCBI NO: 15229132 NR Description: RNA-binding protein, putative [Arabidopsis
  misc_feature (83)..(380): Homolog of NCBI NO: 1174153 NR Description: RNA-binding protein
  misc_feature (83)..(380): Homolog of NCBI NO: 15235177 NR Description: RNA-binding protein RBP37 [Arabidopsis thaliana]
  misc_feature (63)..(380): Homolog of NCBI NO: 15223304 NR Description: RNA-binding protein, putative [Arabidopsis
MAVAENVGAKIGSSSQNLENNVVSSNSGEVEQSKPRSGSINDDQKLNNGVFNHQDRVPGTMPVPNSNYNYEAQMGQMHTNGVNNDGYGMNGVICGENGGESFKRDMRDLEELLSKLNPMAEEFVPPSLTNTHGYLPGPGAGAGAGFGYPNNFILLNNFGDANGQTNRRRKNGYNHGKRRVNHKMDMEKREEMIRRTVYVSDIDQLVTEEQLAGLFLNCGQVVDCRVCGDPNSILRFAFVEFTDEDGARAALNLSGTMLGYYPLRVLPSKTAIAPVNPTFLPRSEDEREMCSRTIYCTNIDKKLTQADVKHFFESICGEVQRLRLLGDYHHSTRIAFVEFTVAESAIAALSCSGVILGSLPIRVSPSKTPVRSRAPRPSMH

SEQ ID NO: 60264 - protein, 320 aa, Glycine max
  peptide (1)..(320): Ceres Seq. ID no. 15168478
  misc_feature (137)..(205): Pfam Name: RNA recognition motif. (a.k.a. RRM, RBD, or RNP domain) Pfam Description: RNA recognition motif. (a.k.a. RRM, RBD, or RNP
  misc_feature (48)..(311): Homolog of NCBI NO: 15238531 NR Description: RNA-binding protein, putative [Arabidopsis
  misc_feature (52)..(303): Homolog of NCBI NO: 8671859 NR Description: Contains similarity to RNA-binding protein from thaliana gi|2129727 and contains RNA recognition PF|00076 domain.
  misc_feature (24)..(317): Homolog of NCBI NO: 15231858 NR Description: RNA-binding protein, putative [Arabidopsis
  misc_feature (120)..(320): Homolog of NCBI NO: 14030687 NR Description: At1g32790 [Arabidopsis thaliana]
  misc_feature (46)..(318): Homolog of NCBI NO: 15220902 NR Description: RNA-binding protein, putative [Arabidopsis
  misc_feature (1)..(26): Homolog of NCBI NO: 15229132 NR Description: RNA-binding protein, putative [Arabidopsis
  misc_feature (29)..(316): Homolog of NCBI NO: 15229132 NR Description: RNA-binding protein, putative [Arabidopsis
  misc_feature (23)..(320): Homolog of NCBI NO: 1174153 NR Description: RNA-binding protein
  misc_feature (23)..(320): Homolog of NCBI NO: 15235177 NR Description: RNA-binding protein RBP37 [Arabidopsis thaliana]
  misc_feature (3)..(320): Homolog of NCBI NO: 15223304 NR Description: RNA-binding protein, putative [Arabidopsis
MPVPNSNYNYEAQMGQMHTNGVNNDGYGMNGVICGENGGESFKRDMRDLEELLSKLNPMAEEFVPPSLTNTHGYLPGPGAGAGAGFGYPNNFILLNNFGDANGQTNRRRKNGYNHGKRRVNHKMDMEKREEMIRRTVYVSDIDQLVTEEQLAGLFLNCGQVVDCRVCGDPNSILRFAFVEFTDEDGARAALNLSGTMLGYYPLRVLPSKTAIAPVNPTFLPRSEDEREMCSRTIYCTNIDKKLTQADVKHFFESICGEVQRLRLLGDYHHSTRIAFVEFTVAESAIAALSCSGVILGSLPIRVSPSKTPVRSRAPRPSMH

SEQ ID NO: 60265 - protein, 307 aa, Glycine max
  peptide (1)..(307): Ceres Seq. ID no. 15168479
  misc_feature (124)..(192): Pfam Name: RNA recognition motif. (a.k.a. RRM, RBD, or RNP domain) Pfam Description: RNA recognition motif. (a.k.a. RRM, RBD, or RNP
  misc_feature (35)..(298): Homolog of NCBI NO: 15238531 NR Description: RNA-binding protein, putative [Arabidopsis
  misc_feature (39)..(290): Homolog of NCBI NO: 8671859 NR Description: Contains similarity to RNA-binding protein from thaliana gi|2129727 and contains RNA recognition PF|00076 domain.
  misc_feature (11)..(304): Homolog of NCBI NO: 15231858 NR Description: RNA-binding protein, putative [Arabidopsis
  misc_feature (107)..(307): Homolog of NCBI NO: 14030687 NR Description: At1g32790 [Arabidopsis thaliana]
  misc_feature (33)..(305): Homolog of NCBI NO: 15220902 NR Description: RNA-binding protein, putative [Arabidopsis
  misc_feature (1)..(13): Homolog of NCBI NO: 15229132 NR Description: RNA-binding protein, putative [Arabidopsis
  misc_feature (16)..(303): Homolog of NCBI NO: 15229132 NR Description: RNA-binding protein, putative [Arabidopsis
  misc_feature (10)..(307): Homolog of NCBI NO: 1174153 NR Description: RNA-binding protein
  misc_feature (10)..(307): Homolog of NCBI NO: 15235177 NR Description: RNA-binding protein RBP37 [Arabidopsis thaliana]
  misc_feature (1)..(307): Homolog of NCBI NO: 15223304 NR Description: RNA-binding protein, putative [Arabidopsis
MGQMHTNGVNNDGYGMNGVICGENGGESFKRDMRDLEELLSKLNPMAEEFVPPSLTNTHGYLPGPGAGAGAGFGYPNNFILLNNFGDANGQTNRRRKNGYNHGKRRVNHKMDMEKREEMIRRTVYVSDIDQLVTEEQLAGLFLNCGQVVDCRVCGDPNSILRFAFVEFTDEDGARAALNLSGTMLGYYPLRVLPSKTAIAPVNPTFLPRSEDEREMCSRTIYCTNIDKKLTQADVKHFFESICGEVQRLRLLGDYHHSTRIAFVEFTVAESAIAALSCSGVILGSLPIRVSPSKTPVRSRAPRPSMH

SEQ ID NO: 60266 - DNA, 1600 bp, Glycine max
  misc_feature (1)..(1600): Ceres Seq. ID no. 15168496
aacacttacccatcccatggaatccgcaacatcatggagtaaccctctcccactttccagtctcccttccccttcgcattcacgccacccctccgccttcaaatttatggctttttcaactcttcacactttctcactcccttccctttcttctccctcttctttccacccatttcccctttcctctctctctccaaaacccacttctttcaaccctcgccctctcttccctcgcaccatgcacgcctcgcgcatccaagatgccgttggaggggcactggccctcgtccaatcgtcccccgctacgtggcagtccgcgcttctcagcaacgcgctgatctttttcttggggtctccgattttggtcagcgggttgtctctttccgggatcggtgctgcgtttctgctcggaacgctcacttggcgcgcttttgggccttctgggttcttccttgttgccacgtactttgttattggtactgctgctacaaaggtcaaaatggcacagaaagtggctcagggggttgctgagaaaaaaagaggaagaaggggtccgggcagtgttattggatccagtgctgctggttgcatttgtgctttcctcacgatttttggtgttgggggagaggcattttctcggctttggagacttggatttgttgccagtttctgcactaagttgagtgacactgtctcaagtgagattgggaaggcatatggcaaaacaacgtaccttgttacaacattcaaggtagtcccaagaggcacagaaggggctgttagtgttgaaggaaccttggcagggattttagcatccatagttctagcatttgtcagttttctcatcggtgaggttggttcacatgaagcaattatatgtgtactagctgctcagattgctaatcttggtgagagcataattggtgctgcacttcaagagaaggaaggatttaaatggcttaacaatgatgcagtcaatgtcatcaacatatcaatgggcagtatcatagcagtcttcatgcagcaagcactccagatctggggttcctaaacttgatgcagggttttcgaggagctcaatcatattaacatagtgaccatcttgataagtgcttatctagggcacggatttgaacaatggagcagtttggataaaatgattattcgtttatttgtcattgaaaactgacttggatatttatactcctggatgtttgagtgccatatgagaagcagccttctctgacacaagattcatctgcaaatttaaaatggctagaaacccgtccttctgatcatacccaaaccatgttggttgttacaaaggtgtggcaatggaaaccacaaaactcagtaagctgtagccatgattcaactcttgtatgggaagtagtggttcttccaaaatgtagatgtgaacttcttcttcttgatctagaacagtttcaaccaagcatttctgtctatcgttcttgtttgtcccttttattttctggctgttgggagggtaagattgggggggaggggtctttgtttctggccttgatccgtttttttaaatgcatgcactcactgaaatacagtcattgaaagaatagtt

SEQ ID NO: 60267 - protein, 349 aa, Glycine max
  peptide (1)..(349): Ceres Seq. ID no. 15168497
  misc_feature (102)..(341): Pfam Name: Integral membrane protein DUF92 Pfam Description: Integral membrane protein DUF92
  misc_feature (98)..(349): Homolog of NCBI NO: 17229104 NR Description: hypothetical protein [Nostoc sp. PCC 7120]
  misc_feature (103)..(340): Homolog of NCBI NO: 23043616 NR Description: hypothetical protein [Trichodesmium erythraeum
  misc_feature (103)..(207): Homolog of NCBI NO: 23125371 NR Description: hypothetical protein [Nostoc punctiforme]
  misc_feature (217)..(340): Homolog of NCBI NO: 23125371 NR Description: hypothetical protein [Nostoc punctiforme]
  misc_feature (103)..(337): Homolog of NCBI NO: 37520469 NR Description: hypothetical protein gll0900 [Gloeobacter
  misc_feature (78)..(338): Homolog of NCBI NO: 22299927 NR Description: ORF_ID:tlr2384~hypothetical protein
  misc_feature (97)..(346): Homolog of NCBI NO: 16330187 NR Description: hypothetical protein [Synechocystis sp. PCC 6803]
  misc_feature (36)..(320): Homolog of NCBI NO: 34910822 NR Description: P0456A01.17 [Oryza sativa (japonica
  misc_feature (47)..(347): Homolog of NCBI NO: 21592713 NR Description: unknown [Arabidopsis thaliana]
  misc_feature (21)..(347): Homolog of NCBI NO: 18412044 NR Description: expressed protein [Arabidopsis thaliana]
TLTHPMESATSWSNPLPLSSLPSPSHSRHPSAFKFMAFSTLHTFSLPSLSSPSSFHPFPLSSLSPKPTSFNPRPLFPRTMHASRIQDAVGGALALVQSSPATWQSALLSNALIFFLGSPILVSGLSLSGIGAAFLLGTLTWRAFGPSGFFLVATYFVIGTAATKVKMAQKVAQGVAEKKRGRRGPGSVIGSSAAGCICAFLTIFGVGGEAFSRLWRLGFVASFCTKLSDTVSSEIGKAYGKTTYLVTTFKVVPRGTEGAVSVEGTLAGILASIVLAFVSFLIGEVGSHEAIICVLAAQIANLGESIIGAALQEKEGFKWLNNDAVNVINISMGSIIAVFMQQALQIWGS

SEQ ID NO: 60268 - protein, 344 aa, Glycine max
  peptide (1)..(344): Ceres Seq. ID no. 15168498
  misc_feature (97)..(336): Pfam Name: Integral membrane protein DUF92 Pfam Description: Integral membrane protein DUF92
  misc_feature (93)..(344): Homolog of NCBI NO: 17229104 NR Description: hypothetical protein [Nostoc sp. PCC 7120]
  misc_feature (98)..(335): Homolog of NCBI NO: 23043616 NR Description: hypothetical protein [Trichodesmium erythraeum
  misc_feature (98)..(202): Homolog of NCBI NO: 23125371 NR Description: hypothetical protein [Nostoc punctiforme]
  misc_feature (212)..(335): Homolog of NCBI NO: 23125371 NR Description: hypothetical protein [Nostoc punctiforme]
  misc_feature (98)..(332): Homolog of NCBI NO: 37520469 NR Description: hypothetical protein gll0900 [Gloeobacter
  misc_feature (73)..(333): Homolog of NCBI NO: 22299927 NR Description: ORF_ID:tlr2384~hypothetical protein
  misc_feature (92)..(341): Homolog of NCBI NO: 16330187 NR Description: hypothetical protein [Synechocystis sp. PCC 6803]
  misc_feature (31)..(315): Homolog of NCBI NO: 34910822 NR Description: P0456A01.17 [Oryza sativa (japonica
  misc_feature (42)..(342): Homolog of NCBI NO: 21592713 NR Description: unknown [Arabidopsis thaliana]
  misc_feature (16)..(342): Homolog of NCBI NO: 18412044 NR Description: expressed protein [Arabidopsis thaliana]
MESATSWSNPLPLSSLPSPSHSRHPSAFKFMAFSTLHTFSLPSLSSPSSFHPFPLSSLSPKPTSFNPRPLFPRTMHASRIQDAVGGALALVQSSPATWQSALLSNALIFFLGSPILVSGLSLSGIGAAFLLGTLTWRAFGPSGFFLVATYFVIGTAATKVKMAQKVAQGVAEKKRGRRGPGSVIGSSAAGCICAFLTIFGVGGEAFSRLWRLGFVASFCTKLSDTVSSEIGKAYGKTTYLVTTFKVVPRGTEGAVSVEGTLAGILASIVLAFVSFLIGEVGSHEAIICVLAAQIANLGESIIGAALQEKEGFKWLNNDAVNVINISMGSIIAVFMQQALQIWGS

SEQ ID NO: 60269 - protein, 314 aa, Glycine max
  peptide (1)..(314): Ceres Seq. ID no. 15168499
  misc_feature (67)..(306): Pfam Name: Integral membrane protein DUF92 Pfam Description: Integral membrane protein DUF92
  misc_feature (63)..(314): Homolog of NCBI NO: 17229104 NR Description: hypothetical protein [Nostoc sp. PCC 7120]
  misc_feature (68)..(305): Homolog of NCBI NO: 23043616 NR Description: hypothetical protein [Trichodesmium erythraeum
  misc_feature (68)..(172): Homolog of NCBI NO: 23125371 NR Description: hypothetical protein [Nostoc punctiforme]
  misc_feature (182)..(305): Homolog of NCBI NO: 23125371 NR Description: hypothetical protein [Nostoc punctiforme]
  misc_feature (68)..(302): Homolog of NCBI NO: 37520469 NR Description: hypothetical protein gll0900 [Gloeobacter
  misc_feature (43)..(303): Homolog of NCBI NO: 22299927 NR Description: ORF_ID:tlr2384~hypothetical protein
  misc_feature (62)..(311): Homolog of NCBI NO: 16330187 NR Description: hypothetical protein [Synechocystis sp. PCC 6803]
  misc_feature (1)..(285): Homolog of NCBI NO: 34910822 NR Description: P0456A01.17 [Oryza sativa (japonica
  misc_feature (12)..(312): Homolog of NCBI NO: 21592713 NR Description: unknown [Arabidopsis thaliana]
  misc_feature (1)..(312): Homolog of NCBI NO: 18412044 NR Description: expressed protein [Arabidopsis thaliana]
MAFSTLHTFSLPSLSSPSSFHPFPLSSLSPKPTSFNPRPLFPRTMHASRIQDAVGGALALVQSSPATWQSALLSNALIFFLGSPILVSGLSLSGIGAAFLLGTLTWRAFGPSGFFLVATYFVIGTAATKVKMAQKVAQGVAEKKRGRRGPGSVIGSSAAGCICAFLTIFGVGGEAFSRLWRLGFVASFCTKLSDTVSSEIGKAYGKTTYLVTTFKVVPRGTEGAVSVEGTLAGILASIVLAFVSFLIGEVGSHEAIICVLAAQIANLGESIIGAALQEKEGFKWLNNDAVNVINISMGSIIAVFMQQALQIWGS

SEQ ID NO: 60270 - DNA, 772 bp, Glycine max
  misc_feature (1)..(772): Ceres Seq. ID no. 14316530
attctccaaccaacggcgacaacaacaaagattctttctagtttcttcctttcctttcctttttcgtcgccaacacggtaaacaaaaccccccaaatttcctcaattagggtttcaatccacattccaattccccaaccctcttcttccccatcctccaaatcccgaaactttccccaactgggtcctcaagtacgccacggcgagccctcgtagctcgcgatctcagaaaccaacgatgccgaaatcctcacgattcctcgtcgtcgcgatcgccgtcgccgcgctctgcgtgatcctccccgtcgcggcggcggcggatctcgaggaccccggcgtgctgcggctgccgtcggacagcctgtgcggcaaaacgacgccgtcttcgtgcccggcaaagtgcttccgcgccgaccccgtttgcggcgcggacggcgtgacgtactggtgcggttgcgcagaggcggcgtgcgcaggcgtggaggttgcgaaattggggttctgtgaagtcgggaatggtggctcggcgccgattcctgggcaagctctgcttttggtgcacattgtttggctcattgtgttggggttctccgtgttgttcggtcttttttagataattgggtttctttatgtatctaccatgatcagagggtgttatggttttggttctttgggattctttgagggttctttttgtaaattgatcaaacggccattcttgtattgtatgtatgattattcttattattgtaatttcacaactttcttgattc

SEQ ID NO: 60271 - protein, 124 aa, Glycine max
  peptide (1)..(124): Ceres Seq. ID no. 14316531
  misc_feature (44)..(89): Pfam Name: Kazal-type serine protease inhibitor domain Pfam Description: Kazal-type serine protease inhibitor domain
  misc_feature (1)..(124): Homolog of NCBI NO: 21554106 NR Description: unknown [Arabidopsis thaliana]
  misc_feature (1)..(124): Homolog of NCBI NO: 18412211 NR Description: expressed protein [Arabidopsis thaliana]
  misc_feature (6)..(122): Homolog of NCBI NO: 34909170 NR Description: P0468B07.28 [Oryza sativa (japonica
  misc_feature (4)..(124): Homolog of NCBI NO: 21555759 NR Description: unknown [Arabidopsis thaliana]
  misc_feature (4)..(124): Homolog of NCBI NO: 18411677 NR Description: expressed protein [Arabidopsis thaliana]
MPKSSRFLVVAIAVAALCVILPVAAAADLEDPGVLRLPSDSLCGKTTPSSCPAKCFRADPVCGADGVTYWCGCAEAACAGVEVAKLGFCEVGNGGSAPIPGQALLLVHIVWLIVLGFSVLFGLF

SEQ ID NO: 60272 - DNA, 1061 bp, Glycine max
  misc_feature (1)..(1061): Ceres Seq. ID no. 14316536
gaacaaattaagagtaattgtcaccaacatagtaacatttaaccacacctgtggccaaatgacatcctcagttcccttggtctccaccttattgctttgctctattgctcttctctactctgcatcatttggagctgaagcatggacctcgccctacatacccgtctcttccctcatcagcaaaagtctttatgacacatttttccttcacaaagatgacactgcatgccctgccaaagacttctacccctacgacgccttcattcgtgcatccaaatccttccctgcgtttggtaccaccggatgtttagcaacacgcaagcgtgagattgctgcgtttctcgctcagatttcccacgaaaccactggcggctgggccaccgcacccgacggcccatttgcatggggtctctgcttcaaggaagaaattagtcctcagagtaattactgtgattctactaacacccaatggccttgtttcccaggcaaaagctacaagggtcgaggacccattcaactttcttggaactacaactatggtccagcagggaaggctttgggatttgatgggctgaggaacccagagattgtggcgaacaattctgtgatagccttcaaaactgctatgtggttttggatgacagagcaaaagccaaaaccttcatgccacaatgtgatggttgggatatatgtgccgacagaagatgacatagcagcaaaccgaacagcgggttatggtttggtgactaacataatcaatggtggactggaatgtgggattcctggtgatgcaagagtgaatgatcggattgggtttttcgaaaggtatacgaagttgttcaacgtggacactggacctaacttggattgtgcatatcagaaacccttctaactctttcgttatgtttttgttttgtgtttttcttttcctttaatttaatttttttttctctgccaagactttaataatgtattgaaagaaagcaaatactacctgcttcatggaattttcctaatgtactcaaaacagaagttgacaaacaaagttttatattattctt

SEQ ID NO: 60273 - protein, 296 aa, Glycine max
  peptide (1)..(296): Ceres Seq. ID no. 14316537
  misc_feature (44)..(296): Homolog of NCBI NO: 7798668 NR Description: class I chitinase [Arabis lyallii]
  misc_feature (90)..(296): Homolog of NCBI NO: 4008072 NR Description: chitinase [Cynodon dactylon]
  misc_feature (25)..(296): Homolog of NCBI NO: 34894264 NR Description: unnamed protein product [Oryza sativa (japonica
  misc_feature (37)..(289): Homolog of NCBI NO: 4008074 NR Description: chitinase [Cynodon dactylon]
  misc_feature (28)..(296): Homolog of NCBI NO: 15217733 NR Description: glycosyl hydrolase family 19 (chitinase)
  misc_feature (29)..(296): Homolog of NCBI NO: 15234281 NR Description: glycosyl hydrolase family 19 (chitinase)
  misc_feature (23)..(296): Homolog of NCBI NO: 6002766 NR Description: class II chitinase [Fragaria x ananassa]
  misc_feature (25)..(296): Homolog of NCBI NO: 5880845 NR Description: chitinase precursor [Petroselinum crispum]
  misc_feature (25)..(296): Homolog of NCBI NO: 5880847 NR Description: chitinase precursor [Petroselinum crispum]
  misc_feature (34)..(296): Homolog of NCBI NO: 2129820 NR Description: chitinase (EC 3.2.1.14) class II - peanut
NKLRVIVTNIVTFNHTCGQMTSSVPLVSTLLLCSIALLYSASFGAEAWTSPYIPVSSLISKSLYDTFFLHKDDTACPAKDFYPYDAFIRASKSFPAFGTTGCLATRKREIAAFLAQISHETTGGWATAPDGPFAWGLCFKEEISPQSNYCDSTNTQWPCFPGKSYKGRGPIQLSWNYNYGPAGKALGFDGLRNPEIVANNSVIAFKTAMWFWMTEQKPKPSCHNVMVGIYVPTEDDIAANRTAGYGLVTNIINGGLECGIPGDARVNDRIGFFERYTKLFNVDTGPNLDCAYQKPF

SEQ ID NO: 60274 - protein, 277 aa, Glycine max
  peptide (1)..(277): Ceres Seq. ID no. 14316538
  misc_feature (25)..(277): Homolog of NCBI NO: 7798668 NR Description: class I chitinase [Arabis lyallii]
  misc_feature (71)..(277): Homolog of NCBI NO: 4008072 NR Description: chitinase [Cynodon dactylon]
  misc_feature (6)..(277): Homolog of NCBI NO: 34894264 NR Description: unnamed protein product [Oryza sativa (japonica
  misc_feature (18)..(270): Homolog of NCBI NO: 4008074 NR Description: chitinase [Cynodon dactylon]
  misc_feature (9)..(277): Homolog of NCBI NO: 15217733 NR Description: glycosyl hydrolase family 19 (chitinase)
  misc_feature (10)..(277): Homolog of NCBI NO: 15234281 NR Description: glycosyl hydrolase family 19 (chitinase)
  misc_feature (4)..(277): Homolog of NCBI NO: 6002766 NR Description: class II chitinase [Fragaria x ananassa]
  misc_feature (6)..(277): Homolog of NCBI NO: 5880845 NR Description: chitinase precursor [Petroselinum crispum]
  misc_feature (6)..(277): Homolog of NCBI NO: 5880847 NR Description: chitinase precursor [Petroselinum crispum]
  misc_feature (15)..(277): Homolog of NCBI NO: 2129820 NR Description: chitinase (EC 3.2.1.14) class II - peanut
MTSSVPLVSTLLLCSIALLYSASFGAEAWTSPYIPVSSLISKSLYDTFFLHKDDTACPAKDFYPYDAFIRASKSFPAFGTTGCLATRKREIAAFLAQISHETTGGWATAPDGPFAWGLCFKEEISPQSNYCDSTNTQWPCFPGKSYKGRGPIQLSWNYNYGPAGKALGFDGLRNPEIVANNSVIAFKTAMWFWMTEQKPKPSCHNVMVGIYVPTEDDIAANRTAGYGLVTNIINGGLECGIPGDARVNDRIGFFERYTKLFNVDTGPNLDCAYQKPF

SEQ ID NO: 60275 - DNA, 1562 bp, Glycine max
  misc_feature (1)..(1562): Ceres Seq. ID no. 15171152
attaagcgcattcccatgttcggtcactatcgcagggcattgctctgcttcaagcacaacccaaactccatcactgcaatctccacacccttctctattcttctccgatcattctccacttcctcttccgaccataaacagcaacactcattcaccttaaactacctcctcaacaccttcggcttctccccagaaaccgcctcaaaactctccacccgaatccgcctcgaaacctcccacgatcctgactcaatcctctccctcttcaaatcccacggcttctccgactcccatatccgccgcatcatccaaacatacccttacttcctctcctacaacgcccgcaaaaccatcctccccaaactcaccttcctcctctccaaaggcgcctccacctccgacctcgttcgcatcgtcaccaaaaaccctagaatcctccacttcgatctccacaacgccatcaccccgcgctacgacttcatcaaaaaattcatgctttccgatgattccaccctccgctccatcaaatcatgccccagcatcatcttttcgaacacccccctcctcaacattcaatttctcctccacaacgatgtcccggaatccaaggttgttatgttgcttcgctactgggcctgctcgctcgttgccaatgcccccacgtttcaggatgcggttcgggaggttatggaattgggcttcaggcccaacaaaacgttgttcttggtggcacttcgtgctaagcttgtgaggaaatcgttgtgggagaggaaggttgaggtgtataggaaatggggctggtctgaggagattctgctttccacgtttctgaggaacccctggtgtatgctggtctctgagaagaaaattgaggccatgatggagttttttattactcatttgggtttggattctttgtgttttgctaagcatcccgtgcttattgcgttgagcttggagaaaagggttgttcccagggcttctgtgttgcagtttcttttggcgaaaggtttgcttaaggatgttaattgggcgtccgcgtttatagttactgataagattttcttgcagaaatttgtggtttcctatgagaaggaagccgatcagctgttgaagctctatgaagagaagagagatgttcctagagaagagagatgttgaagctctctgaagccgatcagctgtcaaagggaactttgtaactggaatggaaccatatggattggtgtgatcatagagacttgttcatgatcatgactcttctaccatgttttgtcaggattcctgactttagtggtagactggtagtagaaggtttctctctatcattagctgaaattatatggtgaaacttgaggtatattatatcttgccttttcagttactattgctgaaataattggtatttcagtttaaacttaataaattctgttacttgattcagtagaattcccttaattgtttaaatccagggttgtggaaaccactattttcattttacaattaaagctatttctggctgtgatgccatcatcaatagtttgttctcaaccagttgatgt

SEQ ID NO: 60276 - protein, 386 aa, Glycine max
  peptide (1)..(386): Ceres Seq. ID no. 15171153
  misc_feature (86)..(357): Pfam Name: mTERF Pfam Description: mTERF
  misc_feature (25)..(344): Homolog of NCBI NO: 15220713 NR Description: hypothetical protein [Arabidopsis thaliana]
  misc_feature (32)..(375): Homolog of NCBI NO: 21553423 NR Description: unknown [Arabidopsis thaliana]
  misc_feature (32)..(375): Homolog of NCBI NO: 15238313 NR Description: expressed protein [Arabidopsis thaliana]
  misc_feature (46)..(361): Homolog of NCBI NO: 15220662 NR Description: expressed protein [Arabidopsis thaliana]
  misc_feature (32)..(356): Homolog of NCBI NO: 15220664 NR Description: expressed protein [Arabidopsis thaliana]
  misc_feature (23)..(295): Homolog of NCBI NO: 15232683 NR Description: expressed protein [Arabidopsis thaliana]
  misc_feature (50)..(374): Homolog of NCBI NO: 34394750 NR Description: unknown protein [Oryza sativa (japonica
  misc_feature (50)..(378): Homolog of NCBI NO: 25511650 NR Description: T22I11.2 protein - Arabidopsis thaliana
  misc_feature (50)..(378): Homolog of NCBI NO: 15218140 NR Description: hypothetical protein [Arabidopsis thaliana]
  misc_feature (9)..(374): Homolog of NCBI NO: 18415647 NR Description: expressed protein [Arabidopsis thaliana]
IKRIPMFGHYRRALLCFKHNPNSITAISTPFSILLRSFSTSSSDHKQQHSFTLNYLLNTFGFSPETASKLSTRIRLETSHDPDSILSLFKSHGFSDSHIRRIIQTYPYFLSYNARKTILPKLTFLLSKGASTSDLVRIVTKNPRILHFDLHNAITPRYDFIKKFMLSDDSTLRSIKSCPSIIFSNTPLLNIQFLLHNDVPESKVVMLLRYWACSLVANAPTFQDAVREVMELGFRPNKTLFLVALRAKLVRKSLWERKVEVYRKWGWSEEILLSTFLRNPWCMLVSEKKIEAMMEFFITHLGLDSLCFAKHPVLIALSLEKRVVPRASVLQFLLAKGLLKDVNWASAFIVTDKIFLQKFVVSYEKEADQLLKLYEEKRDVPREERC

SEQ ID NO: 60277 - protein, 381 aa, Glycine max
  peptide (1)..(381): Ceres Seq. ID no. 15171154
  misc_feature (81)..(352): Pfam Name: mTERF Pfam Description: mTERF
  misc_feature (20)..(339): Homolog of NCBI NO: 15220713 NR Description: hypothetical protein [Arabidopsis thaliana]
  misc_feature (27)..(370): Homolog of NCBI NO: 21553423 NR Description: unknown [Arabidopsis thaliana]
  misc_feature (27)..(370): Homolog of NCBI NO: 15238313 NR Description: expressed protein [Arabidopsis thaliana]
  misc_feature (41)..(356): Homolog of NCBI NO: 15220662 NR Description: expressed protein [Arabidopsis thaliana]
  misc_feature (27)..(351): Homolog of NCBI NO: 15220664 NR Description: expressed protein [Arabidopsis thaliana]
  misc_feature (18)..(290): Homolog of NCBI NO: 15232683 NR Description: expressed protein [Arabidopsis thaliana]
  misc_feature (45)..(369): Homolog of NCBI NO: 34394750 NR Description: unknown protein [Oryza sativa (japonica
  misc_feature (45)..(373): Homolog of NCBI NO: 25511650 NR Description: T22I11.2 protein - Arabidopsis thaliana
  misc_feature (45)..(373): Homolog of NCBI NO: 15218140 NR Description: hypothetical protein [Arabidopsis thaliana]
  misc_feature (4)..(369): Homolog of NCBI NO: 18415647 NR Description: expressed protein [Arabidopsis thaliana]
MFGHYRRALLCFKHNPNSITAISTPFSILLRSFSTSSSDHKQQHSFTLNYLLNTFGFSPETASKLSTRIRLETSHDPDSILSLFKSHGFSDSHIRRIIQTYPYFLSYNARKTILPKLTFLLSKGASTSDLVRIVTKNPRILHFDLHNAITPRYDFIKKFMLSDDSTLRSIKSCPSIIFSNTPLLNIQFLLHNDVPESKVVMLLRYWACSLVANAPTFQDAVREVMELGFRPNKTLFLVALRAKLVRKSLWERKVEVYRKWGWSEEILLSTFLRNPWCMLVSEKKIEAMMEFFITHLGLDSLCFAKHPVLIALSLEKRVVPRASVLQFLLAKGLLKDVNWASAFIVTDKIFLQKFVVSYEKEADQLLKLYEEKRDVPREERC

SEQ ID NO: 60278 - protein, 222 aa, Glycine max
  peptide (1)..(222): Ceres Seq. ID no. 15171155
  misc_feature (1)..(193): Pfam Name: mTERF Pfam Description: mTERF
  misc_feature (1)..(180): Homolog of NCBI NO: 15220713 NR Description: hypothetical protein [Arabidopsis thaliana]
  misc_feature (1)..(211): Homolog of NCBI NO: 21553423 NR Description: unknown [Arabidopsis thaliana]
  misc_feature (1)..(211): Homolog of NCBI NO: 15238313 NR Description: expressed protein [Arabidopsis thaliana]
  misc_feature (1)..(197): Homolog of NCBI NO: 15220662 NR Description: expressed protein [Arabidopsis thaliana]
  misc_feature (1)..(192): Homolog of NCBI NO: 15220664 NR Description: expressed protein [Arabidopsis thaliana]
  misc_feature (1)..(131): Homolog of NCBI NO: 15232683 NR Description: expressed protein [Arabidopsis thaliana]
  misc_feature (1)..(210): Homolog of NCBI NO: 34394750 NR Description: unknown protein [Oryza sativa (japonica
  misc_feature (1)..(214): Homolog of NCBI NO: 25511650 NR Description: T22I11.2 protein - Arabidopsis thaliana
  misc_feature (1)..(214): Homolog of NCBI NO: 15218140 NR Description: hypothetical protein [Arabidopsis thaliana]
  misc_feature (1)..(210): Homolog of NCBI NO: 18415647 NR Description: expressed protein [Arabidopsis thaliana]
MLSDDSTLRSIKSCPSIIFSNTPLLNIQFLLHNDVPESKVVMLLRYWACSLVANAPTFQDAVREVMELGFRPNKTLFLVALRAKLVRKSLWERKVEVYRKWGWSEEILLSTFLRNPWCMLVSEKKIEAMMEFFITHLGLDSLCFAKHPVLIALSLEKRVVPRASVLQFLLAKGLLKDVNWASAFIVTDKIFLQKFVVSYEKEADQLLKLYEEKRDVPREERC

SEQ ID NO: 60279 - DNA, 1278 bp, Glycine max
  misc_feature (1)..(1278): Ceres Seq. ID no. 15168580
aattacgaaaacccctcttccaattctgaattagcctctctaatccttcgcagcgccagaaaacttcaaactacagtcaacgtttcaaaatccgcttctctgttcatcttctccccacccctgcctaaccgactataattttttcataacccgcttctgaatggaagtcaatcccacccacgacggtggcgatgacacctcggaaacgccactgccgccaatggtggacccatctccgtctccgtctccgcaaatgaaagaagaggtgatggacgcggagcaaggcggtgacgtatcgcttccaatgagcgttgttccggcgtcgttgacagtgtcaactgaggcagcggcgaaacgatcgtcgaaggaccggcacacgaaggtggagggacgcggccggagaatccgtatgccggcgacgtgcgcggcgaggatctttcagctgacgcgggaactgggacacaagtccgacggagaaacaatccggtggttgctggagcacgcagagccggcgatcatcgaggccaccggaaccggcaccataccggcgatcgcggtctcggtcggcggcacactcaagattccgacatcctcggaagcgagagcccagggagaagaagacactccgaaaaagcgaaggagaagagcattaaagagcgaattcatcaacctgaacgaaaaccaggtttcggtgtcttcagggctggcaccaatcgcacaaagcagcgcatatggaagtggtggtggtggacttgttcctctgtggcatggtaacggtgctgctgctgggcctttcttcgtgtttccgaacgcttcaaacccacctcagtattgggccattccggcaaccgcggccccgtttttcaacgtccaggcccggcccatttcggggttcgtttccgccttgcagatgcaacatgataaccaccaccactctttaataaacgctgctgcctcgggttctgttaaatcttcgtccactgtgagtgtcactagcagtgctgcttccactcaaatgctcaaggatttctccttcgaaatttatgacaagaaagagcttcaatttttaggtcaaccaccacaaccctcttcatagccttgaactttaatacaatattcaaatactagtgtctattttttgttttttcaattttagttttagacatgtttgtttgtaatagttaggaggatttagggacaaattatattgtattttaattgaaaccttttaatttaagctgttgatattttttttaaagtaaaattgtatttttgacc

SEQ ID NO: 60280 - protein, 311 aa, Glycine max
  peptide (1)..(311): Ceres Seq. ID no. 15168581
  misc_feature (58)..(247): Pfam Name: TCP family transcription factor Pfam Description: TCP family transcription factor
  misc_feature (20)..(192): Homolog of NCBI NO: 5731257 NR Description: auxin-induced basic helix-loop-helix
  misc_feature (24)..(155): Homolog of NCBI NO: 15218305 NR Description: TCP family transcription factor, putative
  misc_feature (43)..(144): Homolog of NCBI NO: 15219640 NR Description: TCP family transcription factor, putative
  misc_feature (23)..(149): Homolog of NCBI NO: 18409345 NR Description: TCP family transcription factor, putative
  misc_feature (42)..(149): Homolog of NCBI NO: 20975251 NR Description: transcription factor PCF3 [Oryza sativa (japonica
  misc_feature (50)..(151): Homolog of NCBI NO: 15217857 NR Description: TCP family transcription factor, putative
  misc_feature (68)..(221): Homolog of NCBI NO: 7489534 NR Description: probable DNA binding protein PCF2 - rice
  misc_feature (15)..(287): Homolog of NCBI NO: 15225538 NR Description: TCP family transcription factor, putative
  misc_feature (58)..(304): Homolog of NCBI NO: 21592496 NR Description: unknown [Arabidopsis thaliana]
  misc_feature (16)..(304): Homolog of NCBI NO: 15242216 NR Description: TCP family transcription factor, putative
MEVNPTHDGGDDTSETPLPPMVDPSPSPSPQMKEEVMDAEQGGDVSLPMSVVPASLTVSTEAAAKRSSKDRHTKVEGRGRRIRMPATCAARIFQLTRELGHKSDGETIRWLLEHAEPAIIEATGTGTIPAIAVSVGGTLKIPTSSEARAQGEEDTPKKRRRRALKSEFINLNENQVSVSSGLAPIAQSSAYGSGGGGLVPLWHGNGAAAGPFFVFPNASNPPQYWAIPATAAPFFNVQARPISGFVSALQMQHDNHHHSLINAAASGSVKSSSTVSVTSSAASTQMLKDFSFEIYDKKELQFLGQPPQPSS

SEQ ID NO: 60281 - protein, 291 aa, Glycine max
  peptide (1)..(291): Ceres Seq. ID no. 15168582
  misc_feature (38)..(227): Pfam Name: TCP family transcription factor Pfam Description: TCP family transcription factor
  misc_feature (1)..(172): Homolog of NCBI NO: 5731257 NR Description: auxin-induced basic helix-loop-helix
  misc_feature (4)..(135): Homolog of NCBI NO: 15218305 NR Description: TCP family transcription factor, putative
  misc_feature (23)..(124): Homolog of NCBI NO: 15219640 NR Description: TCP family transcription factor, putative
  misc_feature (3)..(129): Homolog of NCBI NO: 18409345 NR Description: TCP family transcription factor, putative
  misc_feature (22)..(129): Homolog of NCBI NO: 20975251 NR Description: transcription factor PCF3 [Oryza sativa (japonica
  misc_feature (30)..(131): Homolog of NCBI NO: 15217857 NR Description: TCP family transcription factor, putative
  misc_feature (48)..(201): Homolog of NCBI NO: 7489534 NR Description: probable DNA binding protein PCF2 - rice
  misc_feature (1)..(267): Homolog of NCBI NO: 15225538 NR Description: TCP family transcription factor, putative
  misc_feature (38)..(284): Homolog of NCBI NO: 21592496 NR Description: unknown [Arabidopsis thaliana]
  misc_feature (1)..(284): Homolog of NCBI NO: 15242216 NR Description: TCP family transcription factor, putative
MVDPSPSPSPQMKEEVMDAEQGGDVSLPMSVVPASLTVSTEAAAKRSSKDRHTKVEGRGRRIRMPATCAARIFQLTRELGHKSDGETIRWLLEHAEPAIIEATGTGTIPAIAVSVGGTLKIPTSSEARAQGEEDTPKKRRRRALKSEFINLNENQVSVSSGLAPIAQSSAYGSGGGGLVPLWHGNGAAAGPFFVFPNASNPPQYWAIPATAAPFFNVQARPISGFVSALQMQHDNHHHSLINAAASGSVKSSSTVSVTSSAASTQMLKDFSFEIYDKKELQFLGQPPQPSS

SEQ ID NO: 60282 - protein, 280 aa, Glycine max
  peptide (1)..(280): Ceres Seq. ID no. 15168583
  misc_feature (27)..(216): Pfam Name: TCP family transcription factor Pfam Description: TCP family transcription factor
  misc_feature (1)..(161): Homolog of NCBI NO: 5731257 NR Description: auxin-induced basic helix-loop-helix
  misc_feature (1)..(124): Homolog of NCBI NO: 15218305 NR Description: TCP family transcription factor, putative
  misc_feature (12)..(113): Homolog of NCBI NO: 15219640 NR Description: TCP family transcription factor, putative
  misc_feature (1)..(118): Homolog of NCBI NO: 18409345 NR Description: TCP family transcription factor, putative
  misc_feature (11)..(118): Homolog of NCBI NO: 20975251 NR Description: transcription factor PCF3 [Oryza sativa (japonica
  misc_feature (19)..(120): Homolog of NCBI NO: 15217857 NR Description: TCP family transcription factor, putative
  misc_feature (37)..(190): Homolog of NCBI NO: 7489534 NR Description: probable DNA binding protein PCF2 - rice
  misc_feature (1)..(256): Homolog of NCBI NO: 15225538 NR Description: TCP family transcription factor, putative
  misc_feature (27)..(273): Homolog of NCBI NO: 21592496 NR Description: unknown [Arabidopsis thaliana]
  misc_feature (1)..(273): Homolog of NCBI NO: 15242216 NR Description: TCP family transcription factor, putative
MKEEVMDAEQGGDVSLPMSVVPASLTVSTEAAAKRSSKDRHTKVEGRGRRIRMPATCAARIFQLTRELGHKSDGETIRWLLEHAEPAIIEATGTGTIPAIAVSVGGTLKIPTSSEARAQGEEDTPKKRRRRALKSEFINLNENQVSVSSGLAPIAQSSAYGSGGGGLVPLWHGNGAAAGPFFVFPNASNPPQYWAIPATAAPFFNVQARPISGFVSALQMQHDNHHHSLINAAASGSVKSSSTVSVTSSAASTQMLKDFSFEIYDKKELQFLGQPPQPSS

SEQ ID NO: 60283 - DNA, 1627 bp, Glycine max
  misc_feature (1)..(1627): Ceres Seq. ID no. 14315338
ttttccctttgttttatattctttattttaacttttttctgttttggttgaccagagaggatatatcctcctttgtacttttgtttctcttaatgaattttcttattatataaaggaaatctattgaaaatagtttaatcgtgcacatttctatcagaaaaatatatgcaacatcttaatgagttaggacagtcatgttgaacttggagagttcatatatttagaagcaacttagggggggtttggtgaatgtaatcttttttcattcttggaaatcatgtttcctaggaatcatatttcctgggaatatctaaaatattactggaattgaaggacataattgtgtttttgcattataaaaaacttccccccttcatgggaatcttggactccacccctcccataggaaaattttactgggaaacacagttaaaaaataatttctgggaatgttaaactcttaggaatgattattaaaattgtcataccaaacatgggaattcaacattcacaacctaagattcttgagaaacttaagaaatcttccttccgaacactgccttaatgtttgatttaattgtactgagacatagttgtttgcttttatcttgtgtccttttccctgttttctttttattggagtatgtaatttccttattcctcaaagttaaacagagagcacattctatatccactgagaaggctacagtttctgctaccgatgaagattccattgctgatgtgatggaacagcatgacgaatttcttagttcaatgctggctcgttcagctaagttacagatggtcttcagatgttgggaaagaaatgatgttaaggaggtcattggcataatggcaaggatggatgatcatgctgtgattgctgatgttgttagcattataatggaaaaaattgatatcattacacttgagatatgtgctggtcttctgccacttctaactgatcttctacaaagtgaaatggaaagacatctaggaatatccttggaaatgctattgaaactggtcagaatatttggttcagtaatctattcaaccgtatcagctacacaacctgttggtgtcgatatcgaggcagagaacaggctagagcgttgcaacctctgcttcacagagcttgaaaaagtcaaacgttttttgccttctctttcaagaagaggaggatcaattgcaaaatctgcacaagagttgaatctggctttgcaggatgtttcgtgatcttttcctgattcaattatttccgccgctcaagttttaccggtgctttttaggggttttgtgcattttaaagatttaaacctccatacaagccaccgaatagtttgatgcattgtcatttggcattgaatgaagccttttcctgtatgtacatttattgctgttaaaaattcatggtaattgattagtggaggcactgatagctgctaattctgcgacatatactcgaagccaaagcttgaggcatgtcaccctctgctgatggttgcacagctgactataacctgtcgatatctgcttaatgtgtagatctcagtcggttccataactaacctaatatgtggcgcaagatactactgcctatctaatcttatttcaaaatttcatg

SEQ ID NO: 60284 - protein, 224 aa, Glycine max
  peptide (1)..(224): Ceres Seq. ID no. 14315339
  misc_feature (45)..(181): Homolog of NCBI NO: 15220302 NR Description: transducin / WD-40 repeat protein family
  misc_feature (34)..(195): Homolog of NCBI NO: 15219885 NR Description: expressed protein [Arabidopsis thaliana]
  misc_feature (37)..(223): Homolog of NCBI NO: 37535664 NR Description: putative microtubule-severing protein subunit
  misc_feature (61)..(221): Homolog of NCBI NO: 26452373 NR Description: unknown protein [Arabidopsis thaliana]
  misc_feature (36)..(208): Homolog of NCBI NO: 9759081 NR Description: contains similarity to unknown
  misc_feature (35)..(204): Homolog of NCBI NO: 18415801 NR Description: katanin p80 subunit - like protein [Arabidopsis
  misc_feature (35)..(204): Homolog of NCBI NO: 10178281 NR Description: katanin p80 subunit-like protein [Arabidopsis
  misc_feature (36)..(224): Homolog of NCBI NO: 30688991 NR Description: transducin / WD-40 repeat protein family
  misc_feature (36)..(224): Homolog of NCBI NO: 30688988 NR Description: transducin / WD-40 repeat protein family
  misc_feature (38)..(223): Homolog of NCBI NO: 38344202 NR Description: OSJNBa0064G10.18 [Oryza sativa (japonica
MFDLIVLRHSCLLLSCVLFPVFFLLEYVISLFLKVKQRAHSISTEKATVSATDEDSIADVMEQHDEFLSSMLARSAKLQMVFRCWERNDVKEVIGIMARMDDHAVIADVVSIIMEKIDIITLEICAGLLPLLTDLLQSEMERHLGISLEMLLKLVRIFGSVIYSTVSATQPVGVDIEAENRLERCNLCFTELEKVKRFLPSLSRRGGSIAKSAQELNLALQDVS

SEQ ID NO: 60285 - protein, 164 aa, Glycine max
  peptide (1)..(164): Ceres Seq. ID no. 14315340
  misc_feature (1)..(121): Homolog of NCBI NO: 15220302 NR Description: transducin / WD-40 repeat protein family
  misc_feature (1)..(135): Homolog of NCBI NO: 15219885 NR Description: expressed protein [Arabidopsis thaliana]
  misc_feature (1)..(163): Homolog of NCBI NO: 37535664 NR Description: putative microtubule-severing protein subunit
  misc_feature (1)..(161): Homolog of NCBI NO: 26452373 NR Description: unknown protein [Arabidopsis thaliana]
  misc_feature (1)..(148): Homolog of NCBI NO: 9759081 NR Description: contains similarity to unknown
  misc_feature (1)..(144): Homolog of NCBI NO: 18415801 NR Description: katanin p80 subunit - like protein [Arabidopsis
  misc_feature (1)..(144): Homolog of NCBI NO: 10178281 NR Description: katanin p80 subunit-like protein [Arabidopsis
  misc_feature (1)..(164): Homolog of NCBI NO: 30688991 NR Description: transducin / WD-40 repeat protein family
  misc_feature (1)..(164): Homolog of NCBI NO: 30688988 NR Description: transducin / WD-40 repeat protein family
  misc_feature (1)..(163): Homolog of NCBI NO: 38344202 NR Description: OSJNBa0064G10.18 [Oryza sativa (japonica
MEQHDEFLSSMLARSAKLQMVFRCWERNDVKEVIGIMARMDDHAVIADVVSIIMEKIDIITLEICAGLLPLLTDLLQSEMERHLGISLEMLLKLVRIFGSVIYSTVSATQPVGVDIEAENRLERCNLCFTELEKVKRFLPSLSRRGGSIAKSAQELNLALQDVS

SEQ ID NO: 60286 - protein, 154 aa, Glycine max
  peptide (1)..(154): Ceres Seq. ID no. 14315341
  misc_feature (1)..(111): Homolog of NCBI NO: 15220302 NR Description: transducin / WD-40 repeat protein family
  misc_feature (1)..(125): Homolog of NCBI NO: 15219885 NR Description: expressed protein [Arabidopsis thaliana]
  misc_feature (1)..(153): Homolog of NCBI NO: 37535664 NR Description: putative microtubule-severing protein subunit
  misc_feature (1)..(151): Homolog of NCBI NO: 26452373 NR Description: unknown protein [Arabidopsis thaliana]
  misc_feature (1)..(138): Homolog of NCBI NO: 9759081 NR Description: contains similarity to unknown
  misc_feature (1)..(134): Homolog of NCBI NO: 18415801 NR Description: katanin p80 subunit - like protein [Arabidopsis
  misc_feature (1)..(134): Homolog of NCBI NO: 10178281 NR Description: katanin p80 subunit-like protein [Arabidopsis
  misc_feature (1)..(154): Homolog of NCBI NO: 30688991 NR Description: transducin / WD-40 repeat protein family
  misc_feature (1)..(154): Homolog of NCBI NO: 30688988 NR Description: transducin / WD-40 repeat protein family
  misc_feature (1)..(153): Homolog of NCBI NO: 38344202 NR Description: OSJNBa0064G10.18 [Oryza sativa (japonica
MLARSAKLQMVFRCWERNDVKEVIGIMARMDDHAVIADVVSIIMEKIDIITLEICAGLLPLLTDLLQSEMERHLGISLEMLLKLVRIFGSVIYSTVSATQPVGVDIEAENRLERCNLCFTELEKVKRFLPSLSRRGGSIAKSAQELNLALQDVS

SEQ ID NO: 60287 - DNA, 717 bp, Glycine max
  misc_feature (1)..(717): Ceres Seq. ID no. 12612239
atctccatcgcagttcgcaacagttcaacacacttacacaaccacacgtatcacctctagatcgatcacatttcgtagtccgtaccacgtccgacgatatggagtaccaggggcagcacggccacgccaccgacaaggtggaggagtacggccagcccgtggccgggcacggcggcgccaccggcggccccacggggacgcacggagctgccggagccggaggcgcgcagctccaggcgacgcgggacgagcacaagaccgacggcgttctgcgccgctccggcagctccagctccagcagctcgtctgaggacgacggcgtgggcgggaggaggaagaaggggatgaaggagaagatcaaggagaagctccccggcggagcccacaaggacgccaccgccgggcagcagcacacggcggtggcgggcgagtacgcgggcacgcacggcaccgaggccaccggcgagaagaagggcgtcatggacaagatcaaggagaagcttcccggcggacaatactgagccagctatgcatgcgtgtctctatgttccgtcaaagctcggctagcatttgcagccatgctttactacggataataaataataagtacaatggactccgatgtacgttgtgtgtacgaccgcgtccgtgtgacgcatttgtgtattcgtatacggtatgatgtgtgtacatacatcgtaatagaaaaacgtttgt

SEQ ID NO: 60288 - protein, 172 aa, Glycine max
  peptide (1)..(172): Ceres Seq. ID no. 12612240
  misc_feature (33)..(172): Pfam Name: Dehydrin Pfam Description: Dehydrin
  misc_feature (33)..(169): Homolog of NCBI NO: 118484 NR Description: DEHYDRIN DHN1 (M3) (RAB-17 PROTEIN)
  misc_feature (33)..(169): Homolog of NCBI NO: 1181292 NR Description: dehydrin [Triticum turgidum subsp. durum]
  misc_feature (33)..(169): Homolog of NCBI NO: 82684 NR Description: dehydrin 3 - maize
  misc_feature (33)..(169): Homolog of NCBI NO: 2970213 NR Description: dehydrin-/LEA group 2-like protein [Lophopyrum
  misc_feature (33)..(172): Homolog of NCBI NO: 4105105 NR Description: dehydrin 2 [Hordeum vulgare]
  misc_feature (33)..(172): Homolog of NCBI NO: 118486 NR Description: DEHYDRIN DHN2 (B9)
  misc_feature (33)..(172): Homolog of NCBI NO: 6017930 NR Description: dehydrin; Dhn2 [Hordeum vulgare]
  misc_feature (33)..(172): Homolog of NCBI NO: 7442078 NR Description: dehydrin - barley
  misc_feature (33)..(172): Homolog of NCBI NO: 421976 NR Description: dehydrin 7 - barley
  misc_feature (33)..(172): Homolog of NCBI NO: 118483 NR Description: DEHYDRIN DHN1 (B8)
LHRSSQQFNTLTQPHVSPLDRSHFVVRTTSDDMEYQGQHGHATDKVEEYGQPVAGHGGATGGPTGTHGAAGAGGAQLQATRDEHKTDGVLRRSGSSSSSSSSEDDGVGGRRKKGMKEKIKEKLPGGAHKDATAGQQHTAVAGEYAGTHGTEATGEKKGVMDKIKEKLPGGQY

SEQ ID NO: 60289 - protein, 140 aa, Glycine max
  peptide (1)..(140): Ceres Seq. ID no. 12612241
  misc_feature (1)..(140): Pfam Name: Dehydrin Pfam Description: Dehydrin
  misc_feature (1)..(137): Homolog of NCBI NO: 118484 NR Description: DEHYDRIN DHN1 (M3) (RAB-17 PROTEIN)
  misc_feature (1)..(137): Homolog of NCBI NO: 1181292 NR Description: dehydrin [Triticum turgidum subsp. durum]
  misc_feature (1)..(137): Homolog of NCBI NO: 82684 NR Description: dehydrin 3 - maize
  misc_feature (1)..(137): Homolog of NCBI NO: 2970213 NR Description: dehydrin-/LEA group 2-like protein [Lophopyrum
  misc_feature (1)..(140): Homolog of NCBI NO: 4105105 NR Description: dehydrin 2 [Hordeum vulgare]
  misc_feature (1)..(140): Homolog of NCBI NO: 118486 NR Description: DEHYDRIN DHN2 (B9)
  misc_feature (1)..(140): Homolog of NCBI NO: 6017930 NR Description: dehydrin; Dhn2 [Hordeum vulgare]
  misc_feature (1)..(140): Homolog of NCBI NO: 7442078 NR Description: dehydrin - barley
  misc_feature (1)..(140): Homolog of NCBI NO: 421976 NR Description: dehydrin 7 - barley
  misc_feature (1)..(140): Homolog of NCBI NO: 118483 NR Description: DEHYDRIN DHN1 (B8)
MEYQGQHGHATDKVEEYGQPVAGHGGATGGPTGTHGAAGAGGAQLQATRDEHKTDGVLRRSGSSSSSSSSEDDGVGGRRKKGMKEKIKEKLPGGAHKDATAGQQHTAVAGEYAGTHGTEATGEKKGVMDKIKEKLPGGQY

SEQ ID NO: 60290 - protein, 102 aa, Glycine max
  peptide (1)..(102): Ceres Seq. ID no. 12612242
SPSQFATVQHTYTTTRITSRSITFRSPYHVRRYGVPGAARPRHRQGGGVRPARGRARRRHRRPHGDARSCRSRRRAAPGDAGRAQDRRRSAPLRQLQLQQLV

SEQ ID NO: 60291 - DNA, 661 bp, Glycine max
  misc_feature (1)..(661): Ceres Seq. ID no. 15173311
actaaatccagaaggggaaaaaaagagagaaaagaaatcaggggtaaactttctctctctcccttgcttattcctcccaaaagaaaaagacggtttccgttggaaggaagaaagaaagaaattgagtttgagatctgattgtgcggcgacgatggagaacaacgacagcatcatatcgcgggagaagatcgaccaggcagcggtgtggctcggctccgccgtctcttccgctttcttttcctcattggaacgcttttcctgcgtcaacgtcgccacctctgaccccgacaacgacgatgacgacgacgattattactccaccaccaccgccactcccacctccgcatccaccaccaccaccaccgccctcgccaccactcctccctccgttcaggtcaacgggcaaaaaacaaacgacgacgtctccaacctccccgtttgaggcaatataacgacgacgacgtcgttgctgcgctgtgtatagacctttttcccttttcctcctttcgtgtgtgtgttatgtaaggattctcgattttcgttgcttcatacttttgaagtcgtgaaaaagaaaaaacaagatgtgatgcaattttatgcctgtctatttaattaactaattacatgcttatatatttttattaaattgtattattagttc

SEQ ID NO: 60292 - protein, 146 aa, Glycine max
  peptide (1)..(146): Ceres Seq. ID no. 15173312
  misc_feature (49)..(101): Homolog of NCBI NO: 15236936 NR Description: expressed protein [Arabidopsis thaliana]
LNPEGEKKREKKSGVNFLSLPCLFLPKEKDGFRWKEERKKLSLRSDCAATMENNDSIISREKIDQAAVWLGSAVSSAFFSSLERFSCVNVATSDPDNDDDDDDYYSTTTATPTSASTTTTTALATTPPSVQVNGQKTNDDVSNLPV

SEQ ID NO: 60293 - protein, 96 aa, Glycine max
  peptide (1)..(96): Ceres Seq. ID no. 15173313
  misc_feature (1)..(51): Homolog of NCBI NO: 15236936 NR Description: expressed protein [Arabidopsis thaliana]
MENNDSIISREKIDQAAVWLGSAVSSAFFSSLERFSCVNVATSDPDNDDDDDDYYSTTTATPTSASTTTTTALATTPPSVQVNGQKTNDDVSNLPV

SEQ ID NO: 60294 - DNA, 1654 bp, Glycine max
  misc_feature (1)..(1654): Ceres Seq. ID no. 15227091
aatccattatcaaaatcaatcatacccaacaacatcctccgacaccatgttgcacatggaaaaccccctcctgcagtcaacaaactcaattaccttcacattctttgggctgttgttatttctctttgttctttcatccatattcagaaaccgcggtgctgcaacaagaaaagcaccaccagaagcaagaggcgcgtggcctttaattggtcacatccacctcttaggtggctcaaaaccaccccatgtcacgttgggccacatggcggacaaatatggtcccgtcttcaccttgcgtctgggtgctcacaaaacgttggttgtgagcaattgggaaatggccaaacagtgctttaccgtcaacgacaaagcgtttgctagccgtcctaaatcagtgtcctttgaattgttgggatacaactattccatgattgggttcatcccttacggttcttattggcgtcacgtgcgcaaaattatcacgctggagcttctctctactcactgcatagacatgctcaagcacgtgatggtggccgaggttaaggcggcagtgaaagagacttacaagaacctaaagggttccgaaaaggcaacaactgaaatgaagaggtggttcggggacataacgttaaacgttatgttcagaacggtggtaggaaaacgttttgttggtgagaatgaagagaacgaacggatccgaaaggcgctgagagaattttttgacctgacgggggcgttcaatgtgtctgatgctcttccttatttgagatggttggatttggatggcgcagagaagaaaatgaaaaagacggcgaaagagttagatgggtttgttcaagtttggctggaagaacacaaaagtaaaaggaatagtgaagctgaacccaaaagtaaccaggacttgatggacgtgcttcttagccttgttgaggagggtcaagagtttgacggccaggatgctgacaccacaatcaaagctacttgcctgggcttaattttagctggctctgatacgacaacaacaacattgtcttgggctctctcattacttctcaataatcgtgaagtcctaaataaggcaatccacgaattagacacacaaattgggagtgaaaaaattgtagagatatcagacttaaaaaagctagaatatctccaatctatcatcaaggaaacattacgtttgtacccagctgcaccacttaatgtgccacacgagtccttagaagattgcaccgtgggtggatatcatgtaccaactggcacgcgtctgttgactaatatttcaaaacttcaacgagacccttcattataccctaatccattagaattttggccagagagattcttgacaacccacaaggatgtagacatcaaaggtcaacattttgaattaattccatttggtgcaggtagaagaatgtgccctggactttctttcggtcttcaagtaatgcaactaacgcttgctactctattgcatgggtttgacattgtaactagtgatggggaacatgtcgatatgcttgaacaaattggactaaccaacattaaggcctctccactccaagtcattcttacaccacgtctttctggtcatatttatgatgaaatttaaatactaaaaaaataaagaaaaaaaaaaaaaaaa

SEQ ID NO: 60295 - protein, 539 aa, Glycine max
  peptide (1)..(539): Ceres Seq. ID no. 15227092
  misc_feature (60)..(529): Pfam Name: Cytochrome P450 Pfam Description: Cytochrome P450
IHYQNQSYPTTSSDTMLHMENPLLQSTNSITFTFFGLLLFLFVLSSIFRNRGAATRKAPPEARGAWPLIGHIHLLGGSKPPHVTLGHMADKYGPVFTLRLGAHKTLVVSNWEMAKQCFTVNDKAFASRPKSVSFELLGYNYSMIGFIPYGSYWRHVRKIITLELLSTHCIDMLKHVMVAEVKAAVKETYKNLKGSEKATTEMKRWFGDITLNVMFRTVVGKRFVGENEENERIRKALREFFDLTGAFNVSDALPYLRWLDLDGAEKKMKKTAKELDGFVQVWLEEHKSKRNSEAEPKSNQDLMDVLLSLVEEGQEFDGQDADTTIKATCLGLILAGSDTTTTTLSWALSLLLNNREVLNKAIHELDTQIGSEKIVEISDLKKLEYLQSIIKETLRLYPAAPLNVPHESLEDCTVGGYHVPTGTRLLTNISKLQRDPSLYPNPLEFWPERFLTTHKDVDIKGQHFELIPFGAGRRMCPGLSFGLQVMQLTLATLLHGFDIVTSDGEHVDMLEQIGLTNIKASPLQVILTPRLSGHIYDEI

SEQ ID NO: 60296 - protein, 524 aa, Glycine max
  peptide (1)..(524): Ceres Seq. ID no. 15227093
  misc_feature (45)..(514): Pfam Name: Cytochrome P450 Pfam Description: Cytochrome P450
MLHMENPLLQSTNSITFTFFGLLLFLFVLSSIFRNRGAATRKAPPEARGAWPLIGHIHLLGGSKPPHVTLGHMADKYGPVFTLRLGAHKTLVVSNWEMAKQCFTVNDKAFASRPKSVSFELLGYNYSMIGFIPYGSYWRHVRKIITLELLSTHCIDMLKHVMVAEVKAAVKETYKNLKGSEKATTEMKRWFGDITLNVMFRTVVGKRFVGENEENERIRKALREFFDLTGAFNVSDALPYLRWLDLDGAEKKMKKTAKELDGFVQVWLEEHKSKRNSEAEPKSNQDLMDVLLSLVEEGQEFDGQDADTTIKATCLGLILAGSDTTTTTLSWALSLLLNNREVLNKAIHELDTQIGSEKIVEISDLKKLEYLQSIIKETLRLYPAAPLNVPHESLEDCTVGGYHVPTGTRLLTNISKLQRDPSLYPNPLEFWPERFLTTHKDVDIKGQHFELIPFGAGRRMCPGLSFGLQVMQLTLATLLHGFDIVTSDGEHVDMLEQIGLTNIKASPLQVILTPRLSGHIYDEI

SEQ ID NO: 60297 - protein, 521 aa, Glycine max
  peptide (1)..(521): Ceres Seq. ID no. 15227094
  misc_feature (42)..(511): Pfam Name: Cytochrome P450 Pfam Description: Cytochrome P450
MENPLLQSTNSITFTFFGLLLFLFVLSSIFRNRGAATRKAPPEARGAWPLIGHIHLLGGSKPPHVTLGHMADKYGPVFTLRLGAHKTLVVSNWEMAKQCFTVNDKAFASRPKSVSFELLGYNYSMIGFIPYGSYWRHVRKIITLELLSTHCIDMLKHVMVAEVKAAVKETYKNLKGSEKATTEMKRWFGDITLNVMFRTVVGKRFVGENEENERIRKALREFFDLTGAFNVSDALPYLRWLDLDGAEKKMKKTAKELDGFVQVWLEEHKSKRNSEAEPKSNQDLMDVLLSLVEEGQEFDGQDADTTIKATCLGLILAGSDTTTTTLSWALSLLLNNREVLNKAIHELDTQIGSEKIVEISDLKKLEYLQSIIKETLRLYPAAPLNVPHESLEDCTVGGYHVPTGTRLLTNISKLQRDPSLYPNPLEFWPERFLTTHKDVDIKGQHFELIPFGAGRRMCPGLSFGLQVMQLTLATLLHGFDIVTSDGEHVDMLEQIGLTNIKASPLQVILTPRLSGHIYDEI

SEQ ID NO: 60298 - DNA, 955 bp, Glycine max
  misc_feature (1)..(955): Ceres Seq. ID no. 15173314
caattatgctgtgcacaccctgcttactgaactgaagcgatgatggtgttctgtcctgtgttgaaggaaacgtcgaaacctgaaagcgaaccatgccagaacgagaatccaccaatggttactgcagcagtggcgaagaagacggtgacgccgcttggagagcagcaatcgattccattgctcaaaccaccacctatgtcgcttccaccaccaaacacaatcacccaaatcatcatattgatgatgatgaccacaaacccaacacacaacagcttaagcactaccaactcaaggcacaaaagcttctgaatgaaatattggaaaattcaatagagatagtgagaaaacctgtccctgtcgtggatgaggatcccgagagcaatgaatgcggcattcgcttgtttaaacatgctcagccaggaatagtgtttgatcacgtagatgaactccaaccaccaaggaaacggcctagactacttcctggaggagatattgatgagaaatcaaagaagcagtttagaaaacagattagatctgttgctgttaacgggatagatataatagctgcagcaaatgatgcatacaagaagtcattagctagactagaagctaaagatgccgcagcaaaagctaaagccaagagagaagaggaaagaattgaaaatttgaaaaagattaggggagaaaggtggctaccttccatggccaaggagatgcaggttaaaattcgacactgacatgttatgtctttccatgctcttaacttcgatgctagttttatgtgtaactctataactgattagctttttttatttgttagttgagcacttgagcttgttgtacacaataattttatagaattataacttggttatgaatttttttttcttctttttttctttaacttaactattctgttacattaccgttcacaagttcacatattgaaatatct

SEQ ID NO: 60299 - protein, 214 aa, Glycine max
  peptide (1)..(214): Ceres Seq. ID no. 15173315
  misc_feature (1)..(214): Homolog of NCBI NO: 15229629 NR Description: expressed protein [Arabidopsis thaliana]
  misc_feature (1)..(214): Homolog of NCBI NO: 21593080 NR Description: unknown [Arabidopsis thaliana]
MPERESTNGYCSSGEEDGDAAWRAAIDSIAQTTTYVASTTKHNHPNHHIDDDDHKPNTQQLKHYQLKAQKLLNEILENSIEIVRKPVPVVDEDPESNECGIRLFKHAQPGIVFDHVDELQPPRKRPRLLPGGDIDEKSKKQFRKQIRSVAVNGIDIIAAANDAYKKSLARLEAKDAAAKAKAKREEERIENLKKIRGERWLPSMAKEMQVKIRH

SEQ ID NO: 60300 - DNA, 1360 bp, Glycine max
  misc_feature (1)..(1360): Ceres Seq. ID no. 13638402
ataaaccctgcaccttccaacaatcacttctctcctccttccttctcacttctcacttctcaccaattacgttaccttgcactattattctatacaactgtaaacatccttaattgcaaaccctctctctctctccttaaataattctcataaaaaaataaaataaaaattaaaactaacaaagaaaccattttgcacaaacccaattgagagtttgagacccagatgatgatgatgaacaatactattattccatggtcaaccattggcgttgtgattgcatggtacacttccaacataggggttcttcttctgaacaagtacttgctaagcaactacggctttaggttccccgtgttcctcaccacgtgtcacatgctggtgtgctcgctcttcagctacgttattgtttccgttacggaagctgttccgctgcagcgcgtgcggtccaggagccagttttggaggatcgtggcgctcggcgtcgttttctgcttctccgtcgtttgcgggaacgtgtcgctcaggtacattccggtgtcgtttaatcaggccatcggcgccaccacgccgttcttcaccgccgttttcgcttatgctgtcagcgccaagagggaggcttgggttacgtacgccacgctcttgcccgttgttgcgggcgtcgtcatagctagtgggggtgaaccaagttttcatctgtttggatttataatctgtgtttcatcgactggtgccagagcatttaaatcagtgcttcaagatattttgttgtcctcagagggagaaaagttgaattctatgaacctgctgctttatatggctccaatagcagtgatggtcttacttcctacaatattgttgatggagggaaatgtgattcagatcactatggatcttgccagaaaggatataagaattttttggtatctgcttctcagttcttctcttgcatattttgtgaacctcactaattttttggtgaccaaacatacaagtgcacttacccttcaggttttaggaaatgcaaagggggcagttgctgtggtggtctcaattttgatattcaaaaaccccatttcaatgataggaatgcttggctatgcactcactatcattggagttatcttgtacagtgaaaccaagaagaggtatagcaaaaattagtaaaattaacaagattaccaatcaaagcagggtgtgatttaccacaagcgagagggccaacaagttatacttatgcatacaaaattatgagcttgcagcaaccacttttgttacacgtgaacaagaatatttcccccctaactatttcattcattgcaagcgttttgggagtagtcacactccccataaacccttt

SEQ ID NO: 60301 - protein, 312 aa, Glycine max
  peptide (1)..(312): Ceres Seq. ID no. 13638403
  misc_feature (27)..(150): Pfam Name: Integral membrane protein DUF6 Pfam Description: Integral membrane protein DUF6
  misc_feature (17)..(302): Homolog of NCBI NO: 38567832 NR Description: OSJNBb0020J19.10 [Oryza sativa (japonica
  misc_feature (13)..(301): Homolog of NCBI NO: 15229717 NR Description: phosphate translocator-related [Arabidopsis
  misc_feature (153)..(308): Homolog of NCBI NO: 15229717 NR Description: phosphate translocator-related [Arabidopsis
  misc_feature (13)..(308): Homolog of NCBI NO: 15221371 NR Description: phosphate translocator-related [Arabidopsis
  misc_feature (1)..(309): Homolog of NCBI NO: 15228248 NR Description: phosphate translocator-related [Arabidopsis
  misc_feature (16)..(309): Homolog of NCBI NO: 17064798 NR Description: phosphate/phosphoenolpyruvate translocator-like
  misc_feature (16)..(309): Homolog of NCBI NO: 15237644 NR Description: phosphate translocator-related [Arabidopsis
  misc_feature (13)..(308): Homolog of NCBI NO: 27476065 NR Description: Putative phosphate/phosphoenolpyruvate
  misc_feature (13)..(312): Homolog of NCBI NO: 30681126 NR Description: phosphate translocator-related [Arabidopsis
  misc_feature (13)..(312): Homolog of NCBI NO: 9759107 NR Description: phosphate/phosphoenolpyruvate translocator
MMMMNNTIIPWSTIGVVIAWYTSNIGVLLLNKYLLSNYGFRFPVFLTTCHMLVCSLFSYVIVSVTEAVPLQRVRSRSQFWRIVALGVVFCFSVVCGNVSLRYIPVSFNQAIGATTPFFTAVFAYAVSAKREAWVTYATLLPVVAGVVIASGGEPSFHLFGFIICVSSTGARAFKSVLQDILLSSEGEKLNSMNLLLYMAPIAVMVLLPTILLMEGNVIQITMDLARKDIRIFWYLLLSSSLAYFVNLTNFLVTKHTSALTLQVLGNAKGAVAVVVSILIFKNPISMIGMLGYALTIIGVILYSETKKRYSKN

SEQ ID NO: 60302 - protein, 311 aa, Glycine max
  peptide (1)..(311): Ceres Seq. ID no. 13638404
  misc_feature (26)..(149): Pfam Name: Integral membrane protein DUF6 Pfam Description: Integral membrane protein DUF6
  misc_feature (16)..(301): Homolog of NCBI NO: 38567832 NR Description: OSJNBb0020J19.10 [Oryza sativa (japonica
  misc_feature (12)..(300): Homolog of NCBI NO: 15229717 NR Description: phosphate translocator-related [Arabidopsis
  misc_feature (152)..(307): Homolog of NCBI NO: 15229717 NR Description: phosphate translocator-related [Arabidopsis
  misc_feature (12)..(307): Homolog of NCBI NO: 15221371 NR Description: phosphate translocator-related [Arabidopsis
  misc_feature (1)..(308): Homolog of NCBI NO: 15228248 NR Description: phosphate translocator-related [Arabidopsis
  misc_feature (15)..(308): Homolog of NCBI NO: 17064798 NR Description: phosphate/phosphoenolpyruvate translocator-like
  misc_feature (15)..(308): Homolog of NCBI NO: 15237644 NR Description: phosphate translocator-related [Arabidopsis
  misc_feature (12)..(307): Homolog of NCBI NO: 27476065 NR Description: Putative phosphate/phosphoenolpyruvate
  misc_feature (12)..(311): Homolog of NCBI NO: 30681126 NR Description: phosphate translocator-related [Arabidopsis
  misc_feature (12)..(311): Homolog of NCBI NO: 9759107 NR Description: phosphate/phosphoenolpyruvate translocator
MMMNNTIIPWSTIGVVIAWYTSNIGVLLLNKYLLSNYGFRFPVFLTTCHMLVCSLFSYVIVSVTEAVPLQRVRSRSQFWRIVALGVVFCFSVVCGNVSLRYIPVSFNQAIGATTPFFTAVFAYAVSAKREAWVTYATLLPVVAGVVIASGGEPSFHLFGFIICVSSTGARAFKSVLQDILLSSEGEKLNSMNLLLYMAPIAVMVLLPTILLMEGNVIQITMDLARKDIRIFWYLLLSSSLAYFVNLTNFLVTKHTSALTLQVLGNAKGAVAVVVSILIFKNPISMIGMLGYALTIIGVILYSETKKRYSKN

SEQ ID NO: 60303 - protein, 310 aa, Glycine max
  peptide (1)..(310): Ceres Seq. ID no. 13638405
  misc_feature (25)..(148): Pfam Name: Integral membrane protein DUF6 Pfam Description: Integral membrane protein DUF6
  misc_feature (15)..(300): Homolog of NCBI NO: 38567832 NR Description: OSJNBb0020J19.10 [Oryza sativa (japonica
  misc_feature (11)..(299): Homolog of NCBI NO: 15229717 NR Description: phosphate translocator-related [Arabidopsis
  misc_feature (151)..(306): Homolog of NCBI NO: 15229717 NR Description: phosphate translocator-related [Arabidopsis
  misc_feature (11)..(306): Homolog of NCBI NO: 15221371 NR Description: phosphate translocator-related [Arabidopsis
  misc_feature (1)..(307): Homolog of NCBI NO: 15228248 NR Description: phosphate translocator-related [Arabidopsis
  misc_feature (14)..(307): Homolog of NCBI NO: 17064798 NR Description: phosphate/phosphoenolpyruvate translocator-like
  misc_feature (14)..(307): Homolog of NCBI NO: 15237644 NR Description: phosphate translocator-related [Arabidopsis
  misc_feature (11)..(306): Homolog of NCBI NO: 27476065 NR Description: Putative phosphate/phosphoenolpyruvate
  misc_feature (11)..(310): Homolog of NCBI NO: 30681126 NR Description: phosphate translocator-related [Arabidopsis
  misc_feature (11)..(310): Homolog of NCBI NO: 9759107 NR Description: phosphate/phosphoenolpyruvate translocator
MMNNTIIPWSTIGVVIAWYTSNIGVLLLNKYLLSNYGFRFPVFLTTCHMLVCSLFSYVIVSVTEAVPLQRVRSRSQFWRIVALGVVFCFSVVCGNVSLRYIPVSFNQAIGATTPFFTAVFAYAVSAKREAWVTYATLLPVVAGVVIASGGEPSFHLFGFIICVSSTGARAFKSVLQDILLSSEGEKLNSMNLLLYMAPIAVMVLLPTILLMEGNVIQITMDLARKDIRIFWYLLLSSSLAYFVNLTNFLVTKHTSALTLQVLGNAKGAVAVVVSILIFKNPISMIGMLGYALTIIGVILYSETKKRYSKN

SEQ ID NO: 60304 - DNA, 1237 bp, Glycine max
  misc_feature (1)..(1237): Ceres Seq. ID no. 14311207
gaaattctccaaggaatctctctctctctctctctttctttccctttttcactttctcattcattcttattagtatttctatttcacttcaccaacccactccaccgtttcccctttccttccatgctattatggcttcatcttccatcaaacacactcaccaccttaaccgcacaaaactcttcatgaaagaagaaacccttttgaaaaagaagcatcactatcccaaaatcatacgaatacgtgtcaccgacgccgacgctaccgactcctccagcgacgacgacgagccctccatgtcctccacgcgccgcagagtaaaaaacttcgtcaacgaaattaccatccaaggcggcggcggtggtggtggcgacgttaacgttgtttctaagaaaagaagattcaagtccggtgccggagctccgttatgtcggcggaagacgggggcgaagaagttccggggagtgaggcagcggccatgggggaagtgggcggcggagataagagacccgtcgcgccgcgtccggctgtggctgggaacctacgacaccgccgaggaagctgccattgtgtacgacaacgcggccattcagctgcgtggcgccgacgcgctcaccaatttcataacgccgccgccggagaacagaaaaaccggttactgctccggcgaggagtctcgcaacaacgacgacttgcgttcccccacttcggttcttgggcgctgttcggtgtccgaggaagctgtaactgcaaacgacgtatttggaggctctagtgagtgcgagtattcatgcgtttcggagtcagtgtttcctattcctaacgaggtggtgtttgactttgaaagcacgttagatatgtttgatgaagggattaataatgttgtggcagagactagtatattcttggcggaggatttagatttgggttttacgagttggcatagagagtgtgataatttccaagacattgggggggatttgtttgtttgggatcctcttgtcgctctttgattgagacacagacaccattctctcgtctttgtaattctattgccaacgaaaatgggttgctatcagttttgtttcttttgggggtttaggcaaaaaccttgtgtctaaggagaggttttctaattttttattctagcagtatatgtttattaaccactagttgtaaaaccgtgcttcccacggtgttgccgtctttttgtttcttatataaaattatgtctcat

SEQ ID NO: 60305 - protein, 336 aa, Glycine max
  peptide (1)..(336): Ceres Seq. ID no. 14311208
  misc_feature (150)..(210): Pfam Name: AP2 domain Pfam Description: AP2 domain
  misc_feature (76)..(207): Homolog of NCBI NO: 28876021 NR Description: putative AP2 domain containing protein
  misc_feature (74)..(212): Homolog of NCBI NO: 15225959 NR Description: AP2 domain transcription factor, putative
  misc_feature (48)..(273): Homolog of NCBI NO: 7489208 NR Description: Tsi1 protein - common tobacco
  misc_feature (49)..(238): Homolog of NCBI NO: 7531181 NR Description: PATHOGENESIS-RELATED GENES TRANSCRIPTIONAL
  misc_feature (75)..(246): Homolog of NCBI NO: 15233169 NR Description: AP2 domain transcription factor, putative
  misc_feature (49)..(216): Homolog of NCBI NO: 15238705 NR Description: putative protein; protein id: At5g53290.1
  misc_feature (49)..(248): Homolog of NCBI NO: 15234337 NR Description: putative protein; protein id: At4g27950.1
  misc_feature (69)..(336): Homolog of NCBI NO: 15237053 NR Description: AP2 domain transcription factor, putative
  misc_feature (44)..(335): Homolog of NCBI NO: 15236595 NR Description: AP2 domain transcription factor, putative
  misc_feature (44)..(335): Homolog of NCBI NO: 22655200 NR Description: putative Ap2 domain protein [Arabidopsis thaliana]
NSPRNLSLSLSFFPFFTFSFILISISISLHQPTPPFPLSFHAIMASSSIKHTHHLNRTKLFMKEETLLKKKHHYPKIIRIRVTDADATDSSSDDDEPSMSSTRRRVKNFVNEITIQGGGGGGGDVNVVSKKRRFKSGAGAPLCRRKTGAKKFRGVRQRPWGKWAAEIRDPSRRVRLWLGTYDTAEEAAIVYDNAAIQLRGADALTNFITPPPENRKTGYCSGEESRNNDDLRSPTSVLGRCSVSEEAVTANDVFGGSSECEYSCVSESVFPIPNEVVFDFESTLDMFDEGINNVVAETSIFLAEDLDLGFTSWHRECDNFQDIGGDLFVWDPLVAL

SEQ ID NO: 60306 - protein, 293 aa, Glycine max
  peptide (1)..(293): Ceres Seq. ID no. 14311209
  misc_feature (107)..(167): Pfam Name: AP2 domain Pfam Description: AP2 domain
  misc_feature (33)..(164): Homolog of NCBI NO: 28876021 NR Description: putative AP2 domain containing protein
  misc_feature (31)..(169): Homolog of NCBI NO: 15225959 NR Description: AP2 domain transcription factor, putative
  misc_feature (5)..(230): Homolog of NCBI NO: 7489208 NR Description: Tsi1 protein - common tobacco
  misc_feature (6)..(195): Homolog of NCBI NO: 7531181 NR Description: PATHOGENESIS-RELATED GENES TRANSCRIPTIONAL
  misc_feature (32)..(203): Homolog of NCBI NO: 15233169 NR Description: AP2 domain transcription factor, putative
  misc_feature (6)..(173): Homolog of NCBI NO: 15238705 NR Description: putative protein; protein id: At5g53290.1
  misc_feature (6)..(205): Homolog of NCBI NO: 15234337 NR Description: putative protein; protein id: At4g27950.1
  misc_feature (26)..(293): Homolog of NCBI NO: 15237053 NR Description: AP2 domain transcription factor, putative
  misc_feature (1)..(292): Homolog of NCBI NO: 15236595 NR Description: AP2 domain transcription factor, putative
  misc_feature (1)..(292): Homolog of NCBI NO: 22655200 NR Description: putative Ap2 domain protein [Arabidopsis thaliana]
MASSSIKHTHHLNRTKLFMKEETLLKKKHHYPKIIRIRVTDADATDSSSDDDEPSMSSTRRRVKNFVNEITIQGGGGGGGDVNVVSKKRRFKSGAGAPLCRRKTGAKKFRGVRQRPWGKWAAEIRDPSRRVRLWLGTYDTAEEAAIVYDNAAIQLRGADALTNFITPPPENRKTGYCSGEESRNNDDLRSPTSVLGRCSVSEEAVTANDVFGGSSECEYSCVSESVFPIPNEVVFDFESTLDMFDEGINNVVAETSIFLAEDLDLGFTSWHRECDNFQDIGGDLFVWDPLVAL

SEQ ID NO: 60307 - protein, 275 aa, Glycine max
  peptide (1)..(275): Ceres Seq. ID no. 14311210
  misc_feature (89)..(149): Pfam Name: AP2 domain Pfam Description: AP2 domain
  misc_feature (15)..(146): Homolog of NCBI NO: 28876021 NR Description: putative AP2 domain containing protein
  misc_feature (13)..(151): Homolog of NCBI NO: 15225959 NR Description: AP2 domain transcription factor, putative
  misc_feature (1)..(212): Homolog of NCBI NO: 7489208 NR Description: Tsi1 protein - common tobacco
  misc_feature (1)..(177): Homolog of NCBI NO: 7531181 NR Description: PATHOGENESIS-RELATED GENES TRANSCRIPTIONAL
  misc_feature (14)..(185): Homolog of NCBI NO: 15233169 NR Description: AP2 domain transcription factor, putative
  misc_feature (1)..(155): Homolog of NCBI NO: 15238705 NR Description: putative protein; protein id: At5g53290.1
  misc_feature (1)..(187): Homolog of NCBI NO: 15234337 NR Description: putative protein; protein id: At4g27950.1
  misc_feature (8)..(275): Homolog of NCBI NO: 15237053 NR Description: AP2 domain transcription factor, putative
  misc_feature (1)..(274): Homolog of NCBI NO: 15236595 NR Description: AP2 domain transcription factor, putative
  misc_feature (1)..(274): Homolog of NCBI NO: 22655200 NR Description: putative Ap2 domain protein [Arabidopsis thaliana]
MKEETLLKKKHHYPKIIRIRVTDADATDSSSDDDEPSMSSTRRRVKNFVNEITIQGGGGGGGDVNVVSKKRRFKSGAGAPLCRRKTGAKKFRGVRQRPWGKWAAEIRDPSRRVRLWLGTYDTAEEAAIVYDNAAIQLRGADALTNFITPPPENRKTGYCSGEESRNNDDLRSPTSVLGRCSVSEEAVTANDVFGGSSECEYSCVSESVFPIPNEVVFDFESTLDMFDEGINNVVAETSIFLAEDLDLGFTSWHRECDNFQDIGGDLFVWDPLVAL

SEQ ID NO: 60308 - DNA, 1510 bp, Glycine max
  misc_feature (1)..(1510): Ceres Seq. ID no. 15177947
aagagaaacaacaagaaagagatgagaacaaacaagaatcaagagagagaggtgttactacgttagtctatgaacagtcaccccgagagactgaaatttccagaccctcaaatcaaactcttctattctctcatcaatcaatcaatccagttccctctcggttccttcctacagttgaataatgaaatttctggaaaagtgctcgagtgaagaggcattcagcagcatctcaatttataatcgtttcagataggaatgggaatatatctcagcactccaaaaactgaaaagttttctgaagatggtgaaaatgactgtcttagatatggtttatcatccatgcaagggtggcgtgcaacaatggaagatgctcatgctgcatatactgatctggatgagtccacttcattttttggtgtctatgatggccatggaggtaaggtggttgcaaagttttgtgccaagtttcttcatcaacagttgttcaaaagtgagacatacttaactggagatataggagcctcccttcagaaagcctttttgagaatggatgaaatgatgcgtggtcaaaggggatggagggaattatcaatattgggggataagataaacaagtttactgggatgatagaagggttgatttggtctccacgaagcagtgatgggaattgccatgttgatgattgggcttttgaggaggggcctcattctgattttgctggaccaacttcaggaagcactgcctgtgttgcagttattagaaacaaccaacttgttgttgcaaatgctggtgattcgcgttgtgtgatatccaggaagggccaggcatacaatttgtctagagaccacaaacctgatcttgagattgagaaggaaagaatcttaaaagctggtggtttcattcacgtaggacgagtcaatggaagtttaaatcttgcaagagctattggtgacatggaatttaaacagaataagtttctttctgctgaaaaacaaattgtaactgccaatccagacatcaacactgttgagctttgtgacgaagatgagtttgtggtgttagcttgtgatggcatatgggattgcatgtcaagtcaacaactggttgattttgttcatgaacaattgcactcggaaacaaaactttctgccgtgtgtgaaagagtacttgatcggtgtttggcaccatcaactgccagtggtgaaggatgtgacaacatgaccatgattgtggtgcagttcaaaagacctgctcagtccagtgtaccagcagaagagtcctcttcaaactgacaagctgaacctgaaacaaaactagagagaagtgagagttagcattattcctcagtgacagttcaaatattgtatcatatatatatatataatatatatgtgtgtgtttagtgtgcaacagtgattagaatgcgtccgcatggtcatcttcctttcatcccacattatacacaactgctattccaattaccgtaaagaatagtaccagtttttctcc

SEQ ID NO: 60309 - protein, 345 aa, Glycine max
  peptide (1)..(345): Ceres Seq. ID no. 15177948
  misc_feature (22)..(322): Pfam Name: Protein phosphatase 2C Pfam Description: Protein phosphatase 2C
  misc_feature (156)..(342): Homolog of NCBI NO: 27807391 NR Description: protein phosphatase 1G (formerly 2C),
  misc_feature (1)..(119): Homolog of NCBI NO: 31216428 NR Description: ENSANGP00000017684 [Anopheles gambiae]
  misc_feature (142)..(345): Homolog of NCBI NO: 31216428 NR Description: ENSANGP00000017684 [Anopheles gambiae]
  misc_feature (1)..(102): Homolog of NCBI NO: 19921654 NR Description: CG10417-PA [Drosophila melanogaster]
  misc_feature (156)..(342): Homolog of NCBI NO: 19921654 NR Description: CG10417-PA [Drosophila melanogaster]
  misc_feature (1)..(120): Homolog of NCBI NO: 27697184 NR Description: Similar to protein phosphatase 1G (formerly 2C),
  misc_feature (156)..(338): Homolog of NCBI NO: 27697184 NR Description: Similar to protein phosphatase 1G (formerly 2C),
  misc_feature (1)..(332): Homolog of NCBI NO: 12003990 NR Description: protein phosphatase type-2C [Zea mays]
  misc_feature (1)..(342): Homolog of NCBI NO: 15224677 NR Description: protein phosphatase 2C (PP2C), putative
  misc_feature (1)..(345): Homolog of NCBI NO: 15236548 NR Description: protein phosphatase 2C (PP2C), putative
MGIYLSTPKTEKFSEDGENDCLRYGLSSMQGWRATMEDAHAAYTDLDESTSFFGVYDGHGGKVVAKFCAKFLHQQLFKSETYLTGDIGASLQKAFLRMDEMMRGQRGWRELSILGDKINKFTGMIEGLIWSPRSSDGNCHVDDWAFEEGPHSDFAGPTSGSTACVAVIRNNQLVVANAGDSRCVISRKGQAYNLSRDHKPDLEIEKERILKAGGFIHVGRVNGSLNLARAIGDMEFKQNKFLSAEKQIVTANPDINTVELCDEDEFVVLACDGIWDCMSSQQLVDFVHEQLHSETKLSAVCERVLDRCLAPSTASGEGCDNMTMIVVQFKRPAQSSVPAEESSSN

SEQ ID NO: 60310 - protein, 317 aa, Glycine max
  peptide (1)..(317): Ceres Seq. ID no. 15177949
  misc_feature (1)..(294): Pfam Name: Protein phosphatase 2C Pfam Description: Protein phosphatase 2C
  misc_feature (128)..(314): Homolog of NCBI NO: 27807391 NR Description: protein phosphatase 1G (formerly 2C),
  misc_feature (1)..(91): Homolog of NCBI NO: 31216428 NR Description: ENSANGP00000017684 [Anopheles gambiae]
  misc_feature (114)..(317): Homolog of NCBI NO: 31216428 NR Description: ENSANGP00000017684 [Anopheles gambiae]
  misc_feature (1)..(74): Homolog of NCBI NO: 19921654 NR Description: CG10417-PA [Drosophila melanogaster]
  misc_feature (128)..(314): Homolog of NCBI NO: 19921654 NR Description: CG10417-PA [Drosophila melanogaster]
  misc_feature (1)..(92): Homolog of NCBI NO: 27697184 NR Description: Similar to protein phosphatase 1G (formerly 2C),
  misc_feature (128)..(310): Homolog of NCBI NO: 27697184 NR Description: Similar to protein phosphatase 1G (formerly 2C),
  misc_feature (1)..(304): Homolog of NCBI NO: 12003990 NR Description: protein phosphatase type-2C [Zea mays]
  misc_feature (1)..(314): Homolog of NCBI NO: 15224677 NR Description: protein phosphatase 2C (PP2C), putative
  misc_feature (1)..(317): Homolog of NCBI NO: 15236548 NR Description: protein phosphatase 2C (PP2C), putative
MQGWRATMEDAHAAYTDLDESTSFFGVYDGHGGKVVAKFCAKFLHQQLFKSETYLTGDIGASLQKAFLRMDEMMRGQRGWRELSILGDKINKFTGMIEGLIWSPRSSDGNCHVDDWAFEEGPHSDFAGPTSGSTACVAVIRNNQLVVANAGDSRCVISRKGQAYNLSRDHKPDLEIEKERILKAGGFIHVGRVNGSLNLARAIGDMEFKQNKFLSAEKQIVTANPDINTVELCDEDEFVVLACDGIWDCMSSQQLVDFVHEQLHSETKLSAVCERVLDRCLAPSTASGEGCDNMTMIVVQFKRPAQSSVPAEESSSN

SEQ ID NO: 60311 - protein, 310 aa, Glycine max
  peptide (1)..(310): Ceres Seq. ID no. 15177950
  misc_feature (1)..(287): Pfam Name: Protein phosphatase 2C Pfam Description: Protein phosphatase 2C
  misc_feature (121)..(307): Homolog of NCBI NO: 27807391 NR Description: protein phosphatase 1G (formerly 2C),
  misc_feature (1)..(84): Homolog of NCBI NO: 31216428 NR Description: ENSANGP00000017684 [Anopheles gambiae]
  misc_feature (107)..(310): Homolog of NCBI NO: 31216428 NR Description: ENSANGP00000017684 [Anopheles gambiae]
  misc_feature (1)..(67): Homolog of NCBI NO: 19921654 NR Description: CG10417-PA [Drosophila melanogaster]
  misc_feature (121)..(307): Homolog of NCBI NO: 19921654 NR Description: CG10417-PA [Drosophila melanogaster]
  misc_feature (1)..(85): Homolog of NCBI NO: 27697184 NR Description: Similar to protein phosphatase 1G (formerly 2C),
  misc_feature (121)..(303): Homolog of NCBI NO: 27697184 NR Description: Similar to protein phosphatase 1G (formerly 2C),
  misc_feature (1)..(297): Homolog of NCBI NO: 12003990 NR Description: protein phosphatase type-2C [Zea mays]
  misc_feature (1)..(307): Homolog of NCBI NO: 15224677 NR Description: protein phosphatase 2C (PP2C), putative
  misc_feature (1)..(310): Homolog of NCBI NO: 15236548 NR Description: protein phosphatase 2C (PP2C), putative
MEDAHAAYTDLDESTSFFGVYDGHGGKVVAKFCAKFLHQQLFKSETYLTGDIGASLQKAFLRMDEMMRGQRGWRELSILGDKINKFTGMIEGLIWSPRSSDGNCHVDDWAFEEGPHSDFAGPTSGSTACVAVIRNNQLVVANAGDSRCVISRKGQAYNLSRDHKPDLEIEKERILKAGGFIHVGRVNGSLNLARAIGDMEFKQNKFLSAEKQIVTANPDINTVELCDEDEFVVLACDGIWDCMSSQQLVDFVHEQLHSETKLSAVCERVLDRCLAPSTASGEGCDNMTMIVVQFKRPAQSSVPAEESSSN

SEQ ID NO: 60312 - DNA, 682 bp, Glycine max
  misc_feature (1)..(682): Ceres Seq. ID no. 15225303
tgttgacaatgccaatcttgaatatagctgacgattcagaagtgttcttcaggaatatagtggcatttgaggaatgtcacctttcagatgatacaaacatcattactcaataccgaaagattctagattttcttatcaacactgaaaaagatgtgaatgtactagttgataagaaaattattgtcaattggatgggtgatgctaatgcagtggctacaatggttaacagtctgggctcaaatattgggatgccacgtttcaatccagtgtatttctctctctgcaatagcttaaatgatttctatgaaagtccttgcaacaagtacaaggctatcttcaaacacgattacttcaacactccttggaaaatagcatctacagttgctgcaattgtgcttcttttgctcacattgattcagactatatgttcaataaactcactgttttaattaaggtagctgaggatttgggccgttaacagggaagtggaagtcaattgggggaaggaaacttctgtaatgtgatttagtaccttgttgcttttctttcatcaaataattaaaattctactatccttcttaacattaattatttgttgcaatataacttttatttactctctatattgatctgtattaattttgtatacgctttatatatatagctacttattattattgtt

SEQ ID NO: 60313 - protein, 148 aa, Glycine max
  peptide (1)..(148): Ceres Seq. ID no. 15225304
  misc_feature (1)..(137): Pfam Name: Plant protein of unknown function Pfam Description: Plant protein of unknown function
  misc_feature (1)..(148): Homolog of NCBI NO: 15229680 NR Description: hypothetical protein [Arabidopsis thaliana]
  misc_feature (1)..(140): Homolog of NCBI NO: 15229681 NR Description: hypothetical protein [Arabidopsis thaliana]
  misc_feature (1)..(148): Homolog of NCBI NO: 32490273 NR Description: OSJNBb0116K07.15 [Oryza sativa (japonica
  misc_feature (1)..(147): Homolog of NCBI NO: 15236618 NR Description: expressed protein [Arabidopsis thaliana]
  misc_feature (1)..(144): Homolog of NCBI NO: 18406666 NR Description: expressed protein [Arabidopsis thaliana]
  misc_feature (1)..(144): Homolog of NCBI NO: 7486946 NR Description: hypothetical protein At2g44930 [imported] -
  misc_feature (1)..(144): Homolog of NCBI NO: 15227658 NR Description: expressed protein [Arabidopsis thaliana]
  misc_feature (1)..(147): Homolog of NCBI NO: 15239004 NR Description: hypothetical protein [Arabidopsis thaliana]
  misc_feature (1)..(144): Homolog of NCBI NO: 15232337 NR Description: hypothetical protein [Arabidopsis thaliana]
  misc_feature (1)..(144): Homolog of NCBI NO: 15226899 NR Description: hypothetical protein [Arabidopsis thaliana]
LTMPILNIADDSEVFFRNIVAFEECHLSDDTNIITQYRKILDFLINTEKDVNVLVDKKIIVNWMGDANAVATMVNSLGSNIGMPRFNPVYFSLCNSLNDFYESPCNKYKAIFKHDYFNTPWKIASTVAAIVLLLLTLIQTICSINSLF

SEQ ID NO: 60314 - protein, 146 aa, Glycine max
  peptide (1)..(146): Ceres Seq. ID no. 15225305
  misc_feature (1)..(135): Pfam Name: Plant protein of unknown function Pfam Description: Plant protein of unknown function
  misc_feature (1)..(146): Homolog of NCBI NO: 15229680 NR Description: hypothetical protein [Arabidopsis thaliana]
  misc_feature (1)..(138): Homolog of NCBI NO: 15229681 NR Description: hypothetical protein [Arabidopsis thaliana]
  misc_feature (1)..(146): Homolog of NCBI NO: 32490273 NR Description: OSJNBb0116K07.15 [Oryza sativa (japonica
  misc_feature (1)..(145): Homolog of NCBI NO: 15236618 NR Description: expressed protein [Arabidopsis thaliana]
  misc_feature (1)..(142): Homolog of NCBI NO: 18406666 NR Description: expressed protein [Arabidopsis thaliana]
  misc_feature (1)..(142): Homolog of NCBI NO: 7486946 NR Description: hypothetical protein At2g44930 [imported] -
  misc_feature (1)..(142): Homolog of NCBI NO: 15227658 NR Description: expressed protein [Arabidopsis thaliana]
  misc_feature (1)..(145): Homolog of NCBI NO: 15239004 NR Description: hypothetical protein [Arabidopsis thaliana]
  misc_feature (1)..(142): Homolog of NCBI NO: 15232337 NR Description: hypothetical protein [Arabidopsis thaliana]
  misc_feature (1)..(142): Homolog of NCBI NO: 15226899 NR Description: hypothetical protein [Arabidopsis thaliana]
MPILNIADDSEVFFRNIVAFEECHLSDDTNIITQYRKILDFLINTEKDVNVLVDKKIIVNWMGDANAVATMVNSLGSNIGMPRFNPVYFSLCNSLNDFYESPCNKYKAIFKHDYFNTPWKIASTVAAIVLLLLTLIQTICSINSLF

SEQ ID NO: 60315 - protein, 85 aa, Glycine max
  peptide (1)..(85): Ceres Seq. ID no. 15225306
  misc_feature (1)..(74): Pfam Name: Plant protein of unknown function Pfam Description: Plant protein of unknown function
  misc_feature (1)..(85): Homolog of NCBI NO: 15229680 NR Description: hypothetical protein [Arabidopsis thaliana]
  misc_feature (1)..(77): Homolog of NCBI NO: 15229681 NR Description: hypothetical protein [Arabidopsis thaliana]
  misc_feature (1)..(85): Homolog of NCBI NO: 32490273 NR Description: OSJNBb0116K07.15 [Oryza sativa (japonica
  misc_feature (1)..(84): Homolog of NCBI NO: 15236618 NR Description: expressed protein [Arabidopsis thaliana]
  misc_feature (1)..(81): Homolog of NCBI NO: 18406666 NR Description: expressed protein [Arabidopsis thaliana]
  misc_feature (1)..(81): Homolog of NCBI NO: 7486946 NR Description: hypothetical protein At2g44930 [imported] -
  misc_feature (1)..(81): Homolog of NCBI NO: 15227658 NR Description: expressed protein [Arabidopsis thaliana]
  misc_feature (1)..(84): Homolog of NCBI NO: 15239004 NR Description: hypothetical protein [Arabidopsis thaliana]
  misc_feature (1)..(81): Homolog of NCBI NO: 15232337 NR Description: hypothetical protein [Arabidopsis thaliana]
  misc_feature (1)..(81): Homolog of NCBI NO: 15226899 NR Description: hypothetical protein [Arabidopsis thaliana]
MGDANAVATMVNSLGSNIGMPRFNPVYFSLCNSLNDFYESPCNKYKAIFKHDYFNTPWKIASTVAAIVLLLLTLIQTICSINSLF

SEQ ID NO: 60316 - DNA, 1486 bp, Glycine max
  misc_feature (1)..(1486): Ceres Seq. ID no. 15172495
gagggcgcatgtgtatgtagcgtgcacccttccacattctttctcgttctcgatctctctcgatttttccttcccttttctccataaacgaggtgcttcagatttgctcacaataggagggaatcgaatcgaatcgaatcgaaaggaaagtgcagaatggatgacatgccgttgccggcgctctttgagcaagcccgcaagatccacgccgcagccaccgattccggcgccgaccaggaggttgtgaagaaggggtgcgaggctctgcatagatgcgaggacatggtcaataatctaggtttgttctctcccaacgagaccaaagaagatatcagcaccacgaatctcaaatacattctggtgccattttatcttgcggagttgacagaaaaaatagcacaggatgacaggatacagattctaaagtcttcccaggcaaaacttaaggagtttatctcattttgtgaagcaatggagctggtcccaaaagaggagttagaatcttacattgatggggcaccaaaaactgttgctgatcagagggccaggaagatcgctaggttcaaacgtcagagagctgcagaatcaaagttgttggaaataaaagagcgaaaggaacgacgtgggcgttctactaaagcagctgccctgtccacccctgttgaggcaggagaggaagaagtattggatgatgatggggaagaagaaagagaggcttggatcactaccatatctttggcaatctgtaaggcactagatatgctggatatgttgaagaaagaggaagagatgctttctgctgtaaaggatagacaatccaaggatggggataaggagttctctaaggatgttcttgatgaacgtgccaagaaagcagaagcttggcatcgtgattctgcagttcgtgcacagtacactaggccatcaccaccaatcacatgtgccactttcgcccaagatgttctagaaggaagagcaaaggcttcacaagaacacgatcacaagcatcaacccctaatatttggaccagctagccttgtaaatggaaacataacaactgagagagaaagaatggcagctcaggtcttccaacctagtcataggatgccaactatgagcattgaggaggccgggctaaaagaaatggaaataatgaacaaatggcaagagagaaatgtcaaactcatggaagaagtcaattcatcttggcacaatgataggaagtcaaagctaggagaagacgatgatgatgaagatgatgatgctgcacaggagaaagcaagggcttgggatgactggaaggatgataatccacgtggtgctggaaataagaaacttaccccttgtgggtaaactgaggtcttccctggcttaagtaacgggcttaggataaaactgtttttaacgaaatcccgtaatttggagttgatatactacttgtagttagattgtgttaagattatatgtataccaggattttcatttg

SEQ ID NO: 60317 - protein, 398 aa, Glycine max
  peptide (1)..(398): Ceres Seq. ID no. 15172496
  misc_feature (4)..(386): Pfam Name: TAP42-like family Pfam Description: TAP42-like family
  misc_feature (361)..(393): Homolog of NCBI NO: 4557663 NR Description: immunoglobulin (CD79A) binding protein 1
  misc_feature (6)..(213): Homolog of NCBI NO: 4557663 NR Description: immunoglobulin (CD79A) binding protein 1
  misc_feature (299)..(391): Homolog of NCBI NO: 19075479 NR Description: putative phosphatase component
  misc_feature (1)..(224): Homolog of NCBI NO: 19075479 NR Description: putative phosphatase component
  misc_feature (182)..(398): Homolog of NCBI NO: 7489459 NR Description: chilling-induced protein - rice
  misc_feature (3)..(218): Homolog of NCBI NO: 7489459 NR Description: chilling-induced protein - rice
  misc_feature (3)..(398): Homolog of NCBI NO: 29367365 NR Description: PP2A regulatory subunit-like protein
  misc_feature (1)..(398): Homolog of NCBI NO: 8809589 NR Description: PP2A regulatory subunit [Arabidopsis thaliana]
  misc_feature (1)..(398): Homolog of NCBI NO: 21553995 NR Description: PP2A regulatory subunit [Arabidopsis thaliana]
  misc_feature (1)..(398): Homolog of NCBI NO: 18423459 NR Description: PP2A regulatory subunit
MDDMPLPALFEQARKIHAAATDSGADQEVVKKGCEALHRCEDMVNNLGLFSPNETKEDISTTNLKYILVPFYLAELTEKIAQDDRIQILKSSQAKLKEFISFCEAMELVPKEELESYIDGAPKTVADQRARKIARFKRQRAAESKLLEIKERKERRGRSTKAAALSTPVEAGEEEVLDDDGEEEREAWITTISLAICKALDMLDMLKKEEEMLSAVKDRQSKDGDKEFSKDVLDERAKKAEAWHRDSAVRAQYTRPSPPITCATFAQDVLEGRAKASQEHDHKHQPLIFGPASLVNGNITTERERMAAQVFQPSHRMPTMSIEEAGLKEMEIMNKWQERNVKLMEEVNSSWHNDRKSKLGEDDDDEDDDAAQEKARAWDDWKDDNPRGAGNKKLTPCG

SEQ ID NO: 60318 - protein, 395 aa, Glycine max
  peptide (1)..(395): Ceres Seq. ID no. 15172497
  misc_feature (1)..(383): Pfam Name: TAP42-like family Pfam Description: TAP42-like family
  misc_feature (358)..(390): Homolog of NCBI NO: 4557663 NR Description: immunoglobulin (CD79A) binding protein 1
  misc_feature (3)..(210): Homolog of NCBI NO: 4557663 NR Description: immunoglobulin (CD79A) binding protein 1
  misc_feature (296)..(388): Homolog of NCBI NO: 19075479 NR Description: putative phosphatase component
  misc_feature (1)..(221): Homolog of NCBI NO: 19075479 NR Description: putative phosphatase component
  misc_feature (179)..(395): Homolog of NCBI NO: 7489459 NR Description: chilling-induced protein - rice
  misc_feature (1)..(215): Homolog of NCBI NO: 7489459 NR Description: chilling-induced protein - rice
  misc_feature (1)..(395): Homolog of NCBI NO: 29367365 NR Description: PP2A regulatory subunit-like protein
  misc_feature (1)..(395): Homolog of NCBI NO: 8809589 NR Description: PP2A regulatory subunit [Arabidopsis thaliana]
  misc_feature (1)..(395): Homolog of NCBI NO: 21553995 NR Description: PP2A regulatory subunit [Arabidopsis thaliana]
  misc_feature (1)..(395): Homolog of NCBI NO: 18423459 NR Description: PP2A regulatory subunit
MPLPALFEQARKIHAAATDSGADQEVVKKGCEALHRCEDMVNNLGLFSPNETKEDISTTNLKYILVPFYLAELTEKIAQDDRIQILKSSQAKLKEFISFCEAMELVPKEELESYIDGAPKTVADQRARKIARFKRQRAAESKLLEIKERKERRGRSTKAAALSTPVEAGEEEVLDDDGEEEREAWITTISLAICKALDMLDMLKKEEEMLSAVKDRQSKDGDKEFSKDVLDERAKKAEAWHRDSAVRAQYTRPSPPITCATFAQDVLEGRAKASQEHDHKHQPLIFGPASLVNGNITTERERMAAQVFQPSHRMPTMSIEEAGLKEMEIMNKWQERNVKLMEEVNSSWHNDRKSKLGEDDDDEDDDAAQEKARAWDDWKDDNPRGAGNKKLTPCG

SEQ ID NO: 60319 - protein, 356 aa, Glycine max
  peptide (1)..(356): Ceres Seq. ID no. 15172498
  misc_feature (1)..(344): Pfam Name: TAP42-like family Pfam Description: TAP42-like family
  misc_feature (319)..(351): Homolog of NCBI NO: 4557663 NR Description: immunoglobulin (CD79A) binding protein 1
  misc_feature (1)..(171): Homolog of NCBI NO: 4557663 NR Description: immunoglobulin (CD79A) binding protein 1
  misc_feature (257)..(349): Homolog of NCBI NO: 19075479 NR Description: putative phosphatase component
  misc_feature (1)..(182): Homolog of NCBI NO: 19075479 NR Description: putative phosphatase component
  misc_feature (140)..(356): Homolog of NCBI NO: 7489459 NR Description: chilling-induced protein - rice
  misc_feature (1)..(176): Homolog of NCBI NO: 7489459 NR Description: chilling-induced protein - rice
  misc_feature (1)..(356): Homolog of NCBI NO: 29367365 NR Description: PP2A regulatory subunit-like protein
  misc_feature (1)..(356): Homolog of NCBI NO: 8809589 NR Description: PP2A regulatory subunit [Arabidopsis thaliana]
  misc_feature (1)..(356): Homolog of NCBI NO: 21553995 NR Description: PP2A regulatory subunit [Arabidopsis thaliana]
  misc_feature (1)..(356): Homolog of NCBI NO: 18423459 NR Description: PP2A regulatory subunit
MVNNLGLFSPNETKEDISTTNLKYILVPFYLAELTEKIAQDDRIQILKSSQAKLKEFISFCEAMELVPKEELESYIDGAPKTVADQRARKIARFKRQRAAESKLLEIKERKERRGRSTKAAALSTPVEAGEEEVLDDDGEEEREAWITTISLAICKALDMLDMLKKEEEMLSAVKDRQSKDGDKEFSKDVLDERAKKAEAWHRDSAVRAQYTRPSPPITCATFAQDVLEGRAKASQEHDHKHQPLIFGPASLVNGNITTERERMAAQVFQPSHRMPTMSIEEAGLKEMEIMNKWQERNVKLMEEVNSSWHNDRKSKLGEDDDDEDDDAAQEKARAWDDWKDDNPRGAGNKKLTPCG

SEQ ID NO: 60320 - DNA, 1953 bp, Glycine max
  misc_feature (1)..(1953): Ceres Seq. ID no. 14308493
aaaattttcaaagtcgaagcgagaacttgccatttcgagggttttagggttagggttttctaaaattgcaagaacatgggtttcaacattcaaccctatgggattcagtccatgctcaaggaaggccataagcacctttctggcctggatgaagcggttctcaagaacatcgacgcctgcaaacaactttccactatcactcgaacttccctcggtcccaatgggatgaataagatggttataaatcacttggacaagctttttgtcacgaacgatgctgggacgattgtgaatgaacttgaagttcagcatcctgctgccaaggttttggttttggctgggaaggctcaacaagaggagattggggatggagctaatttaactatttcatttgctggggagctcctgcagggtgccgaggaacttatcaggatgggtttgcatccgagcgagatcatcagtggatacactaaagcaatcaacaagactgttcaaatattggatgaactagttgaggatggttctgagaatatggatgttcgtgataaggaacaagttatttcaagaatgaaagcagccgttgccagcaagcaatttggtcaagaagatatcatatgttcgcttgttgctgatgcatgcatccaagtgtgccccaaaaaccctgcaaactttaatgtggacaacgttcgtgttgcaaagctcttgggagggggcttgcataacagtactgtagttcgaggattggttctgaaaagtgatgctgtcgggactataaagcaagcagaaaaggcgaaggttgctgtgtttgctagtggtgttgatacatctgcaactgagactaaaggaactgtcctcatacatacagctgagcagctagaaaattattcaaaaactgaagaggctaaagtagaggagctcatcaaggcagtagcagattctggcgccaaagtgattgtcagtggaggagcagtaggagaaatggctttgcatttctgtgagcgttacaagcttatggttctgaaaatcagctcaaagtttgaactacgtcgattttgccggacaaccggctctgttgccatgctaaaactttgccaaccaaacccagatgatcttggatatgtagattccgtttcagttcaggaaattggtggtgtcagggtgaccattgtgaaaaatgaagagggtggaaattctgtagccactgttgttttacgaggaagtactgatagtatactagatgatcttgaaagagcagtggatgatggagtgaacacttacaaggcaatgtgcagggatagccgctttgtacctggagctgcagctactgaaattgagttagctaaaagggtgaaagacttttccttcaaggagacagggttggatcagtatgctattgcaaaatttgctgaaagttttgaaatgattcctagaactttggctgagaatgctggcctaaatgcaatggagatcatatcttctctgtatgcagaacatgcatctggaaatgccaaagttggcattgatttggaagaaggcatatgcaaggatgtctcaaccctgagcatttgggatctccatgtgactaagttatttgctcttaaatatgctgcagatgctgcatgcactgtactacgtgtggaccagattattatggcaaaaccagctggtggtccaaggagagaacagcctgctggtggtatggatgaagactaaaattattgtgggaattgatggtttgctttggtcatgtttgtatctcagcatgatggcttgaatttgccttaggcatgttttcttgatttagactttttagtagtggtggcgatcttaacaaattttgaattttgttttgctatgaaatactaagagatgtggtctgtaaatttacattttattcatagcgttattgtgagtgatgttaatttgctgagcatggcctttgtttgagatttc

SEQ ID NO: 60321 - protein, 545 aa, Glycine max
  peptide (1)..(545): Ceres Seq. ID no. 14308494
  misc_feature (38)..(529): Pfam Name: TCP-1/cpn60 chaperonin family Pfam Description: TCP-1/cpn60 chaperonin family
  misc_feature (9)..(545): Homolog of NCBI NO: 6005727 NR Description: chaperonin containing TCP1, subunit 8 (theta)
  misc_feature (9)..(545): Homolog of NCBI NO: 9988062 NR Description: T-complex protein 1, theta subunit (TCP-1-theta)
  misc_feature (9)..(545): Homolog of NCBI NO: 31560613 NR Description: chaperonin subunit 8 (theta) [Mus musculus]
  misc_feature (9)..(545): Homolog of NCBI NO: 1174621 NR Description: T-COMPLEX PROTEIN 1, THETA SUBUNIT (TCP-1-THETA)
  misc_feature (9)..(545): Homolog of NCBI NO: 27924345 NR Description: Similar to chaperonin containing TCP1, subunit 8
  misc_feature (9)..(545): Homolog of NCBI NO: 28829459 NR Description: similar to Physarum polycephalum (Slime mold).
  misc_feature (9)..(545): Homolog of NCBI NO: 29791676 NR Description: Similar to chaperonin containing TCP1, subunit 8
  misc_feature (10)..(545): Homolog of NCBI NO: 17066726 NR Description: CCT chaperonin theta subunit [Physarum
  misc_feature (1)..(524): Homolog of NCBI NO: 6223641 NR Description: putative T-complex protein 1, theta subunit
  misc_feature (1)..(545): Homolog of NCBI NO: 18396719 NR Description: chaperonin, putative [Arabidopsis thaliana]
MGFNIQPYGIQSMLKEGHKHLSGLDEAVLKNIDACKQLSTITRTSLGPNGMNKMVINHLDKLFVTNDAGTIVNELEVQHPAAKVLVLAGKAQQEEIGDGANLTISFAGELLQGAEELIRMGLHPSEIISGYTKAINKTVQILDELVEDGSENMDVRDKEQVISRMKAAVASKQFGQEDIICSLVADACIQVCPKNPANFNVDNVRVAKLLGGGLHNSTVVRGLVLKSDAVGTIKQAEKAKVAVFASGVDTSATETKGTVLIHTAEQLENYSKTEEAKVEELIKAVADSGAKVIVSGGAVGEMALHFCERYKLMVLKISSKFELRRFCRTTGSVAMLKLCQPNPDDLGYVDSVSVQEIGGVRVTIVKNEEGGNSVATVVLRGSTDSILDDLERAVDDGVNTYKAMCRDSRFVPGAAATEIELAKRVKDFSFKETGLDQYAIAKFAESFEMIPRTLAENAGLNAMEIISSLYAEHASGNAKVGIDLEEGICKDVSTLSIWDLHVTKLFALKYAADAACTVLRVDQIIMAKPAGGPRREQPAGGMDED

SEQ ID NO: 60322 - protein, 533 aa, Glycine max
  peptide (1)..(533): Ceres Seq. ID no. 14308495
  misc_feature (26)..(517): Pfam Name: TCP-1/cpn60 chaperonin family Pfam Description: TCP-1/cpn60 chaperonin family
  misc_feature (1)..(533): Homolog of NCBI NO: 6005727 NR Description: chaperonin containing TCP1, subunit 8 (theta)
  misc_feature (1)..(533): Homolog of NCBI NO: 9988062 NR Description: T-complex protein 1, theta subunit (TCP-1-theta)
  misc_feature (1)..(533): Homolog of NCBI NO: 31560613 NR Description: chaperonin subunit 8 (theta) [Mus musculus]
  misc_feature (1)..(533): Homolog of NCBI NO: 1174621 NR Description: T-COMPLEX PROTEIN 1, THETA SUBUNIT (TCP-1-THETA)
  misc_feature (1)..(533): Homolog of NCBI NO: 27924345 NR Description: Similar to chaperonin containing TCP1, subunit 8
  misc_feature (1)..(533): Homolog of NCBI NO: 28829459 NR Description: similar to Physarum polycephalum (Slime mold).
  misc_feature (1)..(533): Homolog of NCBI NO: 29791676 NR Description: Similar to chaperonin containing TCP1, subunit 8
  misc_feature (1)..(533): Homolog of NCBI NO: 17066726 NR Description: CCT chaperonin theta subunit [Physarum
  misc_feature (1)..(512): Homolog of NCBI NO: 6223641 NR Description: putative T-complex protein 1, theta subunit
  misc_feature (1)..(533): Homolog of NCBI NO: 18396719 NR Description: chaperonin, putative [Arabidopsis thaliana]
MLKEGHKHLSGLDEAVLKNIDACKQLSTITRTSLGPNGMNKMVINHLDKLFVTNDAGTIVNELEVQHPAAKVLVLAGKAQQEEIGDGANLTISFAGELLQGAEELIRMGLHPSEIISGYTKAINKTVQILDELVEDGSENMDVRDKEQVISRMKAAVASKQFGQEDIICSLVADACIQVCPKNPANFNVDNVRVAKLLGGGLHNSTVVRGLVLKSDAVGTIKQAEKAKVAVFASGVDTSATETKGTVLIHTAEQLENYSKTEEAKVEELIKAVADSGAKVIVSGGAVGEMALHFCERYKLMVLKISSKFELRRFCRTTGSVAMLKLCQPNPDDLGYVDSVSVQEIGGVRVTIVKNEEGGNSVATVVLRGSTDSILDDLERAVDDGVNTYKAMCRDSRFVPGAAATEIELAKRVKDFSFKETGLDQYAIAKFAESFEMIPRTLAENAGLNAMEIISSLYAEHASGNAKVGIDLEEGICKDVSTLSIWDLHVTKLFALKYAADAACTVLRVDQIIMAKPAGGPRREQPAGGMDED

SEQ ID NO: 60323 - protein, 495 aa, Glycine max
  peptide (1)..(495): Ceres Seq. ID no. 14308496
  misc_feature (1)..(479): Pfam Name: TCP-1/cpn60 chaperonin family Pfam Description: TCP-1/cpn60 chaperonin family
  misc_feature (1)..(495): Homolog of NCBI NO: 6005727 NR Description: chaperonin containing TCP1, subunit 8 (theta)
  misc_feature (1)..(495): Homolog of NCBI NO: 9988062 NR Description: T-complex protein 1, theta subunit (TCP-1-theta)
  misc_feature (1)..(495): Homolog of NCBI NO: 31560613 NR Description: chaperonin subunit 8 (theta) [Mus musculus]
  misc_feature (1)..(495): Homolog of NCBI NO: 1174621 NR Description: T-COMPLEX PROTEIN 1, THETA SUBUNIT (TCP-1-THETA)
  misc_feature (1)..(495): Homolog of NCBI NO: 27924345 NR Description: Similar to chaperonin containing TCP1, subunit 8
  misc_feature (1)..(495): Homolog of NCBI NO: 28829459 NR Description: similar to Physarum polycephalum (Slime mold).
  misc_feature (1)..(495): Homolog of NCBI NO: 29791676 NR Description: Similar to chaperonin containing TCP1, subunit 8
  misc_feature (1)..(495): Homolog of NCBI NO: 17066726 NR Description: CCT chaperonin theta subunit [Physarum
  misc_feature (1)..(474): Homolog of NCBI NO: 6223641 NR Description: putative T-complex protein 1, theta subunit
  misc_feature (1)..(495): Homolog of NCBI NO: 18396719 NR Description: chaperonin, putative [Arabidopsis thaliana]
MNKMVINHLDKLFVTNDAGTIVNELEVQHPAAKVLVLAGKAQQEEIGDGANLTISFAGELLQGAEELIRMGLHPSEIISGYTKAINKTVQILDELVEDGSENMDVRDKEQVISRMKAAVASKQFGQEDIICSLVADACIQVCPKNPANFNVDNVRVAKLLGGGLHNSTVVRGLVLKSDAVGTIKQAEKAKVAVFASGVDTSATETKGTVLIHTAEQLENYSKTEEAKVEELIKAVADSGAKVIVSGGAVGEMALHFCERYKLMVLKISSKFELRRFCRTTGSVAMLKLCQPNPDDLGYVDSVSVQEIGGVRVTIVKNEEGGNSVATVVLRGSTDSILDDLERAVDDGVNTYKAMCRDSRFVPGAAATEIELAKRVKDFSFKETGLDQYAIAKFAESFEMIPRTLAENAGLNAMEIISSLYAEHASGNAKVGIDLEEGICKDVSTLSIWDLHVTKLFALKYAADAACTVLRVDQIIMAKPAGGPRREQPAGGMDED

SEQ ID NO: 60324 - DNA, 1552 bp, Glycine max
  misc_feature (1)..(1552): Ceres Seq. ID no. 15176106
tctgttttttggagtcagcttcactgcacaggatttatgtgatcgcaacatgggagtttgtttgagcgcccaaattaaagctgaaagcccatataacactgggttcaattcaaagtatgtgagtacggatggaaatgatttcggcagcacaaacgataaggtttcagcaaactcaattcctcaaactcctcggagtgagggtgagatcttgcggtcatccaatttgaagagctttcccttgtcagaacttaagacggccactagaaatttccgtccagatagcgtgttaggagaaggtggttttggatcagtttttaaggggtggatcgatgagaattcattgactgctaccaaacctggcactggcattgttattgctgttaaaagacttaatcaagatggcatccagggtcacagggagtggttggctgaagtcaactatcttggacagctttctcatcctcatctagtgagattgattgggttttgccttgaagatgaacatcgccttctcgtctacgaatttatgccacgtggaagcttggaaaaccatttgttcaggagaggctcatattttcaaccactttcttggagcttacgtttgaaggtagctcttgatgctgccaaagggcttgcatttctccacagtgcagaagcaaaagtgatatatagagattttaagacttcaaatatcttgctggattcaaaatataatgcaaaactttctgattttgggctggcaaaggatggaccaacaggtgacaaaagtcatgtctccattagggtaatgggaacctacggatacgcagcacctgaatatctagccacaggtcatcttactgctaagagcgatgtctatagttttggggttgtcctgctggaaatgttgtctggcaagagggctgttgacaagaatagaccatctggacaacacaatttggtggaatgggctaaaccttacctggcaaacaagcgtaagatatttcgtgtgttggacacccggctcgaaggacaatattcaacagatgatgcctgtaagctagccacccttgccttgcggtgcctatcaatagaatccaagttcaggccaaacatggatgaagtggttacaacattggagcagctgcaagttcctaatgtaaatggaggccatcaaaatgggtctcgtgttcgtagaagaagtgctgatgtgaatagaggctatcaaaatccttctgttaatggatctcgagttcgtagaagaagtgccgatgatattagccctatggagactcccacagcttatccccggccttctgcatcccctctctatacttgatattgcaaacttatcatcatgcatctgttgctggtgatctcatccaccaactcagtcacctcagtagctattagcctattgcactctagtattgtacatatcttatttcacataatgtattcagtattgctagtaccaattaatattttcggagttctgttttaagtgtttgtaactactaaactagatgcgaaggcaggtacattatatttgtatgatagctctgattagctc

SEQ ID NO: 60325 - protein, 438 aa, Glycine max
  peptide (1)..(438): Ceres Seq. ID no. 15176107
  misc_feature (90)..(372): Pfam Name: Protein kinase domain Pfam Description: Protein kinase domain
  misc_feature (17)..(438): Homolog of NCBI NO: 15227042 NR Description: protein kinase (APK2b) [Arabidopsis thaliana]
  misc_feature (17)..(390): Homolog of NCBI NO: 166809 NR Description: protein kinase
  misc_feature (17)..(390): Homolog of NCBI NO: 15241749 NR Description: protein kinase, putative [Arabidopsis thaliana]
  misc_feature (17)..(410): Homolog of NCBI NO: 34897424 NR Description: putative protein kinase [Oryza sativa (japonica
  misc_feature (15)..(419): Homolog of NCBI NO: 34906046 NR Description: putative serine/threonine-specific protein kinase
  misc_feature (17)..(414): Homolog of NCBI NO: 14719339 NR Description: putative protein kinase [Oryza sativa]
  misc_feature (277)..(436): Homolog of NCBI NO: 8778537 NR Description: F22G5.5 [Arabidopsis thaliana]
  misc_feature (17)..(277): Homolog of NCBI NO: 8778537 NR Description: F22G5.5 [Arabidopsis thaliana]
  misc_feature (17)..(437): Homolog of NCBI NO: 15227001 NR Description: protein kinase (APK1b) [Arabidopsis thaliana]
  misc_feature (17)..(437): Homolog of NCBI NO: 15222437 NR Description: protein kinase (APK1a) [Arabidopsis thaliana]
LFFGVSFTAQDLCDRNMGVCLSAQIKAESPYNTGFNSKYVSTDGNDFGSTNDKVSANSIPQTPRSEGEILRSSNLKSFPLSELKTATRNFRPDSVLGEGGFGSVFKGWIDENSLTATKPGTGIVIAVKRLNQDGIQGHREWLAEVNYLGQLSHPHLVRLIGFCLEDEHRLLVYEFMPRGSLENHLFRRGSYFQPLSWSLRLKVALDAAKGLAFLHSAEAKVIYRDFKTSNILLDSKYNAKLSDFGLAKDGPTGDKSHVSIRVMGTYGYAAPEYLATGHLTAKSDVYSFGVVLLEMLSGKRAVDKNRPSGQHNLVEWAKPYLANKRKIFRVLDTRLEGQYSTDDACKLATLALRCLSIESKFRPNMDEVVTTLEQLQVPNVNGGHQNGSRVRRRSADVNRGYQNPSVNGSRVRRRSADDISPMETPTAYPRPSASPLYT

SEQ ID NO: 60326 - protein, 422 aa, Glycine max
  peptide (1)..(422): Ceres Seq. ID no. 15176108
  misc_feature (74)..(356): Pfam Name: Protein kinase domain Pfam Description: Protein kinase domain
  misc_feature (1)..(422): Homolog of NCBI NO: 15227042 NR Description: protein kinase (APK2b) [Arabidopsis thaliana]
  misc_feature (1)..(374): Homolog of NCBI NO: 166809 NR Description: protein kinase
  misc_feature (1)..(374): Homolog of NCBI NO: 15241749 NR Description: protein kinase, putative [Arabidopsis thaliana]
  misc_feature (1)..(394): Homolog of NCBI NO: 34897424 NR Description: putative protein kinase [Oryza sativa (japonica
  misc_feature (1)..(403): Homolog of NCBI NO: 34906046 NR Description: putative serine/threonine-specific protein kinase
  misc_feature (1)..(398): Homolog of NCBI NO: 14719339 NR Description: putative protein kinase [Oryza sativa]
  misc_feature (261)..(420): Homolog of NCBI NO: 8778537 NR Description: F22G5.5 [Arabidopsis thaliana]
  misc_feature (1)..(261): Homolog of NCBI NO: 8778537 NR Description: F22G5.5 [Arabidopsis thaliana]
  misc_feature (1)..(421): Homolog of NCBI NO: 15227001 NR Description: protein kinase (APK1b) [Arabidopsis thaliana]
  misc_feature (1)..(421): Homolog of NCBI NO: 15222437 NR Description: protein kinase (APK1a) [Arabidopsis thaliana]
MGVCLSAQIKAESPYNTGFNSKYVSTDGNDFGSTNDKVSANSIPQTPRSEGEILRSSNLKSFPLSELKTATRNFRPDSVLGEGGFGSVFKGWIDENSLTATKPGTGIVIAVKRLNQDGIQGHREWLAEVNYLGQLSHPHLVRLIGFCLEDEHRLLVYEFMPRGSLENHLFRRGSYFQPLSWSLRLKVALDAAKGLAFLHSAEAKVIYRDFKTSNILLDSKYNAKLSDFGLAKDGPTGDKSHVSIRVMGTYGYAAPEYLATGHLTAKSDVYSFGVVLLEMLSGKRAVDKNRPSGQHNLVEWAKPYLANKRKIFRVLDTRLEGQYSTDDACKLATLALRCLSIESKFRPNMDEVVTTLEQLQVPNVNGGHQNGSRVRRRSADVNRGYQNPSVNGSRVRRRSADDISPMETPTAYPRPSASPLYT

SEQ ID NO: 60327 - protein, 263 aa, Glycine max
  peptide (1)..(263): Ceres Seq. ID no. 15176109
  misc_feature (1)..(197): Pfam Name: Protein kinase domain Pfam Description: Protein kinase domain
  misc_feature (1)..(263): Homolog of NCBI NO: 15227042 NR Description: protein kinase (APK2b) [Arabidopsis thaliana]
  misc_feature (1)..(215): Homolog of NCBI NO: 166809 NR Description: protein kinase
  misc_feature (1)..(215): Homolog of NCBI NO: 15241749 NR Description: protein kinase, putative [Arabidopsis thaliana]
  misc_feature (1)..(235): Homolog of NCBI NO: 34897424 NR Description: putative protein kinase [Oryza sativa (japonica
  misc_feature (1)..(244): Homolog of NCBI NO: 34906046 NR Description: putative serine/threonine-specific protein kinase
  misc_feature (1)..(239): Homolog of NCBI NO: 14719339 NR Description: putative protein kinase [Oryza sativa]
  misc_feature (102)..(261): Homolog of NCBI NO: 8778537 NR Description: F22G5.5 [Arabidopsis thaliana]
  misc_feature (1)..(102): Homolog of NCBI NO: 8778537 NR Description: F22G5.5 [Arabidopsis thaliana]
  misc_feature (1)..(262): Homolog of NCBI NO: 15227001 NR Description: protein kinase (APK1b) [Arabidopsis thaliana]
  misc_feature (1)..(262): Homolog of NCBI NO: 15222437 NR Description: protein kinase (APK1a) [Arabidopsis thaliana]
MPRGSLENHLFRRGSYFQPLSWSLRLKVALDAAKGLAFLHSAEAKVIYRDFKTSNILLDSKYNAKLSDFGLAKDGPTGDKSHVSIRVMGTYGYAAPEYLATGHLTAKSDVYSFGVVLLEMLSGKRAVDKNRPSGQHNLVEWAKPYLANKRKIFRVLDTRLEGQYSTDDACKLATLALRCLSIESKFRPNMDEVVTTLEQLQVPNVNGGHQNGSRVRRRSADVNRGYQNPSVNGSRVRRRSADDISPMETPTAYPRPSASPLYT

SEQ ID NO: 60328 - DNA, 1140 bp, Glycine max
  misc_feature (1)..(1140): Ceres Seq. ID no. 15169727
atacaccacagtttccaatttccatcaatctcaatctcatcctctcctaacattctccctataaaatcgccacatccaactcccaacaacacaacaccaacaacctcaaaaaacataattaagcattaacattccacaccttttcacacacacacaaaaaaaacaaccctctaaaatctaagcctcaaagagtgctaaactttgttacaatgaacatgttaggccttagagacctagttttcatagctccaactccttctcaacttcaccaccatcaacaacaccaacccatttcagcagaacaccattcaaacctccctttgccttcacaagcctctctcagtgttggtcttggcattttccctctcctaacagtgccacacaccaatgatgttcaagttcaggttcaagactgtgccaacaacaacaacaacaccaacaccaactattggaacctgaagatgtgtggtgccactgaagtgaattccacaagaaaaggtgttatgaacatggaggatgagggaagcaataagcaaatgatggagagtgaggaaggtgggggtgagtttagggtgtgccaggattgtggcaatagagccaagagagattgcagcttcagaaggtgcaggacttgctgcaagggacgtggctttgattgcagcactcacgtgaagagcacgtgggtccccgcgtctatgagacggggtggtggtggtgatagtagtggtggtgatggcaacagcgatgctggtgcttctaagaggctaagaactttggggtcatcaaagaatgttgctgctagtgctacctctcatagttccacttccaatgctaccccaacaaagagctttgataccagttcttgtcaacaaggtgatttcatttttctcttttaattcaaagatgtttactacaatttcacaaatagtttaattaagtacttgtttaattaaggtttttaattgcactggtattgtcgtgttcttggatattgtgagaaattgcaacaaatacaactcatgcagtcacaattgtaaacactcggataggccaaaatcgcagctgcagaccatttttcaaaaccttgatttccaggttttaaattatggtcgcagtcgcaaattcattgtaattcttgac

SEQ ID NO: 60329 - protein, 228 aa, Glycine max
  peptide (1)..(228): Ceres Seq. ID no. 15169728
  misc_feature (116)..(221): Pfam Name: Domain of unknown function (DUF702) Pfam Description: Domain of unknown function (DUF702)
  misc_feature (21)..(165): Homolog of NCBI NO: 15223669 NR Description: hypothetical protein [Arabidopsis thaliana]
  misc_feature (20)..(165): Homolog of NCBI NO: 15222285 NR Description: hypothetical protein [Arabidopsis thaliana]
  misc_feature (107)..(171): Homolog of NCBI NO: 15232522 NR Description: expressed protein [Arabidopsis thaliana]
  misc_feature (104)..(165): Homolog of NCBI NO: 15242760 NR Description: hypothetical protein [Arabidopsis thaliana]
  misc_feature (116)..(165): Homolog of NCBI NO: 15230389 NR Description: expressed protein [Arabidopsis thaliana]
  misc_feature (101)..(224): Homolog of NCBI NO: 15239350 NR Description: zinc finger protein SHI-related [Arabidopsis
  misc_feature (123)..(204): Homolog of NCBI NO: 15234365 NR Description: expressed protein [Arabidopsis thaliana]
  misc_feature (116)..(221): Homolog of NCBI NO: 34906658 NR Description: putative LRP(lateral root primordia) 1
  misc_feature (1)..(221): Homolog of NCBI NO: 18416839 NR Description: lateral root primordia (LRP1) [Arabidopsis
  misc_feature (1)..(221): Homolog of NCBI NO: 882341 NR Description: LRP1
MNMLGLRDLVFIAPTPSQLHHHQQHQPISAEHHSNLPLPSQASLSVGLGIFPLLTVPHTNDVQVQVQDCANNNNNTNTNYWNLKMCGATEVNSTRKGVMNMEDEGSNKQMMESEEGGGEFRVCQDCGNRAKRDCSFRRCRTCCKGRGFDCSTHVKSTWVPASMRRGGGGDSSGGDGNSDAGASKRLRTLGSSKNVAASATSHSSTSNATPTKSFDTSSCQQGDFIFLF

SEQ ID NO: 60330 - protein, 226 aa, Glycine max
  peptide (1)..(226): Ceres Seq. ID no. 15169729
  misc_feature (114)..(219): Pfam Name: Domain of unknown function (DUF702) Pfam Description: Domain of unknown function (DUF702)
  misc_feature (19)..(163): Homolog of NCBI NO: 15223669 NR Description: hypothetical protein [Arabidopsis thaliana]
  misc_feature (18)..(163): Homolog of NCBI NO: 15222285 NR Description: hypothetical protein [Arabidopsis thaliana]
  misc_feature (105)..(169): Homolog of NCBI NO: 15232522 NR Description: expressed protein [Arabidopsis thaliana]
  misc_feature (102)..(163): Homolog of NCBI NO: 15242760 NR Description: hypothetical protein [Arabidopsis thaliana]
  misc_feature (114)..(163): Homolog of NCBI NO: 15230389 NR Description: expressed protein [Arabidopsis thaliana]
  misc_feature (99)..(222): Homolog of NCBI NO: 15239350 NR Description: zinc finger protein SHI-related [Arabidopsis
  misc_feature (121)..(202): Homolog of NCBI NO: 15234365 NR Description: expressed protein [Arabidopsis thaliana]
  misc_feature (114)..(219): Homolog of NCBI NO: 34906658 NR Description: putative LRP(lateral root primordia) 1
  misc_feature (1)..(219): Homolog of NCBI NO: 18416839 NR Description: lateral root primordia (LRP1) [Arabidopsis
  misc_feature (1)..(219): Homolog of NCBI NO: 882341 NR Description: LRP1
MLGLRDLVFIAPTPSQLHHHQQHQPISAEHHSNLPLPSQASLSVGLGIFPLLTVPHTNDVQVQVQDCANNNNNTNTNYWNLKMCGATEVNSTRKGVMNMEDEGSNKQMMESEEGGGEFRVCQDCGNRAKRDCSFRRCRTCCKGRGFDCSTHVKSTWVPASMRRGGGGDSSGGDGNSDAGASKRLRTLGSSKNVAASATSHSSTSNATPTKSFDTSSCQQGDFIFLF

SEQ ID NO: 60331 - protein, 144 aa, Glycine max
  peptide (1)..(144): Ceres Seq. ID no. 15169730
  misc_feature (32)..(137): Pfam Name: Domain of unknown function (DUF702) Pfam Description: Domain of unknown function (DUF702)
  misc_feature (1)..(81): Homolog of NCBI NO: 15223669 NR Description: hypothetical protein [Arabidopsis thaliana]
  misc_feature (1)..(81): Homolog of NCBI NO: 15222285 NR Description: hypothetical protein [Arabidopsis thaliana]
  misc_feature (23)..(87): Homolog of NCBI NO: 15232522 NR Description: expressed protein [Arabidopsis thaliana]
  misc_feature (20)..(81): Homolog of NCBI NO: 15242760 NR Description: hypothetical protein [Arabidopsis thaliana]
  misc_feature (32)..(81): Homolog of NCBI NO: 15230389 NR Description: expressed protein [Arabidopsis thaliana]
  misc_feature (17)..(140): Homolog of NCBI NO: 15239350 NR Description: zinc finger protein SHI-related [Arabidopsis
  misc_feature (39)..(120): Homolog of NCBI NO: 15234365 NR Description: expressed protein [Arabidopsis thaliana]
  misc_feature (32)..(137): Homolog of NCBI NO: 34906658 NR Description: putative LRP(lateral root primordia) 1
  misc_feature (1)..(137): Homolog of NCBI NO: 18416839 NR Description: lateral root primordia (LRP1) [Arabidopsis
  misc_feature (1)..(137): Homolog of NCBI NO: 882341 NR Description: LRP1
MCGATEVNSTRKGVMNMEDEGSNKQMMESEEGGGEFRVCQDCGNRAKRDCSFRRCRTCCKGRGFDCSTHVKSTWVPASMRRGGGGDSSGGDGNSDAGASKRLRTLGSSKNVAASATSHSSTSNATPTKSFDTSSCQQGDFIFLF

SEQ ID NO: 60332 - DNA, 1346 bp, Glycine max
  misc_feature (1)..(1346): Ceres Seq. ID no. 15171453
atcatggccgcatcgattcaggacgccaagaaccgcatctcgcagatcgagcgtgtcttttgctctaagctccaccctctctttaaatccgacatcgcattgaaacgccgccgcatccagtacctcgaggagttgctgcactccaaagagtccgcgctccgcgactcctaggcgaagcgaaacgccgcgttttcgaagctcgagagctgcgagggcgagaaggcgacgctgctggcgagaattgacgagttggacgagaaattgagattgaagacgcgggagattgaggaggcggacgggaagctactcgagcgcgtggaggcgctgacgtgcgagttaagggatgagaaattgaagaggaatcgcgtgacggaggcgtataagaggcttaagtctcagcacgtttaccttcggagaaaggttggtctcggtgaagagaatgtggttcaggaaaacaaattggagtgtgcaagtgaattggagatgcttcagagtccaatcgtaaaacctggtcttgcattttagaacccaaatatgactatggatcctagtgatagcgatacagctgaagtgaggaaccaaatcccagaggaagattttggaggccttgaaacgaaaactccagatgtgtttgttgccacatgtgtcataaagagagtcaaggagaagccatctgagattgacagagggtgtaatttgagttctccatcttctggttttcgtgatgtcccaaaatgtccatccaatacaaaattagtctctgtatctagtacaaagcgccctgtatcttcctggaggcaaacccggtcccatcaaagtcgagtaggtcctgatcttcatgatgattttcttgatacttctcttgagaatatcagagaaaatttaaataaggatttgaacaaggaagaccaaccatgcctgattcagaaagacattagtgcggacagctcagatgacgaaacacacgatatgaatgccaaaagcagtcctcagaagaagcaaaagcaatcttctgttacagtggccaacacaagaagtttcaagtacgttgaaccagttaggaagaaagctgagcgtgaaaatttaaaaggagttgaatgcaaacaatgcaggaagttctatgatgctgttcttcctaatgctgatggcaaggatgctgacagtaagcagagcttccgctgtgaacaccttgatggtgtttctaggcatcgatataggtatgttcctcccatgactcctgaaggattttggaatattgggtttgaatctgaaatgtaagaatatattttagagagatcagagattactatttgatttataaatggattctgtatccaattaaaaag

SEQ ID NO: 60333 - protein, 247 aa, Glycine max
  peptide (1)..(247): Ceres Seq. ID no. 15171454
  misc_feature (81)..(247): Homolog of NCBI NO: 4506441 NR Description: retinoblastoma binding protein 8
  misc_feature (100)..(247): Homolog of NCBI NO: 18044620 NR Description: 9930104E21Rik protein [Mus musculus]
  misc_feature (100)..(247): Homolog of NCBI NO: 29747802 NR Description: Similar to retinoblastoma binding protein 8 [Mus
  misc_feature (100)..(247): Homolog of NCBI NO: 34880527 NR Description: similar to Retinoblastoma-binding protein 8 (CtBP interacting protein) (CtIP) (Retinoblastoma-interacting
  misc_feature (55)..(247): Homolog of NCBI NO: 11357298 NR Description: gamma response I protein - Arabidopsis thaliana
  misc_feature (1)..(52): Homolog of NCBI NO: 11357298 NR Description: gamma response I protein - Arabidopsis thaliana
  misc_feature (55)..(247): Homolog of NCBI NO: 11357299 NR Description: gamma response I protein [imported] - Arabidopsis
  misc_feature (1)..(52): Homolog of NCBI NO: 11357299 NR Description: gamma response I protein [imported] - Arabidopsis
  misc_feature (55)..(247): Homolog of NCBI NO: 30693587 NR Description: predicted protein [Arabidopsis thaliana]
  misc_feature (1)..(52): Homolog of NCBI NO: 30693587 NR Description: predicted protein [Arabidopsis thaliana]
MTMDPSDSDTAEVRNQIPEEDFGGLETKTPDVFVATCVIKRVKEKPSEIDRGCNLSSPSSGFRDVPKCPSNTKLVSVSSTKRPVSSWRQTRSHQSRVGPDLHDDFLDTSLENIRENLNKDLNKEDQPCLIQKDISADSSDDETHDMNAKSSPQKKQKQSSVTVANTRSFKYVEPVRKKAERENLKGVECKQCRKFYDAVLPNADGKDADSKQSFRCEHLDGVSRHRYRYVPPMTPEGFWNIGFESEM

SEQ ID NO: 60334 - protein, 245 aa, Glycine max
  peptide (1)..(245): Ceres Seq. ID no. 15171455
  misc_feature (79)..(245): Homolog of NCBI NO: 4506441 NR Description: retinoblastoma binding protein 8
  misc_feature (98)..(245): Homolog of NCBI NO: 18044620 NR Description: 9930104E21Rik protein [Mus musculus]
  misc_feature (98)..(245): Homolog of NCBI NO: 29747802 NR Description: Similar to retinoblastoma binding protein 8 [Mus
  misc_feature (98)..(245): Homolog of NCBI NO: 34880527 NR Description: similar to Retinoblastoma-binding protein 8 (CtBP interacting protein) (CtIP) (Retinoblastoma-interacting
  misc_feature (53)..(245): Homolog of NCBI NO: 11357298 NR Description: gamma response I protein - Arabidopsis thaliana
  misc_feature (1)..(50): Homolog of NCBI NO: 11357298 NR Description: gamma response I protein - Arabidopsis thaliana
  misc_feature (53)..(245): Homolog of NCBI NO: 11357299 NR Description: gamma response I protein [imported] - Arabidopsis
  misc_feature (1)..(50): Homolog of NCBI NO: 11357299 NR Description: gamma response I protein [imported] - Arabidopsis
  misc_feature (53)..(245): Homolog of NCBI NO: 30693587 NR Description: predicted protein [Arabidopsis thaliana]
  misc_feature (1)..(50): Homolog of NCBI NO: 30693587 NR Description: predicted protein [Arabidopsis thaliana]
MDPSDSDTAEVRNQIPEEDFGGLETKTPDVFVATCVIKRVKEKPSEIDRGCNLSSPSSGFRDVPKCPSNTKLVSVSSTKRPVSSWRQTRSHQSRVGPDLHDDFLDTSLENIRENLNKDLNKEDQPCLIQKDISADSSDDETHDMNAKSSPQKKQKQSSVTVANTRSFKYVEPVRKKAERENLKGVECKQCRKFYDAVLPNADGKDADSKQSFRCEHLDGVSRHRYRYVPPMTPEGFWNIGFESEM

SEQ ID NO: 60335 - DNA, 824 bp, Glycine max
  misc_feature (1)..(824): Ceres Seq. ID no. 13581380
aattcctctgagccagatgttattcttctagaacctgatcaaattcatgaaaacactccatttgtttcttcgaaaacatatgattcatcttggttcgaaactgaaaagaatcccaaagacaactggcaattacctgcttacggtaattctcagtttaggagaagacttatgaatgatcttcaaaggccttatgaccaagaagaatgtgatagacttctgcttgaagtacgtcagaaaaaacaaaaggaacgtcatagagaaacacgtcatggggtggtcaagttttgtcgcactaggggtgtcagcgaatcatatcttgacttgtaccctgatctagctaaagcaattgccgaattcaaaaaaccggaaaaggttttgtttctcttgcgtggatttattttctggttgcaaaatgtgacccacgaaggaaaatttcgaccttggcttgacaagcattgtttggactttttacgacaaatgaaaaattggaatcttgctaaatttggaagcaagagtttaactaacatagtcaacaaagtttacatacgtacagttaaatctatcttggaactttgacctagttgtagaaagaaagatagctagagttgtggttctcatcaggagttctttcatttctgttaaaccgtggttctctttttgtccaccgttttttgtaccattgagaagatggtgataaactgataattgaggggcttaggtggctagcatatgctgtaatataatgttatattcttcctaagctagtttttgttgagcccaaatgcaagatatctaggactctgttcaaaaagactaatttttat

SEQ ID NO: 60336 - protein, 191 aa, Glycine max
  peptide (1)..(191): Ceres Seq. ID no. 13581381
  misc_feature (17)..(148): Homolog of NCBI NO: 15231501 NR Description: expressed protein [Arabidopsis thaliana]
  misc_feature (15)..(148): Homolog of NCBI NO: 15234084 NR Description: hypothetical protein [Arabidopsis thaliana]
  misc_feature (3)..(157): Homolog of NCBI NO: 22330693 NR Description: expressed protein [Arabidopsis thaliana]
  misc_feature (50)..(152): Homolog of NCBI NO: 38345132 NR Description: OSJNBa0055H05.9 [Oryza sativa (japonica
  misc_feature (1)..(154): Homolog of NCBI NO: 15219016 NR Description: expressed protein [Arabidopsis thaliana]
NSSEPDVILLEPDQIHENTPFVSSKTYDSSWFETEKNPKDNWQLPAYGNSQFRRRLMNDLQRPYDQEECDRLLLEVRQKKQKERHRETRHGVVKFCRTRGVSESYLDLYPDLAKAIAEFKKPEKVLFLLRGFIFWLQNVTHEGKFRPWLDKHCLDFLRQMKNWNLAKFGSKSLTNIVNKVYIRTVKSILEL

SEQ ID NO: 60337 - protein, 135 aa, Glycine max
  peptide (1)..(135): Ceres Seq. ID no. 13581382
  misc_feature (1)..(92): Homolog of NCBI NO: 15231501 NR Description: expressed protein [Arabidopsis thaliana]
  misc_feature (1)..(92): Homolog of NCBI NO: 15234084 NR Description: hypothetical protein [Arabidopsis thaliana]
  misc_feature (1)..(101): Homolog of NCBI NO: 22330693 NR Description: expressed protein [Arabidopsis thaliana]
  misc_feature (1)..(96): Homolog of NCBI NO: 38345132 NR Description: OSJNBa0055H05.9 [Oryza sativa (japonica
  misc_feature (1)..(98): Homolog of NCBI NO: 15219016 NR Description: expressed protein [Arabidopsis thaliana]
MNDLQRPYDQEECDRLLLEVRQKKQKERHRETRHGVVKFCRTRGVSESYLDLYPDLAKAIAEFKKPEKVLFLLRGFIFWLQNVTHEGKFRPWLDKHCLDFLRQMKNWNLAKFGSKSLTNIVNKVYIRTVKSILEL

SEQ ID NO: 60338 - DNA, 1943 bp, Glycine max
  misc_feature (1)..(1943): Ceres Seq. ID no. 14308477
tctctatccttctcccccttcctccaaaactgaccaagtcccatactcttccgccatatcactacttttcaacacgctctaatttaaacaatactcccactaccgcacatggatattttcacttcctatacataaccctattccgccatctcttttttcacacttcatttccttcttcttctctgattttggttcatggcgtgggcgaagaagccaggtgactcaaataatgtaggctttatgagatggttagcgttggtgttggtgttggtgttgttatcgggcttttggtgtgtttcgggtgtgaaagaaggaaaaaggaatgcgtacgcgacaatgatgtacgtaggtacgccgagggactacgaattctacatagccatacgcgtgcttctgaaatcgctggctacgctcgacgctcaagccgatcttgttgtcattgcttcccttgatgttcctcctcgctggattcgtgctcttgaaaaggaagatggtgcgaaagtagtgagagtggaaaatctggacaacccctacaagcatcaagataattttgacaagaggttcaagttatcgttgaacaaactctacgcatggagcttagtggactatgacagggtggtgatgttggacgctgataacctcttccttcaaaacacggacgagttgtttcaatgtggacaattctgtgcggtctttatcaatccttgtgtgttccacacaggactcttcgtcttgcagccatcgatgaccgtgttcaaggacatggttcatgaattacgtaatgggagagaaaatcctgatggtgcagaccagggtttcatagctagctatttcccagagttacttgataagccaatgtttcacccaccacctaatggcaccaagcttgatggaacatataggcttcctttgggttatcagatggatgcttcttactattatcttaaacttcgctggagcataccctgtggaccaaatagtgtgatcacattcccaggggcaccatggttgaagccatggtattggtggtcctggcctgttctgccattaggcctccagtggcatgataaacgtcgccaaactttagggtatggtgcggagatggctgtgatacttattcaatcggcaatatatttgggaataatagcaatgactcgttttgcaaggccaagtctctcaaagctatgctataggcgctctgacaagagcatcaacttggtgcagaacatcctcaaattggtggcattgtggagcatccttgcggcttacacaacacccttcttcatcattcctcacacggttcaccctttgttaggatggcctctctacttgcttggtgtctttgcattgtgctctattgcagtcaatgcctttctgctgccaatgttgccggttctgatgccgtggctcgggatcaccggtgctttgattgtcatggcttttccttggtattcagatggggtggtgagagcattgtgcgtttttggttatgcattctgtgctgcaccgtgtgtgtgggcatctatgactaggataatggcagggcttcaccagtctctagaaagggaagcttttttgccaagattaggagaatcttcaccaccctcttggtttaacaagttatattgagctgtctgattgagcatgattgaatgcttggggacatagatgacaagctcattggaaactgaaggggaggaagtgccatggatttagaaccattatgatgttacggtcgaaattatatacatttttcttggagcgagatggccatgttgcacttactaggaggaggaacaacgcggagttagtgtgtgtatataaagataaagattgttttgctatttttcacatacatatgtatcaattattgcacgattggttcttgtattcaaatttttaaacttgttagacagtgagataagatcagagagttcggcatc

SEQ ID NO: 60339 - protein, 477 aa, Glycine max
  peptide (1)..(477): Ceres Seq. ID no. 14308478
  misc_feature (18)..(293): Homolog of NCBI NO: 18087513 NR Description: AT5g18480/F20L16_200 [Arabidopsis thaliana]
  misc_feature (18)..(293): Homolog of NCBI NO: 22326882 NR Description: glycogenin glucosyltransferase (glycogenin) -
  misc_feature (283)..(475): Homolog of NCBI NO: 25408409 NR Description: probable glycogenin [imported] - Arabidopsis
  misc_feature (42)..(248): Homolog of NCBI NO: 25408409 NR Description: probable glycogenin [imported] - Arabidopsis
  misc_feature (283)..(477): Homolog of NCBI NO: 15235811 NR Description: glycogenin glucosyltransferase (glycogenin) -
  misc_feature (42)..(254): Homolog of NCBI NO: 15235811 NR Description: glycogenin glucosyltransferase (glycogenin) -
  misc_feature (96)..(477): Homolog of NCBI NO: 18403930 NR Description: glycogenin glucosyltransferase (glycogenin) -
  misc_feature (42)..(477): Homolog of NCBI NO: 37536746 NR Description: hypothetical protein [Oryza sativa (japonica
  misc_feature (48)..(477): Homolog of NCBI NO: 38345479 NR Description: OSJNBa0010H02.17 [Oryza sativa (japonica
  misc_feature (42)..(477): Homolog of NCBI NO: 17380986 NR Description: unknown protein [Arabidopsis thaliana]
MAWAKKPGDSNNVGFMRWLALVLVLVLLSGFWCVSGVKEGKRNAYATMMYVGTPRDYEFYIAIRVLLKSLATLDAQADLVVIASLDVPPRWIRALEKEDGAKVVRVENLDNPYKHQDNFDKRFKLSLNKLYAWSLVDYDRVVMLDADNLFLQNTDELFQCGQFCAVFINPCVFHTGLFVLQPSMTVFKDMVHELRNGRENPDGADQGFIASYFPELLDKPMFHPPPNGTKLDGTYRLPLGYQMDASYYYLKLRWSIPCGPNSVITFPGAPWLKPWYWWSWPVLPLGLQWHDKRRQTLGYGAEMAVILIQSAIYLGIIAMTRFARPSLSKLCYRRSDKSINLVQNILKLVALWSILAAYTTPFFIIPHTVHPLLGWPLYLLGVFALCSIAVNAFLLPMLPVLMPWLGITGALIVMAFPWYSDGVVRALCVFGYAFCAAPCVWASMTRIMAGLHQSLEREAFLPRLGESSPPSWFNKLY

SEQ ID NO: 60340 - protein, 462 aa, Glycine max
  peptide (1)..(462): Ceres Seq. ID no. 14308479
  misc_feature (3)..(278): Homolog of NCBI NO: 18087513 NR Description: AT5g18480/F20L16_200 [Arabidopsis thaliana]
  misc_feature (3)..(278): Homolog of NCBI NO: 22326882 NR Description: glycogenin glucosyltransferase (glycogenin) -
  misc_feature (268)..(460): Homolog of NCBI NO: 25408409 NR Description: probable glycogenin [imported] - Arabidopsis
  misc_feature (27)..(233): Homolog of NCBI NO: 25408409 NR Description: probable glycogenin [imported] - Arabidopsis
  misc_feature (268)..(462): Homolog of NCBI NO: 15235811 NR Description: glycogenin glucosyltransferase (glycogenin) -
  misc_feature (27)..(239): Homolog of NCBI NO: 15235811 NR Description: glycogenin glucosyltransferase (glycogenin) -
  misc_feature (81)..(462): Homolog of NCBI NO: 18403930 NR Description: glycogenin glucosyltransferase (glycogenin) -
  misc_feature (27)..(462): Homolog of NCBI NO: 37536746 NR Description: hypothetical protein [Oryza sativa (japonica
  misc_feature (33)..(462): Homolog of NCBI NO: 38345479 NR Description: OSJNBa0010H02.17 [Oryza sativa (japonica
  misc_feature (27)..(462): Homolog of NCBI NO: 17380986 NR Description: unknown protein [Arabidopsis thaliana]
MRWLALVLVLVLLSGFWCVSGVKEGKRNAYATMMYVGTPRDYEFYIAIRVLLKSLATLDAQADLVVIASLDVPPRWIRALEKEDGAKVVRVENLDNPYKHQDNFDKRFKLSLNKLYAWSLVDYDRVVMLDADNLFLQNTDELFQCGQFCAVFINPCVFHTGLFVLQPSMTVFKDMVHELRNGRENPDGADQGFIASYFPELLDKPMFHPPPNGTKLDGTYRLPLGYQMDASYYYLKLRWSIPCGPNSVITFPGAPWLKPWYWWSWPVLPLGLQWHDKRRQTLGYGAEMAVILIQSAIYLGIIAMTRFARPSLSKLCYRRSDKSINLVQNILKLVALWSILAAYTTPFFIIPHTVHPLLGWPLYLLGVFALCSIAVNAFLLPMLPVLMPWLGITGALIVMAFPWYSDGVVRALCVFGYAFCAAPCVWASMTRIMAGLHQSLEREAFLPRLGESSPPSWFNKLY

SEQ ID NO: 60341 - protein, 430 aa, Glycine max
  peptide (1)..(430): Ceres Seq. ID no. 14308480
  misc_feature (1)..(246): Homolog of NCBI NO: 18087513 NR Description: AT5g18480/F20L16_200 [Arabidopsis thaliana]
  misc_feature (1)..(246): Homolog of NCBI NO: 22326882 NR Description: glycogenin glucosyltransferase (glycogenin) -
  misc_feature (236)..(428): Homolog of NCBI NO: 25408409 NR Description: probable glycogenin [imported] - Arabidopsis
  misc_feature (1)..(201): Homolog of NCBI NO: 25408409 NR Description: probable glycogenin [imported] - Arabidopsis
  misc_feature (236)..(430): Homolog of NCBI NO: 15235811 NR Description: glycogenin glucosyltransferase (glycogenin) -
  misc_feature (1)..(207): Homolog of NCBI NO: 15235811 NR Description: glycogenin glucosyltransferase (glycogenin) -
  misc_feature (49)..(430): Homolog of NCBI NO: 18403930 NR Description: glycogenin glucosyltransferase (glycogenin) -
  misc_feature (1)..(430): Homolog of NCBI NO: 37536746 NR Description: hypothetical protein [Oryza sativa (japonica
  misc_feature (1)..(430): Homolog of NCBI NO: 38345479 NR Description: OSJNBa0010H02.17 [Oryza sativa (japonica
  misc_feature (1)..(430): Homolog of NCBI NO: 17380986 NR Description: unknown protein [Arabidopsis thaliana]
MMYVGTPRDYEFYIAIRVLLKSLATLDAQADLVVIASLDVPPRWIRALEKEDGAKVVRVENLDNPYKHQDNFDKRFKLSLNKLYAWSLVDYDRVVMLDADNLFLQNTDELFQCGQFCAVFINPCVFHTGLFVLQPSMTVFKDMVHELRNGRENPDGADQGFIASYFPELLDKPMFHPPPNGTKLDGTYRLPLGYQMDASYYYLKLRWSIPCGPNSVITFPGAPWLKPWYWWSWPVLPLGLQWHDKRRQTLGYGAEMAVILIQSAIYLGIIAMTRFARPSLSKLCYRRSDKSINLVQNILKLVALWSILAAYTTPFFIIPHTVHPLLGWPLYLLGVFALCSIAVNAFLLPMLPVLMPWLGITGALIVMAFPWYSDGVVRALCVFGYAFCAAPCVWASMTRIMAGLHQSLEREAFLPRLGESSPPSWFNKLY

SEQ ID NO: 60342 - DNA, 1827 bp, Glycine max
  misc_feature (1)..(1827): Ceres Seq. ID no. 13502573
ttttttgccatatttcccaaataaaattccccgattaaccttcgtgctacccacgaaatctatttttcttcccatttttttctgagcatttagctgtcgcttctttttgtttgtttttgtcatcctcggcagatcaggttttgtttttgcttctgctccagctttggaagatccacaatctctctctgagtggatggtttagtgtatatttttaagatactgatataaaagtatgggaagcagtgagatggataaaactacaaaagagaaggagtcaaagacgccgccaccacctacatcacaggagcagtcttcgaccaccggcactggaacaattaatcctgagtggcctggctttcaggcatattctcctatacctccacatggtttcttggcatcaagtccccaggctcacccttatatgtggggtgtccagcaatttatgcctccctatggtactccaccacatccctatgttgcaatgtatccccctggtggcatttatgctcatccatccatgcctccgggatcttatccttttaatccttttgccatgccttctcctaatggcattgctgaggcttcaggaaacactcctggcagcatggaagctgatggcaagccttctgaggtgaaggaaaaattgccaatcaaaagatcaaaaggaagtttgggtagtttgaatatgatcacagggaaaaataatgaacatggtaaaacactggggacatctgctaatggaattcattcaaagagtggtgagagtgctagtgaaggtgaaggtaccagtgaaggaagtgatgcaaattctcagaatgactctcaattaaaatcagggggccggcaggattcttttgaagatgaaccctctcaaaatggcagttcagcatatactcctcaaaatgggggactaaatatacctcatacagtggtcaatcaaaccatgtctatcatacctatctctgcaggtggtgctcctggagctgttcctggtcccacgacaaacttaaatataggaatggattattggggtacaccaggttcatccaacattcctggacttggcagaaaggttccatctactgcagttgctggagggatggttactgttggatcacgggatagtgctcagtcacaactctggctacaggatgaaagagagcttaaaaggcaaaggcggaagcagtctaacagggaatctgctcgcaggtccaggttgcgcaagcaggccgagtgtgatgagttagctcagcgtgctgaggctttgaaggaagaaaatgcttctctccggtcagaagtaaatcgaatcaggagtgattatgagcagctactctccgagaatgcagctctcaaggagagacttggggaactacctccgaatgatgatcatcatcataggtctggcaggaatgatcagcatgtgggtaatgacactcaacagagtgggcagacagaggccgtgcagggtggtcattagcaccaaccaaccacttcatgctgcctttcagggagataatctaacttaaatagcaagagcaagatcttgtttcggataggttgtagttcaaattgtattaatgctgaccatttatcgtcttaagatctgtttaatgttatgtgatccttcattcctaatttaccttttttttaactcattcaaaacgacctggattgtatgtagtgtgtgaattctgtgtcataccttatctgcagcttcaaagttagtgttctcattaagtaagcaatatagttaacgaacctgggtgttgtccattatatcatttcctgtacaaataatttatcgggaaaataaataaaagagaaaat

SEQ ID NO: 60343 - protein, 414 aa, Glycine max
  peptide (1)..(414): Ceres Seq. ID no. 13502574
  misc_feature (308)..(372): Pfam Name: bZIP transcription factor Pfam Description: bZIP transcription factor
  misc_feature (1)..(355): Homolog of NCBI NO: 15222576 NR Description: G-Box binding protein -related [Arabidopsis
  misc_feature (1)..(355): Homolog of NCBI NO: 28393494 NR Description: putative G-Box binding protein [Arabidopsis
  misc_feature (23)..(408): Homolog of NCBI NO: 629667 NR Description: G-box-binding protein - tomato
  misc_feature (1)..(374): Homolog of NCBI NO: 25344493 NR Description: hypothetical protein At2g35530 [imported] -
  misc_feature (1)..(395): Homolog of NCBI NO: 30686443 NR Description: G-box binding bZIP transcription factor -related
  misc_feature (1)..(408): Homolog of NCBI NO: 7488942 NR Description: bZIP DNA-binding protein - parsley
  misc_feature (1)..(406): Homolog of NCBI NO: 5381313 NR Description: G-Box binding protein 2 [Catharanthus roseus]
  misc_feature (1)..(414): Homolog of NCBI NO: 7488943 NR Description: bZIP DNA-binding protein - parsley
  misc_feature (1)..(414): Homolog of NCBI NO: 13775107 NR Description: bZIP transcription factor 2 [Phaseolus vulgaris]
  misc_feature (1)..(414): Homolog of NCBI NO: 13775109 NR Description: bZIP transcription factor 3 [Phaseolus vulgaris]
MGSSEMDKTTKEKESKTPPPPTSQEQSSTTGTGTINPEWPGFQAYSPIPPHGFLASSPQAHPYMWGVQQFMPPYGTPPHPYVAMYPPGGIYAHPSMPPGSYPFNPFAMPSPNGIAEASGNTPGSMEADGKPSEVKEKLPIKRSKGSLGSLNMITGKNNEHGKTLGTSANGIHSKSGESASEGEGTSEGSDANSQNDSQLKSGGRQDSFEDEPSQNGSSAYTPQNGGLNIPHTVVNQTMSIIPISAGGAPGAVPGPTTNLNIGMDYWGTPGSSNIPGLGRKVPSTAVAGGMVTVGSRDSAQSQLWLQDERELKRQRRKQSNRESARRSRLRKQAECDELAQRAEALKEENASLRSEVNRIRSDYEQLLSENAALKERLGELPPNDDHHHRSGRNDQHVGNDTQQSGQTEAVQGGH

SEQ ID NO: 60344 - protein, 409 aa, Glycine max
  peptide (1)..(409): Ceres Seq. ID no. 13502575
  misc_feature (303)..(367): Pfam Name: bZIP transcription factor Pfam Description: bZIP transcription factor
  misc_feature (1)..(350): Homolog of NCBI NO: 15222576 NR Description: G-Box binding protein -related [Arabidopsis
  misc_feature (1)..(350): Homolog of NCBI NO: 28393494 NR Description: putative G-Box binding protein [Arabidopsis
  misc_feature (18)..(403): Homolog of NCBI NO: 629667 NR Description: G-box-binding protein - tomato
  misc_feature (1)..(369): Homolog of NCBI NO: 25344493 NR Description: hypothetical protein At2g35530 [imported] -
  misc_feature (1)..(390): Homolog of NCBI NO: 30686443 NR Description: G-box binding bZIP transcription factor -related
  misc_feature (1)..(403): Homolog of NCBI NO: 7488942 NR Description: bZIP DNA-binding protein - parsley
  misc_feature (1)..(401): Homolog of NCBI NO: 5381313 NR Description: G-Box binding protein 2 [Catharanthus roseus]
  misc_feature (1)..(409): Homolog of NCBI NO: 7488943 NR Description: bZIP DNA-binding protein - parsley
  misc_feature (1)..(409): Homolog of NCBI NO: 13775107 NR Description: bZIP transcription factor 2 [Phaseolus vulgaris]
  misc_feature (1)..(409): Homolog of NCBI NO: 13775109 NR Description: bZIP transcription factor 3 [Phaseolus vulgaris]
MDKTTKEKESKTPPPPTSQEQSSTTGTGTINPEWPGFQAYSPIPPHGFLASSPQAHPYMWGVQQFMPPYGTPPHPYVAMYPPGGIYAHPSMPPGSYPFNPFAMPSPNGIAEASGNTPGSMEADGKPSEVKEKLPIKRSKGSLGSLNMITGKNNEHGKTLGTSANGIHSKSGESASEGEGTSEGSDANSQNDSQLKSGGRQDSFEDEPSQNGSSAYTPQNGGLNIPHTVVNQTMSIIPISAGGAPGAVPGPTTNLNIGMDYWGTPGSSNIPGLGRKVPSTAVAGGMVTVGSRDSAQSQLWLQDERELKRQRRKQSNRESARRSRLRKQAECDELAQRAEALKEENASLRSEVNRIRSDYEQLLSENAALKERLGELPPNDDHHHRSGRNDQHVGNDTQQSGQTEAVQGGH

SEQ ID NO: 60345 - protein, 351 aa, Glycine max
  peptide (1)..(351): Ceres Seq. ID no. 13502576
  misc_feature (245)..(309): Pfam Name: bZIP transcription factor Pfam Description: bZIP transcription factor
  misc_feature (1)..(292): Homolog of NCBI NO: 15222576 NR Description: G-Box binding protein -related [Arabidopsis
  misc_feature (1)..(292): Homolog of NCBI NO: 28393494 NR Description: putative G-Box binding protein [Arabidopsis
  misc_feature (1)..(345): Homolog of NCBI NO: 629667 NR Description: G-box-binding protein - tomato
  misc_feature (1)..(311): Homolog of NCBI NO: 25344493 NR Description: hypothetical protein At2g35530 [imported] -
  misc_feature (1)..(332): Homolog of NCBI NO: 30686443 NR Description: G-box binding bZIP transcription factor -related
  misc_feature (1)..(345): Homolog of NCBI NO: 7488942 NR Description: bZIP DNA-binding protein - parsley
  misc_feature (1)..(343): Homolog of NCBI NO: 5381313 NR Description: G-Box binding protein 2 [Catharanthus roseus]
  misc_feature (1)..(351): Homolog of NCBI NO: 7488943 NR Description: bZIP DNA-binding protein - parsley
  misc_feature (1)..(351): Homolog of NCBI NO: 13775107 NR Description: bZIP transcription factor 2 [Phaseolus vulgaris]
  misc_feature (1)..(351): Homolog of NCBI NO: 13775109 NR Description: bZIP transcription factor 3 [Phaseolus vulgaris]
MWGVQQFMPPYGTPPHPYVAMYPPGGIYAHPSMPPGSYPFNPFAMPSPNGIAEASGNTPGSMEADGKPSEVKEKLPIKRSKGSLGSLNMITGKNNEHGKTLGTSANGIHSKSGESASEGEGTSEGSDANSQNDSQLKSGGRQDSFEDEPSQNGSSAYTPQNGGLNIPHTVVNQTMSIIPISAGGAPGAVPGPTTNLNIGMDYWGTPGSSNIPGLGRKVPSTAVAGGMVTVGSRDSAQSQLWLQDERELKRQRRKQSNRESARRSRLRKQAECDELAQRAEALKEENASLRSEVNRIRSDYEQLLSENAALKERLGELPPNDDHHHRSGRNDQHVGNDTQQSGQTEAVQGGH

SEQ ID NO: 60346 - DNA, 1812 bp, Glycine max
  misc_feature (1)..(1812): Ceres Seq. ID no. 15175762
ttttcaaattctttagaatttatcatttcctaagtattatgtttatatgctgtcataaaaaaatgtttatatgctcaatatttgctgtcagcatgacatgatgaaacaagttgcaacgatagtttagtttatcctattatatagctgcaactaagtgattcttaagcatgatattggctatttaatcattttttgtttatcgctactcttgaagttggcttaatgtgaatattcactgccaaacaaaaatgtgaactgaatttcatatgactggagctttgagaatcccgcgtataacggaatcctggttaactttgatgttgatctgagtttcaaaatattacaccatgttcttcatcttgatcaaactctttatcacttgttgagacttgagaaggttcctcatactctgtcgaaaaaatagttgtatagagagaacagcccacatgcatgaagagacatagaaagcccttagtgtctcataatgtactgacattgagaacataattttattcatacatttggaaagtgttcattgtcatatacaacatggcttacaaaacgttgatcagaaaattgttgccttgctgataatataaaattgagttctcttgatcttaacatgagaaaacttatgtctctagctttctggacctatgtaagtcctcatggtacaagcataccagttatatttgagtgagcgtacaagaagttgtctgactttggcagggtgaaactctgcggataatgatgattcttggcctgctttattttgatgctcagaagcatcctacttgttcatcttatctgttccatgcctggtggttgactatcaggaatgttttagttttgacacttgacagcagtgtggaggattgagttatatactacaaatatgcatgaattccgaagtttattactagacgacatagtattagatgtcacctgtatgttaagtggtcgccatgctttgagaaagcgacttgaagagcttggttatgaacttaatgacgaccaagttcagactttattttggtgttttaaagcagtggctgagcaaaaaaagagggttactgatgctgacctcagagcattggtatcagatgaagtttttcaagcagagcctgtctggaaacttggtgatttgcaggtgacttgtggaactcttggcctttctacagcaactgtcaaacttttgagtagtgatggtagcacacacgttgcctgttccattggtacaggaccagtggattcggcttacaaggctgttgatctgattgtgaaggagcaagtaacacttcttgagtactcgatgaatgcagtgacagaaggcattgatgcaattgccactacccgggttgtaattcgtggggagagtgaaacaagtactattactacccatgctttaacgggagaaactgttattcgaacatttagtgggactggagcgggaatggatgttgttgtttccagtgtcaaggcctatattgctgcactaaacaagatgtcgggtttcaaggaatcctctcaatctgctgaaaaaatttcaatttcttcattgaagatttgagaattgtgtggtgcttctttggtaacaattgtttgtgttaaaccacgaagaggaagacaatgttgcagcagcatccttgcctctcgcagttctccatattaagggttgtccctgtattttgaccggaatatatttgcaacctgtaatttattgattcacccaagtagcctttgcaaagaatgtaacttaagtccgttttaaatattcagactacagggattctttcccttttcattttncat

SEQ ID NO: 60347 - protein, 224 aa, Glycine max
  peptide (1)..(224): Ceres Seq. ID no. 15175763
  misc_feature (20)..(209): Homolog of NCBI NO: 7387848 NR Description: 2-isopropylmalate synthase A
  misc_feature (20)..(209): Homolog of NCBI NO: 7387849 NR Description: 2-isopropylmalate synthase B
  misc_feature (32)..(217): Homolog of NCBI NO: 6714306 NR Description: F15H18.3 [Arabidopsis thaliana]
  misc_feature (32)..(217): Homolog of NCBI NO: 15221794 NR Description: 2-isopropylmalate synthase -related [Arabidopsis
  misc_feature (20)..(224): Homolog of NCBI NO: 15221125 NR Description: 2-isopropylmalate synthase -related [Arabidopsis
MHEFRSLLLDDIVLDVTCMLSGRHALRKRLEELGYELNDDQVQTLFWCFKAVAEQKKRVTDADLRALVSDEVFQAEPVWKLGDLQVTCGTLGLSTATVKLLSSDGSTHVACSIGTGPVDSAYKAVDLIVKEQVTLLEYSMNAVTEGIDAIATTRVVIRGESETSTITTHALTGETVIRTFSGTGAGMDVVVSSVKAYIAALNKMSGFKESSQSAEKISISSLKI

SEQ ID NO: 60348 - protein, 206 aa, Glycine max
  peptide (1)..(206): Ceres Seq. ID no. 15175764
  misc_feature (2)..(191): Homolog of NCBI NO: 7387848 NR Description: 2-isopropylmalate synthase A
  misc_feature (2)..(191): Homolog of NCBI NO: 7387849 NR Description: 2-isopropylmalate synthase B
  misc_feature (14)..(199): Homolog of NCBI NO: 6714306 NR Description: F15H18.3 [Arabidopsis thaliana]
  misc_feature (14)..(199): Homolog of NCBI NO: 15221794 NR Description: 2-isopropylmalate synthase -related [Arabidopsis
  misc_feature (2)..(206): Homolog of NCBI NO: 15221125 NR Description: 2-isopropylmalate synthase -related [Arabidopsis
MLSGRHALRKRLEELGYELNDDQVQTLFWCFKAVAEQKKRVTDADLRALVSDEVFQAEPVWKLGDLQVTCGTLGLSTATVKLLSSDGSTHVACSIGTGPVDSAYKAVDLIVKEQVTLLEYSMNAVTEGIDAIATTRVVIRGESETSTITTHALTGETVIRTFSGTGAGMDVVVSSVKAYIAALNKMSGFKESSQSAEKISISSLKI

SEQ ID NO: 60349 - DNA, 1153 bp, Glycine max
  misc_feature (1)..(1153): Ceres Seq. ID no. 14308467
gaaccaaaacaaaaccattaattccatttgtttccttcatatggctaacaacattcttaccatgacaaacctcaatttcgaacttgattgcaagagaactcatgattctttggggagtttgagtcaattgaccacatctctggcttgtgtaacccaccatgaaagacaacaactcagggagacctttaaggcagtgaatggagaagacttgataagtcatcttcaaagatatgaagatgcgttttattctccttcttcttcttcttcttcttcttcttcttcttcttcttcttcttcttcttcttctatgaactgttctgctatttccttgtggatgcttgacacacatgacagggatgctgttgtggctagagaagctctccaacaagatgagaccaatttcaaggctcttgtggagatttttgtgggtagaaaatcaagtcatgttcttctcatctcacaggcctaccagaaaatgttcaaaagacacttggaccaagatattatcaatttggaccctccacacccctttcaaaagattattgtggcattggctgcatcacacaaagctcatcaagcagatgtcaaccatcatatatccaagtgtgatgctaggaggctctatgagactggggagggaagcttaggaactgtaattgaagctgttgtgttagaaattttaagcaagaggagcattccccaactgaagctaacattttttagttataaacacatttatggacatgactacacaaagtctatcaagagggggaaatacggtcaatttggtaaagctttaaaggtggttgtgaaatgcatttgtaatccagcacactattatgcaaagatactgtactcaagcatcaaaggggaaacaagggacagaagagttttggcacgaacattggtaagcagggctgagatagacatagatgaaattagaagggttttcaaagaaaagtatgggaaggaacttgctgatgctatatgtgaaggctttccatctggtgactactacagagactttcttgttgccttggctacaagatctaagtagaccctgttgcatctgatcttaacttgtattgcaacaaaatttgttgagaatagtataattcatatcaactttttgagtttcttttgtgggtaaaat

SEQ ID NO: 60350 - protein, 351 aa, Glycine max
  peptide (1)..(351): Ceres Seq. ID no. 14308468
  misc_feature (279)..(343): Pfam Name: Annexin Pfam Description: Annexin
  misc_feature (99)..(346): Homolog of NCBI NO: 13397835 NR Description: annexin A13 isoform b [Homo sapiens]
  misc_feature (97)..(346): Homolog of NCBI NO: 34868934 NR Description: hypothetical protein XP_346470 [Rattus norvegicus]
  misc_feature (97)..(346): Homolog of NCBI NO: 18426844 NR Description: annexin A7 [Rattus norvegicus]
  misc_feature (106)..(338): Homolog of NCBI NO: 3881978 NR Description: annexin-like protein [Medicago sativa]
  misc_feature (97)..(346): Homolog of NCBI NO: 30584789 NR Description: Homo sapiens annexin A7 [synthetic construct]
  misc_feature (97)..(346): Homolog of NCBI NO: 4809279 NR Description: annexin VII isoform 2; annexin VII (synexin);
  misc_feature (97)..(346): Homolog of NCBI NO: 4502111 NR Description: annexin VII isoform 1; annexin VII (synexin);
  misc_feature (97)..(346): Homolog of NCBI NO: 26346446 NR Description: unnamed protein product [Mus musculus]
  misc_feature (97)..(346): Homolog of NCBI NO: 346651 NR Description: annexin VII - mouse
  misc_feature (97)..(346): Homolog of NCBI NO: 6753062 NR Description: annexin A7; annexin VII [Mus musculus]
NQNKTINSICFLHMANNILTMTNLNFELDCKRTHDSLGSLSQLTTSLACVTHHERQQLRETFKAVNGEDLISHLQRYEDAFYSPSSSSSSSSSSSSSSSSSSMNCSAISLWMLDTHDRDAVVAREALQQDETNFKALVEIFVGRKSSHVLLISQAYQKMFKRHLDQDIINLDPPHPFQKIIVALAASHKAHQADVNHHISKCDARRLYETGEGSLGTVIEAVVLEILSKRSIPQLKLTFFSYKHIYGHDYTKSIKRGKYGQFGKALKVVVKCICNPAHYYAKILYSSIKGETRDRRVLARTLVSRAEIDIDEIRRVFKEKYGKELADAICEGFPSGDYYRDFLVALATRSK

SEQ ID NO: 60351 - protein, 338 aa, Glycine max
  peptide (1)..(338): Ceres Seq. ID no. 14308469
  misc_feature (266)..(330): Pfam Name: Annexin Pfam Description: Annexin
  misc_feature (86)..(333): Homolog of NCBI NO: 13397835 NR Description: annexin A13 isoform b [Homo sapiens]
  misc_feature (84)..(333): Homolog of NCBI NO: 34868934 NR Description: hypothetical protein XP_346470 [Rattus norvegicus]
  misc_feature (84)..(333): Homolog of NCBI NO: 18426844 NR Description: annexin A7 [Rattus norvegicus]
  misc_feature (93)..(325): Homolog of NCBI NO: 3881978 NR Description: annexin-like protein [Medicago sativa]
  misc_feature (84)..(333): Homolog of NCBI NO: 4809279 NR Description: annexin VII isoform 2; annexin VII (synexin);
  misc_feature (84)..(333): Homolog of NCBI NO: 30584789 NR Description: Homo sapiens annexin A7 [synthetic construct]
  misc_feature (84)..(333): Homolog of NCBI NO: 4502111 NR Description: annexin VII isoform 1; annexin VII (synexin);
  misc_feature (84)..(333): Homolog of NCBI NO: 26346446 NR Description: unnamed protein product [Mus musculus]
  misc_feature (84)..(333): Homolog of NCBI NO: 346651 NR Description: annexin VII - mouse
  misc_feature (84)..(333): Homolog of NCBI NO: 6753062 NR Description: annexin A7; annexin VII [Mus musculus]
MANNILTMTNLNFELDCKRTHDSLGSLSQLTTSLACVTHHERQQLRETFKAVNGEDLISHLQRYEDAFYSPSSSSSSSSSSSSSSSSSSMNCSAISLWMLDTHDRDAVVAREALQQDETNFKALVEIFVGRKSSHVLLISQAYQKMFKRHLDQDIINLDPPHPFQKIIVALAASHKAHQADVNHHISKCDARRLYETGEGSLGTVIEAVVLEILSKRSIPQLKLTFFSYKHIYGHDYTKSIKRGKYGQFGKALKVVVKCICNPAHYYAKILYSSIKGETRDRRVLARTLVSRAEIDIDEIRRVFKEKYGKELADAICEGFPSGDYYRDFLVALATRSK

SEQ ID NO: 60352 - protein, 331 aa, Glycine max
  peptide (1)..(331): Ceres Seq. ID no. 14308470
  misc_feature (259)..(323): Pfam Name: Annexin Pfam Description: Annexin
  misc_feature (79)..(326): Homolog of NCBI NO: 13397835 NR Description: annexin A13 isoform b [Homo sapiens]
  misc_feature (77)..(326): Homolog of NCBI NO: 34868934 NR Description: hypothetical protein XP_346470 [Rattus norvegicus]
  misc_feature (77)..(326): Homolog of NCBI NO: 18426844 NR Description: annexin A7 [Rattus norvegicus]
  misc_feature (86)..(318): Homolog of NCBI NO: 3881978 NR Description: annexin-like protein [Medicago sativa]
  misc_feature (77)..(326): Homolog of NCBI NO: 4809279 NR Description: annexin VII isoform 2; annexin VII (synexin);
  misc_feature (77)..(326): Homolog of NCBI NO: 30584789 NR Description: Homo sapiens annexin A7 [synthetic construct]
  misc_feature (77)..(326): Homolog of NCBI NO: 4502111 NR Description: annexin VII isoform 1; annexin VII (synexin);
  misc_feature (77)..(326): Homolog of NCBI NO: 26346446 NR Description: unnamed protein product [Mus musculus]
  misc_feature (77)..(326): Homolog of NCBI NO: 346651 NR Description: annexin VII - mouse
  misc_feature (77)..(326): Homolog of NCBI NO: 6753062 NR Description: annexin A7; annexin VII [Mus musculus]
MTNLNFELDCKRTHDSLGSLSQLTTSLACVTHHERQQLRETFKAVNGEDLISHLQRYEDAFYSPSSSSSSSSSSSSSSSSSSMNCSAISLWMLDTHDRDAVVAREALQQDETNFKALVEIFVGRKSSHVLLISQAYQKMFKRHLDQDIINLDPPHPFQKIIVALAASHKAHQADVNHHISKCDARRLYETGEGSLGTVIEAVVLEILSKRSIPQLKLTFFSYKHIYGHDYTKSIKRGKYGQFGKALKVVVKCICNPAHYYAKILYSSIKGETRDRRVLARTLVSRAEIDIDEIRRVFKEKYGKELADAICEGFPSGDYYRDFLVALATRSK

SEQ ID NO: 60353 - DNA, 1411 bp, Glycine max
  misc_feature (1)..(1411): Ceres Seq. ID no. 13594180
aaaagcgtcgatttagcttcatccctagctactagctagcactttcacttccgttaatttaacagtagaccattaacttgaaaatttcaaaacaccgcatcaaaattttcttctgaaggcactaccgaagaatggctgtttttgcatcttcatcatctttacaaacccatttgcattcctcgctcttggcaccttcttttgaaggtgcacatgatcacaactcgtggtgggtgcgagcgagatcacagaaacgcattggtcaaagattacacacacaggacatagctagagggctgagaataaaagtccagagtgcagcaacaaaaccagcaaaatctccagctgaagaagattggaaggttaagcgagaatttctgcttcagaaaagggtaagaagtgtggaagtaaaggaagctctgcgccttcagaaagaaaacagttttgtattacttgatgtaagaccagaagcagagttcaaggaggcacatcctccaggtgcaatcaatgtgcaaatatataggctcataaaagagtggacagcatgggacattgcaagacgtgctgcatttttgttttttggtattttttctgggacagaagagaaccctgagttcatcaagaatgttgaagcaaaaatagataaagatgcaaagataatagtagcttgcacatcagggggtacattgagaccatcacaaaatttgcccgaaggtcaacaatcaaggtactaaattttctctctctcacccgaacatccggaatatatttatatagggctatttttatatgatactaagtggaagaaataaattttgatcctagatggataatctagattgaaggttaatatgacttttttgtttaatttctccattcatttaaatgtttaatgtttattgcagaccatactaataaattgttaatcattaaagtctgataatagtatctatcaatgtacatagagatgcaaaatcatggagtattgtaaagttgtataactgcttgatctaaactgcatcaattccatctacagaccgcaatttacaagtagctcttaaatctaaattattctgcaacagctaaaatacgccaccgcatttgtccatttgatattaccaagaatgtttactttcatgtcaaaagcttaaattgtcagtgaaaacacaactcttgacattaaacacatggaaacatgtcaaacctagaatatgaaccaaaacaccatctaaagccaaatgatatgaccaagagcgtttaccattatgttaaaaatttaagttgttaacagggacaaaatagttgagatataacactatgttctaaacataggcttttttctatttaagctattgggcatggaccactaaattgaacttgagttgggtttaagactgaaaaatatgaaatagat

SEQ ID NO: 60354 - protein, 199 aa, Glycine max
  peptide (1)..(199): Ceres Seq. ID no. 15221316
  misc_feature (91)..(198): Pfam Name: Rhodanese-like domain Pfam Description: Rhodanese-like domain
  misc_feature (57)..(198): Homolog of NCBI NO: 7487511 NR Description: hypothetical protein T29A15.190 - Arabidopsis
  misc_feature (57)..(198): Homolog of NCBI NO: 21553366 NR Description: unknown [Arabidopsis thaliana]
  misc_feature (57)..(198): Homolog of NCBI NO: 18417050 NR Description: rhodanese-like domain protein [Arabidopsis
MAVFASSSSLQTHLHSSLLAPSFEGAHDHNSWWVRARSQKRIGQRLHTQDIARGLRIKVQSAATKPAKSPAEEDWKVKREFLLQKRVRSVEVKEALRLQKENSFVLLDVRPEAEFKEAHPPGAINVQIYRLIKEWTAWDIARRAAFLFFGIFSGTEENPEFIKNVEAKIDKDAKIIVACTSGGTLRPSQNLPEGQQSRY

SEQ ID NO: 60355 - DNA, 1386 bp, Glycine max
  misc_feature (1)..(1386): Ceres Seq. ID no. 15177987
aatttcggtcgcaaaagtttctaataccacaaagtcgtcatttttaattggggaccgtattcgtagggttgctagtaaacttactggttcaccctctatggtgaagagttctggtgatcggtctcagaagaccgatggaagcgctgatggtttttctgggaatggacctgatttttcttttgaggaggctcagaggtcaaatatggttgccccaacagagtattcatctctggacgatttgctatcttcacttcgtttggtggctcaagaaccccttggagattacagcttcctgaatcctattgtaagcttcttctatgatttcaggaattcgatagttgtggctgatgattctgtaaaagatatattttgtaaagaaaaagttggtactaaaaggaagaaaccgctcacggctggattgcccgaaacatttgaatttgaggatatgagtgacacatattggacagacagggtcattgacaatggtagtgaagcacaaccagcgcaaccgtgtcaaccaccacaaccagcacggagaaaccggaaaaaagaccatcaacttgttcctactgagccagggaagcctgttcaagttagtcgtaggccatattccaggaaacagtattctaacaacaatcacattgaggctcctgcaaaacctcctggttatatagatgagaatgcccctgctgaacttgttatgaactttgctgagttgggttctgttccctcagaaacaaaccttaataaaatgtttaggcgttttggacctctaaaggaagcagagacagaagttgatacagtaagcagccgagcaagagtggtttttaaaaagtgtgttgatgcagaggttgcttgtagtagtgctcaaaagttcaacatatttggcccaatacttgtaaattaccagcttaattatactcctagtgcattgttcaaagcttcatctgttgccacaacacaggaccaggagatgcatcttgatctctccaattttgaggttaatataattgggagtgttgacgatgatgtggcggctaagtttggctgaatgaattgctgaagcaaaattttacctagtggctgctgaagtaggtaggtaaccagaatgttaattcatctggtcatccatttttctgttaagagatatttttggttgtaggattcctttagttgtagttctggtagttttgtaattcattttctagttttctgtatagccttgtcaactgaccctcttttgtagttgccatcattctccatccggatcattttgaattttctagtctgaacactggttctatatcaagatctttcgaattctctagtctgaacactggttctgtatcaaaatcaatagtcattcggcaattatagttaacaaag

SEQ ID NO: 60356 - protein, 349 aa, Glycine max
  peptide (1)..(349): Ceres Seq. ID no. 15177988
  misc_feature (215)..(308): Homolog of NCBI NO: 34394029 NR Description: PWWP domain protein-like [Oryza sativa (japonica
  misc_feature (225)..(306): Homolog of NCBI NO: 15242573 NR Description: PWWP domain protein [Arabidopsis thaliana]
  misc_feature (1)..(41): Homolog of NCBI NO: 15232577 NR Description: Putative protein [Arabidopsis thaliana]
  misc_feature (73)..(324): Homolog of NCBI NO: 15232577 NR Description: Putative protein [Arabidopsis thaliana]
ISVAKVSNTTKSSFLIGDRIRRVASKLTGSPSMVKSSGDRSQKTDGSADGFSGNGPDFSFEEAQRSNMVAPTEYSSLDDLLSSLRLVAQEPLGDYSFLNPIVSFFYDFRNSIVVADDSVKDIFCKEKVGTKRKKPLTAGLPETFEFEDMSDTYWTDRVIDNGSEAQPAQPCQPPQPARRNRKKDHQLVPTEPGKPVQVSRRPYSRKQYSNNNHIEAPAKPPGYIDENAPAELVMNFAELGSVPSETNLNKMFRRFGPLKEAETEVDTVSSRARVVFKKCVDAEVACSSAQKFNIFGPILVNYQLNYTPSALFKASSVATTQDQEMHLDLSNFEVNIIGSVDDDVAAKFG

SEQ ID NO: 60357 - protein, 317 aa, Glycine max
  peptide (1)..(317): Ceres Seq. ID no. 15177989
  misc_feature (183)..(276): Homolog of NCBI NO: 34394029 NR Description: PWWP domain protein-like [Oryza sativa (japonica
  misc_feature (193)..(274): Homolog of NCBI NO: 15242573 NR Description: PWWP domain protein [Arabidopsis thaliana]
  misc_feature (41)..(292): Homolog of NCBI NO: 15232577 NR Description: Putative protein [Arabidopsis thaliana]
MVKSSGDRSQKTDGSADGFSGNGPDFSFEEAQRSNMVAPTEYSSLDDLLSSLRLVAQEPLGDYSFLNPIVSFFYDFRNSIVVADDSVKDIFCKEKVGTKRKKPLTAGLPETFEFEDMSDTYWTDRVIDNGSEAQPAQPCQPPQPARRNRKKDHQLVPTEPGKPVQVSRRPYSRKQYSNNNHIEAPAKPPGYIDENAPAELVMNFAELGSVPSETNLNKMFRRFGPLKEAETEVDTVSSRARVVFKKCVDAEVACSSAQKFNIFGPILVNYQLNYTPSALFKASSVATTQDQEMHLDLSNFEVNIIGSVDDDVAAKFG

SEQ ID NO: 60358 - protein, 282 aa, Glycine max
  peptide (1)..(282): Ceres Seq. ID no. 15177990
  misc_feature (148)..(241): Homolog of NCBI NO: 34394029 NR Description: PWWP domain protein-like [Oryza sativa (japonica
  misc_feature (158)..(239): Homolog of NCBI NO: 15242573 NR Description: PWWP domain protein [Arabidopsis thaliana]
  misc_feature (6)..(257): Homolog of NCBI NO: 15232577 NR Description: Putative protein [Arabidopsis thaliana]
MVAPTEYSSLDDLLSSLRLVAQEPLGDYSFLNPIVSFFYDFRNSIVVADDSVKDIFCKEKVGTKRKKPLTAGLPETFEFEDMSDTYWTDRVIDNGSEAQPAQPCQPPQPARRNRKKDHQLVPTEPGKPVQVSRRPYSRKQYSNNNHIEAPAKPPGYIDENAPAELVMNFAELGSVPSETNLNKMFRRFGPLKEAETEVDTVSSRARVVFKKCVDAEVACSSAQKFNIFGPILVNYQLNYTPSALFKASSVATTQDQEMHLDLSNFEVNIIGSVDDDVAAKFG

SEQ ID NO: 60359 - DNA, 2182 bp, Glycine max
  misc_feature (1)..(2182): Ceres Seq. ID no. 13594171
acatctaactaccctccttcaaaactcatctcgaaaccctaagcactcgctcgggttcgtgtagtgccaaaccctagggctcattttccagatctattcagtttttctctcctctcttttccgatccaccgttggagatcgaagatggtgtccgacgccagcaagaagaaggccgcacagaagaaggccgccgccgccgccaagagaggtggcaaagctgccgccgctgccgttatggccgccacctcttccaaagccgccgacaaggtcgccaacggaatcgccgatattcagatttcggatcggacctgcaccggcgtcctctgttcgcatcctctctccagagatattcgaatagagtctctatccgtcacattccatggacatgatctcattgttgattctgaattggagctgaattatggaaggcgttatggcttactcggattaaatggttgtggaaaatctacactgcttacagccatcggttgtcgggaacttccaattcccgaccacatggacatatatcatctaaccagggagattgatgcctctgatatgtctgcattggaagctgtcataagctgtgacgaagaaagattgaaattggagaaagaagcagaagctttagctgcacaggatgatggaggtggtgaatcccttgaacgcatttatgaacgattggatgccctagatgcagccactgcagaaaagcgtgctgctgaaatcttacatggtcttggctttgacaagcaaatgcaggcaaagaagacacgtgatttttccggtggctggagaatgaggattgcattagcgcgagctctatttatgaacccaaccattcttctacttgatgaaccaaccaatcaccttgatttggaagcttgtgtgtggctggaggagagtttgaagaagtttgaacgtattctggttgtgatttcacactctcaggactttcttaatggtgtctgcacaaatattatccacatgcaaagcaaaaaactgaagctctacactggtaattatgatcaatatgttcagacacgttctgagctagaagagaaccagatgaaacagtacaagtgggagcaggagcagattgcctcaatgaaggaatacattgcccgatttggccatggttcggctaaactagctcgccaggcacagagtaaggagaaaacactggcaaaaatggaacgtggtggacttgcagagaaggtggtcagagacaaagttttggtatttcgttttactgatgttgggaaacttccccctccagttctccagtttgttgaggtgtcatttggttatactcctgataatctcatctacaagaacattgactttggggttgatttagattctcgggttgcgctggttgggcccaatggtgctgggaagagtacactactgaagctaatgacaggtgacttgatgcctagtgatggcatggtccgacgtcataatcatcttcgaattgcacaatatcaccagcatttggccgaaaagctagacatggaaatgtctgctctccagtttatgattaaagaataccctggaaacgaggaagagaagatgagggcggcgattgggaagtttgggctgtcaggtaaagcgcaggtgatgccaatgaagaacttgtcagatggacagaggagccgagttatatttgcttggttagcttggagacagcctcagatgcttcttttggatgagccaactaatcatttggatattgagacaattgactcgttggccgaggcattgaatgaatgggacggtggcttggtgcttgtcagccatgattttaggctcataaatcaggtggcgcatgagatatgggtatgtgctaatcaatctgtgaccagatgggagggtgacattatggaattcaaggcgcatctaaagtcgaaggcgggtttatctgactgaaacaatacgagtgtggatgctgccggtgtgtagtagtattacattaaaaggttatgatttttgttcgagcagagatccgtaataattttttttagttactatttcttgtgcttatcatttatttgcctggttgttaacaagcgtggatgaatgggatttcaccttgaggaaacgaagcttattctacaaatgaactatttcaaccgagaatattattatttgtggtattataattacgttaattcctctc

SEQ ID NO: 60360 - protein, 595 aa, Glycine max
  peptide (1)..(595): Ceres Seq. ID no. 15221313
  misc_feature (94)..(285): Pfam Name: ABC transporter Pfam Description: ABC transporter
  misc_feature (34)..(590): Homolog of NCBI NO: 23956078 NR Description: ATP-binding cassette, sub-family F (GCN20),
  misc_feature (34)..(590): Homolog of NCBI NO: 27707592 NR Description: similar to ATP-binding cassette, sub-family F,
  misc_feature (1)..(590): Homolog of NCBI NO: 28502799 NR Description: Similar to ATP-binding cassette, sub-family F
  misc_feature (1)..(590): Homolog of NCBI NO: 27881506 NR Description: ATP-binding cassette, sub-family F, member 2
  misc_feature (1)..(590): Homolog of NCBI NO: 10947137 NR Description: ATP-binding cassette, sub-family F, member 2
  misc_feature (1)..(590): Homolog of NCBI NO: 10179834 NR Description: iron inhibited ABC transporter 2 [Homo sapiens]
  misc_feature (1)..(592): Homolog of NCBI NO: 28436765 NR Description: Similar to ATP-binding cassette, sub-family F
  misc_feature (1)..(546): Homolog of NCBI NO: 7573600 NR Description: ABC transporter homolog [Populus nigra]
  misc_feature (1)..(595): Homolog of NCBI NO: 15239436 NR Description: ABC transporter family protein [Arabidopsis
  misc_feature (1)..(595): Homolog of NCBI NO: 28071305 NR Description: putative ABC transporter [Oryza sativa (japonica
MVSDASKKKAAQKKAAAAAKRGGKAAAAAVMAATSSKAADKVANGIADIQISDRTCTGVLCSHPLSRDIRIESLSVTFHGHDLIVDSELELNYGRRYGLLGLNGCGKSTLLTAIGCRELPIPDHMDIYHLTREIDASDMSALEAVISCDEERLKLEKEAEALAAQDDGGGESLERIYERLDALDAATAEKRAAEILHGLGFDKQMQAKKTRDFSGGWRMRIALARALFMNPTILLLDEPTNHLDLEACVWLEESLKKFERILVVISHSQDFLNGVCTNIIHMQSKKLKLYTGNYDQYVQTRSELEENQMKQYKWEQEQIASMKEYIARFGHGSAKLARQAQSKEKTLAKMERGGLAEKVVRDKVLVFRFTDVGKLPPPVLQFVEVSFGYTPDNLIYKNIDFGVDLDSRVALVGPNGAGKSTLLKLMTGDLMPSDGMVRRHNHLRIAQYHQHLAEKLDMEMSALQFMIKEYPGNEEEKMRAAIGKFGLSGKAQVMPMKNLSDGQRSRVIFAWLAWRQPQMLLLDEPTNHLDIETIDSLAEALNEWDGGLVLVSHDFRLINQVAHEIWVCANQSVTRWEGDIMEFKAHLKSKAGLSD

SEQ ID NO: 60361 - protein, 565 aa, Glycine max
  peptide (1)..(565): Ceres Seq. ID no. 15221314
  misc_feature (64)..(255): Pfam Name: ABC transporter Pfam Description: ABC transporter
  misc_feature (4)..(560): Homolog of NCBI NO: 23956078 NR Description: ATP-binding cassette, sub-family F (GCN20),
  misc_feature (4)..(560): Homolog of NCBI NO: 27707592 NR Description: similar to ATP-binding cassette, sub-family F,
  misc_feature (1)..(560): Homolog of NCBI NO: 28502799 NR Description: Similar to ATP-binding cassette, sub-family F
  misc_feature (1)..(560): Homolog of NCBI NO: 27881506 NR Description: ATP-binding cassette, sub-family F, member 2
  misc_feature (1)..(560): Homolog of NCBI NO: 10947137 NR Description: ATP-binding cassette, sub-family F, member 2
  misc_feature (1)..(560): Homolog of NCBI NO: 10179834 NR Description: iron inhibited ABC transporter 2 [Homo sapiens]
  misc_feature (1)..(562): Homolog of NCBI NO: 28436765 NR Description: Similar to ATP-binding cassette, sub-family F
  misc_feature (1)..(516): Homolog of NCBI NO: 7573600 NR Description: ABC transporter homolog [Populus nigra]
  misc_feature (1)..(565): Homolog of NCBI NO: 15239436 NR Description: ABC transporter family protein [Arabidopsis
  misc_feature (1)..(565): Homolog of NCBI NO: 28071305 NR Description: putative ABC transporter [Oryza sativa (japonica
MAATSSKAADKVANGIADIQISDRTCTGVLCSHPLSRDIRIESLSVTFHGHDLIVDSELELNYGRRYGLLGLNGCGKSTLLTAIGCRELPIPDHMDIYHLTREIDASDMSALEAVISCDEERLKLEKEAEALAAQDDGGGESLERIYERLDALDAATAEKRAAEILHGLGFDKQMQAKKTRDFSGGWRMRIALARALFMNPTILLLDEPTNHLDLEACVWLEESLKKFERILVVISHSQDFLNGVCTNIIHMQSKKLKLYTGNYDQYVQTRSELEENQMKQYKWEQEQIASMKEYIARFGHGSAKLARQAQSKEKTLAKMERGGLAEKVVRDKVLVFRFTDVGKLPPPVLQFVEVSFGYTPDNLIYKNIDFGVDLDSRVALVGPNGAGKSTLLKLMTGDLMPSDGMVRRHNHLRIAQYHQHLAEKLDMEMSALQFMIKEYPGNEEEKMRAAIGKFGLSGKAQVMPMKNLSDGQRSRVIFAWLAWRQPQMLLLDEPTNHLDIETIDSLAEALNEWDGGLVLVSHDFRLINQVAHEIWVCANQSVTRWEGDIMEFKAHLKSKAGLSD

SEQ ID NO: 60362 - protein, 471 aa, Glycine max
  peptide (1)..(471): Ceres Seq. ID no. 15221315
  misc_feature (1)..(161): Pfam Name: ABC transporter Pfam Description: ABC transporter
  misc_feature (1)..(466): Homolog of NCBI NO: 23956078 NR Description: ATP-binding cassette, sub-family F (GCN20),
  misc_feature (1)..(466): Homolog of NCBI NO: 27707592 NR Description: similar to ATP-binding cassette, sub-family F,
  misc_feature (1)..(466): Homolog of NCBI NO: 28502799 NR Description: Similar to ATP-binding cassette, sub-family F
  misc_feature (1)..(466): Homolog of NCBI NO: 27881506 NR Description: ATP-binding cassette, sub-family F, member 2
  misc_feature (1)..(466): Homolog of NCBI NO: 10947137 NR Description: ATP-binding cassette, sub-family F, member 2
  misc_feature (1)..(466): Homolog of NCBI NO: 10179834 NR Description: iron inhibited ABC transporter 2 [Homo sapiens]
  misc_feature (1)..(468): Homolog of NCBI NO: 28436765 NR Description: Similar to ATP-binding cassette, sub-family F
  misc_feature (1)..(422): Homolog of NCBI NO: 7573600 NR Description: ABC transporter homolog [Populus nigra]
  misc_feature (1)..(471): Homolog of NCBI NO: 15239436 NR Description: ABC transporter family protein [Arabidopsis
  misc_feature (1)..(471): Homolog of NCBI NO: 28071305 NR Description: putative ABC transporter [Oryza sativa (japonica
MDIYHLTREIDASDMSALEAVISCDEERLKLEKEAEALAAQDDGGGESLERIYERLDALDAATAEKRAAEILHGLGFDKQMQAKKTRDFSGGWRMRIALARALFMNPTILLLDEPTNHLDLEACVWLEESLKKFERILVVISHSQDFLNGVCTNIIHMQSKKLKLYTGNYDQYVQTRSELEENQMKQYKWEQEQIASMKEYIARFGHGSAKLARQAQSKEKTLAKMERGGLAEKVVRDKVLVFRFTDVGKLPPPVLQFVEVSFGYTPDNLIYKNIDFGVDLDSRVALVGPNGAGKSTLLKLMTGDLMPSDGMVRRHNHLRIAQYHQHLAEKLDMEMSALQFMIKEYPGNEEEKMRAAIGKFGLSGKAQVMPMKNLSDGQRSRVIFAWLAWRQPQMLLLDEPTNHLDIETIDSLAEALNEWDGGLVLVSHDFRLINQVAHEIWVCANQSVTRWEGDIMEFKAHLKSKAGLSD

SEQ ID NO: 60363 - DNA, 1817 bp, Glycine max
  misc_feature (1)..(1817): Ceres Seq. ID no. 14308221
agtcacaacacacacacacatagcaatggcatctatggcggctataggttctctcaatgttccacgttctgcttcttcccgttcatcctttgtgggaagaaaaagcgttccacgcagcctttccttctctgcatcacaactttgtggagacaagattcccacagattcagttttattggcaccaaaaataggtcgcagtccagttatcgttactcctaaagcagtttctgattcccaaaactcacaaacgtgccttgatcccgatgctagcagaagtgtgcttggcattatacttggaggtggtgctgggactcggctttatccactcaccaagaagagggcaaagccagctgttcctcttggagctaactataggcttattgatattcctgttagcaactgcttgaatagcaatgtctccaagatctatgttctcactcaattcaattctgcgtcgttaaaccgacacctttctcgtgcttatgcaagcaacatgggtggctacaaaaatgagggatttgttgaggttcttgctgctcagcagagtcctgagaatcctaattggttccagggtactgcagatgctgtgaggcagtatttgtggctttttgaagagcacaatgttttggaattcttggttctggctggtgaccatttgtatcgaatggattacgagaaatttatccaagcgcatagggaaactgatgctgatatcactgtggctgcattgccaatggatgaagcgcgtgccactgcatttggtttgatgaagattgatgaagaggggcgtataattgaatttgctgaaaagccaaaaggagaacagttgaaagctatgaaggttgatactacaattttgggtcttgatgacgagagagcaaaagaaatgccttatattgctagcatgggtatatatgttgttagcaaaaatgtgatgttagacctgctccgtgagaagtttcctggtgcaaatgactttgggagtgaagtgattcctggtgctacttctattggaatgagagtgcaagcttacttgtatgatggctactgggaagacattggtacaatcgaggctttctataatgcaaatctgggaatcaccaaaaagcctgtgcctgacttcagtttctatgatcgttcatctccaatctacacccaaccacgatatttgcctccctctaagatgcttgatgctgatgtcactgatagtgttattggtgaaggatgtgtgactaagaactgcaaaattcaccattctgtggttgggctgcgatcttgcatatcagaaggtgcaattattgaagacacgttattaatgggggcagattattacgagacggaggctgataagaggtttctggctgccaaaggcagtgttccaattggtataggcaggaactctcatatcaaaagggcaattattgacaagaatgctcgaattggggaaaatgtcaagattattaacagtgacaatgtccaagaagctgcaagggaaacagatgggtatttcataaaaagtgggattgtcacagtaatcaaggatgctttaattcctagtggaacagtcatctaaacacaaccacctccccaaaaaatttcttgtaccccaaatcctaatggtgactgcgaagctcattaccaccgcaggagagtttatcaagctctgcttccacgtctaagataggcttttgtgtttcatgatatatatttttgggcagtggcttgtaaataatagcggaagagaaggcccgctatgagcaatcacgctgtaaagttcgttaatcaattcaataaaacaagtttctttatttcgtacc

SEQ ID NO: 60364 - protein, 523 aa, Glycine max
  peptide (1)..(523): Ceres Seq. ID no. 14308222
  misc_feature (94)..(369): Pfam Name: Nucleotidyl transferase Pfam Description: Nucleotidyl transferase
  misc_feature (10)..(523): Homolog of NCBI NO: 7434871 NR Description: glucose-1-phosphate adenylyltransferase (EC
  misc_feature (9)..(523): Homolog of NCBI NO: 13487709 NR Description: ADP-glucose pyrophosphorylase small subunit
  misc_feature (9)..(523): Homolog of NCBI NO: 1707943 NR Description: Glucose-1-phosphate adenylyltransferase small
  misc_feature (20)..(523): Homolog of NCBI NO: 16950559 NR Description: ADP-glucose pyrophosphorylase small subunit
  misc_feature (9)..(523): Homolog of NCBI NO: 1237082 NR Description: ADP-glucose pyrophosphorylase [Pisum sativum]
  misc_feature (12)..(523): Homolog of NCBI NO: 1707944 NR Description: Glucose-1-phosphate adenylyltransferase small
  misc_feature (9)..(523): Homolog of NCBI NO: 17865468 NR Description: Glucose-1-phosphate adenylyltransferase small chloroplast precursor (ADP-glucose synthase) (ADP-glucose
  misc_feature (9)..(523): Homolog of NCBI NO: 13487787 NR Description: ADP-glucose pyrophosphorylase small subunit
  misc_feature (9)..(523): Homolog of NCBI NO: 1237080 NR Description: ADP-glucose pyrophosphorylase [Pisum sativum]
  misc_feature (9)..(523): Homolog of NCBI NO: 29421116 NR Description: ADP-glucose pyrophosphorylase small subunit
VTTHTHIAMASMAAIGSLNVPRSASSRSSFVGRKSVPRSLSFSASQLCGDKIPTDSVLLAPKIGRSPVIVTPKAVSDSQNSQTCLDPDASRSVLGIILGGGAGTRLYPLTKKRAKPAVPLGANYRLIDIPVSNCLNSNVSKIYVLTQFNSASLNRHLSRAYASNMGGYKNEGFVEVLAAQQSPENPNWFQGTADAVRQYLWLFEEHNVLEFLVLAGDHLYRMDYEKFIQAHRETDADITVAALPMDEARATAFGLMKIDEEGRIIEFAEKPKGEQLKAMKVDTTILGLDDERAKEMPYIASMGIYVVSKNVMLDLLREKFPGANDFGSEVIPGATSIGMRVQAYLYDGYWEDIGTIEAFYNANLGITKKPVPDFSFYDRSSPIYTQPRYLPPSKMLDADVTDSVIGEGCVTKNCKIHHSVVGLRSCISEGAIIEDTLLMGADYYETEADKRFLAAKGSVPIGIGRNSHIKRAIIDKNARIGENVKIINSDNVQEAARETDGYFIKSGIVTVIKDALIPSGTVI

SEQ ID NO: 60365 - protein, 515 aa, Glycine max
  peptide (1)..(515): Ceres Seq. ID no. 14308223
  misc_feature (86)..(361): Pfam Name: Nucleotidyl transferase Pfam Description: Nucleotidyl transferase
  misc_feature (2)..(515): Homolog of NCBI NO: 7434871 NR Description: glucose-1-phosphate adenylyltransferase (EC
  misc_feature (1)..(515): Homolog of NCBI NO: 13487709 NR Description: ADP-glucose pyrophosphorylase small subunit
  misc_feature (1)..(515): Homolog of NCBI NO: 1707943 NR Description: Glucose-1-phosphate adenylyltransferase small
  misc_feature (12)..(515): Homolog of NCBI NO: 16950559 NR Description: ADP-glucose pyrophosphorylase small subunit
  misc_feature (1)..(515): Homolog of NCBI NO: 1237082 NR Description: ADP-glucose pyrophosphorylase [Pisum sativum]
  misc_feature (4)..(515): Homolog of NCBI NO: 1707944 NR Description: Glucose-1-phosphate adenylyltransferase small
  misc_feature (1)..(515): Homolog of NCBI NO: 17865468 NR Description: Glucose-1-phosphate adenylyltransferase small chloroplast precursor (ADP-glucose synthase) (ADP-glucose
  misc_feature (1)..(515): Homolog of NCBI NO: 13487787 NR Description: ADP-glucose pyrophosphorylase small subunit
  misc_feature (1)..(515): Homolog of NCBI NO: 1237080 NR Description: ADP-glucose pyrophosphorylase [Pisum sativum]
  misc_feature (1)..(515): Homolog of NCBI NO: 29421116 NR Description: ADP-glucose pyrophosphorylase small subunit
MASMAAIGSLNVPRSASSRSSFVGRKSVPRSLSFSASQLCGDKIPTDSVLLAPKIGRSPVIVTPKAVSDSQNSQTCLDPDASRSVLGIILGGGAGTRLYPLTKKRAKPAVPLGANYRLIDIPVSNCLNSNVSKIYVLTQFNSASLNRHLSRAYASNMGGYKNEGFVEVLAAQQSPENPNWFQGTADAVRQYLWLFEEHNVLEFLVLAGDHLYRMDYEKFIQAHRETDADITVAALPMDEARATAFGLMKIDEEGRIIEFAEKPKGEQLKAMKVDTTILGLDDERAKEMPYIASMGIYVVSKNVMLDLLREKFPGANDFGSEVIPGATSIGMRVQAYLYDGYWEDIGTIEAFYNANLGITKKPVPDFSFYDRSSPIYTQPRYLPPSKMLDADVTDSVIGEGCVTKNCKIHHSVVGLRSCISEGAIIEDTLLMGADYYETEADKRFLAAKGSVPIGIGRNSHIKRAIIDKNARIGENVKIINSDNVQEAARETDGYFIKSGIVTVIKDALIPSGTVI

SEQ ID NO: 60366 - protein, 512 aa, Glycine max
  peptide (1)..(512): Ceres Seq. ID no. 14308224
  misc_feature (83)..(358): Pfam Name: Nucleotidyl transferase Pfam Description: Nucleotidyl transferase
  misc_feature (1)..(512): Homolog of NCBI NO: 7434871 NR Description: glucose-1-phosphate adenylyltransferase (EC
  misc_feature (1)..(512): Homolog of NCBI NO: 13487709 NR Description: ADP-glucose pyrophosphorylase small subunit
  misc_feature (1)..(512): Homolog of NCBI NO: 1707943 NR Description: Glucose-1-phosphate adenylyltransferase small
  misc_feature (9)..(512): Homolog of NCBI NO: 16950559 NR Description: ADP-glucose pyrophosphorylase small subunit
  misc_feature (1)..(512): Homolog of NCBI NO: 1237082 NR Description: ADP-glucose pyrophosphorylase [Pisum sativum]
  misc_feature (1)..(512): Homolog of NCBI NO: 1707944 NR Description: Glucose-1-phosphate adenylyltransferase small
  misc_feature (1)..(512): Homolog of NCBI NO: 17865468 NR Description: Glucose-1-phosphate adenylyltransferase small chloroplast precursor (ADP-glucose synthase) (ADP-glucose
  misc_feature (1)..(512): Homolog of NCBI NO: 13487787 NR Description: ADP-glucose pyrophosphorylase small subunit
  misc_feature (1)..(512): Homolog of NCBI NO: 1237080 NR Description: ADP-glucose pyrophosphorylase [Pisum sativum]
  misc_feature (1)..(512): Homolog of NCBI NO: 29421116 NR Description: ADP-glucose pyrophosphorylase small subunit
MAAIGSLNVPRSASSRSSFVGRKSVPRSLSFSASQLCGDKIPTDSVLLAPKIGRSPVIVTPKAVSDSQNSQTCLDPDASRSVLGIILGGGAGTRLYPLTKKRAKPAVPLGANYRLIDIPVSNCLNSNVSKIYVLTQFNSASLNRHLSRAYASNMGGYKNEGFVEVLAAQQSPENPNWFQGTADAVRQYLWLFEEHNVLEFLVLAGDHLYRMDYEKFIQAHRETDADITVAALPMDEARATAFGLMKIDEEGRIIEFAEKPKGEQLKAMKVDTTILGLDDERAKEMPYIASMGIYVVSKNVMLDLLREKFPGANDFGSEVIPGATSIGMRVQAYLYDGYWEDIGTIEAFYNANLGITKKPVPDFSFYDRSSPIYTQPRYLPPSKMLDADVTDSVIGEGCVTKNCKIHHSVVGLRSCISEGAIIEDTLLMGADYYETEADKRFLAAKGSVPIGIGRNSHIKRAIIDKNARIGENVKIINSDNVQEAARETDGYFIKSGIVTVIKDALIPSGTVI

SEQ ID NO: 60367 - DNA, 1234 bp, Glycine max
  misc_feature (1)..(1234): Ceres Seq. ID no. 15177588
gaaagggatgataattgggctagtggagtgacagagagaaaccggagcagagcagagaagagaaacaaaaggtggggtcagtggaaattatcatcatacaatttcacttaacccttcaagctcaagacagcacagcaatcacatcgcatgtcccttatatatatacttattcattgcctctgaaccttatcaaaacacttctcaatctctctctctccaatggccaaagacctcgaaacggagattcaaagtgggttgcctcacaaggactaccacgacccaccccccgccccattctacgaccccgccgagctccgaaagtggtccttcttccgagccctcatcgccgagttcgtcgccaccctcctcttcctctacgtcaccatcctcaccgtcatcggctacaaccaccagacagccaccgccgccgagccctgcagcggcgtcggcgtcctcggcatcgcttgggcctttggaggcatgatttttgtcctcgtctattgcaccgccggcatatcagggggacacataaacccggcggtgacgttcgggttgtttttggcgaggaaggtgtcgctgacaagagctgttgggtacatggtggctcaggtgttgggggccataagtggggtggggcttgtgaaggctttgcagaagagctactacaacaggtacaaaggtggcgtgaacatgctcgctgatggttacagcaaaggaaccggtttgggcgctgagattattggcacctttattcttgtctacaccgtcttctctgctaccgatcccaagagagtagcaagagactcccatgttcccgtgttggcaccacttccaattgggtttgcggtgttcatggttcacttggccaccatccctatcaccggcactggcatcaacccagctagaagccttgggcctgctgtcatattcaacaacgagaaggcttgggatgaccagtggatcttctgggttggacccttcatcggtgctgctcttgctgcattctaccaccagtccgtgttgatggcccaagcagcaaaggctctagggtctttcaggagctcctcaaacctgtaattctggccaagctatttgagctacgagagacatgcttcatttaattgtgttcttaattaatttgcttatacatggtggattggaataatctgtatatcctcgtcactatgtttatttaatttatgtttactatatttgtggtgacgtccatctcaac

SEQ ID NO: 60368 - protein, 285 aa, Glycine max
  peptide (1)..(285): Ceres Seq. ID no. 15177589
  misc_feature (31)..(264): Pfam Name: Major intrinsic protein Pfam Description: Major intrinsic protein
  misc_feature (1)..(283): Homolog of NCBI NO: 7441275 NR Description: mipC protein - common ice plant
  misc_feature (1)..(283): Homolog of NCBI NO: 13486938 NR Description: plasma membrane intrinsic protein 2-1 [Pyrus
  misc_feature (1)..(285): Homolog of NCBI NO: 5081421 NR Description: plasma membrane intrinsic protein 1 [Brassica
  misc_feature (1)..(284): Homolog of NCBI NO: 17940746 NR Description: aquaporin-like protein [Petunia x hybrida]
  misc_feature (1)..(285): Homolog of NCBI NO: 28395418 NR Description: plasma intrinsic protein 2,1 [Juglans regia]
  misc_feature (1)..(285): Homolog of NCBI NO: 13486942 NR Description: plasma membrane intrinsic protein 2-2 [Pyrus
  misc_feature (1)..(285): Homolog of NCBI NO: 28395420 NR Description: plasma intrinsic protein 2,2 [Juglans regia]
  misc_feature (1)..(285): Homolog of NCBI NO: 3158476 NR Description: aquaporin 2 [Samanea saman]
  misc_feature (1)..(284): Homolog of NCBI NO: 12006845 NR Description: putative PIP2 [Nicotiana glauca]
  misc_feature (1)..(282): Homolog of NCBI NO: 8071620 NR Description: putative aquaporin PIP2-1 [Vitis berlandieri x
MAKDLETEIQSGLPHKDYHDPPPAPFYDPAELRKWSFFRALIAEFVATLLFLYVTILTVIGYNHQTATAAEPCSGVGVLGIAWAFGGMIFVLVYCTAGISGGHINPAVTFGLFLARKVSLTRAVGYMVAQVLGAISGVGLVKALQKSYYNRYKGGVNMLADGYSKGTGLGAEIIGTFILVYTVFSATDPKRVARDSHVPVLAPLPIGFAVFMVHLATIPITGTGINPARSLGPAVIFNNEKAWDDQWIFWVGPFIGAALAAFYHQSVLMAQAAKALGSFRSSSNL

SEQ ID NO: 60369 - protein, 198 aa, Glycine max
  peptide (1)..(198): Ceres Seq. ID no. 15177590
  misc_feature (1)..(177): Pfam Name: Major intrinsic protein Pfam Description: Major intrinsic protein
  misc_feature (1)..(196): Homolog of NCBI NO: 7441275 NR Description: mipC protein - common ice plant
  misc_feature (1)..(196): Homolog of NCBI NO: 13486938 NR Description: plasma membrane intrinsic protein 2-1 [Pyrus
  misc_feature (1)..(198): Homolog of NCBI NO: 5081421 NR Description: plasma membrane intrinsic protein 1 [Brassica
  misc_feature (1)..(197): Homolog of NCBI NO: 17940746 NR Description: aquaporin-like protein [Petunia x hybrida]
  misc_feature (1)..(198): Homolog of NCBI NO: 28395418 NR Description: plasma intrinsic protein 2,1 [Juglans regia]
  misc_feature (1)..(198): Homolog of NCBI NO: 13486942 NR Description: plasma membrane intrinsic protein 2-2 [Pyrus
  misc_feature (1)..(198): Homolog of NCBI NO: 28395420 NR Description: plasma intrinsic protein 2,2 [Juglans regia]
  misc_feature (1)..(198): Homolog of NCBI NO: 3158476 NR Description: aquaporin 2 [Samanea saman]
  misc_feature (1)..(197): Homolog of NCBI NO: 12006845 NR Description: putative PIP2 [Nicotiana glauca]
  misc_feature (1)..(195): Homolog of NCBI NO: 8071620 NR Description: putative aquaporin PIP2-1 [Vitis berlandieri x
MIFVLVYCTAGISGGHINPAVTFGLFLARKVSLTRAVGYMVAQVLGAISGVGLVKALQKSYYNRYKGGVNMLADGYSKGTGLGAEIIGTFILVYTVFSATDPKRVARDSHVPVLAPLPIGFAVFMVHLATIPITGTGINPARSLGPAVIFNNEKAWDDQWIFWVGPFIGAALAAFYHQSVLMAQAAKALGSFRSSSNL

SEQ ID NO: 60370 - protein, 159 aa, Glycine max
  peptide (1)..(159): Ceres Seq. ID no. 15177591
  misc_feature (1)..(138): Pfam Name: Major intrinsic protein Pfam Description: Major intrinsic protein
  misc_feature (1)..(157): Homolog of NCBI NO: 7441275 NR Description: mipC protein - common ice plant
  misc_feature (1)..(157): Homolog of NCBI NO: 13486938 NR Description: plasma membrane intrinsic protein 2-1 [Pyrus
  misc_feature (1)..(159): Homolog of NCBI NO: 5081421 NR Description: plasma membrane intrinsic protein 1 [Brassica
  misc_feature (1)..(158): Homolog of NCBI NO: 17940746 NR Description: aquaporin-like protein [Petunia x hybrida]
  misc_feature (1)..(159): Homolog of NCBI NO: 28395418 NR Description: plasma intrinsic protein 2,1 [Juglans regia]
  misc_feature (1)..(159): Homolog of NCBI NO: 13486942 NR Description: plasma membrane intrinsic protein 2-2 [Pyrus
  misc_feature (1)..(159): Homolog of NCBI NO: 28395420 NR Description: plasma intrinsic protein 2,2 [Juglans regia]
  misc_feature (1)..(159): Homolog of NCBI NO: 3158476 NR Description: aquaporin 2 [Samanea saman]
  misc_feature (1)..(158): Homolog of NCBI NO: 12006845 NR Description: putative PIP2 [Nicotiana glauca]
  misc_feature (1)..(156): Homolog of NCBI NO: 8071620 NR Description: putative aquaporin PIP2-1 [Vitis berlandieri x
MVAQVLGAISGVGLVKALQKSYYNRYKGGVNMLADGYSKGTGLGAEIIGTFILVYTVFSATDPKRVARDSHVPVLAPLPIGFAVFMVHLATIPITGTGINPARSLGPAVIFNNEKAWDDQWIFWVGPFIGAALAAFYHQSVLMAQAAKALGSFRSSSNL

SEQ ID NO: 60371 - DNA, 1317 bp, Glycine max
  misc_feature (1)..(1317): Ceres Seq. ID no. 14311993
gttttaaaaatgttcatattccgttcttcacttttggacatgtataaaaaaatacattacaccttttgatgaggtagtaattctctaggagaaagaaataaagaagtagctttttggagggttgacatggaagaacggtatgagccattgaaggagcttggtgctgggaattttggtgtggcaaggttggcaaaagacaagaaaactggagagcttgttgcggtcaaatacatagagaggggcaaaaagattgatgagaatgttcagagggagataattaaccaccgatctttaaggcatccaaatataatcaggtttaaagaggtgttactgacccctacacatttagctatcgtcttggagtatgcttcaggtggtgaactttttgagaggatttgtactgctggtcgatttagcgaagatgaggcaagatatttcttccagcagctaatatctggggttagctactgtcattcaatggaaatttgtcatagagatctaaaattggaaaacactctcttggatggaaatccatctcctcggcttaaaatttgtgactttggttattccaagtctgctctactgcactctcaacctaaatcaacagttggaactcctgcatacattgctccggaggttctgtcgcgaaaggagtatgatggaaagatttcagatgtttggtcctgtggagtgactctttatgtcatgttagttggtgcatacccatttgaagatccagaagatcctagaaatttcagaaagactattgggagaataatcggtattcagtactccatacccgactatgttcgtgtttcttctgactgtaggaatcttctctctcgcatctttgttgctgatcctgccaagaggatcaccatcccagagataaaacagtatccttggtttctgaagaatatgcctaaagagatcatcgaagctgaaagaaaaggattcgaggaaacaaccaaagaccaaccaaaccagaaggtggaggaaatcatgaggataattcaagcggcaaggataccaggacaaggatccaaagctggagaaggtggacaagctggcactggatcattagatattgaggatgatgaggaaattgatgttagtggtgactatgaacaagtgtgatcgagaacttgattagttgatatggctagattgtctataagacatagtcagcattattaacatctatcacagtgtgcaacactggtgttctaaagatacttgttataccaggcttgaaataggattttgtgtttatttaaatgaataatattaagaaaaggctgctatttcagtttcagt

SEQ ID NO: 60372 - protein, 336 aa, Glycine max
  peptide (1)..(336): Ceres Seq. ID no. 14311994
  misc_feature (5)..(261): Pfam Name: Protein kinase domain Pfam Description: Protein kinase domain
  misc_feature (3)..(336): Homolog of NCBI NO: 32487487 NR Description: OSJNBb0020J19.1 [Oryza sativa (japonica
  misc_feature (3)..(336): Homolog of NCBI NO: 18418337 NR Description: protein kinase, putative [Arabidopsis thaliana]
  misc_feature (1)..(333): Homolog of NCBI NO: 29164823 NR Description: abcisic acid-inducible protein kinanase
  misc_feature (1)..(333): Homolog of NCBI NO: 4098174 NR Description: PK11-C5 [Nicotiana tabacum]
  misc_feature (1)..(326): Homolog of NCBI NO: 7446429 NR Description: probable serine/threonine-specific protein kinase
  misc_feature (1)..(326): Homolog of NCBI NO: 7446428 NR Description: probable serine/threonine-specific protein kinase
  misc_feature (1)..(333): Homolog of NCBI NO: 1362050 NR Description: serine/threonine-specific protein kinase SPK-1
  misc_feature (1)..(333): Homolog of NCBI NO: 3811293 NR Description: putative serine/threonine protein kinase
  misc_feature (1)..(326): Homolog of NCBI NO: 37536914 NR Description: protein kinase REK [Oryza sativa (japonica
  misc_feature (1)..(333): Homolog of NCBI NO: 310580 NR Description: protein kinase 2
MEERYEPLKELGAGNFGVARLAKDKKTGELVAVKYIERGKKIDENVQREIINHRSLRHPNIIRFKEVLLTPTHLAIVLEYASGGELFERICTAGRFSEDEARYFFQQLISGVSYCHSMEICHRDLKLENTLLDGNPSPRLKICDFGYSKSALLHSQPKSTVGTPAYIAPEVLSRKEYDGKISDVWSCGVTLYVMLVGAYPFEDPEDPRNFRKTIGRIIGIQYSIPDYVRVSSDCRNLLSRIFVADPAKRITIPEIKQYPWFLKNMPKEIIEAERKGFEETTKDQPNQKVEEIMRIIQAARIPGQGSKAGEGGQAGTGSLDIEDDEEIDVSGDYEQV

SEQ ID NO: 60373 - protein, 219 aa, Glycine max
  peptide (1)..(219): Ceres Seq. ID no. 14311995
  misc_feature (1)..(144): Pfam Name: Protein kinase domain Pfam Description: Protein kinase domain
  misc_feature (1)..(219): Homolog of NCBI NO: 32487487 NR Description: OSJNBb0020J19.1 [Oryza sativa (japonica
  misc_feature (1)..(219): Homolog of NCBI NO: 18418337 NR Description: protein kinase, putative [Arabidopsis thaliana]
  misc_feature (1)..(216): Homolog of NCBI NO: 29164823 NR Description: abcisic acid-inducible protein kinanase
  misc_feature (1)..(216): Homolog of NCBI NO: 4098174 NR Description: PK11-C5 [Nicotiana tabacum]
  misc_feature (1)..(209): Homolog of NCBI NO: 7446429 NR Description: probable serine/threonine-specific protein kinase
  misc_feature (1)..(209): Homolog of NCBI NO: 7446428 NR Description: probable serine/threonine-specific protein kinase
  misc_feature (1)..(216): Homolog of NCBI NO: 1362050 NR Description: serine/threonine-specific protein kinase SPK-1
  misc_feature (1)..(216): Homolog of NCBI NO: 3811293 NR Description: putative serine/threonine protein kinase
  misc_feature (1)..(209): Homolog of NCBI NO: 37536914 NR Description: protein kinase REK [Oryza sativa (japonica
  misc_feature (1)..(216): Homolog of NCBI NO: 310580 NR Description: protein kinase 2
MEICHRDLKLENTLLDGNPSPRLKICDFGYSKSALLHSQPKSTVGTPAYIAPEVLSRKEYDGKISDVWSCGVTLYVMLVGAYPFEDPEDPRNFRKTIGRIIGIQYSIPDYVRVSSDCRNLLSRIFVADPAKRITIPEIKQYPWFLKNMPKEIIEAERKGFEETTKDQPNQKVEEIMRIIQAARIPGQGSKAGEGGQAGTGSLDIEDDEEIDVSGDYEQV

SEQ ID NO: 60374 - DNA, 1544 bp, Glycine max
  misc_feature (1)..(1544): Ceres Seq. ID no. 15176012
actaccaccatagcagctggaaagcaagagaggaacatgatgaaagttgcacctacgagtccgcttcccacgaggcacgtgcggtttctgtttcaccgcacgtgccttgagcattcaataattaccaccaactcgccaaagtcacttaattataaacgcggaacgcatttcaccaggagaagcagaaccatcgctcaagctcacactcacagtaaaatccaaaccaaaatggcggaaaataaagccattgaagaagctcagagcaagttccgttcagagttccttcaagttctgcgtagtaggcgacccgctcaagttccattaacagtcgaattcgcgaagccagtggtgaatcctttgcatcagaactctcctccatcgatcgaagagatcaagataatggagtcgtgtccgagaactgatatagagaaccttgaagacttgctcgaggaggagaatctctatttgaatatagaggaaggagagcaaggacggttgcctttgttgattttgaagttgaaggaaagcgataagcagagaaaaaggcctgcagttgtttttcttcacagtacgaacaaatacaaagaagtcctacgtccattgcttaaggcgtatgcttcgcgaggatatatagcaatttctgttgattctcgttaccatggagaacgtgctaccagcgcaaccacctatcgcgatgcacttatttctgcatggaaaactggtgagacgatgccattcatatttgacacggtctgggacttgattagattggcagattatctaacacagagagaggatatagacccttctaggataggaatcactggaatatcacttggaggaatgcatgcatggtttgctgcagttgctgatactcgctatgctgtggttgctcctctgattggcattcagggatttcaatgggccataggcaacgataaatggcaggctcgagttgatagtataaagcctctttttgaggcggctcgtgatgatttgggtaaaggtgctattgacaaagaagtggtggagaaggtgtgggaccgaattgctcctggtttagcttcccaatttgactcaccttattcagttccaactatcgcaccacgtcctttgcttattgttaatggtgcggaagatcctcggtgtcccgttgcaggcttggaaattccaagggcacaagcaagccaggcatatggacagtttgactgtttagataatttcaagattattacagaacctggagttggacaccaattaacgagacttcaagtgaaagaatcatcttattggtttgacaggttcttgaacccttagcccgtgccctcatatgtgttcatcaagccctgtgtggttgttgctctagctcattgcctcatttctattgtcattgtgtcatgatatcaaagtcaataaattgtcaaatagaaatcatcatcatgatgactcttaaggtacagtcaataaatttattatgtatgatggtgtgtaattgaatgatagtaaaaaaaaaattatattgtcattgcatatattatttattc

SEQ ID NO: 60375 - protein, 438 aa, Glycine max
  peptide (1)..(438): Ceres Seq. ID no. 15176013
  misc_feature (364)..(436): Homolog of NCBI NO: 23098650 NR Description: hypothetical protein [Oceanobacillus iheyensis
  misc_feature (156)..(301): Homolog of NCBI NO: 23098650 NR Description: hypothetical protein [Oceanobacillus iheyensis
  misc_feature (75)..(207): Homolog of NCBI NO: 34898368 NR Description: ESTs C19441(E10423),C99201(E10423) correspond to
  misc_feature (232)..(436): Homolog of NCBI NO: 34898368 NR Description: ESTs C19441(E10423),C99201(E10423) correspond to
  misc_feature (90)..(436): Homolog of NCBI NO: 30689997 NR Description: expressed protein [Arabidopsis thaliana]
TTTIAAGKQERNMMKVAPTSPLPTRHVRFLFHRTCLEHSIITTNSPKSLNYKRGTHFTRRSRTIAQAHTHSKIQTKMAENKAIEEAQSKFRSEFLQVLRSRRPAQVPLTVEFAKPVVNPLHQNSPPSIEEIKIMESCPRTDIENLEDLLEEENLYLNIEEGEQGRLPLLILKLKESDKQRKRPAVVFLHSTNKYKEVLRPLLKAYASRGYIAISVDSRYHGERATSATTYRDALISAWKTGETMPFIFDTVWDLIRLADYLTQREDIDPSRIGITGISLGGMHAWFAAVADTRYAVVAPLIGIQGFQWAIGNDKWQARVDSIKPLFEAARDDLGKGAIDKEVVEKVWDRIAPGLASQFDSPYSVPTIAPRPLLIVNGAEDPRCPVAGLEIPRAQASQAYGQFDCLDNFKIITEPGVGHQLTRLQVKESSYWFDRFLNP

SEQ ID NO: 60376 - protein, 426 aa, Glycine max
  peptide (1)..(426): Ceres Seq. ID no. 15176014
  misc_feature (352)..(424): Homolog of NCBI NO: 23098650 NR Description: hypothetical protein [Oceanobacillus iheyensis
  misc_feature (144)..(289): Homolog of NCBI NO: 23098650 NR Description: hypothetical protein [Oceanobacillus iheyensis
  misc_feature (63)..(195): Homolog of NCBI NO: 34898368 NR Description: ESTs C19441(E10423),C99201(E10423) correspond to
  misc_feature (220)..(424): Homolog of NCBI NO: 34898368 NR Description: ESTs C19441(E10423),C99201(E10423) correspond to
  misc_feature (78)..(424): Homolog of NCBI NO: 30689997 NR Description: expressed protein [Arabidopsis thaliana]
MMKVAPTSPLPTRHVRFLFHRTCLEHSIITTNSPKSLNYKRGTHFTRRSRTIAQAHTHSKIQTKMAENKAIEEAQSKFRSEFLQVLRSRRPAQVPLTVEFAKPVVNPLHQNSPPSIEEIKIMESCPRTDIENLEDLLEEENLYLNIEEGEQGRLPLLILKLKESDKQRKRPAVVFLHSTNKYKEVLRPLLKAYASRGYIAISVDSRYHGERATSATTYRDALISAWKTGETMPFIFDTVWDLIRLADYLTQREDIDPSRIGITGISLGGMHAWFAAVADTRYAVVAPLIGIQGFQWAIGNDKWQARVDSIKPLFEAARDDLGKGAIDKEVVEKVWDRIAPGLASQFDSPYSVPTIAPRPLLIVNGAEDPRCPVAGLEIPRAQASQAYGQFDCLDNFKIITEPGVGHQLTRLQVKESSYWFDRFLNP

SEQ ID NO: 60377 - protein, 425 aa, Glycine max
  peptide (1)..(425): Ceres Seq. ID no. 15176015
  misc_feature (351)..(423): Homolog of NCBI NO: 23098650 NR Description: hypothetical protein [Oceanobacillus iheyensis
  misc_feature (143)..(288): Homolog of NCBI NO: 23098650 NR Description: hypothetical protein [Oceanobacillus iheyensis
  misc_feature (62)..(194): Homolog of NCBI NO: 34898368 NR Description: ESTs C19441(E10423),C99201(E10423) correspond to
  misc_feature (219)..(423): Homolog of NCBI NO: 34898368 NR Description: ESTs C19441(E10423),C99201(E10423) correspond to
  misc_feature (77)..(423): Homolog of NCBI NO: 30689997 NR Description: expressed protein [Arabidopsis thaliana]
MKVAPTSPLPTRHVRFLFHRTCLEHSIITTNSPKSLNYKRGTHFTRRSRTIAQAHTHSKIQTKMAENKAIEEAQSKFRSEFLQVLRSRRPAQVPLTVEFAKPVVNPLHQNSPPSIEEIKIMESCPRTDIENLEDLLEEENLYLNIEEGEQGRLPLLILKLKESDKQRKRPAVVFLHSTNKYKEVLRPLLKAYASRGYIAISVDSRYHGERATSATTYRDALISAWKTGETMPFIFDTVWDLIRLADYLTQREDIDPSRIGITGISLGGMHAWFAAVADTRYAVVAPLIGIQGFQWAIGNDKWQARVDSIKPLFEAARDDLGKGAIDKEVVEKVWDRIAPGLASQFDSPYSVPTIAPRPLLIVNGAEDPRCPVAGLEIPRAQASQAYGQFDCLDNFKIITEPGVGHQLTRLQVKESSYWFDRFLNP

SEQ ID NO: 60378 - DNA, 731 bp, Glycine max
  misc_feature (1)..(731): Ceres Seq. ID no. 15226667
ccgggccccccctcgagtcagctacgtaggccccccccccccctaataaaattttgaattaataatcagcataagttactaaaataaaatttcaatattgattgaagaacaacactaaaaacaattaagaaactactagcccacttcgtatcaaagatataaataatatcagtcttcttaatgattctaaaaattaagtataaggttagtaaccaggtatgattgttactgcagattggctggaattgccaggtgctttgattcttcttatcgtcgtagctccttctctaattgcaagcacttttagagacaacattgttggggtggtggtgtgcctcatcattgcatgctatttgctgcaagaacacattcgggcttctggtggtttcagaaactccttcactaaagctcacggcgtatcaaattccatcggcataatacttctgttggtttatcccatctgggcactggttgtcatacttttttaggcaccaccatttggacttgttgattcgtgtgaattaaaccaattgttttctgtaccattcatttgttggaacttgatatctataaacaccccgccattgttttgcgattcatctttgtcctaaagttagcatgtgtaaaaaagtggaataaaatctcagttgtagtcttctggtttcgtagaatgtaaaaaaaacaaaatatgaagaggattggtgtggtgtctttctagctgtcgtgtattc

SEQ ID NO: 60379 - protein, 89 aa, Glycine max
  peptide (1)..(89): Ceres Seq. ID no. 15226668
  misc_feature (6)..(76): Pfam Name: Cold acclimation protein WCOR413 Pfam Description: Cold acclimation protein WCOR413
  misc_feature (8)..(84): Homolog of NCBI NO: 16356677 NR Description: cold acclimation protein WCOR413-like protein
  misc_feature (8)..(89): Homolog of NCBI NO: 15224052 NR Description: cold acclimation protein WCOR413 (Triticum
  misc_feature (8)..(86): Homolog of NCBI NO: 21360378 NR Description: stress-regulated protein SAP1 [Xerophyta viscosa]
  misc_feature (6)..(86): Homolog of NCBI NO: 7489665 NR Description: cold acclimation protein WCOR413 - wheat
  misc_feature (6)..(89): Homolog of NCBI NO: 15235477 NR Description: cold acclimation protein homolog [Arabidopsis
  misc_feature (6)..(86): Homolog of NCBI NO: 15230325 NR Description: cold acclimation protein -related [Arabidopsis
  misc_feature (6)..(85): Homolog of NCBI NO: 15226654 NR Description: cold acclimation protein WCOR413
  misc_feature (6)..(88): Homolog of NCBI NO: 16555360 NR Description: cold acclimation protein WCOR413-like protein
  misc_feature (6)..(86): Homolog of NCBI NO: 27902673 NR Description: cold acclimation protein COR413-PM1 [Zea mays]
  misc_feature (6)..(86): Homolog of NCBI NO: 10121845 NR Description: cold acclimation protein WCOR413-like protein
MIVTADWLELPGALILLIVVAPSLIASTFRDNIVGVVVCLIIACYLLQEHIRASGGFRNSFTKAHGVSNSIGIILLLVYPIWALVVILF

SEQ ID NO: 60380 - DNA, 1438 bp, Glycine max
  misc_feature (1)..(1438): Ceres Seq. ID no. 15178046
aaaactgaaggctgtgctttgctctgcttctgaatgaagaaaatgaagacacatagtcgttaccaggacaatttggattctgattcaaagagtaagagatcatgcttctgtggaatcgttccagcggtttctttactttgtgttgtcttgcttttctcgactttattctttgcacaacgctacaacgagaaactattaaggtggaaaatgaacatcaagaaattgaaaaatgacaattgcaagaaccagtgcaggactggtggaagtcatgcattacctgaaggcataatctccaacacttctgatttggaaatgcggcatttgtgggatcttcctatgactaagacaatagagaataaggaaaatgcatcaaccaatttgtttgcaatggcagttgggataaagcagaaagatcttgtgaacaaattggtcaaaaagtttctatcaagcaatttcgttgtaatgctcttccactacgatggtattgttgacgaatggaatgactttgaatggaataatcatgtcattcatgtggctgtagccaatcaaagtaaatggtggtttgcaaagcgtttcttacaccctgacatagttgcagaatatggttatattttcctatgggatgaggatcttggagttgaacacttccacccggataggtatgtttctattataaaaagtgaaggactggaaatatcacaaccagcacttgatagtaacaaatcagaggtacatcatcagattactgcacgtgggaggaggtcgaatgtgcacagaaggatttacaaaactggtggtagtggcaaacgttgtgatgaaagtagcactgctcctccttgcacagggtgggttgaaatgatggcctttgttttctcaagagctgcatggcgttgcgtttggtatatgatccagaatgacttgatccatgcatggggtctagatatgcagctaggctactgtgctcagggtgatcgaacaaaaaatgttggtgttgtggatgctgaatacatagtccactacggtcatcctactcttggaggcttagatgtgaatgaggtttcatctcggacaaaggatcatagagttgatgtgaggagactgtcttaccgtgaattacaagtttttagaaaacgatggcagaaggcagttgaggaggatgattgttgggtcgatccatttcaataacaaatactgatagtcaaaattgtgtatagattttatgaaaatacacaaatatgtaaggagaagcaaattcaattggcagataaaacaaatgttgatcatggagaggggagtagttaaaaaagcctagaggagtttttttagcatctcaagggcaagcatgacttcatggggaaaaaattcttctcaattgagtttggtgcatttttgtttaacctttcattttttaatagtttccaaatggaattgtttattc

SEQ ID NO: 60381 - protein, 383 aa, Glycine max
  peptide (1)..(383): Ceres Seq. ID no. 15178047
  misc_feature (69)..(382): Pfam Name: Protein of unknown function (DUF707) Pfam Description: Protein of unknown function (DUF707)
  misc_feature (76)..(155): Homolog of NCBI NO: 34903420 NR Description: hypothetical protein~similar to Oryza sativa
  misc_feature (173)..(382): Homolog of NCBI NO: 34903420 NR Description: hypothetical protein~similar to Oryza sativa
  misc_feature (348)..(382): Homolog of NCBI NO: 34899756 NR Description: OJ1773_H01.1 [Oryza sativa (japonica
  misc_feature (272)..(348): Homolog of NCBI NO: 34899756 NR Description: OJ1773_H01.1 [Oryza sativa (japonica
  misc_feature (92)..(248): Homolog of NCBI NO: 34899756 NR Description: OJ1773_H01.1 [Oryza sativa (japonica
  misc_feature (34)..(382): Homolog of NCBI NO: 33146749 NR Description: putative lysine ketoglutarate reductase
  misc_feature (81)..(380): Homolog of NCBI NO: 24636978 NR Description: lysine ketoglutarate reductase trans-splicing
  misc_feature (1)..(380): Homolog of NCBI NO: 15219892 NR Description: expressed protein [Arabidopsis thaliana]
  misc_feature (69)..(382): Homolog of NCBI NO: 19386727 NR Description: P0678F11.16 [Oryza sativa (japonica
  misc_feature (1)..(381): Homolog of NCBI NO: 22329488 NR Description: expressed protein [Arabidopsis thaliana]
MKKMKTHSRYQDNLDSDSKSKRSCFCGIVPAVSLLCVVLLFSTLFFAQRYNEKLLRWKMNIKKLKNDNCKNQCRTGGSHALPEGIISNTSDLEMRHLWDLPMTKTIENKENASTNLFAMAVGIKQKDLVNKLVKKFLSSNFVVMLFHYDGIVDEWNDFEWNNHVIHVAVANQSKWWFAKRFLHPDIVAEYGYIFLWDEDLGVEHFHPDRYVSIIKSEGLEISQPALDSNKSEVHHQITARGRRSNVHRRIYKTGGSGKRCDESSTAPPCTGWVEMMAFVFSRAAWRCVWYMIQNDLIHAWGLDMQLGYCAQGDRTKNVGVVDAEYIVHYGHPTLGGLDVNEVSSRTKDHRVDVRRLSYRELQVFRKRWQKAVEEDDCWVDPFQ

SEQ ID NO: 60382 - protein, 380 aa, Glycine max
  peptide (1)..(380): Ceres Seq. ID no. 15178048
  misc_feature (66)..(379): Pfam Name: Protein of unknown function (DUF707) Pfam Description: Protein of unknown function (DUF707)
  misc_feature (73)..(152): Homolog of NCBI NO: 34903420 NR Description: hypothetical protein~similar to Oryza sativa
  misc_feature (170)..(379): Homolog of NCBI NO: 34903420 NR Description: hypothetical protein~similar to Oryza sativa
  misc_feature (345)..(379): Homolog of NCBI NO: 34899756 NR Description: OJ1773_H01.1 [Oryza sativa (japonica
  misc_feature (269)..(345): Homolog of NCBI NO: 34899756 NR Description: OJ1773_H01.1 [Oryza sativa (japonica
  misc_feature (89)..(245): Homolog of NCBI NO: 34899756 NR Description: OJ1773_H01.1 [Oryza sativa (japonica
  misc_feature (31)..(379): Homolog of NCBI NO: 33146749 NR Description: putative lysine ketoglutarate reductase
  misc_feature (78)..(377): Homolog of NCBI NO: 24636978 NR Description: lysine ketoglutarate reductase trans-splicing
  misc_feature (1)..(377): Homolog of NCBI NO: 15219892 NR Description: expressed protein [Arabidopsis thaliana]
  misc_feature (66)..(379): Homolog of NCBI NO: 19386727 NR Description: P0678F11.16 [Oryza sativa (japonica
  misc_feature (1)..(378): Homolog of NCBI NO: 22329488 NR Description: expressed protein [Arabidopsis thaliana]
MKTHSRYQDNLDSDSKSKRSCFCGIVPAVSLLCVVLLFSTLFFAQRYNEKLLRWKMNIKKLKNDNCKNQCRTGGSHALPEGIISNTSDLEMRHLWDLPMTKTIENKENASTNLFAMAVGIKQKDLVNKLVKKFLSSNFVVMLFHYDGIVDEWNDFEWNNHVIHVAVANQSKWWFAKRFLHPDIVAEYGYIFLWDEDLGVEHFHPDRYVSIIKSEGLEISQPALDSNKSEVHHQITARGRRSNVHRRIYKTGGSGKRCDESSTAPPCTGWVEMMAFVFSRAAWRCVWYMIQNDLIHAWGLDMQLGYCAQGDRTKNVGVVDAEYIVHYGHPTLGGLDVNEVSSRTKDHRVDVRRLSYRELQVFRKRWQKAVEEDDCWVDPFQ

SEQ ID NO: 60383 - protein, 325 aa, Glycine max
  peptide (1)..(325): Ceres Seq. ID no. 15178049
  misc_feature (11)..(324): Pfam Name: Protein of unknown function (DUF707) Pfam Description: Protein of unknown function (DUF707)
  misc_feature (18)..(97): Homolog of NCBI NO: 34903420 NR Description: hypothetical protein~similar to Oryza sativa
  misc_feature (115)..(324): Homolog of NCBI NO: 34903420 NR Description: hypothetical protein~similar to Oryza sativa
  misc_feature (290)..(324): Homolog of NCBI NO: 34899756 NR Description: OJ1773_H01.1 [Oryza sativa (japonica
  misc_feature (214)..(290): Homolog of NCBI NO: 34899756 NR Description: OJ1773_H01.1 [Oryza sativa (japonica
  misc_feature (34)..(190): Homolog of NCBI NO: 34899756 NR Description: OJ1773_H01.1 [Oryza sativa (japonica
  misc_feature (1)..(324): Homolog of NCBI NO: 33146749 NR Description: putative lysine ketoglutarate reductase
  misc_feature (23)..(322): Homolog of NCBI NO: 24636978 NR Description: lysine ketoglutarate reductase trans-splicing
  misc_feature (1)..(322): Homolog of NCBI NO: 15219892 NR Description: expressed protein [Arabidopsis thaliana]
  misc_feature (11)..(324): Homolog of NCBI NO: 19386727 NR Description: P0678F11.16 [Oryza sativa (japonica
  misc_feature (1)..(323): Homolog of NCBI NO: 22329488 NR Description: expressed protein [Arabidopsis thaliana]
MNIKKLKNDNCKNQCRTGGSHALPEGIISNTSDLEMRHLWDLPMTKTIENKENASTNLFAMAVGIKQKDLVNKLVKKFLSSNFVVMLFHYDGIVDEWNDFEWNNHVIHVAVANQSKWWFAKRFLHPDIVAEYGYIFLWDEDLGVEHFHPDRYVSIIKSEGLEISQPALDSNKSEVHHQITARGRRSNVHRRIYKTGGSGKRCDESSTAPPCTGWVEMMAFVFSRAAWRCVWYMIQNDLIHAWGLDMQLGYCAQGDRTKNVGVVDAEYIVHYGHPTLGGLDVNEVSSRTKDHRVDVRRLSYRELQVFRKRWQKAVEEDDCWVDPFQ

SEQ ID NO: 60384 - DNA, 1450 bp, Glycine max
  misc_feature (1)..(1450): Ceres Seq. ID no. 14308594
accgatattcaaaagatgggcatccaacatgtgctggttttgccatttcctgctcaagggcatgtcaatcctctgatgctcttgtcaaaaaaactagctgaacatggcttcaaagtcacttttgtcaacacagatttcaaccacaagagagtgttgagtgcaacaaatgaggagggatcagcagtgagattaatctcaatcccagatggtttaggccctgaggatgacagaaataacgtggtcaatttatgttcggaatccttaagcagtaccatgacttctgcccttgagaaggtcataaaggatattgatgcacttgatagtgctagtgagaaaatcacaggtatagtggctgatgtgaacatggcatgggccttggaactcacagataagctaggaatcaaaggtgctgtcttctgccctgcttcagcagctgttttagtcttgggtgagaacattccaaacctcattcaagatgggatcataaataccgaagggttcccgattataaaagggaaatttcaactatccccagaaatgccaattatggacacagctgacattccatggtgcagcttaggtgacccaaccatgcacaaggttatatataatcatgcgtcaaagattatacgatattcacatttaacagattggtggcttggaaacaccacaagtgaccttgaacctggtgctatatctttgtctccaaagatcctaccaattggtccactcatagggagtggtaatgacattagatcattggggcaattctgggaagaagacgtctcttgcttgacctggcttgatcaacaaccaccttgttctgtcatatacgttgcctttggtagctctactatttttgaccctcatcaactcaaggaactagctcttggacttgacctcacaaacaggccttttctgtgggttgttcgtgaggatgccagtggaagcaccaaaatcacatacccagatgaattccaaggcacttgtggtaaaattgttaaatgggcacctcaacaaaaggtgttaagccaccctgcaatagcttgttttattagtcactgtggttggaattctaccttggaaggtgtgtccaatggggtacctttcttgtgttggccatattatactgaccaattagttgacaaggcttacatttgtgatatgtggaaggtgggtttgggattcgatttggatgacaaagggctgatatcacgttgggagataaagaagaaagtagaccaaatccttggagatgagaacataaggggaaggtctcaaaaactgaaggaaatggttctaagtaacattgcagaagggggacaatcctatgagaattttaacaagtttgtggagtggctcaaggaataaaaatgtatttgttgatgccctgatgttgtgaacaatgtttatgatgttcctgaaaaatattgaacatttaaatttagcc

SEQ ID NO: 60385 - protein, 456 aa, Glycine max
  peptide (1)..(456): Ceres Seq. ID no. 14308595
  misc_feature (11)..(455): Pfam Name: UDP-glucoronosyl and UDP-glucosyl transferase Pfam Description: UDP-glucoronosyl and UDP-glucosyl transferase
  misc_feature (7)..(455): Homolog of NCBI NO: 13236658 NR Description: putative glucosyltransferase [Oryza sativa]
  misc_feature (10)..(456): Homolog of NCBI NO: 13236656 NR Description: putative glucosyltransferase [Oryza sativa]
  misc_feature (11)..(456): Homolog of NCBI NO: 21326127 NR Description: putative glucosyl transferase [Sorghum bicolor]
  misc_feature (4)..(455): Homolog of NCBI NO: 15232846 NR Description: glycosyltransferase family [Arabidopsis thaliana]
  misc_feature (6)..(455): Homolog of NCBI NO: 21326125 NR Description: putative glucosyl transferase [Sorghum bicolor]
  misc_feature (10)..(456): Homolog of NCBI NO: 13236653 NR Description: putative glucosyltransferase [Oryza sativa]
  misc_feature (6)..(456): Homolog of NCBI NO: 21326123 NR Description: putative glucosyl transferase [Sorghum bicolor]
  misc_feature (10)..(456): Homolog of NCBI NO: 13236650 NR Description: putative glucosyltransferase [Oryza sativa]
  misc_feature (6)..(455): Homolog of NCBI NO: 21326124 NR Description: putative glucosyl transferase [Sorghum bicolor]
  misc_feature (11)..(456): Homolog of NCBI NO: 10953887 NR Description: UDP-glucosyltransferase HRA25 [Phaseolus vulgaris]
TDIQKMGIQHVLVLPFPAQGHVNPLMLLSKKLAEHGFKVTFVNTDFNHKRVLSATNEEGSAVRLISIPDGLGPEDDRNNVVNLCSESLSSTMTSALEKVIKDIDALDSASEKITGIVADVNMAWALELTDKLGIKGAVFCPASAAVLVLGENIPNLIQDGIINTEGFPIIKGKFQLSPEMPIMDTADIPWCSLGDPTMHKVIYNHASKIIRYSHLTDWWLGNTTSDLEPGAISLSPKILPIGPLIGSGNDIRSLGQFWEEDVSCLTWLDQQPPCSVIYVAFGSSTIFDPHQLKELALGLDLTNRPFLWVVREDASGSTKITYPDEFQGTCGKIVKWAPQQKVLSHPAIACFISHCGWNSTLEGVSNGVPFLCWPYYTDQLVDKAYICDMWKVGLGFDLDDKGLISRWEIKKKVDQILGDENIRGRSQKLKEMVLSNIAEGGQSYENFNKFVEWLKE

SEQ ID NO: 60386 - protein, 451 aa, Glycine max
  peptide (1)..(451): Ceres Seq. ID no. 14308596
  misc_feature (6)..(450): Pfam Name: UDP-glucoronosyl and UDP-glucosyl transferase Pfam Description: UDP-glucoronosyl and UDP-glucosyl transferase
  misc_feature (2)..(450): Homolog of NCBI NO: 13236658 NR Description: putative glucosyltransferase [Oryza sativa]
  misc_feature (5)..(451): Homolog of NCBI NO: 13236656 NR Description: putative glucosyltransferase [Oryza sativa]
  misc_feature (6)..(451): Homolog of NCBI NO: 21326127 NR Description: putative glucosyl transferase [Sorghum bicolor]
  misc_feature (1)..(450): Homolog of NCBI NO: 15232846 NR Description: glycosyltransferase family [Arabidopsis thaliana]
  misc_feature (1)..(450): Homolog of NCBI NO: 21326125 NR Description: putative glucosyl transferase [Sorghum bicolor]
  misc_feature (5)..(451): Homolog of NCBI NO: 13236653 NR Description: putative glucosyltransferase [Oryza sativa]
  misc_feature (1)..(451): Homolog of NCBI NO: 21326123 NR Description: putative glucosyl transferase [Sorghum bicolor]
  misc_feature (5)..(451): Homolog of NCBI NO: 13236650 NR Description: putative glucosyltransferase [Oryza sativa]
  misc_feature (1)..(450): Homolog of NCBI NO: 21326124 NR Description: putative glucosyl transferase [Sorghum bicolor]
  misc_feature (6)..(451): Homolog of NCBI NO: 10953887 NR Description: UDP-glucosyltransferase HRA25 [Phaseolus vulgaris]
MGIQHVLVLPFPAQGHVNPLMLLSKKLAEHGFKVTFVNTDFNHKRVLSATNEEGSAVRLISIPDGLGPEDDRNNVVNLCSESLSSTMTSALEKVIKDIDALDSASEKITGIVADVNMAWALELTDKLGIKGAVFCPASAAVLVLGENIPNLIQDGIINTEGFPIIKGKFQLSPEMPIMDTADIPWCSLGDPTMHKVIYNHASKIIRYSHLTDWWLGNTTSDLEPGAISLSPKILPIGPLIGSGNDIRSLGQFWEEDVSCLTWLDQQPPCSVIYVAFGSSTIFDPHQLKELALGLDLTNRPFLWVVREDASGSTKITYPDEFQGTCGKIVKWAPQQKVLSHPAIACFISHCGWNSTLEGVSNGVPFLCWPYYTDQLVDKAYICDMWKVGLGFDLDDKGLISRWEIKKKVDQILGDENIRGRSQKLKEMVLSNIAEGGQSYENFNKFVEWLKE

SEQ ID NO: 60387 - protein, 431 aa, Glycine max
  peptide (1)..(431): Ceres Seq. ID no. 14308597
  misc_feature (1)..(430): Pfam Name: UDP-glucoronosyl and UDP-glucosyl transferase Pfam Description: UDP-glucoronosyl and UDP-glucosyl transferase
  misc_feature (1)..(430): Homolog of NCBI NO: 13236658 NR Description: putative glucosyltransferase [Oryza sativa]
  misc_feature (1)..(431): Homolog of NCBI NO: 13236656 NR Description: putative glucosyltransferase [Oryza sativa]
  misc_feature (1)..(431): Homolog of NCBI NO: 21326127 NR Description: putative glucosyl transferase [Sorghum bicolor]
  misc_feature (1)..(430): Homolog of NCBI NO: 15232846 NR Description: glycosyltransferase family [Arabidopsis thaliana]
  misc_feature (1)..(430): Homolog of NCBI NO: 21326125 NR Description: putative glucosyl transferase [Sorghum bicolor]
  misc_feature (1)..(431): Homolog of NCBI NO: 13236653 NR Description: putative glucosyltransferase [Oryza sativa]
  misc_feature (1)..(431): Homolog of NCBI NO: 21326123 NR Description: putative glucosyl transferase [Sorghum bicolor]
  misc_feature (1)..(431): Homolog of NCBI NO: 13236650 NR Description: putative glucosyltransferase [Oryza sativa]
  misc_feature (1)..(430): Homolog of NCBI NO: 21326124 NR Description: putative glucosyl transferase [Sorghum bicolor]
  misc_feature (1)..(431): Homolog of NCBI NO: 10953887 NR Description: UDP-glucosyltransferase HRA25 [Phaseolus vulgaris]
MLLSKKLAEHGFKVTFVNTDFNHKRVLSATNEEGSAVRLISIPDGLGPEDDRNNVVNLCSESLSSTMTSALEKVIKDIDALDSASEKITGIVADVNMAWALELTDKLGIKGAVFCPASAAVLVLGENIPNLIQDGIINTEGFPIIKGKFQLSPEMPIMDTADIPWCSLGDPTMHKVIYNHASKIIRYSHLTDWWLGNTTSDLEPGAISLSPKILPIGPLIGSGNDIRSLGQFWEEDVSCLTWLDQQPPCSVIYVAFGSSTIFDPHQLKELALGLDLTNRPFLWVVREDASGSTKITYPDEFQGTCGKIVKWAPQQKVLSHPAIACFISHCGWNSTLEGVSNGVPFLCWPYYTDQLVDKAYICDMWKVGLGFDLDDKGLISRWEIKKKVDQILGDENIRGRSQKLKEMVLSNIAEGGQSYENFNKFVEWLKE

SEQ ID NO: 60388 - DNA, 1290 bp, Glycine max
  misc_feature (1)..(1290): Ceres Seq. ID no. 15176294
gtatggatgtagaagtgtacagaaagactaggaccccacaagagggtcacacgcaagatttctctctatcttctcatccaccatttctccaattggaagcacacgccaacgatcctattgctctactattttcaccactattcagtgttgttcatagccataccattccacaccacaacccttcttcttctaccttgcttttcctattatctatccattgagacccccaaatggcctctgccactgccaccactctcttcacccctaaccccatgttttcaactgaacaccactctctctctccatctccaaccattcccaaatcctttactggcctctgcaagcccttccattcaagggttcccacttccatccccttcttccactgcagaagacccaagttctttgtcagggccacagttataaagtggagatgtccaaagcaaactatccctcccaatgataccggttttcaaaagaaactcctgtatctggaatccatcggtattgactctttcttgcttattgaaaaccatccaacagtgatcacaacctctcttgctgacataagatccaccgtggagtacattacctccttggatttcactgcaattgagtttcggcgtatggttggcatgtgccccgagattctgaccacccaagtctcagacctcatacctgtcttcaccttccttcatcgtgaggttcatgtgcctggctcggatattaagcgtgtaataaatcgtcgtcccaggttgcttgtcagcagtgttagtaagcgacttcgtcctaccctgtacttcctccaaagtattggcatagaagaggtaaacaagcacactgacttgctatcatgtagtgttgaggaaaagttcatgcccaggattgattactttgagaatattgggttttctcgccgtgatgcaacttcaatgttccgaagatttcctcagctattttgttatagtattaaaaataacttggagcctaaatacagttactttgtggtggagatggggagagatctgaaggagctgaaagaattcccacagtatttctcatttagcctagagaataggattaagcctaggcataaacagtgtgtagaaatgggggtgtgttttcctctccctgccttgttaaaaacaagtgaagtgaaatttcaaagtagattagacgtatgtgtaaattcttcaacccccttgaaaacatcccctctgtggtctgctggctgtgatgtttatgacgtatagaataacatttgcattgtatatttaattgcttttgtgc

SEQ ID NO: 60389 - protein, 340 aa, Glycine max
  peptide (1)..(340): Ceres Seq. ID no. 15176295
  misc_feature (78)..(312): Pfam Name: mTERF Pfam Description: mTERF
  misc_feature (82)..(339): Homolog of NCBI NO: 15240542 NR Description: expressed protein [Arabidopsis thaliana]
  misc_feature (82)..(314): Homolog of NCBI NO: 27817836 NR Description: OJ1127_E01.4 [Oryza sativa (japonica
  misc_feature (79)..(314): Homolog of NCBI NO: 15230219 NR Description: hypothetical protein [Arabidopsis thaliana]
  misc_feature (77)..(311): Homolog of NCBI NO: 28204784 NR Description: hypothetical protein [Arabidopsis thaliana]
  misc_feature (77)..(311): Homolog of NCBI NO: 15227524 NR Description: hypothetical protein [Arabidopsis thaliana]
  misc_feature (91)..(315): Homolog of NCBI NO: 28392870 NR Description: unknown protein [Arabidopsis thaliana]
  misc_feature (82)..(315): Homolog of NCBI NO: 15226787 NR Description: expressed protein [Arabidopsis thaliana]
  misc_feature (78)..(317): Homolog of NCBI NO: 30686636 NR Description: expressed protein [Arabidopsis thaliana]
  misc_feature (78)..(317): Homolog of NCBI NO: 21537209 NR Description: unknown [Arabidopsis thaliana]
  misc_feature (78)..(330): Homolog of NCBI NO: 30686631 NR Description: expressed protein [Arabidopsis thaliana]
MASATATTLFTPNPMFSTEHHSLSPSPTIPKSFTGLCKPFHSRVPTSIPFFHCRRPKFFVRATVIKWRCPKQTIPPNDTGFQKKLLYLESIGIDSFLLIENHPTVITTSLADIRSTVEYITSLDFTAIEFRRMVGMCPEILTTQVSDLIPVFTFLHREVHVPGSDIKRVINRRPRLLVSSVSKRLRPTLYFLQSIGIEEVNKHTDLLSCSVEEKFMPRIDYFENIGFSRRDATSMFRRFPQLFCYSIKNNLEPKYSYFVVEMGRDLKELKEFPQYFSFSLENRIKPRHKQCVEMGVCFPLPALLKTSEVKFQSRLDVCVNSSTPLKTSPLWSAGCDVYDV

SEQ ID NO: 60390 - protein, 326 aa, Glycine max
  peptide (1)..(326): Ceres Seq. ID no. 15176296
  misc_feature (64)..(298): Pfam Name: mTERF Pfam Description: mTERF
  misc_feature (68)..(325): Homolog of NCBI NO: 15240542 NR Description: expressed protein [Arabidopsis thaliana]
  misc_feature (68)..(300): Homolog of NCBI NO: 27817836 NR Description: OJ1127_E01.4 [Oryza sativa (japonica
  misc_feature (65)..(300): Homolog of NCBI NO: 15230219 NR Description: hypothetical protein [Arabidopsis thaliana]
  misc_feature (63)..(297): Homolog of NCBI NO: 28204784 NR Description: hypothetical protein [Arabidopsis thaliana]
  misc_feature (63)..(297): Homolog of NCBI NO: 15227524 NR Description: hypothetical protein [Arabidopsis thaliana]
  misc_feature (77)..(301): Homolog of NCBI NO: 28392870 NR Description: unknown protein [Arabidopsis thaliana]
  misc_feature (68)..(301): Homolog of NCBI NO: 15226787 NR Description: expressed protein [Arabidopsis thaliana]
  misc_feature (64)..(303): Homolog of NCBI NO: 30686636 NR Description: expressed protein [Arabidopsis thaliana]
  misc_feature (64)..(303): Homolog of NCBI NO: 21537209 NR Description: unknown [Arabidopsis thaliana]
  misc_feature (64)..(316): Homolog of NCBI NO: 30686631 NR Description: expressed protein [Arabidopsis thaliana]
MFSTEHHSLSPSPTIPKSFTGLCKPFHSRVPTSIPFFHCRRPKFFVRATVIKWRCPKQTIPPNDTGFQKKLLYLESIGIDSFLLIENHPTVITTSLADIRSTVEYITSLDFTAIEFRRMVGMCPEILTTQVSDLIPVFTFLHREVHVPGSDIKRVINRRPRLLVSSVSKRLRPTLYFLQSIGIEEVNKHTDLLSCSVEEKFMPRIDYFENIGFSRRDATSMFRRFPQLFCYSIKNNLEPKYSYFVVEMGRDLKELKEFPQYFSFSLENRIKPRHKQCVEMGVCFPLPALLKTSEVKFQSRLDVCVNSSTPLKTSPLWSAGCDVYDV

SEQ ID NO: 60391 - protein, 208 aa, Glycine max
  peptide (1)..(208): Ceres Seq. ID no. 15176297
  misc_feature (1)..(180): Pfam Name: mTERF Pfam Description: mTERF
  misc_feature (1)..(207): Homolog of NCBI NO: 15240542 NR Description: expressed protein [Arabidopsis thaliana]
  misc_feature (1)..(182): Homolog of NCBI NO: 27817836 NR Description: OJ1127_E01.4 [Oryza sativa (japonica
  misc_feature (1)..(182): Homolog of NCBI NO: 15230219 NR Description: hypothetical protein [Arabidopsis thaliana]
  misc_feature (1)..(179): Homolog of NCBI NO: 28204784 NR Description: hypothetical protein [Arabidopsis thaliana]
  misc_feature (1)..(179): Homolog of NCBI NO: 15227524 NR Description: hypothetical protein [Arabidopsis thaliana]
  misc_feature (1)..(183): Homolog of NCBI NO: 28392870 NR Description: unknown protein [Arabidopsis thaliana]
  misc_feature (1)..(183): Homolog of NCBI NO: 15226787 NR Description: expressed protein [Arabidopsis thaliana]
  misc_feature (1)..(185): Homolog of NCBI NO: 30686636 NR Description: expressed protein [Arabidopsis thaliana]
  misc_feature (1)..(185): Homolog of NCBI NO: 21537209 NR Description: unknown [Arabidopsis thaliana]
  misc_feature (1)..(198): Homolog of NCBI NO: 30686631 NR Description: expressed protein [Arabidopsis thaliana]
MVGMCPEILTTQVSDLIPVFTFLHREVHVPGSDIKRVINRRPRLLVSSVSKRLRPTLYFLQSIGIEEVNKHTDLLSCSVEEKFMPRIDYFENIGFSRRDATSMFRRFPQLFCYSIKNNLEPKYSYFVVEMGRDLKELKEFPQYFSFSLENRIKPRHKQCVEMGVCFPLPALLKTSEVKFQSRLDVCVNSSTPLKTSPLWSAGCDVYDV

SEQ ID NO: 60392 - DNA, 1642 bp, Glycine max
  misc_feature (1)..(1642): Ceres Seq. ID no. 15172446
aaatccctacagagagagagaaagatgcagaagagagagcagggcaagtccggcggatccgccggaggaggggcggcgccacctgcgaagagaggccgtcccttcggcagcggtaacaacagttcctctgccgcggcttcagccgcggattcggcggctccgtcaaccctccttggtccttcccttcacgttcacaactccttcgccgatcagaacaacaaaagaattgtcttggctcttcaaagtggtctgaagaatgagctaacatgggctttgaatacacttacgctgctctcctttaaagaaaaggatgacatgcgcaaggatgcgactccccttgcgaaaattcccggcttgcttgatgcgctcctacaagttatagatgattggcgtgatatagcactcccgaaggaatttgccaagacaacgaggatcaggactttaggtgcaaattctgttgtaagtggatttgggagtgaatatcaggcgctgggctcaactggtactccccaccgccctggtgtaggatctggctctgctggtatagaatcaacgcaacagaatggcatgacaaaatctcgtttttctgagttgtggcttgatgaagatagtttatttaatttagatgatgaagggcgagcagaaaagcagcaatgtgctgttgctgcttcaaatatcatcaggaacttctctttcatgccagataatgaagttataatggcccaacatcgccattgtttggaaacagccttccaatgcatagaagatcatcttgtagaggatgaggaacttgtaacaaatgctctagagacaattgttaacttagctccacttctggatcttcgaatatttagctcttccaaaccttcatttattaaaataacagaaaaacgtgcagttcaggccatcatggggatgttggaatctgcagtcaaagcatggcattgtgctgctgctgaattacttgggcgtttgatcattaatcctgacaatgaacctttcttgcttccattttttccacagatacacaaacgcttaattgatctcatcagcatgccagctctagatgctcaggcagctgctataggtgcactctataaccttgctgaagttaatatggactgcagattgaagattgctaacgagagatgggctattgatcggttgcttaaagtgataaagatgccacatccagttccagaagtttgccggaaatctgccatgatattggagagtcttgtgtctgagccgcaaaacagaagtttgctgctagcatatgagaatgcttttgcagagatagttttcactgatggaagatattccgatacatttgcgaggatattgtatgaactaacatctagaccaagtaacaaagtggcagcggctcgtggcatatggggtatgtaaacatcaaactgtgaaatgactttgattagtgatcagtgctatatatagttttgcgacttggatggcttttggacgacttttgaagattcaaaatgtacatgtcttctgtgtaggattgtactataccttaagcatattcaagttgtcatgtactccagttgtatgatgataacttcagaattattcttgtgtttaagacgatgtgaagattagaaacttcatttcctagataaag

SEQ ID NO: 60393 - protein, 468 aa, Glycine max
  peptide (1)..(468): Ceres Seq. ID no. 15172447
  misc_feature (17)..(467): Homolog of NCBI NO: 14192867 NR Description: Unknown protein [Oryza sativa]
  misc_feature (9)..(468): Homolog of NCBI NO: 18403609 NR Description: expressed protein [Arabidopsis thaliana]
  misc_feature (9)..(468): Homolog of NCBI NO: 21537098 NR Description: unknown [Arabidopsis thaliana]
KSLQRERKMQKREQGKSGGSAGGGAAPPAKRGRPFGSGNNSSSAAASAADSAAPSTLLGPSLHVHNSFADQNNKRIVLALQSGLKNELTWALNTLTLLSFKEKDDMRKDATPLAKIPGLLDALLQVIDDWRDIALPKEFAKTTRIRTLGANSVVSGFGSEYQALGSTGTPHRPGVGSGSAGIESTQQNGMTKSRFSELWLDEDSLFNLDDEGRAEKQQCAVAASNIIRNFSFMPDNEVIMAQHRHCLETAFQCIEDHLVEDEELVTNALETIVNLAPLLDLRIFSSSKPSFIKITEKRAVQAIMGMLESAVKAWHCAAAELLGRLIINPDNEPFLLPFFPQIHKRLIDLISMPALDAQAAAIGALYNLAEVNMDCRLKIANERWAIDRLLKVIKMPHPVPEVCRKSAMILESLVSEPQNRSLLLAYENAFAEIVFTDGRYSDTFARILYELTSRPSNKVAAARGIWGM

SEQ ID NO: 60394 - protein, 460 aa, Glycine max
  peptide (1)..(460): Ceres Seq. ID no. 15172448
  misc_feature (9)..(459): Homolog of NCBI NO: 14192867 NR Description: Unknown protein [Oryza sativa]
  misc_feature (1)..(460): Homolog of NCBI NO: 18403609 NR Description: expressed protein [Arabidopsis thaliana]
  misc_feature (1)..(460): Homolog of NCBI NO: 21537098 NR Description: unknown [Arabidopsis thaliana]
MQKREQGKSGGSAGGGAAPPAKRGRPFGSGNNSSSAAASAADSAAPSTLLGPSLHVHNSFADQNNKRIVLALQSGLKNELTWALNTLTLLSFKEKDDMRKDATPLAKIPGLLDALLQVIDDWRDIALPKEFAKTTRIRTLGANSVVSGFGSEYQALGSTGTPHRPGVGSGSAGIESTQQNGMTKSRFSELWLDEDSLFNLDDEGRAEKQQCAVAASNIIRNFSFMPDNEVIMAQHRHCLETAFQCIEDHLVEDEELVTNALETIVNLAPLLDLRIFSSSKPSFIKITEKRAVQAIMGMLESAVKAWHCAAAELLGRLIINPDNEPFLLPFFPQIHKRLIDLISMPALDAQAAAIGALYNLAEVNMDCRLKIANERWAIDRLLKVIKMPHPVPEVCRKSAMILESLVSEPQNRSLLLAYENAFAEIVFTDGRYSDTFARILYELTSRPSNKVAAARGIWGM

SEQ ID NO: 60395 - protein, 363 aa, Glycine max
  peptide (1)..(363): Ceres Seq. ID no. 15172449
  misc_feature (1)..(362): Homolog of NCBI NO: 14192867 NR Description: Unknown protein [Oryza sativa]
  misc_feature (1)..(363): Homolog of NCBI NO: 18403609 NR Description: expressed protein [Arabidopsis thaliana]
  misc_feature (1)..(363): Homolog of NCBI NO: 21537098 NR Description: unknown [Arabidopsis thaliana]
MRKDATPLAKIPGLLDALLQVIDDWRDIALPKEFAKTTRIRTLGANSVVSGFGSEYQALGSTGTPHRPGVGSGSAGIESTQQNGMTKSRFSELWLDEDSLFNLDDEGRAEKQQCAVAASNIIRNFSFMPDNEVIMAQHRHCLETAFQCIEDHLVEDEELVTNALETIVNLAPLLDLRIFSSSKPSFIKITEKRAVQAIMGMLESAVKAWHCAAAELLGRLIINPDNEPFLLPFFPQIHKRLIDLISMPALDAQAAAIGALYNLAEVNMDCRLKIANERWAIDRLLKVIKMPHPVPEVCRKSAMILESLVSEPQNRSLLLAYENAFAEIVFTDGRYSDTFARILYELTSRPSNKVAAARGIWGM

SEQ ID NO: 60396 - DNA, 1315 bp, Glycine max
  misc_feature (1)..(1315): Ceres Seq. ID no. 14308339
gtttggtcattgccttattctcttgtgctaagacatactactgaggaggtactagatgcatgcatggaagcaattgagccggaacatgctgcaataacatctgaactccggaagaaagtaatgaatgatcttatggagggtttgaaggaccacaattggtttaccgggtttgatattgctgatgatctgcctgtgaaattttcattaaggcagtggatcaagctagccaaggaagtccaagcaacagtttttattgcagtgcatggaggcattggagaagatggtacacttcaatctttgctggatgctgaaggagtgccctacacaggtcctggtgcaatggcatcaaagatttgtatggacaaagttgcaacctctgtggctttaaaacatcttgcaaattcgggagttcttaccataaataaggatgtcaggcaaaaagatgatctctctaataagcccataaatgatacatggcatgacctcaccagaaagctacagtgccaaacattatgtgtcaaaccagcaaaagatggatgctcaactggggtagcaagactatgctgtcccgaggaccttgcaatatatgtcaaagctctggaggactgtctactaagaattcctccaaattgcttatcaaaggcacatggtatgattgagatgccaaaccctcctccagaacacttaatcttcgaacctttcatagagacggatgaaataattgtgacatccaaatttgaggatgcaactggtcatggcctcacttggaaaggacacagcagatgggtggaaataactgttggcgtcataggaaaacgtggatcaatgcactcgctaagtcctagtgtaactgtcaaggaatctggtgatattttgtcacttgaggagaagttccaaggtgggactggcatcaatctgactccgcctcccttgtcaattatgagtgagaatgctttgaagagatgtaaacagcatattgaactgattgcaaacactcttcaattggaaggattttcacgcattgatgcatttgtaaatgttgacagtggagaggttttgattatagaggtaaatactgtgcctggaatgacaccttccactgttctgattcatcaggcactagtagagcaaccaccgttgtatcctcatcaattcttccgtaagcttcttgatttggcatctgaaaggtccatgtaaatctatttaatagaatgtttacattgtctatcaaatgttgttaccacttgaagttattgtgaaactttaatttcctatctggaacttgcgtccctttataatgtgaaactttaatttc

SEQ ID NO: 60397 - protein, 398 aa, Glycine max
  peptide (1)..(398): Ceres Seq. ID no. 14308340
  misc_feature (84)..(194): Pfam Name: D-ala D-ala ligase Pfam Description: D-ala D-ala ligase
  misc_feature (264)..(396): Homolog of NCBI NO: 21674167 NR Description: D-alanine-D-alanine ligase A [Chlorobium tepidum
  misc_feature (77)..(122): Homolog of NCBI NO: 23136007 NR Description: hypothetical protein [Cytophaga hutchinsonii]
  misc_feature (74)..(200): Homolog of NCBI NO: 23136007 NR Description: hypothetical protein [Cytophaga hutchinsonii]
  misc_feature (254)..(396): Homolog of NCBI NO: 23136007 NR Description: hypothetical protein [Cytophaga hutchinsonii]
  misc_feature (75)..(184): Homolog of NCBI NO: 34898182 NR Description: P0034A04.1 [Oryza sativa (japonica
  misc_feature (41)..(300): Homolog of NCBI NO: 15231971 NR Description: expressed protein [Arabidopsis thaliana]
  misc_feature (1)..(299): Homolog of NCBI NO: 26452707 NR Description: unknown protein [Arabidopsis thaliana]
  misc_feature (1)..(170): Homolog of NCBI NO: 34898182 NR Description: P0034A04.1 [Oryza sativa (japonica
  misc_feature (160)..(397): Homolog of NCBI NO: 34898182 NR Description: P0034A04.1 [Oryza sativa (japonica
  misc_feature (1)..(397): Homolog of NCBI NO: 33146883 NR Description: unknown protein [Oryza sativa (japonica
VWSLPYSLVLRHTTEEVLDACMEAIEPEHAAITSELRKKVMNDLMEGLKDHNWFTGFDIADDLPVKFSLRQWIKLAKEVQATVFIAVHGGIGEDGTLQSLLDAEGVPYTGPGAMASKICMDKVATSVALKHLANSGVLTINKDVRQKDDLSNKPINDTWHDLTRKLQCQTLCVKPAKDGCSTGVARLCCPEDLAIYVKALEDCLLRIPPNCLSKAHGMIEMPNPPPEHLIFEPFIETDEIIVTSKFEDATGHGLTWKGHSRWVEITVGVIGKRGSMHSLSPSVTVKESGDILSLEEKFQGGTGINLTPPPLSIMSENALKRCKQHIELIANTLQLEGFSRIDAFVNVDSGEVLIIEVNTVPGMTPSTVLIHQALVEQPPLYPHQFFRKLLDLASERSM

SEQ ID NO: 60398 - protein, 377 aa, Glycine max
  peptide (1)..(377): Ceres Seq. ID no. 14308341
  misc_feature (63)..(173): Pfam Name: D-ala D-ala ligase Pfam Description: D-ala D-ala ligase
  misc_feature (243)..(375): Homolog of NCBI NO: 21674167 NR Description: D-alanine-D-alanine ligase A [Chlorobium tepidum
  misc_feature (56)..(101): Homolog of NCBI NO: 23136007 NR Description: hypothetical protein [Cytophaga hutchinsonii]
  misc_feature (53)..(179): Homolog of NCBI NO: 23136007 NR Description: hypothetical protein [Cytophaga hutchinsonii]
  misc_feature (233)..(375): Homolog of NCBI NO: 23136007 NR Description: hypothetical protein [Cytophaga hutchinsonii]
  misc_feature (54)..(163): Homolog of NCBI NO: 34898182 NR Description: P0034A04.1 [Oryza sativa (japonica
  misc_feature (20)..(279): Homolog of NCBI NO: 15231971 NR Description: expressed protein [Arabidopsis thaliana]
  misc_feature (1)..(278): Homolog of NCBI NO: 26452707 NR Description: unknown protein [Arabidopsis thaliana]
  misc_feature (1)..(149): Homolog of NCBI NO: 34898182 NR Description: P0034A04.1 [Oryza sativa (japonica
  misc_feature (139)..(376): Homolog of NCBI NO: 34898182 NR Description: P0034A04.1 [Oryza sativa (japonica
  misc_feature (1)..(376): Homolog of NCBI NO: 33146883 NR Description: unknown protein [Oryza sativa (japonica
MEAIEPEHAAITSELRKKVMNDLMEGLKDHNWFTGFDIADDLPVKFSLRQWIKLAKEVQATVFIAVHGGIGEDGTLQSLLDAEGVPYTGPGAMASKICMDKVATSVALKHLANSGVLTINKDVRQKDDLSNKPINDTWHDLTRKLQCQTLCVKPAKDGCSTGVARLCCPEDLAIYVKALEDCLLRIPPNCLSKAHGMIEMPNPPPEHLIFEPFIETDEIIVTSKFEDATGHGLTWKGHSRWVEITVGVIGKRGSMHSLSPSVTVKESGDILSLEEKFQGGTGINLTPPPLSIMSENALKRCKQHIELIANTLQLEGFSRIDAFVNVDSGEVLIIEVNTVPGMTPSTVLIHQALVEQPPLYPHQFFRKLLDLASERSM

SEQ ID NO: 60399 - protein, 358 aa, Glycine max
  peptide (1)..(358): Ceres Seq. ID no. 14308342
  misc_feature (44)..(154): Pfam Name: D-ala D-ala ligase Pfam Description: D-ala D-ala ligase
  misc_feature (224)..(356): Homolog of NCBI NO: 21674167 NR Description: D-alanine-D-alanine ligase A [Chlorobium tepidum
  misc_feature (37)..(82): Homolog of NCBI NO: 23136007 NR Description: hypothetical protein [Cytophaga hutchinsonii]
  misc_feature (34)..(160): Homolog of NCBI NO: 23136007 NR Description: hypothetical protein [Cytophaga hutchinsonii]
  misc_feature (214)..(356): Homolog of NCBI NO: 23136007 NR Description: hypothetical protein [Cytophaga hutchinsonii]
  misc_feature (35)..(144): Homolog of NCBI NO: 34898182 NR Description: P0034A04.1 [Oryza sativa (japonica
  misc_feature (1)..(260): Homolog of NCBI NO: 15231971 NR Description: expressed protein [Arabidopsis thaliana]
  misc_feature (1)..(259): Homolog of NCBI NO: 26452707 NR Description: unknown protein [Arabidopsis thaliana]
  misc_feature (1)..(130): Homolog of NCBI NO: 34898182 NR Description: P0034A04.1 [Oryza sativa (japonica
  misc_feature (120)..(357): Homolog of NCBI NO: 34898182 NR Description: P0034A04.1 [Oryza sativa (japonica
  misc_feature (1)..(357): Homolog of NCBI NO: 33146883 NR Description: unknown protein [Oryza sativa (japonica
MNDLMEGLKDHNWFTGFDIADDLPVKFSLRQWIKLAKEVQATVFIAVHGGIGEDGTLQSLLDAEGVPYTGPGAMASKICMDKVATSVALKHLANSGVLTINKDVRQKDDLSNKPINDTWHDLTRKLQCQTLCVKPAKDGCSTGVARLCCPEDLAIYVKALEDCLLRIPPNCLSKAHGMIEMPNPPPEHLIFEPFIETDEIIVTSKFEDATGHGLTWKGHSRWVEITVGVIGKRGSMHSLSPSVTVKESGDILSLEEKFQGGTGINLTPPPLSIMSENALKRCKQHIELIANTLQLEGFSRIDAFVNVDSGEVLIIEVNTVPGMTPSTVLIHQALVEQPPLYPHQFFRKLLDLASERSM

SEQ ID NO: 60400 - DNA, 1369 bp, Glycine max
  misc_feature (1)..(1369): Ceres Seq. ID no. 14313591
aaaaaagaagagtgtatttggaggaaggaaggtaaaggaagccagaggagatggaagaagagggttctcagcagccacagttggtgcttgccgagaagctattccttctccgacaacccgttcaagacattgacaaggttcgctacaaggaggatgttttcactcacatcaaggaaaacgagatggtccctttgtacgagaccctagtcgccgattccgtgttggacttggatcgtgcccttttggacttcatgcgcgctaaaattgaagacgagctcaccaagctcgacgaaaagattgctgatgctgaggaaaacttaggagagagtgaagttcgtgaggctcacttggcaaaatccttgttttttatccggattatggacaaggagaaagccttggaacatctcaagataacagaaaccaagacagttgcagttggccagaaaatggacttggtgttttatacattgcagcttggtttcttcgacatggattttgatctcgtttccaaaagcattgacaaagccaaaaacttgtttgaagaaggtggtgattgggaaaggaagaataggctgaaagtgtacgaaggcctgtactgcatgtccactcgaaatttcaagaaggctgccaagttgtttttggattctatttcaacctttaccacctgtgaactttttccctatgacacctttatattttatacagttttgaccagcattatatcattggatagagtttccctaaagcaaaaggtagtggatgctccagagatcttgacagtgattggcaaaatcccatatctttcagagtttttgaactccttatatgattgtcaatacaagtcttttttctcagcatttgctggcctgacagagcaaattaagttggaccgctatctgcatccacacttccgatattacatgagggaggtcagaaccgttgtttattcccaatttttggaatcttacaagagtgtgacaattgaagccatggcaaaagcctttggagtgacagaggatttcattgatgtggagctatcacgctttattgcagcagggaagcttcattgtaagattgataaagttgaaggtgttcttgaaactaatcgccctgatgctaagaatgctctttaccaagcaactattaagcaaggggacttcctattgaatcggatccagaaattgtcacgtgtgatagatctttaggtcattttttgcattttagactaaaagtttattggaaaggcagagataacgacaatttcacggtattttactacgagggtgaggcacggcatttctgtagtccatttgatgtgcaaatatgattaattaaatttgccaaatccaaatatatcaatcagttttcg

SEQ ID NO: 60401 - protein, 384 aa, Glycine max
  peptide (1)..(384): Ceres Seq. ID no. 14313592
  misc_feature (249)..(353): Pfam Name: PCI domain Pfam Description: PCI domain
  misc_feature (1)..(384): Homolog of NCBI NO: 38454206 NR Description: Unknown (protein for MGC:72968) [Rattus
  misc_feature (1)..(384): Homolog of NCBI NO: 29436940 NR Description: Unknown (protein for MGC:56471) [Danio rerio]
  misc_feature (1)..(384): Homolog of NCBI NO: 20978552 NR Description: 26S proteasome non-ATPase regulatory subunit 6
  misc_feature (1)..(384): Homolog of NCBI NO: 7661914 NR Description: KIAA0107 gene product [Homo sapiens]
  misc_feature (1)..(384): Homolog of NCBI NO: 21313464 NR Description: RIKEN cDNA 2400006A19 [Mus musculus]
  misc_feature (153)..(384): Homolog of NCBI NO: 2982297 NR Description: KIAA0107-like protein [Picea mariana]
  misc_feature (3)..(384): Homolog of NCBI NO: 20978545 NR Description: 26S proteasome non-ATPase regulatory subunit 6
  misc_feature (270)..(384): Homolog of NCBI NO: 7484780 NR Description: 26S proteasome regulatory particle chain RPN7
  misc_feature (4)..(270): Homolog of NCBI NO: 7484780 NR Description: 26S proteasome regulatory particle chain RPN7
  misc_feature (4)..(384): Homolog of NCBI NO: 18416433 NR Description: 26S proteasome regulatory subunit (RPN7),
MEEEGSQQPQLVLAEKLFLLRQPVQDIDKVRYKEDVFTHIKENEMVPLYETLVADSVLDLDRALLDFMRAKIEDELTKLDEKIADAEENLGESEVREAHLAKSLFFIRIMDKEKALEHLKITETKTVAVGQKMDLVFYTLQLGFFDMDFDLVSKSIDKAKNLFEEGGDWERKNRLKVYEGLYCMSTRNFKKAAKLFLDSISTFTTCELFPYDTFIFYTVLTSIISLDRVSLKQKVVDAPEILTVIGKIPYLSEFLNSLYDCQYKSFFSAFAGLTEQIKLDRYLHPHFRYYMREVRTVVYSQFLESYKSVTIEAMAKAFGVTEDFIDVELSRFIAAGKLHCKIDKVEGVLETNRPDAKNALYQATIKQGDFLLNRIQKLSRVIDL

SEQ ID NO: 60402 - protein, 340 aa, Glycine max
  peptide (1)..(340): Ceres Seq. ID no. 14313593
  misc_feature (205)..(309): Pfam Name: PCI domain Pfam Description: PCI domain
  misc_feature (1)..(340): Homolog of NCBI NO: 38454206 NR Description: Unknown (protein for MGC:72968) [Rattus
  misc_feature (1)..(340): Homolog of NCBI NO: 29436940 NR Description: Unknown (protein for MGC:56471) [Danio rerio]
  misc_feature (1)..(340): Homolog of NCBI NO: 20978552 NR Description: 26S proteasome non-ATPase regulatory subunit 6
  misc_feature (1)..(340): Homolog of NCBI NO: 7661914 NR Description: KIAA0107 gene product [Homo sapiens]
  misc_feature (1)..(340): Homolog of NCBI NO: 21313464 NR Description: RIKEN cDNA 2400006A19 [Mus musculus]
  misc_feature (109)..(340): Homolog of NCBI NO: 2982297 NR Description: KIAA0107-like protein [Picea mariana]
  misc_feature (1)..(340): Homolog of NCBI NO: 20978545 NR Description: 26S proteasome non-ATPase regulatory subunit 6
  misc_feature (226)..(340): Homolog of NCBI NO: 7484780 NR Description: 26S proteasome regulatory particle chain RPN7
  misc_feature (1)..(226): Homolog of NCBI NO: 7484780 NR Description: 26S proteasome regulatory particle chain RPN7
  misc_feature (1)..(340): Homolog of NCBI NO: 18416433 NR Description: 26S proteasome regulatory subunit (RPN7),
MVPLYETLVADSVLDLDRALLDFMRAKIEDELTKLDEKIADAEENLGESEVREAHLAKSLFFIRIMDKEKALEHLKITETKTVAVGQKMDLVFYTLQLGFFDMDFDLVSKSIDKAKNLFEEGGDWERKNRLKVYEGLYCMSTRNFKKAAKLFLDSISTFTTCELFPYDTFIFYTVLTSIISLDRVSLKQKVVDAPEILTVIGKIPYLSEFLNSLYDCQYKSFFSAFAGLTEQIKLDRYLHPHFRYYMREVRTVVYSQFLESYKSVTIEAMAKAFGVTEDFIDVELSRFIAAGKLHCKIDKVEGVLETNRPDAKNALYQATIKQGDFLLNRIQKLSRVIDL

SEQ ID NO: 60403 - protein, 317 aa, Glycine max
  peptide (1)..(317): Ceres Seq. ID no. 14313594
  misc_feature (182)..(286): Pfam Name: PCI domain Pfam Description: PCI domain
  misc_feature (1)..(317): Homolog of NCBI NO: 38454206 NR Description: Unknown (protein for MGC:72968) [Rattus
  misc_feature (1)..(317): Homolog of NCBI NO: 29436940 NR Description: Unknown (protein for MGC:56471) [Danio rerio]
  misc_feature (1)..(317): Homolog of NCBI NO: 20978552 NR Description: 26S proteasome non-ATPase regulatory subunit 6
  misc_feature (1)..(317): Homolog of NCBI NO: 7661914 NR Description: KIAA0107 gene product [Homo sapiens]
  misc_feature (1)..(317): Homolog of NCBI NO: 21313464 NR Description: RIKEN cDNA 2400006A19 [Mus musculus]
  misc_feature (86)..(317): Homolog of NCBI NO: 2982297 NR Description: KIAA0107-like protein [Picea mariana]
  misc_feature (1)..(317): Homolog of NCBI NO: 20978545 NR Description: 26S proteasome non-ATPase regulatory subunit 6
  misc_feature (203)..(317): Homolog of NCBI NO: 7484780 NR Description: 26S proteasome regulatory particle chain RPN7
  misc_feature (1)..(203): Homolog of NCBI NO: 7484780 NR Description: 26S proteasome regulatory particle chain RPN7
  misc_feature (1)..(317): Homolog of NCBI NO: 18416433 NR Description: 26S proteasome regulatory subunit (RPN7),
MRAKIEDELTKLDEKIADAEENLGESEVREAHLAKSLFFIRIMDKEKALEHLKITETKTVAVGQKMDLVFYTLQLGFFDMDFDLVSKSIDKAKNLFEEGGDWERKNRLKVYEGLYCMSTRNFKKAAKLFLDSISTFTTCELFPYDTFIFYTVLTSIISLDRVSLKQKVVDAPEILTVIGKIPYLSEFLNSLYDCQYKSFFSAFAGLTEQIKLDRYLHPHFRYYMREVRTVVYSQFLESYKSVTIEAMAKAFGVTEDFIDVELSRFIAAGKLHCKIDKVEGVLETNRPDAKNALYQATIKQGDFLLNRIQKLSRVIDL

SEQ ID NO: 60404 - DNA, 1299 bp, Glycine max
  misc_feature (1)..(1299): Ceres Seq. ID no. 13637958
agatgaagtaggcgaaggctgaaggaaacctctggaattttctttggccaacggcgattccactaataaatatacgtttgttgtgtttccgaggcctgtgaatcggaattggggtttcttcaatcggaatcgcgaacaacatggaagtgagaattgggcaaagggtgtctcgcggaatgctccctctcctcgctctccacaccgtcagcgagtattaccgctccgaccacaaacctccgttcaccgccgccctcatcgccgccaacaccctcatctacctccgcccctccttcctcgatcccctcattccccccattgaacaagtctggttcaacccccacctcatcctcaagaacaaggacttgaaacgcttcttgttgtcgccgttttaccatatcggagaaccgcacctggtttacaacatgctatcccttctctggaaggggtttcagttggaaacctcaatgggaagcgtcgatttcgcttccatagtcgcttccttgctcgttctctcccagggcgtaaccctaatgttatccaaatcactgcttctgttcttcgactacgagagatcctactacagcgaatactccgtcggattctccggcgtcctcttcgccatgaaagtcgttctcaactcccaatcggagaactacacctccgtctacggaattatcgttccgtcccgttacgctgcgtgggctgaattggttctcgctcagcttctcgtgccgggcgtgtcgtttctcggccatctcggtggcattctggcggggcttctttatctgaagctgaggagtacttattcgggttctaaccctataaaagttctcatcagagggattgttgatgctgtgaagtggccttttaagttcttgcggcggaggcggggacggatcaccggaaggggaacagttggaagtaacagggcgtggagatgccagacgtgtacctatgacaacaacaatggttccctgagagtgtgtgagatttgtgggacgattagggttgtcaatggagtgtcctcttttcagaggagctcccgttctgatgggcttcctttggatgagttgcgccgccggagaatcgacaggtttggaggcaggtgatcgtggttagttttgagttcgctgcagcttctggtaaataatactattggatattgagattcaacacatgttagacttttttgtttcgacatatatatgttagttgtagaagtatgacgactgagcaatgaatgttttcatgctatgctagattgtttggcattttcaagaaaaaaaaaatgaaatttgg

SEQ ID NO: 60405 - protein, 322 aa, Glycine max
  peptide (1)..(322): Ceres Seq. ID no. 13637959
  misc_feature (33)..(248): Homolog of NCBI NO: 18410961 NR Description: expressed protein [Arabidopsis thaliana]
  misc_feature (7)..(215): Homolog of NCBI NO: 34876979 NR Description: hypothetical protein XP_237331 [Rattus norvegicus]
  misc_feature (7)..(215): Homolog of NCBI NO: 26325686 NR Description: unnamed protein product [Mus musculus]
  misc_feature (7)..(215): Homolog of NCBI NO: 12853402 NR Description: unnamed protein product [Mus musculus]
  misc_feature (7)..(215): Homolog of NCBI NO: 33300639 NR Description: hypothetical protein DKFZp547E052 [Homo sapiens]
  misc_feature (7)..(215): Homolog of NCBI NO: 16041108 NR Description: hypothetical protein [Macaca fascicularis]
  misc_feature (31)..(185): Homolog of NCBI NO: 18419592 NR Description: unknown [Narcissus pseudonarcissus]
  misc_feature (11)..(319): Homolog of NCBI NO: 34902516 NR Description: P0581F09.16 [Oryza sativa (japonica
  misc_feature (6)..(319): Homolog of NCBI NO: 30684602 NR Description: expressed protein [Arabidopsis thaliana]
  misc_feature (6)..(319): Homolog of NCBI NO: 9294149 NR Description: gene_id:MKP6.17~unknown protein [Arabidopsis
MEVRIGQRVSRGMLPLLALHTVSEYYRSDHKPPFTAALIAANTLIYLRPSFLDPLIPPIEQVWFNPHLILKNKDLKRFLLSPFYHIGEPHLVYNMLSLLWKGFQLETSMGSVDFASIVASLLVLSQGVTLMLSKSLLLFFDYERSYYSEYSVGFSGVLFAMKVVLNSQSENYTSVYGIIVPSRYAAWAELVLAQLLVPGVSFLGHLGGILAGLLYLKLRSTYSGSNPIKVLIRGIVDAVKWPFKFLRRRRGRITGRGTVGSNRAWRCQTCTYDNNNGSLRVCEICGTIRVVNGVSSFQRSSRSDGLPLDELRRRRIDRFGGR

SEQ ID NO: 60406 - protein, 310 aa, Glycine max
  peptide (1)..(310): Ceres Seq. ID no. 13637960
  misc_feature (21)..(236): Homolog of NCBI NO: 18410961 NR Description: expressed protein [Arabidopsis thaliana]
  misc_feature (1)..(203): Homolog of NCBI NO: 34876979 NR Description: hypothetical protein XP_237331 [Rattus norvegicus]
  misc_feature (1)..(203): Homolog of NCBI NO: 26325686 NR Description: unnamed protein product [Mus musculus]
  misc_feature (1)..(203): Homolog of NCBI NO: 12853402 NR Description: unnamed protein product [Mus musculus]
  misc_feature (1)..(203): Homolog of NCBI NO: 33300639 NR Description: hypothetical protein DKFZp547E052 [Homo sapiens]
  misc_feature (1)..(203): Homolog of NCBI NO: 16041108 NR Description: hypothetical protein [Macaca fascicularis]
  misc_feature (19)..(173): Homolog of NCBI NO: 18419592 NR Description: unknown [Narcissus pseudonarcissus]
  misc_feature (1)..(307): Homolog of NCBI NO: 34902516 NR Description: P0581F09.16 [Oryza sativa (japonica
  misc_feature (1)..(307): Homolog of NCBI NO: 30684602 NR Description: expressed protein [Arabidopsis thaliana]
  misc_feature (1)..(307): Homolog of NCBI NO: 9294149 NR Description: gene_id:MKP6.17~unknown protein [Arabidopsis
MLPLLALHTVSEYYRSDHKPPFTAALIAANTLIYLRPSFLDPLIPPIEQVWFNPHLILKNKDLKRFLLSPFYHIGEPHLVYNMLSLLWKGFQLETSMGSVDFASIVASLLVLSQGVTLMLSKSLLLFFDYERSYYSEYSVGFSGVLFAMKVVLNSQSENYTSVYGIIVPSRYAAWAELVLAQLLVPGVSFLGHLGGILAGLLYLKLRSTYSGSNPIKVLIRGIVDAVKWPFKFLRRRRGRITGRGTVGSNRAWRCQTCTYDNNNGSLRVCEICGTIRVVNGVSSFQRSSRSDGLPLDELRRRRIDRFGGR

SEQ ID NO: 60407 - protein, 228 aa, Glycine max
  peptide (1)..(228): Ceres Seq. ID no. 13637961
  misc_feature (1)..(154): Homolog of NCBI NO: 18410961 NR Description: expressed protein [Arabidopsis thaliana]
  misc_feature (1)..(121): Homolog of NCBI NO: 34876979 NR Description: hypothetical protein XP_237331 [Rattus norvegicus]
  misc_feature (1)..(121): Homolog of NCBI NO: 26325686 NR Description: unnamed protein product [Mus musculus]
  misc_feature (1)..(121): Homolog of NCBI NO: 12853402 NR Description: unnamed protein product [Mus musculus]
  misc_feature (1)..(121): Homolog of NCBI NO: 33300639 NR Description: hypothetical protein DKFZp547E052 [Homo sapiens]
  misc_feature (1)..(121): Homolog of NCBI NO: 16041108 NR Description: hypothetical protein [Macaca fascicularis]
  misc_feature (1)..(91): Homolog of NCBI NO: 18419592 NR Description: unknown [Narcissus pseudonarcissus]
  misc_feature (1)..(225): Homolog of NCBI NO: 34902516 NR Description: P0581F09.16 [Oryza sativa (japonica
  misc_feature (1)..(225): Homolog of NCBI NO: 30684602 NR Description: expressed protein [Arabidopsis thaliana]
  misc_feature (1)..(225): Homolog of NCBI NO: 9294149 NR Description: gene_id:MKP6.17~unknown protein [Arabidopsis
MLSLLWKGFQLETSMGSVDFASIVASLLVLSQGVTLMLSKSLLLFFDYERSYYSEYSVGFSGVLFAMKVVLNSQSENYTSVYGIIVPSRYAAWAELVLAQLLVPGVSFLGHLGGILAGLLYLKLRSTYSGSNPIKVLIRGIVDAVKWPFKFLRRRRGRITGRGTVGSNRAWRCQTCTYDNNNGSLRVCEICGTIRVVNGVSSFQRSSRSDGLPLDELRRRRIDRFGGR

SEQ ID NO: 60408 - DNA, 1183 bp, Glycine max
  misc_feature (1)..(1183): Ceres Seq. ID no. 15224554
accgggccccccctcgagtcagctacgtaggcccccccccccctgttaaaaagattaggactagcagttgcacctaagagaaagatgggtgatgctgatgctgaaggacatttgtctactagccctaatcagttagatggtgacaaaagagctaccaatcataaatcagtgaatttggagggaagcctgttggttcagcacctgcaaaaaaagaagagagtccaggctttcaatgaagctcaagaagctctgatcaaagttctatatgagcaattcaaggatcacagaagatgcagttacatgatagccaatgcactggatgaggatggtaaaatcactgctgctcaagtctctcgaaaacttaagcaacttggtttatctcttcctcagaagagttctggaggcaaaatgcacccaaaggatgcagatctcatggatctttcaaatgataggattaatgaatctgatgatgagacattggtaacattgataaaaaggaagaaaatggagaatgacaaattatcaaggggacagttacatggacaaatcagtgaggatagattgtcaatagatgattctgatgatgaaatgctcagctctgttctcaaggaaaaaataaatagcaaagtatcaactgaacaattacttgaacccatcaatgtggatgcattgtcaagagatgattctgatgatgaaatgcccagctctgctctcaaaagaactagaagatcctctcttaattcaaagcaagttgagcttgaaaatatccaaattcaggagagaataatgggcgatgattctttcaatgaaggcaaaacagatgctttggaaagggataatcgtgttgattctatgaattcctcccaaatagaacatcagcaaatggatgacttagcagattcagaagatgaagtggctgttagtggatttcctgacaatgccagatctagaaggcagctgagaatggtgattgatcctgaggatgatgactgaaggagaaagcatgattagggtccaggtttctttatttttgcatatattttctactaaactgaaggagaaagcattgattagtgagtgttgcagagacaagatatgaggatgtttacaagttgccatccttattacaacatatcagttctatatttatagagtataattataactgttataaactttcatt

SEQ ID NO: 60409 - protein, 302 aa, Glycine max
  peptide (1)..(302): Ceres Seq. ID no. 15224555
  misc_feature (17)..(239): Pfam Name: Timeless protein C terminal region Pfam Description: Timeless protein C terminal region
  misc_feature (42)..(222): Homolog of NCBI NO: 15237300 NR Description: expressed protein [Arabidopsis thaliana]
  misc_feature (17)..(239): Homolog of NCBI NO: 15237300 NR Description: expressed protein [Arabidopsis thaliana]
MGDADAEGHLSTSPNQLDGDKRATNHKSVNLEGSLLVQHLQKKKRVQAFNEAQEALIKVLYEQFKDHRRCSYMIANALDEDGKITAAQVSRKLKQLGLSLPQKSSGGKMHPKDADLMDLSNDRINESDDETLVTLIKRKKMENDKLSRGQLHGQISEDRLSIDDSDDEMLSSVLKEKINSKVSTEQLLEPINVDALSRDDSDDEMPSSALKRTRRSSLNSKQVELENIQIQERIMGDDSFNEGKTDALERDNRVDSMNSSQIEHQQMDDLADSEDEVAVSGFPDNARSRRQLRMVIDPEDDD

SEQ ID NO: 60410 - protein, 230 aa, Glycine max
  peptide (1)..(230): Ceres Seq. ID no. 15224556
  misc_feature (1)..(167): Pfam Name: Timeless protein C terminal region Pfam Description: Timeless protein C terminal region
  misc_feature (1)..(150): Homolog of NCBI NO: 15237300 NR Description: expressed protein [Arabidopsis thaliana]
  misc_feature (1)..(167): Homolog of NCBI NO: 15237300 NR Description: expressed protein [Arabidopsis thaliana]
MIANALDEDGKITAAQVSRKLKQLGLSLPQKSSGGKMHPKDADLMDLSNDRINESDDETLVTLIKRKKMENDKLSRGQLHGQISEDRLSIDDSDDEMLSSVLKEKINSKVSTEQLLEPINVDALSRDDSDDEMPSSALKRTRRSSLNSKQVELENIQIQERIMGDDSFNEGKTDALERDNRVDSMNSSQIEHQQMDDLADSEDEVAVSGFPDNARSRRQLRMVIDPEDDD

SEQ ID NO: 60411 - protein, 194 aa, Glycine max
  peptide (1)..(194): Ceres Seq. ID no. 15224557
  misc_feature (1)..(131): Pfam Name: Timeless protein C terminal region Pfam Description: Timeless protein C terminal region
  misc_feature (1)..(114): Homolog of NCBI NO: 15237300 NR Description: expressed protein [Arabidopsis thaliana]
  misc_feature (1)..(131): Homolog of NCBI NO: 15237300 NR Description: expressed protein [Arabidopsis thaliana]
MHPKDADLMDLSNDRINESDDETLVTLIKRKKMENDKLSRGQLHGQISEDRLSIDDSDDEMLSSVLKEKINSKVSTEQLLEPINVDALSRDDSDDEMPSSALKRTRRSSLNSKQVELENIQIQERIMGDDSFNEGKTDALERDNRVDSMNSSQIEHQQMDDLADSEDEVAVSGFPDNARSRRQLRMVIDPEDDD

SEQ ID NO: 60412 - DNA, 1577 bp, Glycine max
  misc_feature (1)..(1577): Ceres Seq. ID no. 14312016
gttcaggttctccttttaacatcttcatcttctcttttcttttgttgtcttctgtgcgcgctctctctctatgcattgatactgtttcttttattttcatctggggttcgccgcttcagctgccaccgttctcggtatctcatgtgatcttcaaagtttgttgctttcagccttttcaagctgtccatttaagtttttgagagcaagcagttttttatgaggaccgaataaaagattcaaatttctatgacgtctatcaaatcattgagatggctgatgagaaaaaagagtggattgtctgatgggggtaaatcaagtttcaagatgaaacatctgccttttctggcagttttgtgcacgataatgttattcattgtgtatagaaccacaaagtatcagtatcaccaagaagagattgacaaaaaatggagtttctggggacaaccaaaggtgtatccttcaacttatgggaagttgaaaggcttgccacgaggtataatacatgataattcagatttggagttaagaccattatggtcaagaagtagttcaagatcaaaggctgtttactctaactctaacttactggcagttccagttggtattaaacaaaagcagaatgttgatgctatggtgcaaaagtttcttcaagaaaacttcacaattattttattccattatgatggcaatgtggatggatggtggaatcttgactggagtagcaaggccatacacattattgctcggaatcaaacaaagtggtggtttgcaaaaaggtttctacatccagatatagtgtctatttatgattatatctttctctgggatgaggatctaggtgtggagcatttttcaccttcaagatatgttgaaattataaagagagaaggtttggagatatctcaaccagctcttgacccaaattcaacagagatacaccatagaattacaattagagctagaaccaagaaatttcatagagtctatgaacgcagaggcagtacaaggtgttcagatttaagtgagggaccgccgtgcactgggtttgtggaaggtatggctcctgttttctctcaatctgcctggtactgcacttggcatcttatacagaatgaccttgtccatggatggggagttgatatgaagctaggatattgtgcacagggagatcgaactaaaaaggtgggagttgttgacagcgaatatgtttttcacaagggaatacaaactctgggggggagtggtcacagaatgacaaaggtttcgaaactacaaaggacaactatgaaacaaggtggagtaggaattgatgtgcgaactgagataagaaggcaatcgacatgggaatttgaaatcttcaaagagcgttggaataaagccattggtgcagacaaaaactgggttgatccatttaagagtgaccaaagacgcataagaaaatggcgtgacacgcaacgccttgctaagaacaatatttaactctgttgcatatcttacagtttcattcacagggcattaccttttatttataggcataatttagtttgtgtagatgagtaaaaattcattcaattttg

SEQ ID NO: 60413 - protein, 410 aa, Glycine max
  peptide (1)..(410): Ceres Seq. ID no. 14312017
  misc_feature (76)..(387): Pfam Name: Protein of unknown function (DUF707) Pfam Description: Protein of unknown function (DUF707)
  misc_feature (68)..(333): Homolog of NCBI NO: 18408876 NR Description: F12A21.2 [Arabidopsis thaliana]
  misc_feature (109)..(389): Homolog of NCBI NO: 34903420 NR Description: hypothetical protein~similar to Oryza sativa
  misc_feature (173)..(404): Homolog of NCBI NO: 25402652 NR Description: hypothetical protein [imported] - Arabidopsis
  misc_feature (80)..(389): Homolog of NCBI NO: 19386727 NR Description: P0678F11.16 [Oryza sativa (japonica
  misc_feature (267)..(403): Homolog of NCBI NO: 34899756 NR Description: OJ1773_H01.1 [Oryza sativa (japonica
  misc_feature (91)..(248): Homolog of NCBI NO: 34899756 NR Description: OJ1773_H01.1 [Oryza sativa (japonica
  misc_feature (33)..(403): Homolog of NCBI NO: 33146749 NR Description: putative lysine ketoglutarate reductase
  misc_feature (76)..(404): Homolog of NCBI NO: 24636978 NR Description: lysine ketoglutarate reductase trans-splicing
  misc_feature (1)..(404): Homolog of NCBI NO: 22329488 NR Description: expressed protein [Arabidopsis thaliana]
  misc_feature (1)..(404): Homolog of NCBI NO: 15219892 NR Description: expressed protein [Arabidopsis thaliana]
MTSIKSLRWLMRKKSGLSDGGKSSFKMKHLPFLAVLCTIMLFIVYRTTKYQYHQEEIDKKWSFWGQPKVYPSTYGKLKGLPRGIIHDNSDLELRPLWSRSSSRSKAVYSNSNLLAVPVGIKQKQNVDAMVQKFLQENFTIILFHYDGNVDGWWNLDWSSKAIHIIARNQTKWWFAKRFLHPDIVSIYDYIFLWDEDLGVEHFSPSRYVEIIKREGLEISQPALDPNSTEIHHRITIRARTKKFHRVYERRGSTRCSDLSEGPPCTGFVEGMAPVFSQSAWYCTWHLIQNDLVHGWGVDMKLGYCAQGDRTKKVGVVDSEYVFHKGIQTLGGSGHRMTKVSKLQRTTMKQGGVGIDVRTEIRRQSTWEFEIFKERWNKAIGADKNWVDPFKSDQRRIRKWRDTQRLAKNNI

SEQ ID NO: 60414 - protein, 400 aa, Glycine max
  peptide (1)..(400): Ceres Seq. ID no. 14312018
  misc_feature (66)..(377): Pfam Name: Protein of unknown function (DUF707) Pfam Description: Protein of unknown function (DUF707)
  misc_feature (58)..(323): Homolog of NCBI NO: 18408876 NR Description: F12A21.2 [Arabidopsis thaliana]
  misc_feature (99)..(379): Homolog of NCBI NO: 34903420 NR Description: hypothetical protein~similar to Oryza sativa
  misc_feature (163)..(394): Homolog of NCBI NO: 25402652 NR Description: hypothetical protein [imported] - Arabidopsis
  misc_feature (70)..(379): Homolog of NCBI NO: 19386727 NR Description: P0678F11.16 [Oryza sativa (japonica
  misc_feature (257)..(393): Homolog of NCBI NO: 34899756 NR Description: OJ1773_H01.1 [Oryza sativa (japonica
  misc_feature (81)..(238): Homolog of NCBI NO: 34899756 NR Description: OJ1773_H01.1 [Oryza sativa (japonica
  misc_feature (23)..(393): Homolog of NCBI NO: 33146749 NR Description: putative lysine ketoglutarate reductase
  misc_feature (66)..(394): Homolog of NCBI NO: 24636978 NR Description: lysine ketoglutarate reductase trans-splicing
  misc_feature (1)..(394): Homolog of NCBI NO: 22329488 NR Description: expressed protein [Arabidopsis thaliana]
  misc_feature (1)..(394): Homolog of NCBI NO: 15219892 NR Description: expressed protein [Arabidopsis thaliana]
MRKKSGLSDGGKSSFKMKHLPFLAVLCTIMLFIVYRTTKYQYHQEEIDKKWSFWGQPKVYPSTYGKLKGLPRGIIHDNSDLELRPLWSRSSSRSKAVYSNSNLLAVPVGIKQKQNVDAMVQKFLQENFTIILFHYDGNVDGWWNLDWSSKAIHIIARNQTKWWFAKRFLHPDIVSIYDYIFLWDEDLGVEHFSPSRYVEIIKREGLEISQPALDPNSTEIHHRITIRARTKKFHRVYERRGSTRCSDLSEGPPCTGFVEGMAPVFSQSAWYCTWHLIQNDLVHGWGVDMKLGYCAQGDRTKKVGVVDSEYVFHKGIQTLGGSGHRMTKVSKLQRTTMKQGGVGIDVRTEIRRQSTWEFEIFKERWNKAIGADKNWVDPFKSDQRRIRKWRDTQRLAKNNI

SEQ ID NO: 60415 - protein, 384 aa, Glycine max
  peptide (1)..(384): Ceres Seq. ID no. 14312019
  misc_feature (50)..(361): Pfam Name: Protein of unknown function (DUF707) Pfam Description: Protein of unknown function (DUF707)
  misc_feature (42)..(307): Homolog of NCBI NO: 18408876 NR Description: F12A21.2 [Arabidopsis thaliana]
  misc_feature (83)..(363): Homolog of NCBI NO: 34903420 NR Description: hypothetical protein~similar to Oryza sativa
  misc_feature (147)..(378): Homolog of NCBI NO: 25402652 NR Description: hypothetical protein [imported] - Arabidopsis
  misc_feature (54)..(363): Homolog of NCBI NO: 19386727 NR Description: P0678F11.16 [Oryza sativa (japonica
  misc_feature (241)..(377): Homolog of NCBI NO: 34899756 NR Description: OJ1773_H01.1 [Oryza sativa (japonica
  misc_feature (65)..(222): Homolog of NCBI NO: 34899756 NR Description: OJ1773_H01.1 [Oryza sativa (japonica
  misc_feature (7)..(377): Homolog of NCBI NO: 33146749 NR Description: putative lysine ketoglutarate reductase
  misc_feature (50)..(378): Homolog of NCBI NO: 24636978 NR Description: lysine ketoglutarate reductase trans-splicing
  misc_feature (1)..(378): Homolog of NCBI NO: 22329488 NR Description: expressed protein [Arabidopsis thaliana]
  misc_feature (1)..(378): Homolog of NCBI NO: 15219892 NR Description: expressed protein [Arabidopsis thaliana]
MKHLPFLAVLCTIMLFIVYRTTKYQYHQEEIDKKWSFWGQPKVYPSTYGKLKGLPRGIIHDNSDLELRPLWSRSSSRSKAVYSNSNLLAVPVGIKQKQNVDAMVQKFLQENFTIILFHYDGNVDGWWNLDWSSKAIHIIARNQTKWWFAKRFLHPDIVSIYDYIFLWDEDLGVEHFSPSRYVEIIKREGLEISQPALDPNSTEIHHRITIRARTKKFHRVYERRGSTRCSDLSEGPPCTGFVEGMAPVFSQSAWYCTWHLIQNDLVHGWGVDMKLGYCAQGDRTKKVGVVDSEYVFHKGIQTLGGSGHRMTKVSKLQRTTMKQGGVGIDVRTEIRRQSTWEFEIFKERWNKAIGADKNWVDPFKSDQRRIRKWRDTQRLAKNNI

SEQ ID NO: 60416 - DNA, 1392 bp, Glycine max
  misc_feature (1)..(1392): Ceres Seq. ID no. 14308598
aaaatatcacattgacgaagaagcccatacttgtgggagatagatggcacgcttgtcactgctcattttcgcgttctgcgccgtcgccgtcgccgtcgccgtcgcgggctcctccttcgatgatgccaaccctatccgtttagcgtcggacttggagtcgcaggtgctggacgtgatcggacagagccgccacgctctctccttcgcccgcttcgctcgccgccacggcaagcgctaccgttccgtcgacgagatccgcaaccgcttccggatcttctctgataatcttaaactcatcagatccaccaacaggaggtctctcacctacacgctcggcgtcaatcattttgctgactggacttgggaggagttcaccagacacaagctcggcgctcctcagaattgctctgccacgctcaaaggcaaccacaggctcaccgatgctgttcttcctgacgagaaagactggagaaaagaaggtatagtcagccaagttaaagatcaaggcaactgcggatcttgctggacattcagcacaactggtgcattggaggcagcttacgcacaggcctttgggaagaatatcagtctttctgagcagcagctagtggactgtgccggtgctttcaataactttggctgtaatggtggtttgccatcccaagcctttgaatacattaaatacaatggtggcctcgacacagaagaagcatatccctacaccggaaaagatggtgtctgcaaatttacagctaaaaacgttgctgttcgagtcattgactctatcaatatcactttgggtgctgaggatgaattgaaacaagcggttgcttttgttcggccagttagtgtggcatttgaggtagcgaaggacttccgattctacaataatggagtttacactagtaccatttgtggtagcacgcccatggatgtaaatcatgctgttcttgctgttgggtatggagttgaagatggtgttccatattggatcattaaaaattcatggggaagcaactggggtgacaatggttacttcaagatggaattagggaagaatatgtgcggtgttgcaacttgtgcatcttatcctgttgtggcttaaatgtatgcagagagatgtggtgcccgatatgcccgtgtaactgcaccttgcacgtcatgcttcgtatcgtccatcttaaagggtgaaacattgtactgcgataaaaatttacagtatatgttgatgtttatctgtaaaataagtttggaattgggatgttcattctccttgagctgaatcacattacaaaatcgtactgtaaatcatttgtcacatagaggtatcatagaaattataaactgtgttatgctccccaatctctagcaatgtaaggatagcgtgctgtg

SEQ ID NO: 60417 - protein, 353 aa, Glycine max
  peptide (1)..(353): Ceres Seq. ID no. 14308599
  misc_feature (136)..(351): Pfam Name: Papain family cysteine protease Pfam Description: Papain family cysteine protease
  misc_feature (17)..(353): Homolog of NCBI NO: 23397070 NR Description: putative cysteine proteinase AALP [Arabidopsis
  misc_feature (1)..(353): Homolog of NCBI NO: 18141289 NR Description: senescence-associated cysteine protease [Brassica
  misc_feature (1)..(353): Homolog of NCBI NO: 18424347 NR Description: cysteine proteinase AALP [Arabidopsis thaliana]
  misc_feature (1)..(353): Homolog of NCBI NO: 2499879 NR Description: Cysteine proteinase 3 precursor
  misc_feature (1)..(353): Homolog of NCBI NO: 28192371 NR Description: NTCP23-like cysteine proteinase [Nicotiana
  misc_feature (5)..(353): Homolog of NCBI NO: 18407961 NR Description: cysteine proteinase AALP, putative [Arabidopsis
  misc_feature (1)..(353): Homolog of NCBI NO: 8347420 NR Description: cysteine protease [Nicotiana tabacum]
  misc_feature (1)..(353): Homolog of NCBI NO: 2677828 NR Description: cysteine protease [Prunus armeniaca]
  misc_feature (1)..(353): Homolog of NCBI NO: 14422331 NR Description: early leaf senescence abundant cysteine protease
  misc_feature (1)..(353): Homolog of NCBI NO: 7435779 NR Description: cysteine proteinase (EC 3.4.22.-) - garden pea
MARLSLLIFAFCAVAVAVAVAGSSFDDANPIRLASDLESQVLDVIGQSRHALSFARFARRHGKRYRSVDEIRNRFRIFSDNLKLIRSTNRRSLTYTLGVNHFADWTWEEFTRHKLGAPQNCSATLKGNHRLTDAVLPDEKDWRKEGIVSQVKDQGNCGSCWTFSTTGALEAAYAQAFGKNISLSEQQLVDCAGAFNNFGCNGGLPSQAFEYIKYNGGLDTEEAYPYTGKDGVCKFTAKNVAVRVIDSINITLGAEDELKQAVAFVRPVSVAFEVAKDFRFYNNGVYTSTICGSTPMDVNHAVLAVGYGVEDGVPYWIIKNSWGSNWGDNGYFKMELGKNMCGVATCASYPVVA

SEQ ID NO: 60418 - DNA, 523 bp, Glycine max
  misc_feature (1)..(523): Ceres Seq. ID no. 15177774
acatatatcttaatggtcaggaaaatgcctcgaatgtatgtttagaggtagtgaaaacactgccacagttgcaacagaaagagccacaatcaagaggtggcagatttggtgataatggtggtcgtggtgggaactacaggtttggtggaagaggtggaggaggcaggaatggtaggttctccaatggtggtgggcgtggcggcaactggggtggaaagagatggtgaagctgagaagggactttgggagttgagtgttttcactctgctcggtgtgggatcataactgcgtgacgaccacgtggggatgaatacttcagtcgtgaatgaagaaacagttgatgttggttaaggcccacggaggattcgagttcaagatggattcaatgtgtcccctaacaacatattctatgtttcatttttgttttgttattttttattcttttgcggggaagcgtaagtttagatttttatattctgtctttcacaggagaaattttgatgtagtagtatatacttttacg

SEQ ID NO: 60419 - protein, 74 aa, Glycine max
  peptide (1)..(74): Ceres Seq. ID no. 15177775
  misc_feature (31)..(72): Homolog of NCBI NO: 17559334 NR Description: putative secreted or extracellular protein
  misc_feature (32)..(71): Homolog of NCBI NO: 18256903 NR Description: Nola1 protein [Mus musculus]
  misc_feature (32)..(72): Homolog of NCBI NO: 17559334 NR Description: putative secreted or extracellular protein
  misc_feature (14)..(72): Homolog of NCBI NO: 28279152 NR Description: Similar to nucleolar protein family A, member 1
  misc_feature (1)..(72): Homolog of NCBI NO: 14517482 NR Description: AT5g62190/mmi9_10 [Arabidopsis thaliana]
  misc_feature (1)..(72): Homolog of NCBI NO: 15241726 NR Description: DEAD box RNA helicase (prh75), putative
  misc_feature (1)..(72): Homolog of NCBI NO: 1488521 NR Description: RNA helicase [Arabidopsis thaliana]
  misc_feature (14)..(73): Homolog of NCBI NO: 9506713 NR Description: nucleolar protein family A, member 1; GAR1
  misc_feature (2)..(71): Homolog of NCBI NO: 7484683 NR Description: RNA helicase prh75 - spinach
  misc_feature (2)..(74): Homolog of NCBI NO: 7211427 NR Description: RNA helicase [Vigna radiata]
IYLNGQENASNVCLEVVKTLPQLQQKEPQSRGGRFGDNGGRGGNYRFGGRGGGGRNGRFSNGGGRGGNWGGKRW

SEQ ID NO: 60420 - protein, 66 aa, Glycine max
  peptide (1)..(66): Ceres Seq. ID no. 15177776
MKKQLMLVKAHGGFEFKMDSMCPLTTYSMFHFCFVIFYSFAGKRKFRFLYSVFHRRNFDVVVYTFT

SEQ ID NO: 60421 - protein, 61 aa, Glycine max
  peptide (1)..(61): Ceres Seq. ID no. 15177777
MLVKAHGGFEFKMDSMCPLTTYSMFHFCFVIFYSFAGKRKFRFLYSVFHRRNFDVVVYTFT

SEQ ID NO: 60422 - protein, 56 aa, Glycine max
  peptide (1)..(56): Ceres Seq. ID no. 15177778
MVVVVGTTGLVEEVEEAGMVGSPMVVGVAATGVERDGEAEKGLWELSVFTLLGVGS

SEQ ID NO: 60423 - DNA, 1244 bp, Glycine max
  misc_feature (1)..(1244): Ceres Seq. ID no. 15172875
agaggtgtagcagctcgagtttttgaaattgttggtttctgacaaggggcgtgagctgctatgcattttccacagttaaagccccaagagctactgcatgagcatttaacgtgtcttcacctaacaggattttggaattgttggtttgatcataagagctatcgcattatacatgagctttgttgatttctatatatctgaaatggttttcttcaccttattgttttcacatgttaatttaattgtgaaactgaattgtggtttgatacagagtaatcatattgttgctttgaaagtactcttcaagagtcaattgcaacaatcccaagttgtgcatcaacttcgacgtgaagttgaaatacagagtcatctccgacatccccacattttgcgcctctatggatacttttatgatcagaaacgagtttatttgattttagagtatgcacccaaaggtgaactttacaaggaattgcaaaaatgcaaatatttcagtgaaaggcgtgcagctacttatgttgcatcattggcccgagcccttatatattgccatggaaagcatgtaatacatagggatattaaaccagagaaccttcttattggttcacagggtgagttgaaaatagcagactttgggtggtcagtgcacacattcaatcgcaggcggaccatgtgtggcacactggattaccttcctcctgagatggtggagagtgtagaacatgatgcgagtgtggatatatggagccttggtgtcttgtgctatgagtttctttatggagtccctccttttgaggctaaagaacattctgatacttacaggaggataatacaagtggatctgaagttccctcctaaaccaattgtgtcttcagctgcaaaggatctcattagtcagatgctggtcaaggattcctctcaacgtctaccattgcacaaactcctcgaacacccttggattgttcagaatgccgagccctctggtgtatataggagctagtgcaccttatcattcttatattgtattttcttaatcgtggaaatcatcaaaatagcagctgcttctaagtatttgacaacattttggttttgagatgatgcaactatttgaagtaggttgctaggttaagagaaatcacttgttatatgattgtaaaccctactccttcaagggctatataaagaataactgatgtcacttgttatttgattgtaaaccctactccttcaagggctatataaag

SEQ ID NO: 60424 - protein, 275 aa, Glycine max
  peptide (1)..(275): Ceres Seq. ID no. 15172876
  misc_feature (33)..(263): Pfam Name: Protein kinase domain Pfam Description: Protein kinase domain
  misc_feature (33)..(271): Homolog of NCBI NO: 33355454 NR Description: serine/threonine protein kinase 6 [Mus musculus]
  misc_feature (33)..(271): Homolog of NCBI NO: 20862949 NR Description: serine/threonine kinase 6 [Mus musculus]
  misc_feature (33)..(275): Homolog of NCBI NO: 15225495 NR Description: protein kinase, putative [Arabidopsis thaliana]
  misc_feature (33)..(268): Homolog of NCBI NO: 27923860 NR Description: Serine/threonine protein kinase Eg2 (pEg2)
  misc_feature (33)..(268): Homolog of NCBI NO: 27923859 NR Description: Serine/threonine protein kinase Eg2-like
  misc_feature (33)..(268): Homolog of NCBI NO: 1079309 NR Description: protein kinase (EC 2.7.1.-) p46XlEg22 - African
  misc_feature (33)..(274): Homolog of NCBI NO: 34906424 NR Description: putative protein kinase [Oryza sativa (japonica
  misc_feature (33)..(274): Homolog of NCBI NO: 15225210 NR Description: serine/threonine protein kinase, putative
  misc_feature (33)..(274): Homolog of NCBI NO: 21592557 NR Description: putative serine/threonine protein kinase
  misc_feature (33)..(274): Homolog of NCBI NO: 15233958 NR Description: protein kinase, putative [Arabidopsis thaliana]
MSFVDFYISEMVFFTLLFSHVNLIVKLNCGLIQSNHIVALKVLFKSQLQQSQVVHQLRREVEIQSHLRHPHILRLYGYFYDQKRVYLILEYAPKGELYKELQKCKYFSERRAATYVASLARALIYCHGKHVIHRDIKPENLLIGSQGELKIADFGWSVHTFNRRRTMCGTLDYLPPEMVESVEHDASVDIWSLGVLCYEFLYGVPPFEAKEHSDTYRRIIQVDLKFPPKPIVSSAAKDLISQMLVKDSSQRLPLHKLLEHPWIVQNAEPSGVYRS

SEQ ID NO: 60425 - protein, 265 aa, Glycine max
  peptide (1)..(265): Ceres Seq. ID no. 15172877
  misc_feature (23)..(253): Pfam Name: Protein kinase domain Pfam Description: Protein kinase domain
  misc_feature (23)..(261): Homolog of NCBI NO: 27923856 NR Description: Serine/threonine kinase 6 (Aurora-family kinase (Aurora/IPL1-related kinase 1) (Ipl1- and aurora-related kinase
  misc_feature (23)..(261): Homolog of NCBI NO: 20862949 NR Description: serine/threonine kinase 6 [Mus musculus]
  misc_feature (23)..(265): Homolog of NCBI NO: 15225495 NR Description: protein kinase, putative [Arabidopsis thaliana]
  misc_feature (23)..(258): Homolog of NCBI NO: 27923860 NR Description: Serine/threonine protein kinase Eg2 (pEg2)
  misc_feature (23)..(258): Homolog of NCBI NO: 27923859 NR Description: Serine/threonine protein kinase Eg2-like
  misc_feature (23)..(258): Homolog of NCBI NO: 1079309 NR Description: protein kinase (EC 2.7.1.-) p46XlEg22 - African
  misc_feature (23)..(264): Homolog of NCBI NO: 34906424 NR Description: putative protein kinase [Oryza sativa (japonica
  misc_feature (23)..(264): Homolog of NCBI NO: 15225210 NR Description: serine/threonine protein kinase, putative
  misc_feature (23)..(264): Homolog of NCBI NO: 21592557 NR Description: putative serine/threonine protein kinase
  misc_feature (23)..(264): Homolog of NCBI NO: 15233958 NR Description: protein kinase, putative [Arabidopsis thaliana]
MVFFTLLFSHVNLIVKLNCGLIQSNHIVALKVLFKSQLQQSQVVHQLRREVEIQSHLRHPHILRLYGYFYDQKRVYLILEYAPKGELYKELQKCKYFSERRAATYVASLARALIYCHGKHVIHRDIKPENLLIGSQGELKIADFGWSVHTFNRRRTMCGTLDYLPPEMVESVEHDASVDIWSLGVLCYEFLYGVPPFEAKEHSDTYRRIIQVDLKFPPKPIVSSAAKDLISQMLVKDSSQRLPLHKLLEHPWIVQNAEPSGVYRS

SEQ ID NO: 60426 - DNA, 1041 bp, Glycine max
  misc_feature (1)..(1041): Ceres Seq. ID no. 13594163
ataaaatggagccacaacatgtgactgatcagaatatagaaactaaaaaatcatcaacaaaaaggctagctgataaggtggcagttataactggtggtgcaagaggaattggtgcagctgcagctaaactgtttgctgaaaatggagcacatgtggtcattgctgatgtgcttgatgaactaggcaccaccgtggccaagtccattggcggccactacatacactgtgatgtgtcgaaggaagatgatgttgaatcagccataaaccttgcactatcatggaagggccatctagacatcatgctcagcaatgctggaattggaggcccagagggaagaagcatcacaacccttgaaatggaccgagtgaggcacttgttctccatcaatctttatggaacaatacatggaatcaagcatgctgcaagggcaatgatcaaaggtaacaacaaaggaggatccatcatatgtacttcaagtgctgcatccatcatgggtggattggccttgcatggatataccatgacaaaagcagcaattgatgggttggtgagaagtgctgcttgtgagttgggagagcatttgattcgtgttaactgcatttccccacatggagtcccctctgagatgcttctcagtgcttgtagaagatttggacatgatgatattacccctcaaggggtgaaggaaatgattgggagcagggcaagtttgcttaaggggaaaggtgcaaccattgaagatgtggcacatgctgctttgttcttggctagtgatgagtctggcttcattacagcacacaatcttcttattgatgggggacacacatctgctgatagcagaatgagttacatgtaccaagacccaaaatgatgagaattatgtaactatcgtttgtagaggaaacacaagaacttgatgatagaatataaaagatttacaataattacatatattctatcacttgatactcttaactttatctactatagttctttaatttccattcgaggaataatatatcgtttcttctttgggcctt

SEQ ID NO: 60427 - protein, 289 aa, Glycine max
  peptide (1)..(289): Ceres Seq. ID no. 13594164
  misc_feature (17)..(277): Homolog of NCBI NO: 34898190 NR Description: putative short-chain alcohol dehydrogenase
  misc_feature (14)..(275): Homolog of NCBI NO: 34899230 NR Description: alcohol dehydrogenase-like protein
  misc_feature (227)..(277): Homolog of NCBI NO: 1717794 NR Description: SEX DETERMINATION PROTEIN TASSELSEED 2
  misc_feature (2)..(230): Homolog of NCBI NO: 1717794 NR Description: SEX DETERMINATION PROTEIN TASSELSEED 2
  misc_feature (20)..(277): Homolog of NCBI NO: 15230558 NR Description: short-chain dehydrogenase/reductase family
  misc_feature (17)..(285): Homolog of NCBI NO: 2501781 NR Description: alcohol dehydrogenase [Arabidopsis thaliana]
  misc_feature (17)..(285): Homolog of NCBI NO: 21554236 NR Description: alcohol dehydrogenase (ATA1) [Arabidopsis
  misc_feature (17)..(285): Homolog of NCBI NO: 15229190 NR Description: tapetal-specific alcohol dehydrogenase (ATA1)
  misc_feature (15)..(287): Homolog of NCBI NO: 1293688 NR Description: STA1-2
  misc_feature (15)..(287): Homolog of NCBI NO: 1293690 NR Description: STA1-12
KMEPQHVTDQNIETKKSSTKRLADKVAVITGGARGIGAAAAKLFAENGAHVVIADVLDELGTTVAKSIGGHYIHCDVSKEDDVESAINLALSWKGHLDIMLSNAGIGGPEGRSITTLEMDRVRHLFSINLYGTIHGIKHAARAMIKGNNKGGSIICTSSAASIMGGLALHGYTMTKAAIDGLVRSAACELGEHLIRVNCISPHGVPSEMLLSACRRFGHDDITPQGVKEMIGSRASLLKGKGATIEDVAHAALFLASDESGFITAHNLLIDGGHTSADSRMSYMYQDPK

SEQ ID NO: 60428 - protein, 288 aa, Glycine max
  peptide (1)..(288): Ceres Seq. ID no. 13594165
  misc_feature (16)..(276): Homolog of NCBI NO: 34898190 NR Description: putative short-chain alcohol dehydrogenase
  misc_feature (13)..(274): Homolog of NCBI NO: 34899230 NR Description: alcohol dehydrogenase-like protein
  misc_feature (226)..(276): Homolog of NCBI NO: 1717794 NR Description: SEX DETERMINATION PROTEIN TASSELSEED 2
  misc_feature (1)..(229): Homolog of NCBI NO: 1717794 NR Description: SEX DETERMINATION PROTEIN TASSELSEED 2
  misc_feature (19)..(276): Homolog of NCBI NO: 15230558 NR Description: short-chain dehydrogenase/reductase family
  misc_feature (16)..(284): Homolog of NCBI NO: 2501781 NR Description: alcohol dehydrogenase [Arabidopsis thaliana]
  misc_feature (16)..(284): Homolog of NCBI NO: 21554236 NR Description: alcohol dehydrogenase (ATA1) [Arabidopsis
  misc_feature (16)..(284): Homolog of NCBI NO: 15229190 NR Description: tapetal-specific alcohol dehydrogenase (ATA1)
  misc_feature (14)..(286): Homolog of NCBI NO: 1293688 NR Description: STA1-2
  misc_feature (14)..(286): Homolog of NCBI NO: 1293690 NR Description: STA1-12
MEPQHVTDQNIETKKSSTKRLADKVAVITGGARGIGAAAAKLFAENGAHVVIADVLDELGTTVAKSIGGHYIHCDVSKEDDVESAINLALSWKGHLDIMLSNAGIGGPEGRSITTLEMDRVRHLFSINLYGTIHGIKHAARAMIKGNNKGGSIICTSSAASIMGGLALHGYTMTKAAIDGLVRSAACELGEHLIRVNCISPHGVPSEMLLSACRRFGHDDITPQGVKEMIGSRASLLKGKGATIEDVAHAALFLASDESGFITAHNLLIDGGHTSADSRMSYMYQDPK

SEQ ID NO: 60429 - protein, 190 aa, Glycine max
  peptide (1)..(190): Ceres Seq. ID no. 13594166
  misc_feature (1)..(178): Homolog of NCBI NO: 34898190 NR Description: putative short-chain alcohol dehydrogenase
  misc_feature (1)..(176): Homolog of NCBI NO: 34899230 NR Description: alcohol dehydrogenase-like protein
  misc_feature (128)..(178): Homolog of NCBI NO: 1717794 NR Description: SEX DETERMINATION PROTEIN TASSELSEED 2
  misc_feature (1)..(131): Homolog of NCBI NO: 1717794 NR Description: SEX DETERMINATION PROTEIN TASSELSEED 2
  misc_feature (1)..(178): Homolog of NCBI NO: 15230558 NR Description: short-chain dehydrogenase/reductase family
  misc_feature (1)..(186): Homolog of NCBI NO: 2501781 NR Description: alcohol dehydrogenase [Arabidopsis thaliana]
  misc_feature (1)..(186): Homolog of NCBI NO: 21554236 NR Description: alcohol dehydrogenase (ATA1) [Arabidopsis
  misc_feature (1)..(186): Homolog of NCBI NO: 15229190 NR Description: tapetal-specific alcohol dehydrogenase (ATA1)
  misc_feature (1)..(188): Homolog of NCBI NO: 1293688 NR Description: STA1-2
  misc_feature (1)..(188): Homolog of NCBI NO: 1293690 NR Description: STA1-12
MLSNAGIGGPEGRSITTLEMDRVRHLFSINLYGTIHGIKHAARAMIKGNNKGGSIICTSSAASIMGGLALHGYTMTKAAIDGLVRSAACELGEHLIRVNCISPHGVPSEMLLSACRRFGHDDITPQGVKEMIGSRASLLKGKGATIEDVAHAALFLASDESGFITAHNLLIDGGHTSADSRMSYMYQDPK

SEQ ID NO: 60430 - DNA, 2002 bp, Glycine max
  misc_feature (1)..(2002): Ceres Seq. ID no. 15169092
agatctgaagaagccacataaccctaagcttcaaacgggtaagtgtcgctgggacttcaatggcagtgaccgaagctcaaaatcctcttcttggagaaaacacatgtggttccttgttaaaaaagcttcaggaaatatgggatgaggttggtgagagcgatgagcaacgagacaagatgcttcttcagttagaacaggagtgcttggatgtgtacaagagaaaggttgagcaggctgcaaagtcaagggcgcagctacttcaagctctgtctgatgctaagcttgagctttccactcttctatcagcacttggagaaaagagctttgctggaattcctgagaatacttctggaactatcaaagaacagcttgcagctatagcaccagtacttgaacagttatggcaacaaaaagaagaaagaattaaggagttctcagatgtacagtcacagatccaacaaatatgtggagagatagccgggaacttgaaccttaatgatgtttcacctgcagttgatgagtctgatttgtccctgaagaagttggatgaatatcaatccgagctccaagaacttcaaaaggaaaagagcgagaggttgcacaaggttcttgaatttgtgagtacggtgcatgatctatgtgctgtccttggtatagacttcttcactactgtaactgaggttcatccaagtctaaatgactctactggtgttcaatccaagagcattagtaatgacacccttgcaaggctggctaagacagtcttgacgctgaaagaagataaaaaacagaggctgcacaagctccaagaattagcttctcagttaattgatctttggaatctaatggatactcatcccgaggaaaggagactatttgaccatgttacctgtaatatgtcagcttctgttgatgaagtcactgttcctggtgcccttgctctggatctgattgagcaggctgaagtggaagttgagagacttgatcagctgaaagccagcaggatgaaggaaattgctttcaagaagcaagcagagctcgaagagatatttgtctgtgctcatatagaagtagatccagatgctgcccgggagaagattatggccttgattgattcaggaaacattgaaccaactgaattactggctgacatggacaatcagatagcaacagcaaaagaagaagctttaagccgaaaagatatattggacaaggttgagaaatggatgtcagcatgtgaagaagaaagttggcttgaagattataatcgggatgataacaggtataatgcaagcagaggtgcacacttaaacctcaaacgtgcagagaaagctcggatattggtcaacaaaattccagctttggtcgatacattggttgctaaaactcgtgcatgggaagaagatcatggcatgtcatttacatatgatggtgttcctcttcttgccatgttagatgaatatgccatgctcagacatgaacgggaagaggaaaaacggaggatgagggatcagaaaaagcatcacgagcagcgaaacacggaacaagaaaccatctttggttcaagacccagccctgctaggccagttagttccagtaagtcaggaggtcctcgtgctaacggaggagccaatggtactcctaaccgacggctatcgcttaatgctcataaaaatggaaacaggtccacatcaaaagatggaaaaagggataacagactatctgctccggtgaattatgtggccatatcaaaagaagatgctgcttcccatgtttctggtactgaacccatcccggcatcaccctaatgacgagatcttcattttcaaccctataatttcatctttgtagcattgtcaaattactagttactgctttaggaattataatatgggagtgacaagtaattagagaggaactgttctgagctgtgtatgttcaatttgccattttggaggttttctcaatacatatgccctttaatatgaaaatatacacagtt

SEQ ID NO: 60431 - protein, 582 aa, Glycine max
  peptide (1)..(582): Ceres Seq. ID no. 15169093
  misc_feature (36)..(580): Pfam Name: Microtubule associated protein (MAP65/ASE1 family) Pfam Description: Microtubule associated protein (MAP65/ASE1
  misc_feature (248)..(577): Homolog of NCBI NO: 8778239 NR Description: F10B6.9 [Arabidopsis thaliana]
  misc_feature (15)..(582): Homolog of NCBI NO: 25410943 NR Description: hypothetical protein At2g01910 [imported] -
  misc_feature (15)..(577): Homolog of NCBI NO: 21539547 NR Description: unknown protein [Arabidopsis thaliana]
  misc_feature (1)..(432): Homolog of NCBI NO: 7485328 NR Description: hypothetical protein F10M23.100 - Arabidopsis
  misc_feature (1)..(582): Homolog of NCBI NO: 18416818 NR Description: microtubule associated protein (MAP65/ASE1)
  misc_feature (1)..(582): Homolog of NCBI NO: 11558256 NR Description: microtubule-associated protein MAP65-1c
  misc_feature (1)..(582): Homolog of NCBI NO: 11558254 NR Description: microtubule-associated protein MAP65-1b
  misc_feature (1)..(582): Homolog of NCBI NO: 28200790 NR Description: 65kD microtubule associated protein [Daucus
  misc_feature (1)..(582): Homolog of NCBI NO: 15240485 NR Description: microtubule associated protein (MAP65/ASE1)
  misc_feature (1)..(582): Homolog of NCBI NO: 11558252 NR Description: microtubule-associated protein MAP65-1a
MAVTEAQNPLLGENTCGSLLKKLQEIWDEVGESDEQRDKMLLQLEQECLDVYKRKVEQAAKSRAQLLQALSDAKLELSTLLSALGEKSFAGIPENTSGTIKEQLAAIAPVLEQLWQQKEERIKEFSDVQSQIQQICGEIAGNLNLNDVSPAVDESDLSLKKLDEYQSELQELQKEKSERLHKVLEFVSTVHDLCAVLGIDFFTTVTEVHPSLNDSTGVQSKSISNDTLARLAKTVLTLKEDKKQRLHKLQELASQLIDLWNLMDTHPEERRLFDHVTCNMSASVDEVTVPGALALDLIEQAEVEVERLDQLKASRMKEIAFKKQAELEEIFVCAHIEVDPDAAREKIMALIDSGNIEPTELLADMDNQIATAKEEALSRKDILDKVEKWMSACEEESWLEDYNRDDNRYNASRGAHLNLKRAEKARILVNKIPALVDTLVAKTRAWEEDHGMSFTYDGVPLLAMLDEYAMLRHEREEEKRRMRDQKKHHEQRNTEQETIFGSRPSPARPVSSSKSGGPRANGGANGTPNRRLSLNAHKNGNRSTSKDGKRDNRLSAPVNYVAISKEDAASHVSGTEPIPASP

SEQ ID NO: 60432 - protein, 543 aa, Glycine max
  peptide (1)..(543): Ceres Seq. ID no. 15169094
  misc_feature (1)..(541): Pfam Name: Microtubule associated protein (MAP65/ASE1 family) Pfam Description: Microtubule associated protein (MAP65/ASE1
  misc_feature (209)..(538): Homolog of NCBI NO: 8778239 NR Description: F10B6.9 [Arabidopsis thaliana]
  misc_feature (1)..(543): Homolog of NCBI NO: 25410943 NR Description: hypothetical protein At2g01910 [imported] -
  misc_feature (1)..(538): Homolog of NCBI NO: 21539547 NR Description: unknown protein [Arabidopsis thaliana]
  misc_feature (1)..(393): Homolog of NCBI NO: 7485328 NR Description: hypothetical protein F10M23.100 - Arabidopsis
  misc_feature (1)..(543): Homolog of NCBI NO: 18416818 NR Description: microtubule associated protein (MAP65/ASE1)
  misc_feature (1)..(543): Homolog of NCBI NO: 11558256 NR Description: microtubule-associated protein MAP65-1c
  misc_feature (1)..(543): Homolog of NCBI NO: 11558254 NR Description: microtubule-associated protein MAP65-1b
  misc_feature (1)..(543): Homolog of NCBI NO: 28200790 NR Description: 65kD microtubule associated protein [Daucus
  misc_feature (1)..(543): Homolog of NCBI NO: 15240485 NR Description: microtubule associated protein (MAP65/ASE1)
  misc_feature (1)..(543): Homolog of NCBI NO: 11558252 NR Description: microtubule-associated protein MAP65-1a
MLLQLEQECLDVYKRKVEQAAKSRAQLLQALSDAKLELSTLLSALGEKSFAGIPENTSGTIKEQLAAIAPVLEQLWQQKEERIKEFSDVQSQIQQICGEIAGNLNLNDVSPAVDESDLSLKKLDEYQSELQELQKEKSERLHKVLEFVSTVHDLCAVLGIDFFTTVTEVHPSLNDSTGVQSKSISNDTLARLAKTVLTLKEDKKQRLHKLQELASQLIDLWNLMDTHPEERRLFDHVTCNMSASVDEVTVPGALALDLIEQAEVEVERLDQLKASRMKEIAFKKQAELEEIFVCAHIEVDPDAAREKIMALIDSGNIEPTELLADMDNQIATAKEEALSRKDILDKVEKWMSACEEESWLEDYNRDDNRYNASRGAHLNLKRAEKARILVNKIPALVDTLVAKTRAWEEDHGMSFTYDGVPLLAMLDEYAMLRHEREEEKRRMRDQKKHHEQRNTEQETIFGSRPSPARPVSSSKSGGPRANGGANGTPNRRLSLNAHKNGNRSTSKDGKRDNRLSAPVNYVAISKEDAASHVSGTEPIPASP

SEQ ID NO: 60433 - protein, 320 aa, Glycine max
  peptide (1)..(320): Ceres Seq. ID no. 15169095
  misc_feature (1)..(318): Pfam Name: Microtubule associated protein (MAP65/ASE1 family) Pfam Description: Microtubule associated protein (MAP65/ASE1
  misc_feature (1)..(315): Homolog of NCBI NO: 8778239 NR Description: F10B6.9 [Arabidopsis thaliana]
  misc_feature (1)..(320): Homolog of NCBI NO: 25410943 NR Description: hypothetical protein At2g01910 [imported] -
  misc_feature (1)..(315): Homolog of NCBI NO: 21539547 NR Description: unknown protein [Arabidopsis thaliana]
  misc_feature (1)..(170): Homolog of NCBI NO: 7485328 NR Description: hypothetical protein F10M23.100 - Arabidopsis
  misc_feature (1)..(320): Homolog of NCBI NO: 18416818 NR Description: microtubule associated protein (MAP65/ASE1)
  misc_feature (1)..(320): Homolog of NCBI NO: 11558256 NR Description: microtubule-associated protein MAP65-1c
  misc_feature (1)..(320): Homolog of NCBI NO: 11558254 NR Description: microtubule-associated protein MAP65-1b
  misc_feature (1)..(320): Homolog of NCBI NO: 28200790 NR Description: 65kD microtubule associated protein [Daucus
  misc_feature (1)..(320): Homolog of NCBI NO: 15240485 NR Description: microtubule associated protein (MAP65/ASE1)
  misc_feature (1)..(320): Homolog of NCBI NO: 11558252 NR Description: microtubule-associated protein MAP65-1a
MDTHPEERRLFDHVTCNMSASVDEVTVPGALALDLIEQAEVEVERLDQLKASRMKEIAFKKQAELEEIFVCAHIEVDPDAAREKIMALIDSGNIEPTELLADMDNQIATAKEEALSRKDILDKVEKWMSACEEESWLEDYNRDDNRYNASRGAHLNLKRAEKARILVNKIPALVDTLVAKTRAWEEDHGMSFTYDGVPLLAMLDEYAMLRHEREEEKRRMRDQKKHHEQRNTEQETIFGSRPSPARPVSSSKSGGPRANGGANGTPNRRLSLNAHKNGNRSTSKDGKRDNRLSAPVNYVAISKEDAASHVSGTEPIPASP

SEQ ID NO: 60434 - DNA, 1500 bp, Glycine max
  misc_feature (1)..(1500): Ceres Seq. ID no. 14308636
tttgcaatggaatatggcgagttctggctgctagctcagcatcaaccaacagaccctattgccaaatctgtggctgttctgaacggagttccagtgctcacaagacctgcagcagtgcaaaagcatcgccaagccatcactgagctcaacaatctggtcaaaacaacgttgctagtcattgagttaatctttgagttggagaagcttacaacttttgacacaaaggatgtgcctgctttgttgcccgcaatagaacaaattcctgttgatgtctactgggctatcatcaccattgtggctattgttactcagattgattacctcactactgagtcagggaacaagcaagacctgtcccactatggtcaaaagatcaacatcatacttagcaaactgaggaagcaaatcatgctgtgcagacaacagattgaggaggcagagtatcaccacaggctcaggaaattttttcaaacgcctactgaaattatggaagtgtttaagtttctagtttattcgaaggatgctccacagctactgtttgatggtgccgctaagaccacggtcgaaatcactgagctcaagaagaagcatgtttacttgctgatttccactctagacatcacggaggaagagatttcagtactccgaccagtttatgattctattaaagctaatgatcagtataagattgtgtggattcccattgtagaagaatggaccgaaaagctgcacaagaaatttgagtttttgaaaagcaagatgccttggtatgtggtgcagcattctggacccatagcagggtacaaatacatcaaggaggaatggcacttcaaaaagaagcctatggttgtggtgttgaatcctcaaggaaaagtgcagcatgcaaacgcattccatctcattcatgtttatggaatgaaggccttcccctttactattgcggatcaagagagaattgatagagaaattcactggattggttctgtagtcggggattctcacccccacataagcacatgggtaagtacatttcacaaaccaattaggatacacatattataaacctatataaattaagtactcatttgaaaatattttagttgttaagttttgagcaatcatattttgaatatttcgttagcctttatgttgtgcaaagtatcatacaattaatacacaggaatcttaaaatttctttttcaagatgaatttcagattatagagagtttttctagaaagagaatagaaaaagaatcgatacctaatctaaagaatagctgaattatttataccaatttttaacaaatggacatcacactatttttaatagtttgttataactgttttaactaccagcttaaaataaaaagacgtaggaatgagaagttttagttatgtgaatcgactgatcaacactttacaaggttttgtttggtattgtttaagttagcattgacaaggacatgagcttaatggagatataaggttgattgagtaatt

SEQ ID NO: 60435 - protein, 353 aa, Glycine max
  peptide (1)..(353): Ceres Seq. ID no. 14308637
  misc_feature (188)..(335): Homolog of NCBI NO: 15220542 NR Description: F12A21.8 [Arabidopsis thaliana]
  misc_feature (1)..(225): Homolog of NCBI NO: 15232160 NR Description: expressed protein [Arabidopsis thaliana]
  misc_feature (103)..(341): Homolog of NCBI NO: 15232160 NR Description: expressed protein [Arabidopsis thaliana]
  misc_feature (2)..(336): Homolog of NCBI NO: 6016724 NR Description: unknown protein [Arabidopsis thaliana]
  misc_feature (2)..(336): Homolog of NCBI NO: 18395902 NR Description: expressed protein [Arabidopsis thaliana]
FAMEYGEFWLLAQHQPTDPIAKSVAVLNGVPVLTRPAAVQKHRQAITELNNLVKTTLLVIELIFELEKLTTFDTKDVPALLPAIEQIPVDVYWAIITIVAIVTQIDYLTTESGNKQDLSHYGQKINIILSKLRKQIMLCRQQIEEAEYHHRLRKFFQTPTEIMEVFKFLVYSKDAPQLLFDGAAKTTVEITELKKKHVYLLISTLDITEEEISVLRPVYDSIKANDQYKIVWIPIVEEWTEKLHKKFEFLKSKMPWYVVQHSGPIAGYKYIKEEWHFKKKPMVVVLNPQGKVQHANAFHLIHVYGMKAFPFTIADQERIDREIHWIGSVVGDSHPHISTWVSTFHKPIRIHIL

SEQ ID NO: 60436 - protein, 351 aa, Glycine max
  peptide (1)..(351): Ceres Seq. ID no. 14308638
  misc_feature (186)..(333): Homolog of NCBI NO: 15220542 NR Description: F12A21.8 [Arabidopsis thaliana]
  misc_feature (1)..(223): Homolog of NCBI NO: 15232160 NR Description: expressed protein [Arabidopsis thaliana]
  misc_feature (101)..(339): Homolog of NCBI NO: 15232160 NR Description: expressed protein [Arabidopsis thaliana]
  misc_feature (1)..(334): Homolog of NCBI NO: 6016724 NR Description: unknown protein [Arabidopsis thaliana]
  misc_feature (1)..(334): Homolog of NCBI NO: 18395902 NR Description: expressed protein [Arabidopsis thaliana]
MEYGEFWLLAQHQPTDPIAKSVAVLNGVPVLTRPAAVQKHRQAITELNNLVKTTLLVIELIFELEKLTTFDTKDVPALLPAIEQIPVDVYWAIITIVAIVTQIDYLTTESGNKQDLSHYGQKINIILSKLRKQIMLCRQQIEEAEYHHRLRKFFQTPTEIMEVFKFLVYSKDAPQLLFDGAAKTTVEITELKKKHVYLLISTLDITEEEISVLRPVYDSIKANDQYKIVWIPIVEEWTEKLHKKFEFLKSKMPWYVVQHSGPIAGYKYIKEEWHFKKKPMVVVLNPQGKVQHANAFHLIHVYGMKAFPFTIADQERIDREIHWIGSVVGDSHPHISTWVSTFHKPIRIHIL

SEQ ID NO: 60437 - protein, 217 aa, Glycine max
  peptide (1)..(217): Ceres Seq. ID no. 14308639
  misc_feature (52)..(199): Homolog of NCBI NO: 15220542 NR Description: F12A21.8 [Arabidopsis thaliana]
  misc_feature (1)..(89): Homolog of NCBI NO: 15232160 NR Description: expressed protein [Arabidopsis thaliana]
  misc_feature (1)..(205): Homolog of NCBI NO: 15232160 NR Description: expressed protein [Arabidopsis thaliana]
  misc_feature (1)..(200): Homolog of NCBI NO: 6016724 NR Description: unknown protein [Arabidopsis thaliana]
  misc_feature (1)..(200): Homolog of NCBI NO: 18395902 NR Description: expressed protein [Arabidopsis thaliana]
MLCRQQIEEAEYHHRLRKFFQTPTEIMEVFKFLVYSKDAPQLLFDGAAKTTVEITELKKKHVYLLISTLDITEEEISVLRPVYDSIKANDQYKIVWIPIVEEWTEKLHKKFEFLKSKMPWYVVQHSGPIAGYKYIKEEWHFKKKPMVVVLNPQGKVQHANAFHLIHVYGMKAFPFTIADQERIDREIHWIGSVVGDSHPHISTWVSTFHKPIRIHIL

SEQ ID NO: 60438 - DNA, 1137 bp, Glycine max
  misc_feature (1)..(1137): Ceres Seq. ID no. 15169976
gttgtatccaaatccaaaaaaacctttttctgaatcagtcgtgaaccaaaagaggaagatggagctgtggaacagagcccgaagctttgcggaagaagcagcgaaacgatcccaggaactgtcgttgggagctagagctacccaattcaccaacatcatagcagaaaccaccaaagaaatcgcagcgcaagcttccaagcacttgccccgaccttatgccataaacgacgtcgatctccaccgttttggcatcaccgaagagttgagggactttgtcaaaggaatcaccatcactacctttgaggattttccccttcaagatgatacggaattgtctgatgttcctgcagtttcaaatgttaggcaggacctaaccgagtggcaggaaaaacatgccagtcttgttctttctacagtcaaggagatttcaggattgaggtatgaactgtgtccacgagtcatgaaagagaggaagttttggagaatatattttatacttgtgaataatcacactgcaccctatgagaataagtacatggaagacaataaactaaaatcatgtgaacaagtaaaagatcacaaagtgatgatggaatccttaaacactgaattgatctccaatcaagaggtgcaagaagtgaaaaaggaggccaaaccttcgaattcatcaacagagcaagacttggatgtatttcttctgggagaaggaaacagtgatgatgagcctgatgatggcgatgggggatatgatgatgatttggaaaaactgatggataattcggatgatgagaaagggaaatcatagatggtgcttgaaattattggctgacattaaataaggggttgcaacatgcctgagaatatacatgatgaaatgaggcttaatttattgatgcgacacatacggtggctgatctgttccgtgatgcctacatttattctttcaaccctttcctgcccctttatttatgtagttgcttccccatgttgagggatgaaattcctgcccctttatttatgtagttgcttccccatgttgagggatgaaaaagttgggtttgtgattataaaaaagttaattatttggtgtctagttttgttagttttttatgtaaaaaatacacattaaatgtactg

SEQ ID NO: 60439 - protein, 267 aa, Glycine max
  peptide (1)..(267): Ceres Seq. ID no. 15169977
  misc_feature (121)..(167): Pfam Name: BSD domain Pfam Description: BSD domain
  misc_feature (33)..(225): Homolog of NCBI NO: 34909848 NR Description: OSJNBb0053G03.5 [Oryza sativa (japonica
  misc_feature (74)..(224): Homolog of NCBI NO: 18425006 NR Description: expressed protein [Arabidopsis thaliana]
  misc_feature (83)..(231): Homolog of NCBI NO: 28273391 NR Description: putative BSD domain containing protein
  misc_feature (209)..(267): Homolog of NCBI NO: 15222681 NR Description: expressed protein [Arabidopsis thaliana]
  misc_feature (83)..(224): Homolog of NCBI NO: 18404344 NR Description: expressed protein [Arabidopsis thaliana]
  misc_feature (21)..(267): Homolog of NCBI NO: 25404796 NR Description: hypothetical protein T6L1.21 [imported] -
  misc_feature (21)..(266): Homolog of NCBI NO: 30697787 NR Description: expressed protein [Arabidopsis thaliana]
  misc_feature (21)..(267): Homolog of NCBI NO: 15450417 NR Description: At1g26300/F28B23_4 [Arabidopsis thaliana]
LYPNPKKPFSESVVNQKRKMELWNRARSFAEEAAKRSQELSLGARATQFTNIIAETTKEIAAQASKHLPRPYAINDVDLHRFGITEELRDFVKGITITTFEDFPLQDDTELSDVPAVSNVRQDLTEWQEKHASLVLSTVKEISGLRYELCPRVMKERKFWRIYFILVNNHTAPYENKYMEDNKLKSCEQVKDHKVMMESLNTELISNQEVQEVKKEAKPSNSSTEQDLDVFLLGEGNSDDEPDDGDGGYDDDLEKLMDNSDDEKGKS

SEQ ID NO: 60440 - protein, 248 aa, Glycine max
  peptide (1)..(248): Ceres Seq. ID no. 15169978
  misc_feature (102)..(148): Pfam Name: BSD domain Pfam Description: BSD domain
  misc_feature (14)..(206): Homolog of NCBI NO: 34909848 NR Description: OSJNBb0053G03.5 [Oryza sativa (japonica
  misc_feature (55)..(205): Homolog of NCBI NO: 18425006 NR Description: expressed protein [Arabidopsis thaliana]
  misc_feature (64)..(212): Homolog of NCBI NO: 28273391 NR Description: putative BSD domain containing protein
  misc_feature (190)..(248): Homolog of NCBI NO: 15222681 NR Description: expressed protein [Arabidopsis thaliana]
  misc_feature (64)..(205): Homolog of NCBI NO: 18404344 NR Description: expressed protein [Arabidopsis thaliana]
  misc_feature (2)..(248): Homolog of NCBI NO: 25404796 NR Description: hypothetical protein T6L1.21 [imported] -
  misc_feature (2)..(247): Homolog of NCBI NO: 30697787 NR Description: expressed protein [Arabidopsis thaliana]
  misc_feature (2)..(248): Homolog of NCBI NO: 15450417 NR Description: At1g26300/F28B23_4 [Arabidopsis thaliana]
MELWNRARSFAEEAAKRSQELSLGARATQFTNIIAETTKEIAAQASKHLPRPYAINDVDLHRFGITEELRDFVKGITITTFEDFPLQDDTELSDVPAVSNVRQDLTEWQEKHASLVLSTVKEISGLRYELCPRVMKERKFWRIYFILVNNHTAPYENKYMEDNKLKSCEQVKDHKVMMESLNTELISNQEVQEVKKEAKPSNSSTEQDLDVFLLGEGNSDDEPDDGDGGYDDDLEKLMDNSDDEKGKS

SEQ ID NO: 60441 - DNA, 1281 bp, Glycine max
  misc_feature (1)..(1281): Ceres Seq. ID no. 14311647
atgccgttcttctctgttatttgagtcaaaggattatccccatgtcagttgcaccagttgacggtattccctcattaaacagtgatctcttctatgatatatttcgtcgacttgatggtgcaacattggctagtgcagcatgtacttgtgcagcgctgtgttccatctcaaaagaagagagtttatgggagaacgtatgttcctctatgtggccttcaaccaatagagaggatgtcaaaagtttaatatcttctgttggtggattcagaaaattctatgcagattgtttcccacttattgtaaacaaggaggttgtagggtatcaaccaaacaactatctcgagtacccggacaattggactgaagctgaatattatggggacatgaatgaatctgaaagcatctctccatcagattttgtttctatagtagatattaggttcaaggggaaaccaatctgttccaaagttctgtggggaattccaaatgcaaatggctatgatggttggttctataactgccctttccggattgatattctcacttatgcagatagagatgataacaatgatggagcggttcacctttctgtatctgatggtctgccaccaattacatccttggagagggaaaggaaagatgggaagctgtggcgggaactccgtgaagggctccagcttagttggattatagtaaacaggaaaataaagcaagctgcaaatcttgctagctggagccctcttggtggtcaaagacactggccaaccgataaggattttgttatccgctttggatcagttctacccgccagggacattcttccttgtcaggtagcagagtgtatccttattatgaagtttagagtgattcacactgaagaagatgggtttcaaacaactcttaaattaacagagctgagcatgcagttggaagacatggaaggtgctcatgttaatggaagaaacagtttgcttatacttaaggaagcacttagcagccgaaggagcaaaaattatggtgaagtactcgagtcttgtcatatgtattcaaaagtacagaatgagttgaaagaggagaagatgagaaacgaaagtcggttggacagactttgtattttaagtggcattgcagcatttatgacgttctggtactgtgttttatgaaatggtagcgcatagtcatttagtggaatatgctaatgtagctctaacaaatgctggaccttggcactcctgtgtaagatgtggttttgcttaccataataaacaaatcaataaacag

SEQ ID NO: 60442 - protein, 386 aa, Glycine max
  peptide (1)..(386): Ceres Seq. ID no. 14311648
  misc_feature (24)..(66): Pfam Name: F-box domain Pfam Description: F-box domain
  misc_feature (19)..(99): Homolog of NCBI NO: 15238908 NR Description: F-box protein family [Arabidopsis thaliana]
  misc_feature (15)..(99): Homolog of NCBI NO: 15227574 NR Description: F-box protein family [Arabidopsis thaliana]
  misc_feature (205)..(379): Homolog of NCBI NO: 15227574 NR Description: F-box protein family [Arabidopsis thaliana]
  misc_feature (20)..(97): Homolog of NCBI NO: 15225867 NR Description: F-box protein family [Arabidopsis thaliana]
  misc_feature (165)..(386): Homolog of NCBI NO: 15225867 NR Description: F-box protein family [Arabidopsis thaliana]
AVLLCYLSQRIIPMSVAPVDGIPSLNSDLFYDIFRRLDGATLASAACTCAALCSISKEESLWENVCSSMWPSTNREDVKSLISSVGGFRKFYADCFPLIVNKEVVGYQPNNYLEYPDNWTEAEYYGDMNESESISPSDFVSIVDIRFKGKPICSKVLWGIPNANGYDGWFYNCPFRIDILTYADRDDNNDGAVHLSVSDGLPPITSLERERKDGKLWRELREGLQLSWIIVNRKIKQAANLASWSPLGGQRHWPTDKDFVIRFGSVLPARDILPCQVAECILIMKFRVIHTEEDGFQTTLKLTELSMQLEDMEGAHVNGRNSLLILKEALSSRRSKNYGEVLESCHMYSKVQNELKEEKMRNESRLDRLCILSGIAAFMTFWYCVL

SEQ ID NO: 60443 - protein, 373 aa, Glycine max
  peptide (1)..(373): Ceres Seq. ID no. 14311649
  misc_feature (11)..(53): Pfam Name: F-box domain Pfam Description: F-box domain
  misc_feature (6)..(86): Homolog of NCBI NO: 15238908 NR Description: F-box protein family [Arabidopsis thaliana]
  misc_feature (2)..(86): Homolog of NCBI NO: 15227574 NR Description: F-box protein family [Arabidopsis thaliana]
  misc_feature (192)..(366): Homolog of NCBI NO: 15227574 NR Description: F-box protein family [Arabidopsis thaliana]
  misc_feature (7)..(84): Homolog of NCBI NO: 15225867 NR Description: F-box protein family [Arabidopsis thaliana]
  misc_feature (152)..(373): Homolog of NCBI NO: 15225867 NR Description: F-box protein family [Arabidopsis thaliana]
MSVAPVDGIPSLNSDLFYDIFRRLDGATLASAACTCAALCSISKEESLWENVCSSMWPSTNREDVKSLISSVGGFRKFYADCFPLIVNKEVVGYQPNNYLEYPDNWTEAEYYGDMNESESISPSDFVSIVDIRFKGKPICSKVLWGIPNANGYDGWFYNCPFRIDILTYADRDDNNDGAVHLSVSDGLPPITSLERERKDGKLWRELREGLQLSWIIVNRKIKQAANLASWSPLGGQRHWPTDKDFVIRFGSVLPARDILPCQVAECILIMKFRVIHTEEDGFQTTLKLTELSMQLEDMEGAHVNGRNSLLILKEALSSRRSKNYGEVLESCHMYSKVQNELKEEKMRNESRLDRLCILSGIAAFMTFWYCVL

SEQ ID NO: 60444 - protein, 318 aa, Glycine max
  peptide (1)..(318): Ceres Seq. ID no. 14311650
  misc_feature (1)..(31): Homolog of NCBI NO: 15238908 NR Description: F-box protein family [Arabidopsis thaliana]
  misc_feature (1)..(31): Homolog of NCBI NO: 15227574 NR Description: F-box protein family [Arabidopsis thaliana]
  misc_feature (137)..(311): Homolog of NCBI NO: 15227574 NR Description: F-box protein family [Arabidopsis thaliana]
  misc_feature (1)..(29): Homolog of NCBI NO: 15225867 NR Description: F-box protein family [Arabidopsis thaliana]
  misc_feature (97)..(318): Homolog of NCBI NO: 15225867 NR Description: F-box protein family [Arabidopsis thaliana]
MWPSTNREDVKSLISSVGGFRKFYADCFPLIVNKEVVGYQPNNYLEYPDNWTEAEYYGDMNESESISPSDFVSIVDIRFKGKPICSKVLWGIPNANGYDGWFYNCPFRIDILTYADRDDNNDGAVHLSVSDGLPPITSLERERKDGKLWRELREGLQLSWIIVNRKIKQAANLASWSPLGGQRHWPTDKDFVIRFGSVLPARDILPCQVAECILIMKFRVIHTEEDGFQTTLKLTELSMQLEDMEGAHVNGRNSLLILKEALSSRRSKNYGEVLESCHMYSKVQNELKEEKMRNESRLDRLCILSGIAAFMTFWYCVL

SEQ ID NO: 60445 - DNA, 1120 bp, Glycine max
  misc_feature (1)..(1120): Ceres Seq. ID no. 14315553
gacgctttaagaccaaaagcaccgtctccgtctccgtctccacctcctgtccttcgttgcacttcgctttttccaaaaccaatcacatcagcatcactctcgtcgccgccgtcgtcgaccaccgcaagagccatcgcactccgccgtcatccgttagggcaaaaatgagtcgaggaagtggaggtggatacgatcgtcacatcactattttctcccctgaaggacgtctcttccaagtcgagtatgctttcaaggctgttaaggccgcaggaatcacctcaattggtgtccgaggaaaggattcgatttgtgttgttactcagaagaaggttccggataagcttttggacaacacaagtgttacacacctctttcccatcaccaagtaccttggtttattggctactggcatgacagctgatgctaggacactggtccaacaagcaagaaatgaagcagctgagtttcgctttacatatggatatgaaatgcctgtagatgtattagctaaatggattgcagacaaatcacaagtctatactcaacatgcttatatgagaccacttggagtagttgccatggttttgggtattgatgatgaatatggacctcagctttacaaatgtgatccagctggtcattactttggtcacaaggcaacaagtgctggattgaaggaccaagaggcaattaatttcttggaaaagaagatgaagaatgacccttcatttacatatgaggagacagttcagactgccatttctgccctgcaatcagttcttcaggaggattttaaggccactgagattgaggttggagtggtgcggaaagaaaatccagaattcagagttttaaccaccgaggaaattgatgagcacttgactgcaataagtgagcgtgactgagttcttgataaggatgtaatggttcaaactttctaatgctagagattaaattatgtacttgtttctggaatcattgaattgatttccttgtgatatttgagtagtaagtttatttaagaatgatgttgaagacggtatttgatttcctattacaagtttacttgggagcaattttatgtttctaccaatgaaatgaaatgaaaattttaaaaaat

SEQ ID NO: 60446 - protein, 300 aa, Glycine max
  peptide (1)..(300): Ceres Seq. ID no. 14315554
  misc_feature (86)..(274): Pfam Name: Proteasome A-type and B-type Pfam Description: Proteasome A-type and B-type
RFKTKSTVSVSVSTSCPSLHFAFSKTNHISITLVAAVVDHRKSHRTPPSSVRAKMSRGSGGGYDRHITIFSPEGRLFQVEYAFKAVKAAGITSIGVRGKDSICVVTQKKVPDKLLDNTSVTHLFPITKYLGLLATGMTADARTLVQQARNEAAEFRFTYGYEMPVDVLAKWIADKSQVYTQHAYMRPLGVVAMVLGIDDEYGPQLYKCDPAGHYFGHKATSAGLKDQEAINFLEKKMKNDPSFTYEETVQTAISALQSVLQEDFKATEIEVGVVRKENPEFRVLTTEEIDEHLTAISERD

SEQ ID NO: 60447 - protein, 246 aa, Glycine max
  peptide (1)..(246): Ceres Seq. ID no. 14315555
  misc_feature (32)..(220): Pfam Name: Proteasome A-type and B-type Pfam Description: Proteasome A-type and B-type
MSRGSGGGYDRHITIFSPEGRLFQVEYAFKAVKAAGITSIGVRGKDSICVVTQKKVPDKLLDNTSVTHLFPITKYLGLLATGMTADARTLVQQARNEAAEFRFTYGYEMPVDVLAKWIADKSQVYTQHAYMRPLGVVAMVLGIDDEYGPQLYKCDPAGHYFGHKATSAGLKDQEAINFLEKKMKNDPSFTYEETVQTAISALQSVLQEDFKATEIEVGVVRKENPEFRVLTTEEIDEHLTAISERD

SEQ ID NO: 60448 - protein, 164 aa, Glycine max
  peptide (1)..(164): Ceres Seq. ID no. 14315556
  misc_feature (1)..(138): Pfam Name: Proteasome A-type and B-type Pfam Description: Proteasome A-type and B-type
MTADARTLVQQARNEAAEFRFTYGYEMPVDVLAKWIADKSQVYTQHAYMRPLGVVAMVLGIDDEYGPQLYKCDPAGHYFGHKATSAGLKDQEAINFLEKKMKNDPSFTYEETVQTAISALQSVLQEDFKATEIEVGVVRKENPEFRVLTTEEIDEHLTAISERD

SEQ ID NO: 60449 - DNA, 1163 bp, Glycine max
  misc_feature (1)..(1163): Ceres Seq. ID no. 15169431
aaagtttaaaccctacagaaaaacgctacataaaccccgcaacaaacaaccaacccccaaacccctcactcttctcggcgtccatcggaaatttccaaggtaaaaagatgaatctgaagaacatgaagattccgaacgttccaggcggcggtgcgtcctctgcgctgctgaagcttgggcttcttggtggaattggtttatatgcagctgctaacagtctctacaacgttgaaggaggtcaccgagccattgttttcaaccgtctagttggtgtcaaagacaaggtctatcctgaaggaacacactttatgattccgtggtttgagaggcctgttatctatgatgtccgtgcacgaccccatctagttgagagtacatctggtagtcgtgatctacagatggtgaaaattggacttcgagttcttactcgccctttgcccaaccaattacctacggtttatcggacccttggagagaattataatgaaagggttttaccttcaatcatacatgaaactttgaaagccgtggttgcccagtacaatgccagccagcttattactcagcgagaggctgttagtcgggaaatccggaagattctaactgaaagggctgctaacttcaatattgcccttgatgatgtgtcaattactagtctgacttttggcaaggagtttactgctgcaattgaagctaagcaggtagctgcacaagaagctgagagggctaaatttgttgtggaaaaagctgagcaagacaagagaagtgctgtaattagagcacagggagaagcaaaaagtgcccaactgattgggcaagctattgccaacaatccagcttttatcacactgaggaagatagaagccgcaagggagattgcacatactatatcaaatgcggcaaacaaggtttacctgaattcagatgatctattgttgaatcttcaagagatgaaattggagccaggcagaaagtgagtgtgttagcctgtttgtttctttttggttttagcttgtaaactatcaatttcaggatcgattttcttgatatgtttttgcaaattcggatatagctggcttgattagacaactgagcggcaaccctttaaatctttgggaaaggattaattgagatccaaacgaatgcttcacattacttgaaac

SEQ ID NO: 60450 - protein, 324 aa, Glycine max
  peptide (1)..(324): Ceres Seq. ID no. 15169432
  misc_feature (73)..(264): Pfam Name: SPFH domain / Band 7 family Pfam Description: SPFH domain / Band 7 family
  misc_feature (51)..(315): Homolog of NCBI NO: 39589300 NR Description: Hypothetical protein CBG22042 [Caenorhabditis
  misc_feature (32)..(316): Homolog of NCBI NO: 39597046 NR Description: Hypothetical protein CBG02605 [Caenorhabditis
  misc_feature (37)..(319): Homolog of NCBI NO: 7716462 NR Description: prohibitin [Zea mays]
  misc_feature (36)..(324): Homolog of NCBI NO: 7716456 NR Description: prohibitin [Zea mays]
  misc_feature (36)..(320): Homolog of NCBI NO: 15225374 NR Description: prohibitin -related [Arabidopsis thaliana]
  misc_feature (36)..(317): Homolog of NCBI NO: 34394832 NR Description: putative prohibitin [Oryza sativa (japonica
  misc_feature (42)..(321): Homolog of NCBI NO: 15219569 NR Description: prohibitin 2 -related [Arabidopsis thaliana]
  misc_feature (38)..(324): Homolog of NCBI NO: 21593626 NR Description: prohibitin-like protein [Arabidopsis thaliana]
  misc_feature (38)..(324): Homolog of NCBI NO: 15235317 NR Description: prohibitin-related protein [Arabidopsis thaliana]
  misc_feature (36)..(324): Homolog of NCBI NO: 12751303 NR Description: prohibitin 1-like protein [Brassica napus]
SLNPTEKRYINPATNNQPPNPSLFSASIGNFQGKKMNLKNMKIPNVPGGGASSALLKLGLLGGIGLYAAANSLYNVEGGHRAIVFNRLVGVKDKVYPEGTHFMIPWFERPVIYDVRARPHLVESTSGSRDLQMVKIGLRVLTRPLPNQLPTVYRTLGENYNERVLPSIIHETLKAVVAQYNASQLITQREAVSREIRKILTERAANFNIALDDVSITSLTFGKEFTAAIEAKQVAAQEAERAKFVVEKAEQDKRSAVIRAQGEAKSAQLIGQAIANNPAFITLRKIEAAREIAHTISNAANKVYLNSDDLLLNLQEMKLEPGRK

SEQ ID NO: 60451 - protein, 289 aa, Glycine max
  peptide (1)..(289): Ceres Seq. ID no. 15169433
  misc_feature (38)..(229): Pfam Name: SPFH domain / Band 7 family Pfam Description: SPFH domain / Band 7 family
  misc_feature (16)..(280): Homolog of NCBI NO: 39589300 NR Description: Hypothetical protein CBG22042 [Caenorhabditis
  misc_feature (1)..(281): Homolog of NCBI NO: 39597046 NR Description: Hypothetical protein CBG02605 [Caenorhabditis
  misc_feature (2)..(284): Homolog of NCBI NO: 7716462 NR Description: prohibitin [Zea mays]
  misc_feature (1)..(289): Homolog of NCBI NO: 7716456 NR Description: prohibitin [Zea mays]
  misc_feature (1)..(285): Homolog of NCBI NO: 15225374 NR Description: prohibitin -related [Arabidopsis thaliana]
  misc_feature (1)..(282): Homolog of NCBI NO: 34394832 NR Description: putative prohibitin [Oryza sativa (japonica
  misc_feature (7)..(286): Homolog of NCBI NO: 15219569 NR Description: prohibitin 2 -related [Arabidopsis thaliana]
  misc_feature (3)..(289): Homolog of NCBI NO: 21593626 NR Description: prohibitin-like protein [Arabidopsis thaliana]
  misc_feature (3)..(289): Homolog of NCBI NO: 15235317 NR Description: prohibitin-related protein [Arabidopsis thaliana]
  misc_feature (1)..(289): Homolog of NCBI NO: 12751303 NR Description: prohibitin 1-like protein [Brassica napus]
MNLKNMKIPNVPGGGASSALLKLGLLGGIGLYAAANSLYNVEGGHRAIVFNRLVGVKDKVYPEGTHFMIPWFERPVIYDVRARPHLVESTSGSRDLQMVKIGLRVLTRPLPNQLPTVYRTLGENYNERVLPSIIHETLKAVVAQYNASQLITQREAVSREIRKILTERAANFNIALDDVSITSLTFGKEFTAAIEAKQVAAQEAERAKFVVEKAEQDKRSAVIRAQGEAKSAQLIGQAIANNPAFITLRKIEAAREIAHTISNAANKVYLNSDDLLLNLQEMKLEPGRK

SEQ ID NO: 60452 - protein, 284 aa, Glycine max
  peptide (1)..(284): Ceres Seq. ID no. 15169434
  misc_feature (33)..(224): Pfam Name: SPFH domain / Band 7 family Pfam Description: SPFH domain / Band 7 family
  misc_feature (11)..(275): Homolog of NCBI NO: 39589300 NR Description: Hypothetical protein CBG22042 [Caenorhabditis
  misc_feature (1)..(276): Homolog of NCBI NO: 39597046 NR Description: Hypothetical protein CBG02605 [Caenorhabditis
  misc_feature (1)..(279): Homolog of NCBI NO: 7716462 NR Description: prohibitin [Zea mays]
  misc_feature (1)..(284): Homolog of NCBI NO: 7716456 NR Description: prohibitin [Zea mays]
  misc_feature (1)..(280): Homolog of NCBI NO: 15225374 NR Description: prohibitin -related [Arabidopsis thaliana]
  misc_feature (1)..(277): Homolog of NCBI NO: 34394832 NR Description: putative prohibitin [Oryza sativa (japonica
  misc_feature (2)..(281): Homolog of NCBI NO: 15219569 NR Description: prohibitin 2 -related [Arabidopsis thaliana]
  misc_feature (1)..(284): Homolog of NCBI NO: 21593626 NR Description: prohibitin-like protein [Arabidopsis thaliana]
  misc_feature (1)..(284): Homolog of NCBI NO: 15235317 NR Description: prohibitin-related protein [Arabidopsis thaliana]
  misc_feature (1)..(284): Homolog of NCBI NO: 12751303 NR Description: prohibitin 1-like protein [Brassica napus]
MKIPNVPGGGASSALLKLGLLGGIGLYAAANSLYNVEGGHRAIVFNRLVGVKDKVYPEGTHFMIPWFERPVIYDVRARPHLVESTSGSRDLQMVKIGLRVLTRPLPNQLPTVYRTLGENYNERVLPSIIHETLKAVVAQYNASQLITQREAVSREIRKILTERAANFNIALDDVSITSLTFGKEFTAAIEAKQVAAQEAERAKFVVEKAEQDKRSAVIRAQGEAKSAQLIGQAIANNPAFITLRKIEAAREIAHTISNAANKVYLNSDDLLLNLQEMKLEPGRK

SEQ ID NO: 60453 - DNA, 1390 bp, Glycine max
  misc_feature (1)..(1390): Ceres Seq. ID no. 14312324
aactccaacacgccctccaagcataaaatttgcaggattagacatttccagcaacacttgaagttgtcaatcaatggccatgaagccctcaacttccacaagtgggtctggcaagaagattagaaagccttatactattaccaaatctagggagagctggtctgaggaagagcacgacaagtttctcgaagctcttcaactatttgacagagattggaagaaaattgaagattttgttggttcaaaatcagttattcagattagaagtcatgcccagaagtacttcttgaaagttcaaaagagcgggacagtagcacatgtgcctcctcctcggcctaagcgcaaagcttctcatccttatccacaaaaggcatccaaaaatgttttgttgccaatgccagcttccatggtttatgtttcttccactagtacccttccaccagggtatgtcacatgggatgaaaattccttgctcatgaattctggatccaacaaatcagtgccttgtaaggatgagctcgccaatcttcttggaaatgaagctgatattggatcaaaggggataacacgaattgaccacagcagtcttagtggtgttgggaactctactagaaatctgcctgctactgagatgccaaaacaagggaaacaggctcaggttattcatggtttgccagattttgctgatgtttacagcttcattggaagtgtttttgatccagacacagaaggccatgtccagaagctgaaggaaatggatcctataaattttgaaactgttttgttgttaatgaaaaacctcactgtcaatttgtctagtcctgactttgagcccgttagggaggtcatgtcatcatacgatgtccatacaaaaacagtaggagttaccgcaggaattgacgtcaagaagcagacaaatgatctatcatgtcaaacagcttgacaaccattaattgaacttattatcaaatttggatggaagaccgaggttttgcccaaccagcagcattagcaatgcattcacattaactcgttgtgaaacttgaaaatgcaaccaaaccatcagcctatgtaaccacaaccaggagagtttgttttaatggaagtgctagcaaagccaaaaatatattcatcgggtaattctaaggtgcacaaggttttgtagtattgcagtgattctagtacttatttatggaatgtggttttcaagtagacacatgggtctaactgtaagataagtttgatggctcaggtgtattaattggagaggtggggggctagtcatagtagcttatatcaatgtggcctaactttcaatgtaaatcataaagagcatcataacaggaagtggtcccaatttctaattctacttacttttttttttagcatc

SEQ ID NO: 60454 - protein, 289 aa, Glycine max
  peptide (1)..(289): Ceres Seq. ID no. 14312325
  misc_feature (26)..(71): Pfam Name: Myb-like DNA-binding domain Pfam Description: Myb-like DNA-binding domain
  misc_feature (14)..(263): Homolog of NCBI NO: 25517982 NR Description: F22L4.6 protein - Arabidopsis thaliana
  misc_feature (14)..(263): Homolog of NCBI NO: 15223419 NR Description: myb family transcription factor [Arabidopsis
  misc_feature (1)..(262): Homolog of NCBI NO: 15234118 NR Description: myb family transcription factor [Arabidopsis
  misc_feature (1)..(253): Homolog of NCBI NO: 8953721 NR Description: contains similarity to MYB-related DNA-binding
  misc_feature (1)..(276): Homolog of NCBI NO: 30696221 NR Description: myb family transcription factor [Arabidopsis
  misc_feature (1)..(276): Homolog of NCBI NO: 30696225 NR Description: myb family transcription factor [Arabidopsis
  misc_feature (6)..(261): Homolog of NCBI NO: 11357907 NR Description: hypothetical protein F9G14.150 - Arabidopsis
  misc_feature (6)..(261): Homolog of NCBI NO: 18414039 NR Description: myb family transcription factor [Arabidopsis
  misc_feature (6)..(261): Homolog of NCBI NO: 14596213 NR Description: putative protein [Arabidopsis thaliana]
  misc_feature (5)..(285): Homolog of NCBI NO: 30680926 NR Description: myb family transcription factor [Arabidopsis
MAMKPSTSTSGSGKKIRKPYTITKSRESWSEEEHDKFLEALQLFDRDWKKIEDFVGSKSVIQIRSHAQKYFLKVQKSGTVAHVPPPRPKRKASHPYPQKASKNVLLPMPASMVYVSSTSTLPPGYVTWDENSLLMNSGSNKSVPCKDELANLLGNEADIGSKGITRIDHSSLSGVGNSTRNLPATEMPKQGKQAQVIHGLPDFADVYSFIGSVFDPDTEGHVQKLKEMDPINFETVLLLMKNLTVNLSSPDFEPVREVMSSYDVHTKTVGVTAGIDVKKQTNDLSCQTA

SEQ ID NO: 60455 - protein, 287 aa, Glycine max
  peptide (1)..(287): Ceres Seq. ID no. 14312326
  misc_feature (24)..(69): Pfam Name: Myb-like DNA-binding domain Pfam Description: Myb-like DNA-binding domain
  misc_feature (12)..(261): Homolog of NCBI NO: 25517982 NR Description: F22L4.6 protein - Arabidopsis thaliana
  misc_feature (12)..(261): Homolog of NCBI NO: 15223419 NR Description: myb family transcription factor [Arabidopsis
  misc_feature (1)..(260): Homolog of NCBI NO: 15234118 NR Description: myb family transcription factor [Arabidopsis
  misc_feature (1)..(251): Homolog of NCBI NO: 8953721 NR Description: contains similarity to MYB-related DNA-binding
  misc_feature (1)..(274): Homolog of NCBI NO: 30696221 NR Description: myb family transcription factor [Arabidopsis
  misc_feature (1)..(274): Homolog of NCBI NO: 30696225 NR Description: myb family transcription factor [Arabidopsis
  misc_feature (4)..(259): Homolog of NCBI NO: 11357907 NR Description: hypothetical protein F9G14.150 - Arabidopsis
  misc_feature (4)..(259): Homolog of NCBI NO: 18414039 NR Description: myb family transcription factor [Arabidopsis
  misc_feature (4)..(259): Homolog of NCBI NO: 14596213 NR Description: putative protein [Arabidopsis thaliana]
  misc_feature (3)..(283): Homolog of NCBI NO: 30680926 NR Description: myb family transcription factor [Arabidopsis
MKPSTSTSGSGKKIRKPYTITKSRESWSEEEHDKFLEALQLFDRDWKKIEDFVGSKSVIQIRSHAQKYFLKVQKSGTVAHVPPPRPKRKASHPYPQKASKNVLLPMPASMVYVSSTSTLPPGYVTWDENSLLMNSGSNKSVPCKDELANLLGNEADIGSKGITRIDHSSLSGVGNSTRNLPATEMPKQGKQAQVIHGLPDFADVYSFIGSVFDPDTEGHVQKLKEMDPINFETVLLLMKNLTVNLSSPDFEPVREVMSSYDVHTKTVGVTAGIDVKKQTNDLSCQTA

SEQ ID NO: 60456 - protein, 182 aa, Glycine max
  peptide (1)..(182): Ceres Seq. ID no. 14312327
  misc_feature (1)..(156): Homolog of NCBI NO: 25517982 NR Description: F22L4.6 protein - Arabidopsis thaliana
  misc_feature (1)..(156): Homolog of NCBI NO: 15223419 NR Description: myb family transcription factor [Arabidopsis
  misc_feature (1)..(155): Homolog of NCBI NO: 15234118 NR Description: myb family transcription factor [Arabidopsis
  misc_feature (1)..(146): Homolog of NCBI NO: 8953721 NR Description: contains similarity to MYB-related DNA-binding
  misc_feature (1)..(169): Homolog of NCBI NO: 30696221 NR Description: myb family transcription factor [Arabidopsis
  misc_feature (1)..(169): Homolog of NCBI NO: 30696225 NR Description: myb family transcription factor [Arabidopsis
  misc_feature (1)..(154): Homolog of NCBI NO: 11357907 NR Description: hypothetical protein F9G14.150 - Arabidopsis
  misc_feature (1)..(154): Homolog of NCBI NO: 18414039 NR Description: myb family transcription factor [Arabidopsis
  misc_feature (1)..(154): Homolog of NCBI NO: 14596213 NR Description: putative protein [Arabidopsis thaliana]
  misc_feature (1)..(178): Homolog of NCBI NO: 30680926 NR Description: myb family transcription factor [Arabidopsis
MPASMVYVSSTSTLPPGYVTWDENSLLMNSGSNKSVPCKDELANLLGNEADIGSKGITRIDHSSLSGVGNSTRNLPATEMPKQGKQAQVIHGLPDFADVYSFIGSVFDPDTEGHVQKLKEMDPINFETVLLLMKNLTVNLSSPDFEPVREVMSSYDVHTKTVGVTAGIDVKKQTNDLSCQTA

SEQ ID NO: 60457 - DNA, 1463 bp, Glycine max
  misc_feature (1)..(1463): Ceres Seq. ID no. 15178751
tgctttttggggatttcagtttttgagttgagtgtgtgtagtttctgttcccttgttttatttatttggtttctcgttggcaactcaagggaggtacagcaaccaccatatatcaggtagtattatcagagtgtgtgtgactcctaaggaatttgcagagccccctactcatatttctctcttctctctcccttttgctccctctggtttctgtttgcgtggggagcaaaaagctcctgcttttctctctgatatatactatatgtaagacacgagctagaggtgaaaaaaggaactattctagttgttgaggggaggacgtatgtatgttcccatttggtgttgaggaacaaacacaagtgaaggtcttcttgactatacatacaccaagtgtacgtttggatatatagagaaaaaatgggtagttgtggaagagaaggagcagtgaggcaatatgtaagatcgaaggttcctcgtttaaggtggactcctgagctgcaccgttgctttgttcatgctattgatagccttggaggtcatcataaggctactccgaagcttgttcttcagttgatggatgttaaagggctcacaatttcacacgtcaagagccatcttcagatgtacagaagcatgaggggtgacttgggcagacaaggtaggacaccctcccaacataggaaccaatcttttgaggagcatgatgatggatgtgttgatgaagtgaatgatgttggtgttgagtactcatgttcgaaacccctgggaagagaatctgattccttcttcgggcacagtaatctccctccaaaaagagcaagaatcgagatgagaagttccatctcagagaggctgcagcaatgcagccaaagattatgtgatgttgtagttccaaatccgtactgtttttatgattatctgaaacagaagaagcccatgcccatggctgatcagcattcccctccttttccagattttcccaacctcacttcattcaaatctcctgatcaacaatctgatttccttcaggttactaaattaaatgaaggaaaaagcacttcacagactattaatgtacttgtgaacactactactgagacagctaatgtagaaattgaagatgaattgtcattgtcgctcacattgccaaatccttcacctcagagaagttcaggcagtgagataagtgaggcaatctcatcctgccatgggtttagcaacaactacaaggactgctctagttcatccactcacactgtcaaagaaagaattaatttggacctatctttagccctatgtggcaattgatttgatgctcttttgtaaaatcaatctactataggtataattccacggtagctctttttcattctctaacagttttggttattttcttgtttctactaccgggtacctttccaatcaccatgtcaattaattctaagctaagctattttgagtag

SEQ ID NO: 60458 - protein, 296 aa, Glycine max
  peptide (1)..(296): Ceres Seq. ID no. 15178752
  misc_feature (20)..(71): Pfam Name: Myb-like DNA-binding domain Pfam Description: Myb-like DNA-binding domain
  misc_feature (8)..(81): Homolog of NCBI NO: 15225671 NR Description: myb family transcription factor [Arabidopsis
  misc_feature (8)..(81): Homolog of NCBI NO: 4588000 NR Description: hypothetical cytoskeletal protein [Arabidopsis
  misc_feature (10)..(97): Homolog of NCBI NO: 26450454 NR Description: unknown protein [Arabidopsis thaliana]
  misc_feature (10)..(125): Homolog of NCBI NO: 18395292 NR Description: hypothetical protein [Arabidopsis thaliana]
  misc_feature (10)..(125): Homolog of NCBI NO: 30793861 NR Description: unknown protein [Arabidopsis thaliana]
  misc_feature (1)..(103): Homolog of NCBI NO: 22329556 NR Description: myb family transcription factor [Arabidopsis
  misc_feature (2)..(81): Homolog of NCBI NO: 23306130 NR Description: Unknown protein [Oryza sativa (japonica
  misc_feature (1)..(123): Homolog of NCBI NO: 7527727 NR Description: T5E21.10 [Arabidopsis thaliana]
  misc_feature (203)..(296): Homolog of NCBI NO: 21741799 NR Description: OSJNBa0005N02.4 [Oryza sativa (japonica
  misc_feature (2)..(118): Homolog of NCBI NO: 21741799 NR Description: OSJNBa0005N02.4 [Oryza sativa (japonica
MGSCGREGAVRQYVRSKVPRLRWTPELHRCFVHAIDSLGGHHKATPKLVLQLMDVKGLTISHVKSHLQMYRSMRGDLGRQGRTPSQHRNQSFEEHDDGCVDEVNDVGVEYSCSKPLGRESDSFFGHSNLPPKRARIEMRSSISERLQQCSQRLCDVVVPNPYCFYDYLKQKKPMPMADQHSPPFPDFPNLTSFKSPDQQSDFLQVTKLNEGKSTSQTINVLVNTTTETANVEIEDELSLSLTLPNPSPQRSSGSEISEAISSCHGFSNNYKDCSSSSTHTVKERINLDLSLALCGN

SEQ ID NO: 60459 - protein, 244 aa, Glycine max
  peptide (1)..(244): Ceres Seq. ID no. 15178753
  misc_feature (1)..(29): Homolog of NCBI NO: 15225671 NR Description: myb family transcription factor [Arabidopsis
  misc_feature (1)..(29): Homolog of NCBI NO: 4588000 NR Description: hypothetical cytoskeletal protein [Arabidopsis
  misc_feature (1)..(45): Homolog of NCBI NO: 26450454 NR Description: unknown protein [Arabidopsis thaliana]
  misc_feature (1)..(73): Homolog of NCBI NO: 18395292 NR Description: hypothetical protein [Arabidopsis thaliana]
  misc_feature (1)..(73): Homolog of NCBI NO: 30793861 NR Description: unknown protein [Arabidopsis thaliana]
  misc_feature (1)..(51): Homolog of NCBI NO: 22329556 NR Description: myb family transcription factor [Arabidopsis
  misc_feature (1)..(29): Homolog of NCBI NO: 23306130 NR Description: Unknown protein [Oryza sativa (japonica
  misc_feature (1)..(71): Homolog of NCBI NO: 7527727 NR Description: T5E21.10 [Arabidopsis thaliana]
  misc_feature (151)..(244): Homolog of NCBI NO: 21741799 NR Description: OSJNBa0005N02.4 [Oryza sativa (japonica
  misc_feature (1)..(66): Homolog of NCBI NO: 21741799 NR Description: OSJNBa0005N02.4 [Oryza sativa (japonica
MDVKGLTISHVKSHLQMYRSMRGDLGRQGRTPSQHRNQSFEEHDDGCVDEVNDVGVEYSCSKPLGRESDSFFGHSNLPPKRARIEMRSSISERLQQCSQRLCDVVVPNPYCFYDYLKQKKPMPMADQHSPPFPDFPNLTSFKSPDQQSDFLQVTKLNEGKSTSQTINVLVNTTTETANVEIEDELSLSLTLPNPSPQRSSGSEISEAISSCHGFSNNYKDCSSSSTHTVKERINLDLSLALCGN

SEQ ID NO: 60460 - protein, 228 aa, Glycine max
  peptide (1)..(228): Ceres Seq. ID no. 15178754
  misc_feature (1)..(13): Homolog of NCBI NO: 15225671 NR Description: myb family transcription factor [Arabidopsis
  misc_feature (1)..(13): Homolog of NCBI NO: 4588000 NR Description: hypothetical cytoskeletal protein [Arabidopsis
  misc_feature (1)..(29): Homolog of NCBI NO: 26450454 NR Description: unknown protein [Arabidopsis thaliana]
  misc_feature (1)..(57): Homolog of NCBI NO: 18395292 NR Description: hypothetical protein [Arabidopsis thaliana]
  misc_feature (1)..(57): Homolog of NCBI NO: 30793861 NR Description: unknown protein [Arabidopsis thaliana]
  misc_feature (1)..(35): Homolog of NCBI NO: 22329556 NR Description: myb family transcription factor [Arabidopsis
  misc_feature (1)..(13): Homolog of NCBI NO: 23306130 NR Description: Unknown protein [Oryza sativa (japonica
  misc_feature (1)..(55): Homolog of NCBI NO: 7527727 NR Description: T5E21.10 [Arabidopsis thaliana]
  misc_feature (135)..(228): Homolog of NCBI NO: 21741799 NR Description: OSJNBa0005N02.4 [Oryza sativa (japonica
  misc_feature (1)..(50): Homolog of NCBI NO: 21741799 NR Description: OSJNBa0005N02.4 [Oryza sativa (japonica
MYRSMRGDLGRQGRTPSQHRNQSFEEHDDGCVDEVNDVGVEYSCSKPLGRESDSFFGHSNLPPKRARIEMRSSISERLQQCSQRLCDVVVPNPYCFYDYLKQKKPMPMADQHSPPFPDFPNLTSFKSPDQQSDFLQVTKLNEGKSTSQTINVLVNTTTETANVEIEDELSLSLTLPNPSPQRSSGSEISEAISSCHGFSNNYKDCSSSSTHTVKERINLDLSLALCGN

SEQ ID NO: 60461 - DNA, 1653 bp, Glycine max
  misc_feature (1)..(1653): Ceres Seq. ID no. 15176588
ggtgtacggccatatttcctctcatcagattgaagggtggttagaattagggttctctatctgcaaagcaaaccttatcttttcacctgaaacttgcttttgttcccaattttctcaaattgctttcggttttcgttctgattctgcaaaatcatggagatggagcgcatcgttgaattccctcacacatacatggatcgacccccgagaaagagagcgcgtttgggctgggacatcgctgaggtccccaaggctcaggtaggattgttttgtggacaagaggttgagaatatttcaagctttgctccttcagaacatccccctagttctctgtttaagggagttgctcgaaatggttctcccccatggcgagacgatgacaaagatggccattacatgtttgagcttggagataatttaacttctcgctataagattcatggcaaaatgggcgaaggaacttttgggcaggtcttggagtgctgggacagagaaaggaaggaaatggtcgccataaaaattgttcgtgggataaagaaatatcgagaggcagccatggtagaaattgaggtactgcaacagcttgggaaacacgataaaggtagcaatcgttgtgtgcaaatacggaactggtttgactatcgtaatcatatctgtattgtgtttgagaaacttggaccaagcttatacgattttcttcggaaaaacagttatcgttcatttcccattgatcttgtccgtgagattggctggcaactattggaatgtgtagcatttatgcatgacttacacatgatccatactgacctgaagccggaaaacatacttctagtttcaccagagtatcttaaaattccagattacaagagtacaaccagatcaccaagttcctttttcaagagagtgcccaagtcaagtgctataaaagttattgattttggcagcactacatatgaacgagaagatcagacatacattgtgtcaacacgtcattatagggcacctgaagttatcctcggacttgggtggagctatccatgtgatatatggagtgtgggttgtatactggttgaattatgcactggtgaagctttgtttcagactcatgaaaatttagagcatctggccatgatggagagggtgcttggtcctataccacagcagatgttaaagagagttgaccgacatgcagagaagtatgtccgaaggggtagattggactggccagagggtgcagcctcacgagagagtattaaagctgtaatgaagcttccccgactacagaacattataatgcagcatgttgatcattcagctggagatcttatacatcttttgcaggggctacttagatatgacccctttgaaagacttacagctagggatgctttgaggcattccttctttactagagatcaacttaggagatgattttcatgtatttgtaaacgattggtctgtttttaagtttaaagatcattcgagggcaaatatggctgtaaggaagcctatgtgccatgtaaataaatatttgaatatcttgggctaaactaaagcaagtgaggatggttattcagcagcagttacacctcaaagcctgtatctcaaacgttttcttaaaaaaaataaaataattgtagatgttcttttacc

SEQ ID NO: 60462 - protein, 425 aa, Glycine max
  peptide (1)..(425): Ceres Seq. ID no. 15176589
  misc_feature (93)..(418): Pfam Name: Protein kinase domain Pfam Description: Protein kinase domain
  misc_feature (56)..(418): Homolog of NCBI NO: 34912246 NR Description: putative protein kinase AFC3
  misc_feature (51)..(418): Homolog of NCBI NO: 15233872 NR Description: protein kinase AFC3 [Arabidopsis thaliana]
  misc_feature (51)..(418): Homolog of NCBI NO: 601791 NR Description: protein kinase
  misc_feature (1)..(422): Homolog of NCBI NO: 601787 NR Description: protein kinase
  misc_feature (1)..(422): Homolog of NCBI NO: 30693861 NR Description: protein kinase (AME2/AFC1) [Arabidopsis thaliana]
  misc_feature (1)..(422): Homolog of NCBI NO: 15231839 NR Description: protein kinase (AME2/AFC1) [Arabidopsis thaliana]
  misc_feature (1)..(420): Homolog of NCBI NO: 34908100 NR Description: putative protein kinase AFC1
  misc_feature (1)..(425): Homolog of NCBI NO: 7489189 NR Description: protein kinase PK12 (EC 2.7.1.-),
  misc_feature (1)..(425): Homolog of NCBI NO: 7211773 NR Description: protein kinase MK5 [Mesembryanthemum crystallinum]
  misc_feature (1)..(420): Homolog of NCBI NO: 15233948 NR Description: protein kinase (AFC2) [Arabidopsis thaliana]
MEMERIVEFPHTYMDRPPRKRARLGWDIAEVPKAQVGLFCGQEVENISSFAPSEHPPSSLFKGVARNGSPPWRDDDKDGHYMFELGDNLTSRYKIHGKMGEGTFGQVLECWDRERKEMVAIKIVRGIKKYREAAMVEIEVLQQLGKHDKGSNRCVQIRNWFDYRNHICIVFEKLGPSLYDFLRKNSYRSFPIDLVREIGWQLLECVAFMHDLHMIHTDLKPENILLVSPEYLKIPDYKSTTRSPSSFFKRVPKSSAIKVIDFGSTTYEREDQTYIVSTRHYRAPEVILGLGWSYPCDIWSVGCILVELCTGEALFQTHENLEHLAMMERVLGPIPQQMLKRVDRHAEKYVRRGRLDWPEGAASRESIKAVMKLPRLQNIIMQHVDHSAGDLIHLLQGLLRYDPFERLTARDALRHSFFTRDQLRR

SEQ ID NO: 60463 - protein, 423 aa, Glycine max
  peptide (1)..(423): Ceres Seq. ID no. 15176590
  misc_feature (91)..(416): Pfam Name: Protein kinase domain Pfam Description: Protein kinase domain
  misc_feature (54)..(416): Homolog of NCBI NO: 34912246 NR Description: putative protein kinase AFC3
  misc_feature (49)..(416): Homolog of NCBI NO: 15233872 NR Description: protein kinase AFC3 [Arabidopsis thaliana]
  misc_feature (49)..(416): Homolog of NCBI NO: 601791 NR Description: protein kinase
  misc_feature (1)..(420): Homolog of NCBI NO: 601787 NR Description: protein kinase
  misc_feature (1)..(420): Homolog of NCBI NO: 30693861 NR Description: protein kinase (AME2/AFC1) [Arabidopsis thaliana]
  misc_feature (1)..(420): Homolog of NCBI NO: 15231839 NR Description: protein kinase (AME2/AFC1) [Arabidopsis thaliana]
  misc_feature (1)..(418): Homolog of NCBI NO: 34908100 NR Description: putative protein kinase AFC1
  misc_feature (1)..(423): Homolog of NCBI NO: 7489189 NR Description: protein kinase PK12 (EC 2.7.1.-),
  misc_feature (1)..(423): Homolog of NCBI NO: 7211773 NR Description: protein kinase MK5 [Mesembryanthemum crystallinum]
  misc_feature (1)..(418): Homolog of NCBI NO: 15233948 NR Description: protein kinase (AFC2) [Arabidopsis thaliana]
MERIVEFPHTYMDRPPRKRARLGWDIAEVPKAQVGLFCGQEVENISSFAPSEHPPSSLFKGVARNGSPPWRDDDKDGHYMFELGDNLTSRYKIHGKMGEGTFGQVLECWDRERKEMVAIKIVRGIKKYREAAMVEIEVLQQLGKHDKGSNRCVQIRNWFDYRNHICIVFEKLGPSLYDFLRKNSYRSFPIDLVREIGWQLLECVAFMHDLHMIHTDLKPENILLVSPEYLKIPDYKSTTRSPSSFFKRVPKSSAIKVIDFGSTTYEREDQTYIVSTRHYRAPEVILGLGWSYPCDIWSVGCILVELCTGEALFQTHENLEHLAMMERVLGPIPQQMLKRVDRHAEKYVRRGRLDWPEGAASRESIKAVMKLPRLQNIIMQHVDHSAGDLIHLLQGLLRYDPFERLTARDALRHSFFTRDQLRR

SEQ ID NO: 60464 - protein, 412 aa, Glycine max
  peptide (1)..(412): Ceres Seq. ID no. 15176591
  misc_feature (80)..(405): Pfam Name: Protein kinase domain Pfam Description: Protein kinase domain
  misc_feature (43)..(405): Homolog of NCBI NO: 34912246 NR Description: putative protein kinase AFC3
  misc_feature (38)..(405): Homolog of NCBI NO: 15233872 NR Description: protein kinase AFC3 [Arabidopsis thaliana]
  misc_feature (38)..(405): Homolog of NCBI NO: 601791 NR Description: protein kinase
  misc_feature (1)..(409): Homolog of NCBI NO: 601787 NR Description: protein kinase
  misc_feature (1)..(409): Homolog of NCBI NO: 30693861 NR Description: protein kinase (AME2/AFC1) [Arabidopsis thaliana]
  misc_feature (1)..(409): Homolog of NCBI NO: 15231839 NR Description: protein kinase (AME2/AFC1) [Arabidopsis thaliana]
  misc_feature (1)..(407): Homolog of NCBI NO: 34908100 NR Description: putative protein kinase AFC1
  misc_feature (1)..(412): Homolog of NCBI NO: 7489189 NR Description: protein kinase PK12 (EC 2.7.1.-),
  misc_feature (1)..(412): Homolog of NCBI NO: 7211773 NR Description: protein kinase MK5 [Mesembryanthemum crystallinum]
  misc_feature (1)..(407): Homolog of NCBI NO: 15233948 NR Description: protein kinase (AFC2) [Arabidopsis thaliana]
MDRPPRKRARLGWDIAEVPKAQVGLFCGQEVENISSFAPSEHPPSSLFKGVARNGSPPWRDDDKDGHYMFELGDNLTSRYKIHGKMGEGTFGQVLECWDRERKEMVAIKIVRGIKKYREAAMVEIEVLQQLGKHDKGSNRCVQIRNWFDYRNHICIVFEKLGPSLYDFLRKNSYRSFPIDLVREIGWQLLECVAFMHDLHMIHTDLKPENILLVSPEYLKIPDYKSTTRSPSSFFKRVPKSSAIKVIDFGSTTYEREDQTYIVSTRHYRAPEVILGLGWSYPCDIWSVGCILVELCTGEALFQTHENLEHLAMMERVLGPIPQQMLKRVDRHAEKYVRRGRLDWPEGAASRESIKAVMKLPRLQNIIMQHVDHSAGDLIHLLQGLLRYDPFERLTARDALRHSFFTRDQLRR

SEQ ID NO: 60465 - DNA, 1231 bp, Glycine max
  misc_feature (1)..(1231): Ceres Seq. ID no. 15175688
aaacactaatcacattcattcaagatagatgtcaaagttaagcattctcttcctcctagtcttatccttcagttctgtactctcagaactatgcaacccacaagacaaacaagccctactccaaatcaagaaagatcttggaaacccaaccactctctcctcatggcttctaaccactgattgctgcaacagaacatggctaggtgtttcatgcgacaccgacacccaaacataccgcgtcaacgacctcgacctctccgatcttaacctccccaaaccctactctattcctccctccatagccaaccttccctacttgaattttctttccattagcaggaccccaaccctaatcggtcaaatcccctcagccatcgctaaactcacccaactccgttatctttatatcacccacaccaatgtctccggccctataccagatttcttgtctcaaatcaaaaccttagtcaccctcgatttctcctacaacaccctctccggcaaactccccgcctcgctctcttcgctgcccaatctcgtcggaatcaccttcgacggcaaccaaatctccggcgccatcccggactcgtacggctcattctcgaagcttttcacgtcgatgacgatctcccgcaaccgcctcacagggaagattccggcgacgttcgcgaatctgaacctggcgttcgtggacttgtctcggaacatgctggagggtgatgcgtcggtgttgtttgggacggagaaaaacacgcagaagatacttctggcgaagaacatgcttgcttttgatctggggaaagtaggcttgtctaagaacttgaacggcttggatcttaggaacaaccgtatttatgggacgctacctcagggacttacggcgcttaagtttctgcacagttttaatgtgagcttcaatgatctttgtggtgagattccgcagggtgggaacatgcaacgttttgacgtatcttcttatgccaataacaagtgtttgtgtggctctcctcttccaccatgcacttaataacaagtgttttattttcaaccctagcttggattaataagaacggatgggattaaacgttataatagagtcatattcaaaaggtaaatacccaaagtattactgtggcgtgcttggactactttgctaatactattttagattattcattaatatatgcttaacttttataattataattataataaataaatacttttaaat

SEQ ID NO: 60466 - protein, 332 aa, Glycine max
  peptide (1)..(332): Ceres Seq. ID no. 15175689
  misc_feature (121)..(144): Pfam Name: Leucine Rich Repeat Pfam Description: Leucine Rich Repeat
MSKLSILFLLVLSFSSVLSELCNPQDKQALLQIKKDLGNPTTLSSWLLTTDCCNRTWLGVSCDTDTQTYRVNDLDLSDLNLPKPYSIPPSIANLPYLNFLSISRTPTLIGQIPSAIAKLTQLRYLYITHTNVSGPIPDFLSQIKTLVTLDFSYNTLSGKLPASLSSLPNLVGITFDGNQISGAIPDSYGSFSKLFTSMTISRNRLTGKIPATFANLNLAFVDLSRNMLEGDASVLFGTEKNTQKILLAKNMLAFDLGKVGLSKNLNGLDLRNNRIYGTLPQGLTALKFLHSFNVSFNDLCGEIPQGGNMQRFDVSSYANNKCLCGSPLPPCT

SEQ ID NO: 60467 - DNA, 1462 bp, Glycine max
  misc_feature (1)..(1462): Ceres Seq. ID no. 14315518
aagttaatcaatcatcgctgtcgttgatcattcagcgcaagtctgcaaatcccatcatcatggcggccataacccgcctcgcgaagcgcgcgttcgtcgtctcttccctggcgaggaggtgcctgagctcctccgtagtcaactgccacgcgccgccgcacgacgccacgtcgttccgcccgtttccgctgcgtgaagattcgagcaagcggtgcgtgcagtgggtgttcctcggctgccccggcgtcggaaaaggaacgtacgctagtcgcctctcgaacctcctcggcgtttctcacatcgccaccggcgatctcgttcgcgacgaactcacctcctctggccccctttcttcccagctatcagaaattgtaaaacaaggtcaattggtgtcagatgaaattattattagtttattgtcaaagagacttgttgccggggaagctaaaggcgatttgggatttattcttgatggttttcctcgaacaattaagcaagcagaaatattggaaggggtaactgacattgacttggtaatcaatctgaagcttcgagaagatgttctgcttgagaaatgccttggtaggagaatttgcaatcagtgtgggggaaattttaatgttgcttccatcaacatcaaggctgagaatgggagccctggaattattatggctccacttcttcctcctgagaattgtatatcaaagctcattactcgatcagatgatactgaagcagtggtcaaagaaaggcttcgaatatacaatgaaatgactcagcctgtggaggaattttaccgttcaagaggaaaattattggagtttaacctgcctggaggaatcccggagtcttggcctaagttgctacatgctcttaatcttgatgattatgaggacaaacgatctgctgcagcataacgatataataatgtatcataacagtaagtatttcattctttgcgtgcatatattgcatgcttggcaattttgcaggacagagagccaaagaaagggaacttccctgctagtattattttggaccaataatgatatttgtaagtgttgtaatctgataagaggataagactggtagtgttgcgttttcttttcatataatttggttatatgggaagggtttcccagcatataatgttattgtgaagagtgaataatatatcacagcattgctagatggatagttggtcaggaatcagcttcgataggactggtgcatcatcactgtactgttgtaaattaaatgtgaatgaacttattctatttaatcatcagattctcgtgatttagggaaggcttttactgaagtaacttccaggaaaaattatttaatatgatgtttcatgttatttgaataagtcttatgatttcacagtactcatgaataactccttttctatgaatgttcttgttgctttaacattcaatgaatagaacaagaattctct

SEQ ID NO: 60468 - protein, 304 aa, Glycine max
  peptide (1)..(304): Ceres Seq. ID no. 14315519
  misc_feature (76)..(194): Pfam Name: Adenylate kinase Pfam Description: Adenylate kinase
  misc_feature (75)..(295): Homolog of NCBI NO: 15644227 NR Description: adenylate kinase [Thermotoga maritima]
  misc_feature (72)..(294): Homolog of NCBI NO: 18311366 NR Description: adenylate kinase [Clostridium perfringens]
  misc_feature (75)..(272): Homolog of NCBI NO: 28212159 NR Description: adenylate kinase [Clostridium tetani E88]
  misc_feature (75)..(280): Homolog of NCBI NO: 23510140 NR Description: adenylate kinase 1 [Plasmodium falciparum 3D7]
  misc_feature (19)..(304): Homolog of NCBI NO: 30687836 NR Description: adenylate kinase -related [Arabidopsis thaliana]
  misc_feature (20)..(304): Homolog of NCBI NO: 29427816 NR Description: Adenylate kinase, chloroplast precursor (ATP-AMP
  misc_feature (20)..(304): Homolog of NCBI NO: 32488408 NR Description: OSJNBa0043A12.38 [Oryza sativa (japonica
  misc_feature (20)..(304): Homolog of NCBI NO: 15228109 NR Description: adenylate kinase -related [Arabidopsis thaliana]
  misc_feature (20)..(120): Homolog of NCBI NO: 6063552 NR Description: ESTs AU065232(E60855),C23624(S1554), correspond to a region of the predicted gene.~similar to putative
  misc_feature (117)..(304): Homolog of NCBI NO: 6063552 NR Description: ESTs AU065232(E60855),C23624(S1554), correspond to a region of the predicted gene.~similar to putative
VNQSSLSLIIQRKSANPIIMAAITRLAKRAFVVSSLARRCLSSSVVNCHAPPHDATSFRPFPLREDSSKRCVQWVFLGCPGVGKGTYASRLSNLLGVSHIATGDLVRDELTSSGPLSSQLSEIVKQGQLVSDEIIISLLSKRLVAGEAKGDLGFILDGFPRTIKQAEILEGVTDIDLVINLKLREDVLLEKCLGRRICNQCGGNFNVASINIKAENGSPGIIMAPLLPPENCISKLITRSDDTEAVVKERLRIYNEMTQPVEEFYRSRGKLLEFNLPGGIPESWPKLLHALNLDDYEDKRSAAA

SEQ ID NO: 60469 - protein, 285 aa, Glycine max
  peptide (1)..(285): Ceres Seq. ID no. 14315520
  misc_feature (57)..(175): Pfam Name: Adenylate kinase Pfam Description: Adenylate kinase
  misc_feature (56)..(276): Homolog of NCBI NO: 15644227 NR Description: adenylate kinase [Thermotoga maritima]
  misc_feature (53)..(275): Homolog of NCBI NO: 18311366 NR Description: adenylate kinase [Clostridium perfringens]
  misc_feature (56)..(253): Homolog of NCBI NO: 28212159 NR Description: adenylate kinase [Clostridium tetani E88]
  misc_feature (56)..(261): Homolog of NCBI NO: 23510140 NR Description: adenylate kinase 1 [Plasmodium falciparum 3D7]
  misc_feature (1)..(285): Homolog of NCBI NO: 30687836 NR Description: adenylate kinase -related [Arabidopsis thaliana]
  misc_feature (1)..(285): Homolog of NCBI NO: 29427816 NR Description: Adenylate kinase, chloroplast precursor (ATP-AMP
  misc_feature (1)..(285): Homolog of NCBI NO: 32488408 NR Description: OSJNBa0043A12.38 [Oryza sativa (japonica
  misc_feature (1)..(285): Homolog of NCBI NO: 15228109 NR Description: adenylate kinase -related [Arabidopsis thaliana]
  misc_feature (1)..(101): Homolog of NCBI NO: 6063552 NR Description: ESTs AU065232(E60855),C23624(S1554), correspond to a region of the predicted gene.~similar to putative
  misc_feature (98)..(285): Homolog of NCBI NO: 6063552 NR Description: ESTs AU065232(E60855),C23624(S1554), correspond to a region of the predicted gene.~similar to putative
MAAITRLAKRAFVVSSLARRCLSSSVVNCHAPPHDATSFRPFPLREDSSKRCVQWVFLGCPGVGKGTYASRLSNLLGVSHIATGDLVRDELTSSGPLSSQLSEIVKQGQLVSDEIIISLLSKRLVAGEAKGDLGFILDGFPRTIKQAEILEGVTDIDLVINLKLREDVLLEKCLGRRICNQCGGNFNVASINIKAENGSPGIIMAPLLPPENCISKLITRSDDTEAVVKERLRIYNEMTQPVEEFYRSRGKLLEFNLPGGIPESWPKLLHALNLDDYEDKRSAAA

SEQ ID NO: 60470 - DNA, 999 bp, Glycine max
  misc_feature (1)..(999): Ceres Seq. ID no. 15173624
acaaattccatacaacactctatccctcgttctttctctctctctctctctctctctctctagccagctttggttagacaacatagttctgaccaacatggtgcaatcaaggaaattcagaggtgtgaggcaacgccattggggctcttgggtttctgagattcgtcacccattattgaaaaggagggtgtggcttgggacattcgagacagctgaggaagcagcaagagcatatgatgaggcagccattttgatgagtggaagaaatgcaaaaacaaacttcccagttggtgaaaaccaaatagtgggaaatcacagttcaaacacttcctcttcctccactacaacattgtctgcagttctgagtgcgaagctgagaaagtgttgcaagtccccttcaccttccctcacttgcctgaggcttgacactgagaattcccacattggtgtgtggcagaagcgagcggggcctcgttccgactcaaactggatcatgatggttgagttggaaaataagaacaacgacaacgagggtgatcatcatcagggtccttcttcttctgatgattcagaatttcctgttgttgttgttgatgttgatgcccaagagaaggtaaagcctgaagaagaaagcactggcttagatgaggaacagaaaatggccctacagatgatagaggaacttctcaataggaattgaattggattagccctatcatcccaacatgcttttactttcacgtggtgcatgcaaggagtttcaagttcaagttctccctctctagcacttcgttttatttctttgtttgtccaaaataggataggagagtgggagtgagagtgctactatattattattcatttcgtgaggaatgaggatgtttagtgtctgtggctgtgaatgtttccccctctgtgtgtaactacctacctacattcactatatatgtggttaaacttcatttcttctgtaaaaaaactattccttgatgcttttcg

SEQ ID NO: 60471 - protein, 232 aa, Glycine max
  peptide (1)..(232): Ceres Seq. ID no. 15173625
  misc_feature (36)..(99): Pfam Name: AP2 domain Pfam Description: AP2 domain
  misc_feature (29)..(125): Homolog of NCBI NO: 8809573 NR Description: ethylene-responsive element binding factor
  misc_feature (37)..(128): Homolog of NCBI NO: 131754 NR Description: PPLZ02 PROTEIN
  misc_feature (38)..(133): Homolog of NCBI NO: 38343976 NR Description: OSJNBb0022F16.15 [Oryza sativa (japonica
  misc_feature (37)..(128): Homolog of NCBI NO: 18650662 NR Description: ethylene response factor 1 [Lycopersicon
  misc_feature (37)..(128): Homolog of NCBI NO: 15238727 NR Description: ethylene responsive element binding protein,
  misc_feature (33)..(178): Homolog of NCBI NO: 30689846 NR Description: AP2 domain transcription factor, putative
  misc_feature (33)..(178): Homolog of NCBI NO: 15239413 NR Description: AP2 domain transcription factor, putative
  misc_feature (33)..(230): Homolog of NCBI NO: 15238976 NR Description: putative protein; protein id: At5g11190.1
  misc_feature (33)..(232): Homolog of NCBI NO: 21553845 NR Description: putative ethylene responsive element [Arabidopsis
  misc_feature (33)..(232): Homolog of NCBI NO: 15218134 NR Description: ethylene responsive element binding factor 2
QIPYNTLSLVLSLSLSLSLSSQLWLDNIVLTNMVQSRKFRGVRQRHWGSWVSEIRHPLLKRRVWLGTFETAEEAARAYDEAAILMSGRNAKTNFPVGENQIVGNHSSNTSSSSTTTLSAVLSAKLRKCCKSPSPSLTCLRLDTENSHIGVWQKRAGPRSDSNWIMMVELENKNNDNEGDHHQGPSSSDDSEFPVVVVDVDAQEKVKPEEESTGLDEEQKMALQMIEELLNRN

SEQ ID NO: 60472 - protein, 200 aa, Glycine max
  peptide (1)..(200): Ceres Seq. ID no. 15173626
  misc_feature (4)..(67): Pfam Name: AP2 domain Pfam Description: AP2 domain
  misc_feature (1)..(93): Homolog of NCBI NO: 8809573 NR Description: ethylene-responsive element binding factor
  misc_feature (5)..(96): Homolog of NCBI NO: 131754 NR Description: PPLZ02 PROTEIN
  misc_feature (6)..(101): Homolog of NCBI NO: 38343976 NR Description: OSJNBb0022F16.15 [Oryza sativa (japonica
  misc_feature (5)..(96): Homolog of NCBI NO: 18650662 NR Description: ethylene response factor 1 [Lycopersicon
  misc_feature (5)..(96): Homolog of NCBI NO: 15238727 NR Description: ethylene responsive element binding protein,
  misc_feature (1)..(146): Homolog of NCBI NO: 30689846 NR Description: AP2 domain transcription factor, putative
  misc_feature (1)..(146): Homolog of NCBI NO: 15239413 NR Description: AP2 domain transcription factor, putative
  misc_feature (1)..(198): Homolog of NCBI NO: 15238976 NR Description: putative protein; protein id: At5g11190.1
  misc_feature (1)..(200): Homolog of NCBI NO: 21553845 NR Description: putative ethylene responsive element [Arabidopsis
  misc_feature (1)..(200): Homolog of NCBI NO: 15218134 NR Description: ethylene responsive element binding factor 2
MVQSRKFRGVRQRHWGSWVSEIRHPLLKRRVWLGTFETAEEAARAYDEAAILMSGRNAKTNFPVGENQIVGNHSSNTSSSSTTTLSAVLSAKLRKCCKSPSPSLTCLRLDTENSHIGVWQKRAGPRSDSNWIMMVELENKNNDNEGDHHQGPSSSDDSEFPVVVVDVDAQEKVKPEEESTGLDEEQKMALQMIEELLNRN

SEQ ID NO: 60473 - protein, 148 aa, Glycine max
  peptide (1)..(148): Ceres Seq. ID no. 15173627
  misc_feature (1)..(41): Homolog of NCBI NO: 8809573 NR Description: ethylene-responsive element binding factor
  misc_feature (1)..(44): Homolog of NCBI NO: 131754 NR Description: PPLZ02 PROTEIN
  misc_feature (1)..(49): Homolog of NCBI NO: 38343976 NR Description: OSJNBb0022F16.15 [Oryza sativa (japonica
  misc_feature (1)..(44): Homolog of NCBI NO: 18650662 NR Description: ethylene response factor 1 [Lycopersicon
  misc_feature (1)..(44): Homolog of NCBI NO: 15238727 NR Description: ethylene responsive element binding protein,
  misc_feature (1)..(94): Homolog of NCBI NO: 30689846 NR Description: AP2 domain transcription factor, putative
  misc_feature (1)..(94): Homolog of NCBI NO: 15239413 NR Description: AP2 domain transcription factor, putative
  misc_feature (1)..(146): Homolog of NCBI NO: 15238976 NR Description: putative protein; protein id: At5g11190.1
  misc_feature (1)..(148): Homolog of NCBI NO: 21553845 NR Description: putative ethylene responsive element [Arabidopsis
  misc_feature (1)..(148): Homolog of NCBI NO: 15218134 NR Description: ethylene responsive element binding factor 2
MSGRNAKTNFPVGENQIVGNHSSNTSSSSTTTLSAVLSAKLRKCCKSPSPSLTCLRLDTENSHIGVWQKRAGPRSDSNWIMMVELENKNNDNEGDHHQGPSSSDDSEFPVVVVDVDAQEKVKPEEESTGLDEEQKMALQMIEELLNRN

SEQ ID NO: 60474 - DNA, 1161 bp, Glycine max
  misc_feature (1)..(1161): Ceres Seq. ID no. 15169772
aacattaatatatttcttttcgaaaaaatgagacaaacatttgctctattactcatcctttcacttgccgtcatcttgtgccatgcagctgtccatgaagaaatccacaaaggccaggaagccgcttatcatggagcccacgtcactgaggaaaaatatcatgagactaaacatgatgtccaagaaggtgccaaagaaggaaccaacacagtcaaggaaactgcagaatacgtcaaagacagagttgaagaggtggttgaccaaactggtgacagtattaagcatacagctgacgatgttaggaacaaagtcaaaggaactacctatgacaaggtctctgatgccattaagcacaagcttgatgatgctggtaatgtaatccaagaagggttggacagagcgaaagaagccatccacagagcaacccatactactcaagaaggtgtccaagagacaggtaacactgtagatgagactgttgagaaggtcgaacatagaactgatgagaccgttatgaaggttggacacagaattgcagatgctcccggagccattagagaaggagtacatgatgcagctgaagctgtcaaagaagccatacatcctcatgaaccaacacttggagagagaatcatggaaaagatcaatgatgtgactcatagcattaagaaggcagtaggtcttgaagctgcagaatcgattggtgaaaaagttctcgagaaaggtgaacaaaaagctgcatcaaaagccgcgaaagaaggtctagagaaagtagttgaaaaggctagtggaatgactcttgagaccgttgccggcccaattggagcaaagatagctgaaaaggttgctggcaaagcagcttcaaaaggtatcaaagaagctcaagaaaagggtcttaatgatgctgttggagatcttgctgaagagataaaagaaaaagcccaacatttaggtgagaagattcagaaacacgcccatcataagcctagcgctgctgatgatgatctttaaggtagaaacagcaggttcataatatgacgcatgtttagctctatagaatgtatataatattatatataatagaatgatataagtttattaagcaaagtatttttagcacaatatgtgtttatgtcaatatattaatacaacgaatcgctc

SEQ ID NO: 60475 - protein, 336 aa, Glycine max
  peptide (1)..(336): Ceres Seq. ID no. 15169773
  misc_feature (125)..(269): Pfam Name: Synuclein Pfam Description: Synuclein
  misc_feature (48)..(323): Homolog of NCBI NO: 7521941 NR Description: fimbriae-associated protein Fap1 - Streptococcus
  misc_feature (48)..(321): Homolog of NCBI NO: 7521941 NR Description: fimbriae-associated protein Fap1 - Streptococcus
  misc_feature (48)..(323): Homolog of NCBI NO: 7521941 NR Description: fimbriae-associated protein Fap1 - Streptococcus
  misc_feature (48)..(323): Homolog of NCBI NO: 7521941 NR Description: fimbriae-associated protein Fap1 - Streptococcus
  misc_feature (30)..(328): Homolog of NCBI NO: 15231736 NR Description: late embryogenesis abundant (LEA) protein,
  misc_feature (48)..(323): Homolog of NCBI NO: 7521941 NR Description: fimbriae-associated protein Fap1 - Streptococcus
  misc_feature (48)..(323): Homolog of NCBI NO: 7521941 NR Description: fimbriae-associated protein Fap1 - Streptococcus
  misc_feature (6)..(314): Homolog of NCBI NO: 23508154 NR Description: hypothetical protein [Plasmodium falciparum 3D7]
  misc_feature (48)..(324): Homolog of NCBI NO: 23508154 NR Description: hypothetical protein [Plasmodium falciparum 3D7]
  misc_feature (48)..(328): Homolog of NCBI NO: 23508154 NR Description: hypothetical protein [Plasmodium falciparum 3D7]
NINIFLFEKMRQTFALLLILSLAVILCHAAVHEEIHKGQEAAYHGAHVTEEKYHETKHDVQEGAKEGTNTVKETAEYVKDRVEEVVDQTGDSIKHTADDVRNKVKGTTYDKVSDAIKHKLDDAGNVIQEGLDRAKEAIHRATHTTQEGVQETGNTVDETVEKVEHRTDETVMKVGHRIADAPGAIREGVHDAAEAVKEAIHPHEPTLGERIMEKINDVTHSIKKAVGLEAAESIGEKVLEKGEQKAASKAAKEGLEKVVEKASGMTLETVAGPIGAKIAEKVAGKAASKGIKEAQEKGLNDAVGDLAEEIKEKAQHLGEKIQKHAHHKPSAADDDL

SEQ ID NO: 60476 - protein, 327 aa, Glycine max
  peptide (1)..(327): Ceres Seq. ID no. 15169774
  misc_feature (116)..(260): Pfam Name: Synuclein Pfam Description: Synuclein
  misc_feature (39)..(314): Homolog of NCBI NO: 7521941 NR Description: fimbriae-associated protein Fap1 - Streptococcus
  misc_feature (39)..(312): Homolog of NCBI NO: 7521941 NR Description: fimbriae-associated protein Fap1 - Streptococcus
  misc_feature (39)..(314): Homolog of NCBI NO: 7521941 NR Description: fimbriae-associated protein Fap1 - Streptococcus
  misc_feature (39)..(314): Homolog of NCBI NO: 7521941 NR Description: fimbriae-associated protein Fap1 - Streptococcus
  misc_feature (21)..(319): Homolog of NCBI NO: 15231736 NR Description: late embryogenesis abundant (LEA) protein,
  misc_feature (39)..(314): Homolog of NCBI NO: 7521941 NR Description: fimbriae-associated protein Fap1 - Streptococcus
  misc_feature (39)..(314): Homolog of NCBI NO: 7521941 NR Description: fimbriae-associated protein Fap1 - Streptococcus
  misc_feature (1)..(305): Homolog of NCBI NO: 23508154 NR Description: hypothetical protein [Plasmodium falciparum 3D7]
  misc_feature (39)..(315): Homolog of NCBI NO: 23508154 NR Description: hypothetical protein [Plasmodium falciparum 3D7]
  misc_feature (39)..(319): Homolog of NCBI NO: 23508154 NR Description: hypothetical protein [Plasmodium falciparum 3D7]
MRQTFALLLILSLAVILCHAAVHEEIHKGQEAAYHGAHVTEEKYHETKHDVQEGAKEGTNTVKETAEYVKDRVEEVVDQTGDSIKHTADDVRNKVKGTTYDKVSDAIKHKLDDAGNVIQEGLDRAKEAIHRATHTTQEGVQETGNTVDETVEKVEHRTDETVMKVGHRIADAPGAIREGVHDAAEAVKEAIHPHEPTLGERIMEKINDVTHSIKKAVGLEAAESIGEKVLEKGEQKAASKAAKEGLEKVVEKASGMTLETVAGPIGAKIAEKVAGKAASKGIKEAQEKGLNDAVGDLAEEIKEKAQHLGEKIQKHAHHKPSAADDDL

SEQ ID NO: 60477 - DNA, 1655 bp, Glycine max
  misc_feature (1)..(1655): Ceres Seq. ID no. 15171520
gactagcatttgctgcattaccattcactactagttttcccacatgctttaactagcgcttttttttctttctattttcattatccaatggcttcttctattcctctttatcaaccaaccaacaccttattctccaacacccagttcaaaggttcgcgccgtggcttcttgtggcgacccagttactcgtttggctctcgtgctgaaaacagagcacgacccatcaaagcttcggttggtgcaccaccatttcccctgtttaagcctccccaagttgaagaaacatcttccgagttggagcctgcagatcctgatttctacaagattggttatgtccgaagcatgcgagcttatggagttcattttaaagaagggccagatggttttggtgtgtatgcttccaaagatgtagagcctcttcgccgagcaagggttgtaatggaaattcctcttgaattgatgttaaccataagcaagaagctcccatggatgtttttccctgatataattcccttggatcatccaatatttgatattatcaactcaacaaatccagagacagattgggacctaaggttagcatgccttctcttatacgcatttgattgcgaaggcaacttttggcaattgtatggcgacttcttaccgagtgcagatgagtgcactagcttacttctggcttcagaggaggaacttttggagctgcaggattccgatcttgcttccactattagaaaacagcaacaacgagccttagaattctgggagagtaactggcacagtgctgcaccccttaaaataaagcgtcttgcacatgatcctcaaaggttcgcttgggcagtaggtattgcacagtcacgatgtattaacatgcaaacgagaattggtgctctaaatcaagaagcaaatatgctgattccttatgctgatatgctgaaccattcatttgagccaaattgttttttccattggcgttttaaggacaggatgcttgaggttcttataaatgctggacagcgcattagaaagggagatgagatgacagttaattacatgagtacgcagaagaacgacatgttcatgcaaagatatggattttcatcacctgtgaatccttgggacgagatcaaattctcaggcaatgcacgtattcatttggattccttcgtgtcaatcttccatatatctggccttcctgaagagtattaccataataattgtctgtcaaatgctggggatagttttgttgatggagcagtcatagctgcagcacgaacactgccaagttggtcagatggggatgtgcctccaatccctagcgtggaaagaaaggctgccaaggagttgcaagatgaatgtcaaaagatgctcgcagcatttgctacaacctctaagcaagaccagaaattgctaggttccatgacagatgctacgaggacacttgaagctgcaataaagtatagattgcacaggaaattgttcatggagaaagttatccaagcattggagatgtatcaagagcaaatactgttctgatcccaatctactaacaggagaatagtcagtaagattttgtagcactgtagtgtcgtgtatacctgtaatcctgtgtcacttaaaacaatgctctttatccattaattgtaggttcttcg

SEQ ID NO: 60478 - protein, 482 aa, Glycine max
  peptide (1)..(482): Ceres Seq. ID no. 15171521
  misc_feature (282)..(329): Pfam Name: SET domain Pfam Description: SET domain
  misc_feature (148)..(285): Homolog of NCBI NO: 7485732 NR Description: hypothetical protein F18F4.220 - Arabidopsis
  misc_feature (282)..(443): Homolog of NCBI NO: 7485733 NR Description: hypothetical protein F18F4.230 - Arabidopsis
  misc_feature (1)..(230): Homolog of NCBI NO: 7485732 NR Description: hypothetical protein F18F4.220 - Arabidopsis
  misc_feature (282)..(482): Homolog of NCBI NO: 30685001 NR Description: expressed protein [Arabidopsis thaliana]
  misc_feature (1)..(285): Homolog of NCBI NO: 30684996 NR Description: expressed protein [Arabidopsis thaliana]
  misc_feature (1)..(482): Homolog of NCBI NO: 28393566 NR Description: unknown protein [Arabidopsis thaliana]
MASSIPLYQPTNTLFSNTQFKGSRRGFLWRPSYSFGSRAENRARPIKASVGAPPFPLFKPPQVEETSSELEPADPDFYKIGYVRSMRAYGVHFKEGPDGFGVYASKDVEPLRRARVVMEIPLELMLTISKKLPWMFFPDIIPLDHPIFDIINSTNPETDWDLRLACLLLYAFDCEGNFWQLYGDFLPSADECTSLLLASEEELLELQDSDLASTIRKQQQRALEFWESNWHSAAPLKIKRLAHDPQRFAWAVGIAQSRCINMQTRIGALNQEANMLIPYADMLNHSFEPNCFFHWRFKDRMLEVLINAGQRIRKGDEMTVNYMSTQKNDMFMQRYGFSSPVNPWDEIKFSGNARIHLDSFVSIFHISGLPEEYYHNNCLSNAGDSFVDGAVIAAARTLPSWSDGDVPPIPSVERKAAKELQDECQKMLAAFATTSKQDQKLLGSMTDATRTLEAAIKYRLHRKLFMEKVIQALEMYQEQILF

SEQ ID NO: 60479 - protein, 397 aa, Glycine max
  peptide (1)..(397): Ceres Seq. ID no. 15171522
  misc_feature (197)..(244): Pfam Name: SET domain Pfam Description: SET domain
  misc_feature (63)..(200): Homolog of NCBI NO: 7485732 NR Description: hypothetical protein F18F4.220 - Arabidopsis
  misc_feature (197)..(358): Homolog of NCBI NO: 7485733 NR Description: hypothetical protein F18F4.230 - Arabidopsis
  misc_feature (1)..(145): Homolog of NCBI NO: 7485732 NR Description: hypothetical protein F18F4.220 - Arabidopsis
  misc_feature (197)..(397): Homolog of NCBI NO: 30685001 NR Description: expressed protein [Arabidopsis thaliana]
  misc_feature (1)..(200): Homolog of NCBI NO: 30684996 NR Description: expressed protein [Arabidopsis thaliana]
  misc_feature (1)..(397): Homolog of NCBI NO: 28393566 NR Description: unknown protein [Arabidopsis thaliana]
MRAYGVHFKEGPDGFGVYASKDVEPLRRARVVMEIPLELMLTISKKLPWMFFPDIIPLDHPIFDIINSTNPETDWDLRLACLLLYAFDCEGNFWQLYGDFLPSADECTSLLLASEEELLELQDSDLASTIRKQQQRALEFWESNWHSAAPLKIKRLAHDPQRFAWAVGIAQSRCINMQTRIGALNQEANMLIPYADMLNHSFEPNCFFHWRFKDRMLEVLINAGQRIRKGDEMTVNYMSTQKNDMFMQRYGFSSPVNPWDEIKFSGNARIHLDSFVSIFHISGLPEEYYHNNCLSNAGDSFVDGAVIAAARTLPSWSDGDVPPIPSVERKAAKELQDECQKMLAAFATTSKQDQKLLGSMTDATRTLEAAIKYRLHRKLFMEKVIQALEMYQEQILF

SEQ ID NO: 60480 - protein, 365 aa, Glycine max
  peptide (1)..(365): Ceres Seq. ID no. 15171523
  misc_feature (165)..(212): Pfam Name: SET domain Pfam Description: SET domain
  misc_feature (31)..(168): Homolog of NCBI NO: 7485732 NR Description: hypothetical protein F18F4.220 - Arabidopsis
  misc_feature (165)..(326): Homolog of NCBI NO: 7485733 NR Description: hypothetical protein F18F4.230 - Arabidopsis
  misc_feature (1)..(113): Homolog of NCBI NO: 7485732 NR Description: hypothetical protein F18F4.220 - Arabidopsis
  misc_feature (165)..(365): Homolog of NCBI NO: 30685001 NR Description: expressed protein [Arabidopsis thaliana]
  misc_feature (1)..(168): Homolog of NCBI NO: 30684996 NR Description: expressed protein [Arabidopsis thaliana]
  misc_feature (1)..(365): Homolog of NCBI NO: 28393566 NR Description: unknown protein [Arabidopsis thaliana]
MEIPLELMLTISKKLPWMFFPDIIPLDHPIFDIINSTNPETDWDLRLACLLLYAFDCEGNFWQLYGDFLPSADECTSLLLASEEELLELQDSDLASTIRKQQQRALEFWESNWHSAAPLKIKRLAHDPQRFAWAVGIAQSRCINMQTRIGALNQEANMLIPYADMLNHSFEPNCFFHWRFKDRMLEVLINAGQRIRKGDEMTVNYMSTQKNDMFMQRYGFSSPVNPWDEIKFSGNARIHLDSFVSIFHISGLPEEYYHNNCLSNAGDSFVDGAVIAAARTLPSWSDGDVPPIPSVERKAAKELQDECQKMLAAFATTSKQDQKLLGSMTDATRTLEAAIKYRLHRKLFMEKVIQALEMYQEQILF

SEQ ID NO: 60481 - DNA, 975 bp, Glycine max
  misc_feature (1)..(975): Ceres Seq. ID no. 15172174
gagagaagatggtggcaagttctagttcagaaggaacaggagtacccctattgagagcatctgataataatggaagagatcaaaacacaagatccccccaagctgagggatggtggaacaaagtgttggacatggaagaggccaagcaccaactcttgttttcactgccaatgattcttaccaacttgttctatcacttgatcattttggtttctgtcatgcttgttggtcaccttggtgagcttcagcttgctggtgctactcttgcaaattcatggttcagtgtcactggcgtggcagttatggttggtttgagtggggcactggaaacactctgcggacaaggatttggtgcaaaggaataccaaatgctgggaatttacctacaagcctcttgcatcatatctcttattttttcaatcattatatccattatttggttctatacagaacccatcctagtgttgcttcatcaatctcccgacattgcaagaacagctgcactttatatgaagtttcttatcccgggagtgtttgcttatagcttcttgcaaaacatcttgaggtttctccagacacaatctgtagtaattccattggttgtactctctgctcttccaatgctggttcatattggtgttgcatatggcttggttcagtggtcaggtctgagttttacaggtgcaccagttgctgcttctatttcactatggatatcattgctattattggccttgtatgtaatgtatgctaagaagttcaagcagacatggaaaggattttcaacgcattcatttcgttacgtatttacaaacatgagactagctctgccctctgctgcaatggtatggtatgaattactaataacctttcacttagctagcccttttgattgttcatcttgattggaaaaacaagccaacacaataacaaactcaataatagagtaatagacagtggaaataaattctccca

SEQ ID NO: 60482 - protein, 300 aa, Glycine max
  peptide (1)..(300): Ceres Seq. ID no. 15172175
  misc_feature (56)..(215): Pfam Name: MatE Pfam Description: MatE
  misc_feature (45)..(288): Homolog of NCBI NO: 15226290 NR Description: MATE efflux protein family [Arabidopsis thaliana]
  misc_feature (45)..(286): Homolog of NCBI NO: 21537267 NR Description: putative integral membrane protein [Arabidopsis
  misc_feature (45)..(288): Homolog of NCBI NO: 15237158 NR Description: MATE efflux protein - related [Arabidopsis
  misc_feature (45)..(286): Homolog of NCBI NO: 15219524 NR Description: MATE efflux protein family [Arabidopsis thaliana]
  misc_feature (15)..(285): Homolog of NCBI NO: 16797803 NR Description: hypothetical membrane protein-1 [Marchantia
  misc_feature (15)..(288): Homolog of NCBI NO: 34394668 NR Description: putative MATE efflux protein family protein
  misc_feature (15)..(105): Homolog of NCBI NO: 34899388 NR Description: putative integral membrane protein
  misc_feature (103)..(285): Homolog of NCBI NO: 34899388 NR Description: putative integral membrane protein
  misc_feature (24)..(288): Homolog of NCBI NO: 15229468 NR Description: MATE efflux protein family [Arabidopsis thaliana]
  misc_feature (12)..(288): Homolog of NCBI NO: 18403810 NR Description: MATE efflux protein family [Arabidopsis thaliana]
EKMVASSSSEGTGVPLLRASDNNGRDQNTRSPQAEGWWNKVLDMEEAKHQLLFSLPMILTNLFYHLIILVSVMLVGHLGELQLAGATLANSWFSVTGVAVMVGLSGALETLCGQGFGAKEYQMLGIYLQASCIISLIFSIIISIIWFYTEPILVLLHQSPDIARTAALYMKFLIPGVFAYSFLQNILRFLQTQSVVIPLVVLSALPMLVHIGVAYGLVQWSGLSFTGAPVAASISLWISLLLLALYVMYAKKFKQTWKGFSTHSFRYVFTNMRLALPSAAMVWYELLITFHLASPFDCSS

SEQ ID NO: 60483 - protein, 298 aa, Glycine max
  peptide (1)..(298): Ceres Seq. ID no. 15172176
  misc_feature (54)..(213): Pfam Name: MatE Pfam Description: MatE
  misc_feature (43)..(286): Homolog of NCBI NO: 15226290 NR Description: MATE efflux protein family [Arabidopsis thaliana]
  misc_feature (43)..(284): Homolog of NCBI NO: 21537267 NR Description: putative integral membrane protein [Arabidopsis
  misc_feature (43)..(286): Homolog of NCBI NO: 15237158 NR Description: MATE efflux protein - related [Arabidopsis
  misc_feature (43)..(284): Homolog of NCBI NO: 15219524 NR Description: MATE efflux protein family [Arabidopsis thaliana]
  misc_feature (13)..(283): Homolog of NCBI NO: 16797803 NR Description: hypothetical membrane protein-1 [Marchantia
  misc_feature (13)..(286): Homolog of NCBI NO: 34394668 NR Description: putative MATE efflux protein family protein
  misc_feature (13)..(103): Homolog of NCBI NO: 34899388 NR Description: putative integral membrane protein
  misc_feature (101)..(283): Homolog of NCBI NO: 34899388 NR Description: putative integral membrane protein
  misc_feature (22)..(286): Homolog of NCBI NO: 15229468 NR Description: MATE efflux protein family [Arabidopsis thaliana]
  misc_feature (10)..(286): Homolog of NCBI NO: 18403810 NR Description: MATE efflux protein family [Arabidopsis thaliana]
MVASSSSEGTGVPLLRASDNNGRDQNTRSPQAEGWWNKVLDMEEAKHQLLFSLPMILTNLFYHLIILVSVMLVGHLGELQLAGATLANSWFSVTGVAVMVGLSGALETLCGQGFGAKEYQMLGIYLQASCIISLIFSIIISIIWFYTEPILVLLHQSPDIARTAALYMKFLIPGVFAYSFLQNILRFLQTQSVVIPLVVLSALPMLVHIGVAYGLVQWSGLSFTGAPVAASISLWISLLLLALYVMYAKKFKQTWKGFSTHSFRYVFTNMRLALPSAAMVWYELLITFHLASPFDCSS

SEQ ID NO: 60484 - protein, 257 aa, Glycine max
  peptide (1)..(257): Ceres Seq. ID no. 15172177
  misc_feature (13)..(172): Pfam Name: MatE Pfam Description: MatE
  misc_feature (2)..(245): Homolog of NCBI NO: 15226290 NR Description: MATE efflux protein family [Arabidopsis thaliana]
  misc_feature (2)..(243): Homolog of NCBI NO: 21537267 NR Description: putative integral membrane protein [Arabidopsis
  misc_feature (2)..(245): Homolog of NCBI NO: 15237158 NR Description: MATE efflux protein - related [Arabidopsis
  misc_feature (2)..(243): Homolog of NCBI NO: 15219524 NR Description: MATE efflux protein family [Arabidopsis thaliana]
  misc_feature (1)..(242): Homolog of NCBI NO: 16797803 NR Description: hypothetical membrane protein-1 [Marchantia
  misc_feature (1)..(245): Homolog of NCBI NO: 34394668 NR Description: putative MATE efflux protein family protein
  misc_feature (1)..(62): Homolog of NCBI NO: 34899388 NR Description: putative integral membrane protein
  misc_feature (60)..(242): Homolog of NCBI NO: 34899388 NR Description: putative integral membrane protein
  misc_feature (1)..(245): Homolog of NCBI NO: 15229468 NR Description: MATE efflux protein family [Arabidopsis thaliana]
  misc_feature (1)..(245): Homolog of NCBI NO: 18403810 NR Description: MATE efflux protein family [Arabidopsis thaliana]
MEEAKHQLLFSLPMILTNLFYHLIILVSVMLVGHLGELQLAGATLANSWFSVTGVAVMVGLSGALETLCGQGFGAKEYQMLGIYLQASCIISLIFSIIISIIWFYTEPILVLLHQSPDIARTAALYMKFLIPGVFAYSFLQNILRFLQTQSVVIPLVVLSALPMLVHIGVAYGLVQWSGLSFTGAPVAASISLWISLLLLALYVMYAKKFKQTWKGFSTHSFRYVFTNMRLALPSAAMVWYELLITFHLASPFDCSS

SEQ ID NO: 60485 - DNA, 1189 bp, Glycine max
  misc_feature (1)..(1189): Ceres Seq. ID no. 14308600
gagcagccagtgtgaaccagtctcacctcattgattcattctccgtcagaaatacctttcctttgcgaaagagaagagatctgaaaccctaaccctaaccctaaccagaggtaatggattcagtgcctcgaagaagcagaggaggaggcgttttggaaaacctcgacaaggtcctaatgcgtcgcaactgagtctacgtcaccttcgtcatcgcaggcgccttcctcggagaacgggctgtggattacggagctcacaagatcggggagcacaataacgttgggtccaaatggcacctagatggaaaggaaaagatgcaaaagctaaaaaggatgcacaagctgaagcgctcaaggaacccatgtcaaagattgtatctcaacttcagtcttctctagttcaatcaaatacttgtggatttctctctggtagtagtgtacacttagcagtgggagcagaacaacttcatttgctcgataaagcatgctttggctcacctgtgagaacagttgaaaaggacaaacctcggtttcaattaagctttgaggaggcattctacctatgctattccttgaaatgccttaagattaataatgacagtgatgatactagtccccaaaacagtgaagagctgtggcattacatgaagtcaaagaaagaaacattcccttgtttctacaaggcttattcccacctgagaatgaaaaactgggtagtgaggtcaggagctcagtatggtgcagatttcgttgtctattgtcaccatccagctcgggtccattccgagtatggtgtgcttgttttatcagatggagaagataaagatctaaatggaaggttgagagtatggtctgatgttcattgcacaactcgacttcttggaggtgttgcaaaaatcttattggttttgtatgtcaatagaaatggtagcagcaatgagtctccattatgtttggcaaactacaccattgaagagcacacaatcaccagatggaatccagaacagtgccgcgaaaagatggtaattcatgctaattctgataatggaactgggtaaatacttcatcatatggacgcaacaaaatatatcaaacatgaaaaaaaaagtattttttttattgtctttgtccaaagatattagttattcaagcataacaatattcttaaagatttgattccttttccgttt

SEQ ID NO: 60486 - protein, 255 aa, Glycine max
  peptide (1)..(255): Ceres Seq. ID no. 14308601
  misc_feature (126)..(211): Pfam Name: tRNA intron endonuclease, catalytic C-terminal domain Pfam Description: tRNA intron endonuclease, catalytic C-terminal
  misc_feature (1)..(242): Homolog of NCBI NO: 19571750 NR Description: SPAPB17E12.07c [Schizosaccharomyces pombe]
  misc_feature (77)..(210): Homolog of NCBI NO: 32412256 NR Description: hypothetical protein ( tRNA-splicing endonuclease
  misc_feature (83)..(177): Homolog of NCBI NO: 31202529 NR Description: ENSANGP00000010953 [Anopheles gambiae]
  misc_feature (86)..(235): Homolog of NCBI NO: 22760473 NR Description: unnamed protein product [Homo sapiens]
  misc_feature (66)..(235): Homolog of NCBI NO: 13376882 NR Description: hypothetical protein MGC2776 [Homo sapiens]
  misc_feature (36)..(235): Homolog of NCBI NO: 39841065 NR Description: similar to hypothetical protein MGC2776 [Mus
  misc_feature (66)..(235): Homolog of NCBI NO: 39644952 NR Description: MGC2776 protein [Homo sapiens]
  misc_feature (1)..(242): Homolog of NCBI NO: 15238643 NR Description: tRNA intron endonuclease - like protein
  misc_feature (1)..(242): Homolog of NCBI NO: 6635256 NR Description: tRNA intron endonuclease [Arabidopsis thaliana]
  misc_feature (1)..(242): Homolog of NCBI NO: 15231186 NR Description: expressed protein [Arabidopsis thaliana]
MAPRWKGKDAKAKKDAQAEALKEPMSKIVSQLQSSLVQSNTCGFLSGSSVHLAVGAEQLHLLDKACFGSPVRTVEKDKPRFQLSFEEAFYLCYSLKCLKINNDSDDTSPQNSEELWHYMKSKKETFPCFYKAYSHLRMKNWVVRSGAQYGADFVVYCHHPARVHSEYGVLVLSDGEDKDLNGRLRVWSDVHCTTRLLGGVAKILLVLYVNRNGSSNESPLCLANYTIEEHTITRWNPEQCREKMVIHANSDNGTG

SEQ ID NO: 60487 - protein, 231 aa, Glycine max
  peptide (1)..(231): Ceres Seq. ID no. 14308602
  misc_feature (102)..(187): Pfam Name: tRNA intron endonuclease, catalytic C-terminal domain Pfam Description: tRNA intron endonuclease, catalytic C-terminal
  misc_feature (1)..(218): Homolog of NCBI NO: 19571750 NR Description: SPAPB17E12.07c [Schizosaccharomyces pombe]
  misc_feature (53)..(186): Homolog of NCBI NO: 32412256 NR Description: hypothetical protein ( tRNA-splicing endonuclease
  misc_feature (59)..(153): Homolog of NCBI NO: 31202529 NR Description: ENSANGP00000010953 [Anopheles gambiae]
  misc_feature (62)..(211): Homolog of NCBI NO: 22760473 NR Description: unnamed protein product [Homo sapiens]
  misc_feature (42)..(211): Homolog of NCBI NO: 13376882 NR Description: hypothetical protein MGC2776 [Homo sapiens]
  misc_feature (12)..(211): Homolog of NCBI NO: 39841065 NR Description: similar to hypothetical protein MGC2776 [Mus
  misc_feature (42)..(211): Homolog of NCBI NO: 39644952 NR Description: MGC2776 protein [Homo sapiens]
  misc_feature (1)..(218): Homolog of NCBI NO: 15238643 NR Description: tRNA intron endonuclease - like protein
  misc_feature (1)..(218): Homolog of NCBI NO: 6635256 NR Description: tRNA intron endonuclease [Arabidopsis thaliana]
  misc_feature (1)..(218): Homolog of NCBI NO: 15231186 NR Description: expressed protein [Arabidopsis thaliana]
MSKIVSQLQSSLVQSNTCGFLSGSSVHLAVGAEQLHLLDKACFGSPVRTVEKDKPRFQLSFEEAFYLCYSLKCLKINNDSDDTSPQNSEELWHYMKSKKETFPCFYKAYSHLRMKNWVVRSGAQYGADFVVYCHHPARVHSEYGVLVLSDGEDKDLNGRLRVWSDVHCTTRLLGGVAKILLVLYVNRNGSSNESPLCLANYTIEEHTITRWNPEQCREKMVIHANSDNGTG

SEQ ID NO: 60488 - protein, 137 aa, Glycine max
  peptide (1)..(137): Ceres Seq. ID no. 14308603
  misc_feature (8)..(93): Pfam Name: tRNA intron endonuclease, catalytic C-terminal domain Pfam Description: tRNA intron endonuclease, catalytic C-terminal
  misc_feature (1)..(124): Homolog of NCBI NO: 19571750 NR Description: SPAPB17E12.07c [Schizosaccharomyces pombe]
  misc_feature (1)..(92): Homolog of NCBI NO: 32412256 NR Description: hypothetical protein ( tRNA-splicing endonuclease
  misc_feature (1)..(59): Homolog of NCBI NO: 31202529 NR Description: ENSANGP00000010953 [Anopheles gambiae]
  misc_feature (1)..(117): Homolog of NCBI NO: 22760473 NR Description: unnamed protein product [Homo sapiens]
  misc_feature (1)..(117): Homolog of NCBI NO: 13376882 NR Description: hypothetical protein MGC2776 [Homo sapiens]
  misc_feature (1)..(117): Homolog of NCBI NO: 39841065 NR Description: similar to hypothetical protein MGC2776 [Mus
  misc_feature (1)..(117): Homolog of NCBI NO: 39644952 NR Description: MGC2776 protein [Homo sapiens]
  misc_feature (1)..(124): Homolog of NCBI NO: 15238643 NR Description: tRNA intron endonuclease - like protein
  misc_feature (1)..(124): Homolog of NCBI NO: 6635256 NR Description: tRNA intron endonuclease [Arabidopsis thaliana]
  misc_feature (1)..(124): Homolog of NCBI NO: 15231186 NR Description: expressed protein [Arabidopsis thaliana]
MKSKKETFPCFYKAYSHLRMKNWVVRSGAQYGADFVVYCHHPARVHSEYGVLVLSDGEDKDLNGRLRVWSDVHCTTRLLGGVAKILLVLYVNRNGSSNESPLCLANYTIEEHTITRWNPEQCREKMVIHANSDNGTG

SEQ ID NO: 60489 - DNA, 1060 bp, Glycine max
  misc_feature (1)..(1060): Ceres Seq. ID no. 14308640
attttgctgtggaagaagaataagaccaaggttttaattagagcctcgtttgtgcaagtgaaaaataggatcacattgacctattcttttttcaagctcttttaattgtcttgggaagaaaatgaacccagaaatgaatggggttgaggctgagaagaggcaagagaatggacatgagaaagtggattatgatgtgcaagagaaaatagactatgtttttaaggtggtggtgataggggactcagcagttggaaagactcaaatactctcaaggtttgcaaagaatgagttctgctttgactcaaagtccaccattggggttgaattccagactaggactgtcactattaatgccaaagtcatcaaagctcagatctgggacactgctggccaggaaaggtacagggctgtaacaagtgcatactacagaggtgcattaggggcaatgcttgtctacgacataacgaagaggcaatcgtttgatcatgtagcgagatgggtggaggagctgcgtgcgcacgcagatagctccattgtgatcatgttggttgggaacaaagctgatcttgtggaccagagaatggtaccaactgaggatgcagtggagtttgctgaggaccaaggcctcttcttctccgagacttcagctctcagtggtgacaatgtggagagtgcatttctcaaattgctagaagagatcaatagggtagtgtccaaaaaggctttggaatgtggtttagggaaggagaatggtgacaccaatgttgcctcactcaaaggaacaaaggttgatataatcttaggtcctgaattggaaattagtgagatgaagaaattgtcttcgtgctcttgttaatattggtagtgagatttaagtttgtgtattttgattttgagtttgggaaaaagagcagagtgagtgaaaagtatatatacatgagtatccttaacggtgagtgtggaaggctaagttgattttatttgctattgctttccatgctgagttgaagagtaatagttatcctgtttcgttatgattatgaattattacagttatggc

SEQ ID NO: 60490 - protein, 244 aa, Glycine max
  peptide (1)..(244): Ceres Seq. ID no. 14308641
  misc_feature (34)..(194): Pfam Name: Ras family Pfam Description: Ras family
  misc_feature (24)..(243): Homolog of NCBI NO: 3024505 NR Description: RAS-RELATED PROTEIN RAB11D
  misc_feature (24)..(239): Homolog of NCBI NO: 3024500 NR Description: Ras-related protein Rab11A
  misc_feature (24)..(229): Homolog of NCBI NO: 15238392 NR Description: Ras family GTP-binding protein [Arabidopsis
  misc_feature (1)..(244): Homolog of NCBI NO: 30677910 NR Description: GTP-binding protein, putative [Arabidopsis
  misc_feature (25)..(244): Homolog of NCBI NO: 7438429 NR Description: GTP-binding protein - garden pea (fragment)
  misc_feature (1)..(244): Homolog of NCBI NO: 5926718 NR Description: PRA2 [Pisum sativum]
  misc_feature (1)..(244): Homolog of NCBI NO: 1370144 NR Description: RAB11B [Lotus corniculatus var. japonicus]
MNPEMNGVEAEKRQENGHEKVDYDVQEKIDYVFKVVVIGDSAVGKTQILSRFAKNEFCFDSKSTIGVEFQTRTVTINAKVIKAQIWDTAGQERYRAVTSAYYRGALGAMLVYDITKRQSFDHVARWVEELRAHADSSIVIMLVGNKADLVDQRMVPTEDAVEFAEDQGLFFSETSALSGDNVESAFLKLLEEINRVVSKKALECGLGKENGDTNVASLKGTKVDIILGPELEISEMKKLSSCSC

SEQ ID NO: 60491 - protein, 240 aa, Glycine max
  peptide (1)..(240): Ceres Seq. ID no. 14308642
  misc_feature (30)..(190): Pfam Name: Ras family Pfam Description: Ras family
  misc_feature (20)..(239): Homolog of NCBI NO: 3024505 NR Description: RAS-RELATED PROTEIN RAB11D
  misc_feature (20)..(235): Homolog of NCBI NO: 3024500 NR Description: Ras-related protein Rab11A
  misc_feature (20)..(225): Homolog of NCBI NO: 15238392 NR Description: Ras family GTP-binding protein [Arabidopsis
  misc_feature (1)..(240): Homolog of NCBI NO: 30677910 NR Description: GTP-binding protein, putative [Arabidopsis
  misc_feature (21)..(240): Homolog of NCBI NO: 7438429 NR Description: GTP-binding protein - garden pea (fragment)
  misc_feature (1)..(240): Homolog of NCBI NO: 5926718 NR Description: PRA2 [Pisum sativum]
  misc_feature (1)..(240): Homolog of NCBI NO: 1370144 NR Description: RAB11B [Lotus corniculatus var. japonicus]
MNGVEAEKRQENGHEKVDYDVQEKIDYVFKVVVIGDSAVGKTQILSRFAKNEFCFDSKSTIGVEFQTRTVTINAKVIKAQIWDTAGQERYRAVTSAYYRGALGAMLVYDITKRQSFDHVARWVEELRAHADSSIVIMLVGNKADLVDQRMVPTEDAVEFAEDQGLFFSETSALSGDNVESAFLKLLEEINRVVSKKALECGLGKENGDTNVASLKGTKVDIILGPELEISEMKKLSSCSC

SEQ ID NO: 60492 - protein, 136 aa, Glycine max
  peptide (1)..(136): Ceres Seq. ID no. 14308643
  misc_feature (1)..(86): Pfam Name: Ras family Pfam Description: Ras family
  misc_feature (1)..(135): Homolog of NCBI NO: 3024505 NR Description: RAS-RELATED PROTEIN RAB11D
  misc_feature (1)..(131): Homolog of NCBI NO: 3024500 NR Description: Ras-related protein Rab11A
  misc_feature (1)..(121): Homolog of NCBI NO: 15238392 NR Description: Ras family GTP-binding protein [Arabidopsis
  misc_feature (1)..(136): Homolog of NCBI NO: 30677910 NR Description: GTP-binding protein, putative [Arabidopsis
  misc_feature (1)..(136): Homolog of NCBI NO: 7438429 NR Description: GTP-binding protein - garden pea (fragment)
  misc_feature (1)..(136): Homolog of NCBI NO: 5926718 NR Description: PRA2 [Pisum sativum]
  misc_feature (1)..(136): Homolog of NCBI NO: 1370144 NR Description: RAB11B [Lotus corniculatus var. japonicus]
MLVYDITKRQSFDHVARWVEELRAHADSSIVIMLVGNKADLVDQRMVPTEDAVEFAEDQGLFFSETSALSGDNVESAFLKLLEEINRVVSKKALECGLGKENGDTNVASLKGTKVDIILGPELEISEMKKLSSCSC

SEQ ID NO: 60493 - DNA, 1568 bp, Glycine max
  misc_feature (1)..(1568): Ceres Seq. ID no. 14308243
agcactagcactgcaattcactgtaatgggtcaagtgttacaagatcagagaggtttgtggactcagatacagagacctttttggacacaatgcagaggagttggtccatgttgccatggaatagaagcttcgagggatggactttcaaaagaacctcctcaagtaaacgagagcctttgacctcacattcaactcattccatgggaccatactttgatcacaataaatgcactgcaagtggctgggaaaatagggaactttggagtagagatgggaaaacaaagctcaaaaccaatgtgttctttgcttcctttgatcaaagaagcaaaaaagcatgtggtgagagtgcatgtacagcactagcagtgtgcatagctcactggcttcattccaaccacaacatgccaacaagggctcaatttgatagcctcatcaaaaagggttcctctaaatggagaaagctgagtcatagtgatcactacctaaagcttttccctgataagcattttgatttagagacaatcttggaagccaacattaggccactagttgttatccctcaaaattcctacacaggatttttctcccctgagaagtttaaatgcttagaaggagccatgtcctttgatgatatttgggatgagataactagaaatgatggtgtggttgatcatgagccaagaatttacatagtgagttggaatgaccatttctttgttctgaaagtggaagttgatgcttgttatgtgattgacactttgggggagaggctttttgagggatgcaaaaaggctttcatgttgaagtttgatggttcaagtttgatgcatgcaaagggaagtaagaaaggaagaggtgagatagtttgcaaaggaaaagagtgttgtaaagagttcatcaaacgctttcttgctgccataccacttaggcaactagaagaggaagagcaaaataaagggactgtctataatccttattttcacaggaaattgcagattgacttccattatagtttgttatcatccttgtcttcagtttcttcaattggtgaacctttacaacctaattatatagcaagacattagttatataactcaattgctaaccttgtgagtcttgagcaattgttacaattagaaaaccaaaaaacccggcttcttgtctgaagacaaaatgttcaggtgagataagtcctaagcactcattaggataaggtaagcctcaaagcttgaagagtgtttatagaaatacttatagataacctatcaacaagttccttgcattggtaataggcttcgaacttaaattcttgtaagatgagtcttattcttaaaaactagaccaactttcgttggcaaaaactcagcttcttttctagcagagtttgctggcagcttctttttggtgacaactactactaaccctttacaaagtgtgattttactggattgagcaacccaaatatccattagcatcactcagagaataaaacctttgaggctgattcttgttaacgttgctgtatttagtggagtggatctgaatgaaaaagaaaagaaattggtct

SEQ ID NO: 60494 - protein, 361 aa, Glycine max
  peptide (1)..(361): Ceres Seq. ID no. 14308244
  misc_feature (193)..(346): Homolog of NCBI NO: 15229852 NR Description: hypothetical protein [Arabidopsis thaliana]
  misc_feature (44)..(217): Homolog of NCBI NO: 18400834 NR Description: SYNC1 protein [Arabidopsis thaliana]
  misc_feature (44)..(217): Homolog of NCBI NO: 17063176 NR Description: SYNC1 protein [Arabidopsis thaliana]
  misc_feature (279)..(338): Homolog of NCBI NO: 15226799 NR Description: hypothetical protein [Arabidopsis thaliana]
  misc_feature (155)..(271): Homolog of NCBI NO: 15226799 NR Description: hypothetical protein [Arabidopsis thaliana]
  misc_feature (50)..(277): Homolog of NCBI NO: 15229852 NR Description: hypothetical protein [Arabidopsis thaliana]
  misc_feature (287)..(338): Homolog of NCBI NO: 15238352 NR Description: expressed protein [Arabidopsis thaliana]
  misc_feature (72)..(271): Homolog of NCBI NO: 15238352 NR Description: expressed protein [Arabidopsis thaliana]
  misc_feature (37)..(340): Homolog of NCBI NO: 34903512 NR Description: P0001B06.8 [Oryza sativa (japonica
  misc_feature (44)..(342): Homolog of NCBI NO: 25412320 NR Description: hypothetical protein At2g25460 [imported] -
STSTAIHCNGSSVTRSERFVDSDTETFLDTMQRSWSMLPWNRSFEGWTFKRTSSSKREPLTSHSTHSMGPYFDHNKCTASGWENRELWSRDGKTKLKTNVFFASFDQRSKKACGESACTALAVCIAHWLHSNHNMPTRAQFDSLIKKGSSKWRKLSHSDHYLKLFPDKHFDLETILEANIRPLVVIPQNSYTGFFSPEKFKCLEGAMSFDDIWDEITRNDGVVDHEPRIYIVSWNDHFFVLKVEVDACYVIDTLGERLFEGCKKAFMLKFDGSSLMHAKGSKKGRGEIVCKGKECCKEFIKRFLAAIPLRQLEEEEQNKGTVYNPYFHRKLQIDFHYSLLSSLSSVSSIGEPLQPNYIARH

SEQ ID NO: 60495 - protein, 331 aa, Glycine max
  peptide (1)..(331): Ceres Seq. ID no. 14308245
  misc_feature (163)..(316): Homolog of NCBI NO: 15229852 NR Description: hypothetical protein [Arabidopsis thaliana]
  misc_feature (14)..(187): Homolog of NCBI NO: 18400834 NR Description: SYNC1 protein [Arabidopsis thaliana]
  misc_feature (14)..(187): Homolog of NCBI NO: 17063176 NR Description: SYNC1 protein [Arabidopsis thaliana]
  misc_feature (249)..(308): Homolog of NCBI NO: 15226799 NR Description: hypothetical protein [Arabidopsis thaliana]
  misc_feature (125)..(241): Homolog of NCBI NO: 15226799 NR Description: hypothetical protein [Arabidopsis thaliana]
  misc_feature (20)..(247): Homolog of NCBI NO: 15229852 NR Description: hypothetical protein [Arabidopsis thaliana]
  misc_feature (257)..(308): Homolog of NCBI NO: 15238352 NR Description: expressed protein [Arabidopsis thaliana]
  misc_feature (42)..(241): Homolog of NCBI NO: 15238352 NR Description: expressed protein [Arabidopsis thaliana]
  misc_feature (7)..(310): Homolog of NCBI NO: 34903512 NR Description: P0001B06.8 [Oryza sativa (japonica
  misc_feature (14)..(312): Homolog of NCBI NO: 25412320 NR Description: hypothetical protein At2g25460 [imported] -
MQRSWSMLPWNRSFEGWTFKRTSSSKREPLTSHSTHSMGPYFDHNKCTASGWENRELWSRDGKTKLKTNVFFASFDQRSKKACGESACTALAVCIAHWLHSNHNMPTRAQFDSLIKKGSSKWRKLSHSDHYLKLFPDKHFDLETILEANIRPLVVIPQNSYTGFFSPEKFKCLEGAMSFDDIWDEITRNDGVVDHEPRIYIVSWNDHFFVLKVEVDACYVIDTLGERLFEGCKKAFMLKFDGSSLMHAKGSKKGRGEIVCKGKECCKEFIKRFLAAIPLRQLEEEEQNKGTVYNPYFHRKLQIDFHYSLLSSLSSVSSIGEPLQPNYIARH

SEQ ID NO: 60496 - protein, 325 aa, Glycine max
  peptide (1)..(325): Ceres Seq. ID no. 14308246
  misc_feature (157)..(310): Homolog of NCBI NO: 15229852 NR Description: hypothetical protein [Arabidopsis thaliana]
  misc_feature (8)..(181): Homolog of NCBI NO: 18400834 NR Description: SYNC1 protein [Arabidopsis thaliana]
  misc_feature (8)..(181): Homolog of NCBI NO: 17063176 NR Description: SYNC1 protein [Arabidopsis thaliana]
  misc_feature (243)..(302): Homolog of NCBI NO: 15226799 NR Description: hypothetical protein [Arabidopsis thaliana]
  misc_feature (119)..(235): Homolog of NCBI NO: 15226799 NR Description: hypothetical protein [Arabidopsis thaliana]
  misc_feature (14)..(241): Homolog of NCBI NO: 15229852 NR Description: hypothetical protein [Arabidopsis thaliana]
  misc_feature (251)..(302): Homolog of NCBI NO: 15238352 NR Description: expressed protein [Arabidopsis thaliana]
  misc_feature (36)..(235): Homolog of NCBI NO: 15238352 NR Description: expressed protein [Arabidopsis thaliana]
  misc_feature (1)..(304): Homolog of NCBI NO: 34903512 NR Description: P0001B06.8 [Oryza sativa (japonica
  misc_feature (8)..(306): Homolog of NCBI NO: 25412320 NR Description: hypothetical protein At2g25460 [imported] -
MLPWNRSFEGWTFKRTSSSKREPLTSHSTHSMGPYFDHNKCTASGWENRELWSRDGKTKLKTNVFFASFDQRSKKACGESACTALAVCIAHWLHSNHNMPTRAQFDSLIKKGSSKWRKLSHSDHYLKLFPDKHFDLETILEANIRPLVVIPQNSYTGFFSPEKFKCLEGAMSFDDIWDEITRNDGVVDHEPRIYIVSWNDHFFVLKVEVDACYVIDTLGERLFEGCKKAFMLKFDGSSLMHAKGSKKGRGEIVCKGKECCKEFIKRFLAAIPLRQLEEEEQNKGTVYNPYFHRKLQIDFHYSLLSSLSSVSSIGEPLQPNYIARH

SEQ ID NO: 60497 - DNA, 1159 bp, Glycine max
  misc_feature (1)..(1159): Ceres Seq. ID no. 12392187
  misc_feature: Phenotype: ROSETTE LEAVES Petiole Length-Short Petioles
  misc_feature: Phenotype: ROSETTE LEAVES Shape-Oval
  misc_feature: Phenotype: WHOLE PLANT Color-Dark Green
  misc_feature: Phenotype: INFLORESCENCE Flowering Time-Late Flowering
  misc_feature: Phenotype: ROSETTE LEAVES Petiole Length-Short Petioles
  misc_feature: Phenotype: ROSETTE LEAVES Shape-Oval
  misc_feature: Phenotype: WHOLE PLANT Color-Dark Green
  misc_feature: Phenotype: INFLORESCENCE Flowering Time-Late Flowering
  misc_feature: Phenotype: ROSETTE LEAVES Petiole Length-Short Petioles
  misc_feature: Phenotype: ROSETTE LEAVES Shape-Oval
  misc_feature: Phenotype: WHOLE PLANT Color-Dark Green
  misc_feature: Phenotype: INFLORESCENCE Flowering Time-Late Flowering
  misc_feature: Phenotype: ROSETTE LEAVES Petiole Length-Short Petioles
  misc_feature: Phenotype: ROSETTE LEAVES Shape-Oval
  misc_feature: Phenotype: WHOLE PLANT Color-Dark Green
  misc_feature: Phenotype: INFLORESCENCE Flowering Time-Late Flowering
  misc_feature: Phenotype: ROSETTE LEAVES Petiole Length-Short Petioles
  misc_feature: Phenotype: ROSETTE LEAVES Shape-Oval
  misc_feature: Phenotype: WHOLE PLANT Color-Dark Green
  misc_feature: Phenotype: INFLORESCENCE Flowering Time-Late Flowering
  misc_feature: Phenotype: ROSETTE LEAVES Petiole Length-Short Petioles
  misc_feature: Phenotype: ROSETTE LEAVES Shape-Oval
  misc_feature: Phenotype: WHOLE PLANT Color-Dark Green
  misc_feature: Phenotype: INFLORESCENCE Flowering Time-Late Flowering
  misc_feature: Phenotype: ROSETTE LEAVES Petiole Length-Short Petioles
  misc_feature: Phenotype: ROSETTE LEAVES Shape-Oval
  misc_feature: Phenotype: WHOLE PLANT Color-Dark Green
  misc_feature: Phenotype: INFLORESCENCE Flowering Time-Late Flowering
  misc_feature: Phenotype: ROSETTE LEAVES Petiole Length-Short Petioles
  misc_feature: Phenotype: ROSETTE LEAVES Shape-Oval
  misc_feature: Phenotype: WHOLE PLANT Color-Dark Green
  misc_feature: Phenotype: INFLORESCENCE Flowering Time-Late Flowering
  misc_feature: Phenotype: ROSETTE LEAVES Petiole Length-Short Petioles
  misc_feature: Phenotype: ROSETTE LEAVES Shape-Oval
  misc_feature: Phenotype: WHOLE PLANT Color-Dark Green
  misc_feature: Phenotype: INFLORESCENCE Flowering Time-Late Flowering
  misc_feature: Phenotype: ROSETTE LEAVES Petiole Length-Short Petioles
  misc_feature: Phenotype: ROSETTE LEAVES Shape-Oval
  misc_feature: Phenotype: WHOLE PLANT Color-Dark Green
  misc_feature: Phenotype: INFLORESCENCE Flowering Time-Late Flowering
atatatatccctcactcactctatctcttttctccagcagcaccaaaaccacccaacactcgaactcaatatccattattaccaaaaaaaaagaaaaaaggatatcaaacacccttttcatcattaaaactctcagttccctctttccctatcaaaaccctttcccacaacactactcactccagtacaagaaaccctttttcaatttggtttcaacagcacacacacacacacatatatatatatatagcatgtttaccttgaatcattcttctgatttgtaccatgtttcccctgagctctcatcttccttggacacatcctcgccggcttcggagggctctcgtggcgtggcattttccgacgaggaggtgcggctggcggtgaggcacccgaagaagcgggcaggtcggaagaagttccgggagacgcgccacccggtgtaccggggggtgaggaggaggaactcggataagtgggtgtgtgaggtgagggagcccaacaagaagaccaggatttggctggggactttccccacgccggagatggcggctcgggcgcacgacgtggcggcaatggccctgaggggccggtatgcctgtctaaactttgctgactcggcctggcggttacctgttcccgccacggccgaggcaaaggatatacagaaggcagcagcagaagctgcccaggctttcagaccagatcaaaccttaaaaaatgctaatacaaggcaggagtgtgtggaggcggtggcggtggcggtggcggagacaacaacggcgacggcacaaggggtgttttatatggaggaagaagagcaggtgttggatatgcctgagttgcttaggaatatggtgctcatgtccccaacacattgcttagggtatgagtatgaagatgctgacttggatgcccaagatgctgaggtgtcactatggaatttctcaatttaataatgtgttttggtttggtttttgttgttagttttttggagtgaacagtgtctgtactggttttttattagtagtacggatactagttataggtggaaagattgcgagggaccaaaaggaattttcttttgaacccttttttgtcaatgtaatcaatatcacgtatatcatgaagtgaatcccttcaagtttatgtataaatt

SEQ ID NO: 60498 - protein, 317 aa, Glycine max
  peptide (1)..(317): Ceres Seq. ID no. 12392188
  misc_feature (145)..(209): Pfam Name: AP2 domain Pfam Description: AP2 domain
  misc_feature (126)..(315): Homolog of NCBI NO: 7484941 NR Description: DRE/CRT-binding protein DREB1A - Arabidopsis
  misc_feature (108)..(315): Homolog of NCBI NO: 38683266 NR Description: Cbcbf [Capsella bursa-pastoris]
  misc_feature (126)..(314): Homolog of NCBI NO: 7488378 NR Description: transcription activator CBF1 homolog M7J2.150 -
  misc_feature (93)..(317): Homolog of NCBI NO: 23495458 NR Description: dehydratiion responsive element binding protein 1
  misc_feature (101)..(317): Homolog of NCBI NO: 18535580 NR Description: putative transcriptional activator CBF1
  misc_feature (96)..(315): Homolog of NCBI NO: 15242244 NR Description: DRE binding protein; protein id: At5g51990.1
  misc_feature (99)..(317): Homolog of NCBI NO: 23495460 NR Description: dehydration responsive element binding protein 1
  misc_feature (94)..(317): Homolog of NCBI NO: 12003384 NR Description: Avr9/Cf-9 rapidly elicited protein 111B
  misc_feature (94)..(317): Homolog of NCBI NO: 40647095 NR Description: DREB-like protein 1 [Capsicum annuum]
  misc_feature (94)..(317): Homolog of NCBI NO: 37147896 NR Description: CaCBF1B [Capsicum annuum]
IYPSLTLSLFSSSTKTTQHSNSISIITKKKEKRISNTLFIIKTLSSLFPYQNPFPQHYSLQYKKPFFNLVSTAHTHTHIYIYSMFTLNHSSDLYHVSPELSSSLDTSSPASEGSRGVAFSDEEVRLAVRHPKKRAGRKKFRETRHPVYRGVRRRNSDKWVCEVREPNKKTRIWLGTFPTPEMAARAHDVAAMALRGRYACLNFADSAWRLPVPATAEAKDIQKAAAEAAQAFRPDQTLKNANTRQECVEAVAVAVAETTTATAQGVFYMEEEEQVLDMPELLRNMVLMSPTHCLGYEYEDADLDAQDAEVSLWNFSI

SEQ ID NO: 60499 - protein, 234 aa, Glycine max
  peptide (1)..(234): Ceres Seq. ID no. 12392189
  misc_feature (62)..(126): Pfam Name: AP2 domain Pfam Description: AP2 domain
  misc_feature (43)..(232): Homolog of NCBI NO: 7484941 NR Description: DRE/CRT-binding protein DREB1A - Arabidopsis
  misc_feature (25)..(232): Homolog of NCBI NO: 38683266 NR Description: Cbcbf [Capsella bursa-pastoris]
  misc_feature (43)..(231): Homolog of NCBI NO: 7488378 NR Description: transcription activator CBF1 homolog M7J2.150 -
  misc_feature (10)..(234): Homolog of NCBI NO: 23495458 NR Description: dehydratiion responsive element binding protein 1
  misc_feature (18)..(234): Homolog of NCBI NO: 18535580 NR Description: putative transcriptional activator CBF1
  misc_feature (13)..(232): Homolog of NCBI NO: 15242244 NR Description: DRE binding protein; protein id: At5g51990.1
  misc_feature (16)..(234): Homolog of NCBI NO: 23495460 NR Description: dehydration responsive element binding protein 1
  misc_feature (11)..(234): Homolog of NCBI NO: 12003384 NR Description: Avr9/Cf-9 rapidly elicited protein 111B
  misc_feature (11)..(234): Homolog of NCBI NO: 40647095 NR Description: DREB-like protein 1 [Capsicum annuum]
  misc_feature (11)..(234): Homolog of NCBI NO: 37147896 NR Description: CaCBF1B [Capsicum annuum]
MFTLNHSSDLYHVSPELSSSLDTSSPASEGSRGVAFSDEEVRLAVRHPKKRAGRKKFRETRHPVYRGVRRRNSDKWVCEVREPNKKTRIWLGTFPTPEMAARAHDVAAMALRGRYACLNFADSAWRLPVPATAEAKDIQKAAAEAAQAFRPDQTLKNANTRQECVEAVAVAVAETTTATAQGVFYMEEEEQVLDMPELLRNMVLMSPTHCLGYEYEDADLDAQDAEVSLWNFSI

SEQ ID NO: 60500 - DNA, 1050 bp, Glycine max
  misc_feature (1)..(1050): Ceres Seq. ID no. 12389450
  misc_feature: Phenotype: ROSETTE LEAVES Petiole Length-Short Petioles
  misc_feature: Phenotype: WHOLE PLANT Color-Dark Green
  misc_feature: Phenotype: INFLORESCENCE Flowering Time-Late Flowering
  misc_feature: Phenotype: ROSETTE LEAVES Petiole Length-Short Petioles
  misc_feature: Phenotype: WHOLE PLANT Color-Dark Green
  misc_feature: Phenotype: INFLORESCENCE Flowering Time-Late Flowering
  misc_feature: Phenotype: INFLORESCENCE Internode Length-Short Internode
  misc_feature: Phenotype: FERTILITY Fertility-Reduced
  misc_feature: Phenotype: ROSETTE LEAVES Petiole Length-Short Petioles
  misc_feature: Phenotype: WHOLE PLANT Color-Dark Green
  misc_feature: Phenotype: INFLORESCENCE Flowering Time-Late Flowering
  misc_feature: Phenotype: ROSETTE LEAVES Petiole Length-Short Petioles
  misc_feature: Phenotype: WHOLE PLANT Color-Dark Green
  misc_feature: Phenotype: INFLORESCENCE Flowering Time-Late Flowering
  misc_feature: Phenotype: ROSETTE LEAVES Petiole Length-Short Petioles
  misc_feature: Phenotype: WHOLE PLANT Color-Dark Green
  misc_feature: Phenotype: INFLORESCENCE Flowering Time-Late Flowering
aactctcactccacaactcaactaagcgcaaaccaaaccaacacaaacaaaaacatctctcagcaaatgaatattctcggacaatcactccaccaatcaaacaacggcagctactcttgttcgtcgccggagactgcaaactcctctaaccttccgaccactccgaaagccgttcactccgacgaggaagtgaacacattagcatcggctcatcctaagaaacgtgcggggcgtcgaatttttaaggagacaaggcatcccgtgtacagaggagtgcggcggaggaacaacaacaagtgggtctgcgaggttcgtgttcccaacgacaagtccacgaggatttggctcggaacgtatccaacgcctgagatggccgcacgtgcgcacgacgtcgccgcgctctcgcttcgaggtaagtcggcgtgtctcaacttcgccgactcgggcgtggcggttgcccttgccggcgtcgaccaatgcgaaggagattcggcgcgtggcggcggcggctgctgtagcgattgcggcggaagacagccgcggcaagcagttgcggactaatgcgattgatgccgttgctgattgcgaagttagcagcagtgacataggcgtcgatgaaaattgcaataacaataaagcttcgcagaggttttgtgatttggatgaaattacaatgccagatgcaccggtttttgaggacatgcatgagtggcttcagactatggctgctgaaccattaagatcacctacttttgtaacatatgttaatgttagggatgtctggaactttgtggaggatgatgctgaggtttccttgtggagcttcaccgtctgaagagcatgcaatttaggctttaggtgtatttagtgtgtttagctttctttctcttcttttggtttttgtacataattaggaacggaggactacgaaaatgtacaaagaccgaaacgatataaggagatagctatctaggtaggaacataaaagtgtgaaacattgtaacttttctcattcggttgtttttgtaaaataaaaattctattttcatc

SEQ ID NO: 60501 - protein, 186 aa, Glycine max
  peptide (1)..(186): Ceres Seq. ID no. 12389451
  misc_feature (86)..(148): Pfam Name: AP2 domain Pfam Description: AP2 domain
  misc_feature (64)..(148): Homolog of NCBI NO: 25407593 NR Description: transcription activator CBF1-like protein
  misc_feature (64)..(148): Homolog of NCBI NO: 18416559 NR Description: DRE binding protein (DREB1A)
  misc_feature (64)..(148): Homolog of NCBI NO: 7488378 NR Description: transcription activator CBF1 homolog M7J2.150 -
  misc_feature (35)..(148): Homolog of NCBI NO: 38683266 NR Description: Cbcbf [Capsella bursa-pastoris]
  misc_feature (34)..(148): Homolog of NCBI NO: 39983638 NR Description: CBF25 [Capsella bursa-pastoris]
  misc_feature (38)..(148): Homolog of NCBI NO: 18535580 NR Description: putative transcriptional activator CBF1
  misc_feature (42)..(148): Homolog of NCBI NO: 37147896 NR Description: CaCBF1B [Capsicum annuum]
  misc_feature (42)..(148): Homolog of NCBI NO: 40647095 NR Description: DREB-like protein 1 [Capsicum annuum]
  misc_feature (23)..(148): Homolog of NCBI NO: 12003384 NR Description: Avr9/Cf-9 rapidly elicited protein 111B
  misc_feature (39)..(161): Homolog of NCBI NO: 23495458 NR Description: dehydratiion responsive element binding protein 1
NSHSTTQLSANQTNTNKNISQQMNILGQSLHQSNNGSYSCSSPETANSSNLPTTPKAVHSDEEVNTLASAHPKKRAGRRIFKETRHPVYRGVRRRNNNKWVCEVRVPNDKSTRIWLGTYPTPEMAARAHDVAALSLRGKSACLNFADSGVAVALAGVDQCEGDSARGGGGCCSDCGGRQPRQAVAD

SEQ ID NO: 60502 - protein, 164 aa, Glycine max
  peptide (1)..(164): Ceres Seq. ID no. 12389452
  misc_feature (64)..(126): Pfam Name: AP2 domain Pfam Description: AP2 domain
  misc_feature (42)..(126): Homolog of NCBI NO: 18416559 NR Description: DRE binding protein (DREB1A)
  misc_feature (42)..(126): Homolog of NCBI NO: 25407593 NR Description: transcription activator CBF1-like protein
  misc_feature (42)..(126): Homolog of NCBI NO: 7488378 NR Description: transcription activator CBF1 homolog M7J2.150 -
  misc_feature (13)..(126): Homolog of NCBI NO: 38683266 NR Description: Cbcbf [Capsella bursa-pastoris]
  misc_feature (12)..(126): Homolog of NCBI NO: 39983638 NR Description: CBF25 [Capsella bursa-pastoris]
  misc_feature (16)..(126): Homolog of NCBI NO: 18535580 NR Description: putative transcriptional activator CBF1
  misc_feature (20)..(126): Homolog of NCBI NO: 37147896 NR Description: CaCBF1B [Capsicum annuum]
  misc_feature (20)..(126): Homolog of NCBI NO: 40647095 NR Description: DREB-like protein 1 [Capsicum annuum]
  misc_feature (1)..(126): Homolog of NCBI NO: 12003384 NR Description: Avr9/Cf-9 rapidly elicited protein 111B
  misc_feature (17)..(139): Homolog of NCBI NO: 23495458 NR Description: dehydratiion responsive element binding protein 1
MNILGQSLHQSNNGSYSCSSPETANSSNLPTTPKAVHSDEEVNTLASAHPKKRAGRRIFKETRHPVYRGVRRRNNNKWVCEVRVPNDKSTRIWLGTYPTPEMAARAHDVAALSLRGKSACLNFADSGVAVALAGVDQCEGDSARGGGGCCSDCGGRQPRQAVAD

SEQ ID NO: 60503 - DNA, 680 bp, Glycine max
  misc_feature (1)..(680): Ceres Seq. ID no. 12398609
  misc_feature: Phenotype: WHOLE PLANT Size-Small
  misc_feature: Phenotype: INFLORESCENCE Flowering Time-Late Flowering
  misc_feature: Phenotype: WHOLE PLANT Size-Large
  misc_feature: Phenotype: INFLORESCENCE Flowering Time-Late Flowering
  misc_feature: Phenotype: INFLORESCENCE Flowering Time-Late Flowering
  misc_feature: Phenotype: WHOLE PLANT Size-Large
aagtgtgagtgatatttgagcttaaaccctagccgctcttctcttcattcttcactttggaaacaatcataatggcgttctgtaataaggttggaaatgtcttgaggcagggtgctgctcgcagcacacatgcccctgttgcgtccatgcttaattacatccgctgcatgtcttcaagcaagcttttcattggaggcctttcatatggagttgatgaccagtctcttaaggatgcattttctggctttggagatgtggttgatgcaaaagttataactgatagagacagtggaagatcaaggggatttggatttgtcaacttctccaatgatgagtctgcaagttcggcactctctgcaatggacgggaaggatctaaatgggcgaagcattcgggtatcctatgcaaatgataaaccatctgcacctcgacctggtggcggtggcggttatcgtggcggggattatgatggtgattttgcttctcgtagtggtggttggtgatcaaatttttgtttgttgcgccttctgcttagttgagattttatgtttatgcctagcacttcgattaaggtggtcactcaagtggtaaagtagtaattattggaattttatgtttttccccgttacatttnttggttatgttattctgtgattttaatggagcatttgtttccatcc

SEQ ID NO: 60504 - protein, 143 aa, Glycine max
  peptide (1)..(143): Ceres Seq. ID no. 12398610
  misc_feature (38)..(109): Pfam Name: RNA recognition motif. (a.k.a. RRM, RBD, or RNP domain) Pfam Description: RNA recognition motif. (a.k.a. RRM, RBD, or RNP
  misc_feature (20)..(143): Homolog of NCBI NO: 322514 NR Description: glycine-rich RNA-binding protein (clone A81) -
  misc_feature (1)..(126): Homolog of NCBI NO: 7489099 NR Description: RNA-binding protein RGP-3 - wood tobacco
  misc_feature (1)..(142): Homolog of NCBI NO: 15822705 NR Description: RNA-binding protein precursor [Solanum tuberosum]
  misc_feature (1)..(136): Homolog of NCBI NO: 7439995 NR Description: RNA binding protein 3 - wood tobacco
  misc_feature (1)..(134): Homolog of NCBI NO: 21553972 NR Description: glycine-rich RNA binding protein, putative
  misc_feature (1)..(134): Homolog of NCBI NO: 15229525 NR Description: glycine-rich RNA-binding protein
  misc_feature (1)..(143): Homolog of NCBI NO: 30682622 NR Description: glycine-rich RNA-binding protein (AtGRP2)
  misc_feature (1)..(143): Homolog of NCBI NO: 15236359 NR Description: glycine-rich RNA-binding protein AtGRP2
  misc_feature (1)..(142): Homolog of NCBI NO: 2826811 NR Description: AtGRP2 [Arabidopsis thaliana]
  misc_feature (1)..(142): Homolog of NCBI NO: 7439994 NR Description: glycine-rich RNA-binding protein - garden pea
MAFCNKVGNVLRQGAARSTHAPVASMLNYIRCMSSSKLFIGGLSYGVDDQSLKDAFSGFGDVVDAKVITDRDSGRSRGFGFVNFSNDESASSALSAMDGKDLNGRSIRVSYANDKPSAPRPGGGGGYRGGDYDGDFASRSGGW

SEQ ID NO: 60505 - protein, 118 aa, Glycine max
  peptide (1)..(118): Ceres Seq. ID no. 12398611
  misc_feature (13)..(84): Pfam Name: RNA recognition motif. (a.k.a. RRM, RBD, or RNP domain) Pfam Description: RNA recognition motif. (a.k.a. RRM, RBD, or RNP
  misc_feature (1)..(118): Homolog of NCBI NO: 322514 NR Description: glycine-rich RNA-binding protein (clone A81) -
  misc_feature (1)..(101): Homolog of NCBI NO: 7489099 NR Description: RNA-binding protein RGP-3 - wood tobacco
  misc_feature (1)..(117): Homolog of NCBI NO: 15822705 NR Description: RNA-binding protein precursor [Solanum tuberosum]
  misc_feature (1)..(111): Homolog of NCBI NO: 7439995 NR Description: RNA binding protein 3 - wood tobacco
  misc_feature (1)..(109): Homolog of NCBI NO: 21553972 NR Description: glycine-rich RNA binding protein, putative
  misc_feature (1)..(109): Homolog of NCBI NO: 15229525 NR Description: glycine-rich RNA-binding protein
  misc_feature (1)..(118): Homolog of NCBI NO: 30682622 NR Description: glycine-rich RNA-binding protein (AtGRP2)
  misc_feature (1)..(118): Homolog of NCBI NO: 15236359 NR Description: glycine-rich RNA-binding protein AtGRP2
  misc_feature (1)..(117): Homolog of NCBI NO: 2826811 NR Description: AtGRP2 [Arabidopsis thaliana]
  misc_feature (1)..(117): Homolog of NCBI NO: 7439994 NR Description: glycine-rich RNA-binding protein - garden pea
MLNYIRCMSSSKLFIGGLSYGVDDQSLKDAFSGFGDVVDAKVITDRDSGRSRGFGFVNFSNDESASSALSAMDGKDLNGRSIRVSYANDKPSAPRPGGGGGYRGGDYDGDFASRSGGW

SEQ ID NO: 60506 - protein, 111 aa, Glycine max
  peptide (1)..(111): Ceres Seq. ID no. 12398612
  misc_feature (6)..(77): Pfam Name: RNA recognition motif. (a.k.a. RRM, RBD, or RNP domain) Pfam Description: RNA recognition motif. (a.k.a. RRM, RBD, or RNP
  misc_feature (1)..(111): Homolog of NCBI NO: 322514 NR Description: glycine-rich RNA-binding protein (clone A81) -
  misc_feature (1)..(94): Homolog of NCBI NO: 7489099 NR Description: RNA-binding protein RGP-3 - wood tobacco
  misc_feature (1)..(110): Homolog of NCBI NO: 15822705 NR Description: RNA-binding protein precursor [Solanum tuberosum]
  misc_feature (1)..(104): Homolog of NCBI NO: 7439995 NR Description: RNA binding protein 3 - wood tobacco
  misc_feature (1)..(102): Homolog of NCBI NO: 21553972 NR Description: glycine-rich RNA binding protein, putative
  misc_feature (1)..(102): Homolog of NCBI NO: 15229525 NR Description: glycine-rich RNA-binding protein
  misc_feature (1)..(111): Homolog of NCBI NO: 30682622 NR Description: glycine-rich RNA-binding protein (AtGRP2)
  misc_feature (1)..(111): Homolog of NCBI NO: 15236359 NR Description: glycine-rich RNA-binding protein AtGRP2
  misc_feature (1)..(110): Homolog of NCBI NO: 2826811 NR Description: AtGRP2 [Arabidopsis thaliana]
  misc_feature (1)..(110): Homolog of NCBI NO: 7439994 NR Description: glycine-rich RNA-binding protein - garden pea
MSSSKLFIGGLSYGVDDQSLKDAFSGFGDVVDAKVITDRDSGRSRGFGFVNFSNDESASSALSAMDGKDLNGRSIRVSYANDKPSAPRPGGGGGYRGGDYDGDFASRSGGW

SEQ ID NO: 60507 - DNA, 594 bp, Glycine max
  misc_feature (1)..(594): Ceres Seq. ID no. 3265003
  misc_feature: Phenotype: ROSETTE LEAVES Petiole Length-Short Petioles
  misc_feature: Phenotype: ROSETTE LEAVES Shape-Oval
  misc_feature: Phenotype: ROSETTE LEAVES Petiole Length-Short Petioles
  misc_feature: Phenotype: ROSETTE LEAVES Shape-Oval
  misc_feature: Phenotype: ROSETTE LEAVES Petiole Length-Short Petioles
  misc_feature: Phenotype: ROSETTE LEAVES Petiole Length-Short Petioles
  misc_feature: Phenotype: ROSETTE LEAVES Shape-Oval
  misc_feature: Phenotype: WHOLE PLANT Size-Small
  misc_feature: Phenotype: ROSETTE LEAVES Petiole Length-Short Petioles
  misc_feature: Phenotype: ROSETTE LEAVES Shape-Oval
  misc_feature: Phenotype: ROSETTE LEAVES Petiole Length-Short Petioles
  misc_feature: Phenotype: ROSETTE LEAVES Shape-Oval
  misc_feature: Phenotype: ROSETTE LEAVES Petiole Length-Short Petioles
  misc_feature: Phenotype: ROSETTE LEAVES Shape-Serrate
  misc_feature: Phenotype: WHOLE PLANT Size-Small
  misc_feature: Phenotype: WHOLE PLANT Other
  misc_feature: Phenotype: INFLORESCENCE Flowering Time-Late Flowering
  misc_feature: Phenotype: ROSETTE LEAVES Petiole Length-Short Petioles
  misc_feature: Phenotype: ROSETTE LEAVES Shape-Oval
tcacaaataaataaaaaaaattgttttcgtgtggaaacaaaaaaacaattcaaaaacaaacatatgatggtgaagccgagtagcgaaaagccagaggagcatagggattccaagtactacaaaggggtccgaaagagaaaatggggcaaatgggtatccgaaataagactacccaacagccgtcagaggatttggttgggatccttcgacacccccgagaaggccgcgcgtgccttcgacgccgcaatgttctgcttacgtggccgcaacgccaagttcaatttccccgacaacccacccgacatcgccggcggggaatccatgacgccgtcacagattcaggtcgccgccgcacaattcgccaacgctgggccccacgagggacattcgggtcgacccgaacattctcccatgcaatctctatcgccttctgtttcagaagggaccgttctaacggacagtgacgtcaccacacttaacggttcgctaacggatttgttcactcccgttgggtcgagtggttacgcatccgattacgggattttccccggtgttgatgatttcagtggcggtttttatgtgccggaaatgctg

SEQ ID NO: 60508 - protein, 198 aa, Glycine max
  peptide (1)..(198): Ceres Seq. ID no. 3265004
  misc_feature (40)..(100): Pfam Name: AP2 domain Pfam Description: AP2 domain
  misc_feature (40)..(191): Homolog of NCBI NO: 38605844 NR Description: OSJNBb0034G17.2 [Oryza sativa (japonica
  misc_feature (42)..(153): Homolog of NCBI NO: 25407707 NR Description: hypothetical protein AT4g31060 [imported] -
  misc_feature (40)..(123): Homolog of NCBI NO: 25406719 NR Description: protein Similar to transcription factor TINY
  misc_feature (40)..(123): Homolog of NCBI NO: 21554403 NR Description: transcription factor TINY, putative [Arabidopsis
  misc_feature (40)..(123): Homolog of NCBI NO: 18378818 NR Description: transcription factor TINY, putative
  misc_feature (20)..(153): Homolog of NCBI NO: 18417729 NR Description: AP2-domain transcription factor, putative
  misc_feature (37)..(179): Homolog of NCBI NO: 22326940 NR Description: similar to AP2 domain transcription factor,
  misc_feature (23)..(189): Homolog of NCBI NO: 15222040 NR Description: AP2 domain containing protein, putative; protein
  misc_feature (40)..(189): Homolog of NCBI NO: 29893536 NR Description: putative AP2 domain transcription factor
  misc_feature (40)..(189): Homolog of NCBI NO: 22329667 NR Description: AP2 domain transcription factor, putative
SQINKKNCFRVETKKQFKNKHMMVKPSSEKPEEHRDSKYYKGVRKRKWGKWVSEIRLPNSRQRIWLGSFDTPEKAARAFDAAMFCLRGRNAKFNFPDNPPDIAGGESMTPSQIQVAAAQFANAGPHEGHSGRPEHSPMQSLSPSVSEGTVLTDSDVTTLNGSLTDLFTPVGSSGYASDYGIFPGVDDFSGGFYVPEML

SEQ ID NO: 60509 - protein, 177 aa, Glycine max
  peptide (1)..(177): Ceres Seq. ID no. 3265005
  misc_feature (19)..(79): Pfam Name: AP2 domain Pfam Description: AP2 domain
  misc_feature (19)..(170): Homolog of NCBI NO: 38605844 NR Description: OSJNBb0034G17.2 [Oryza sativa (japonica
  misc_feature (21)..(132): Homolog of NCBI NO: 25407707 NR Description: hypothetical protein AT4g31060 [imported] -
  misc_feature (19)..(102): Homolog of NCBI NO: 21554403 NR Description: transcription factor TINY, putative [Arabidopsis
  misc_feature (19)..(102): Homolog of NCBI NO: 25406719 NR Description: protein Similar to transcription factor TINY
  misc_feature (19)..(102): Homolog of NCBI NO: 18378818 NR Description: transcription factor TINY, putative
  misc_feature (1)..(132): Homolog of NCBI NO: 18417729 NR Description: AP2-domain transcription factor, putative
  misc_feature (16)..(158): Homolog of NCBI NO: 22326940 NR Description: similar to AP2 domain transcription factor,
  misc_feature (2)..(168): Homolog of NCBI NO: 15222040 NR Description: AP2 domain containing protein, putative; protein
  misc_feature (19)..(168): Homolog of NCBI NO: 29893536 NR Description: putative AP2 domain transcription factor
  misc_feature (19)..(168): Homolog of NCBI NO: 22329667 NR Description: AP2 domain transcription factor, putative
MMVKPSSEKPEEHRDSKYYKGVRKRKWGKWVSEIRLPNSRQRIWLGSFDTPEKAARAFDAAMFCLRGRNAKFNFPDNPPDIAGGESMTPSQIQVAAAQFANAGPHEGHSGRPEHSPMQSLSPSVSEGTVLTDSDVTTLNGSLTDLFTPVGSSGYASDYGIFPGVDDFSGGFYVPEML

SEQ ID NO: 60510 - protein, 176 aa, Glycine max
  peptide (1)..(176): Ceres Seq. ID no. 3265006
  misc_feature (18)..(78): Pfam Name: AP2 domain Pfam Description: AP2 domain
  misc_feature (18)..(169): Homolog of NCBI NO: 38605844 NR Description: OSJNBb0034G17.2 [Oryza sativa (japonica
  misc_feature (20)..(131): Homolog of NCBI NO: 25407707 NR Description: hypothetical protein AT4g31060 [imported] -
  misc_feature (18)..(101): Homolog of NCBI NO: 25406719 NR Description: protein Similar to transcription factor TINY
  misc_feature (18)..(101): Homolog of NCBI NO: 21554403 NR Description: transcription factor TINY, putative [Arabidopsis
  misc_feature (18)..(101): Homolog of NCBI NO: 18378818 NR Description: transcription factor TINY, putative
  misc_feature (1)..(131): Homolog of NCBI NO: 18417729 NR Description: AP2-domain transcription factor, putative
  misc_feature (15)..(157): Homolog of NCBI NO: 22326940 NR Description: similar to AP2 domain transcription factor,
  misc_feature (1)..(167): Homolog of NCBI NO: 15222040 NR Description: AP2 domain containing protein, putative; protein
  misc_feature (18)..(167): Homolog of NCBI NO: 29893536 NR Description: putative AP2 domain transcription factor
  misc_feature (18)..(167): Homolog of NCBI NO: 22329667 NR Description: AP2 domain transcription factor, putative
MVKPSSEKPEEHRDSKYYKGVRKRKWGKWVSEIRLPNSRQRIWLGSFDTPEKAARAFDAAMFCLRGRNAKFNFPDNPPDIAGGESMTPSQIQVAAAQFANAGPHEGHSGRPEHSPMQSLSPSVSEGTVLTDSDVTTLNGSLTDLFTPVGSSGYASDYGIFPGVDDFSGGFYVPEML

SEQ ID NO: 60511 - DNA, 1334 bp, Glycine max
  misc_feature (1)..(1334): Ceres Seq. ID no. 12430842
  misc_feature: Phenotype: WHOLE PLANT Size-Small
  misc_feature: Phenotype: INFLORESCENCE Height-Short
  misc_feature: Phenotype: WHOLE PLANT Size-Small
  misc_feature: Phenotype: INFLORESCENCE Height-Short
  misc_feature: Phenotype: WHOLE PLANT Size-Small
  misc_feature: Phenotype: INFLORESCENCE Height-Short
  misc_feature: Phenotype: WHOLE PLANT Size-Small
  misc_feature: Phenotype: INFLORESCENCE Height-Short
  misc_feature: Phenotype: WHOLE PLANT Size-Small
  misc_feature: Phenotype: INFLORESCENCE Height-Short
  misc_feature: Phenotype: WHOLE PLANT Size-Small
  misc_feature: Phenotype: INFLORESCENCE Height-Short
  misc_feature: Phenotype: WHOLE PLANT Size-Small
  misc_feature: Phenotype: INFLORESCENCE Height-Short
tcttctaaccagtatcacctacacggtgtgtgtgtcccttcatcctggaaattagagccacaaacataacacattccgctttgactttggaggcaggtttttgtgctttgtctggttcccaatcaccgtgatatcatggaatccccacaatctgttgtgtcaccattcaagaggtctgtcttgggtgatgcagagaagtataggtctgatgttctgtctaaggacattgaagtcaatggaaaggaaggtgccgtgtgtaatgtggaggaattcattggtgttgttgatgtttacattcatcaggccagggacattcataacatctgcatataccacaagcaagatgtttatgctaagatttgtttgactagtaatcctgagaatactgtctctaccaagaccatcaatggaggaggaaggaaccccgtgtttaatgagaatcttagtctaagcgttaggactgttgattctgtagtcaaatgtgaaatttggatgctgagcagggtgaagaattatcttgaagatcagttgcttggttttgctttggtgcctttgtctgaagtactggtgaagaaggatggcaaactagagaaagagttctctctttcttcaactgatctattccattctccagccggttatgttcaattgtctcttgcttacactggtgcttcgcctgatgttatggcaatttcttcaatgcctaccaccgagaaggactccgaatcatgcgagtcactggtcagagatttggacaaaatcgaattcccggatccaaaaattgtaaatgaagaccacttgatggtttcggaatacttcggcattccatgtgaggagagccagtgttctgatagcttgaccactactgatactgaaaatcttagttctgaagcaggtgttcagcttgtggagagcttctcagcatgcagtgttagcagtgtgtcaacaaatggggtttcatctccttcagtggctgcaagctcagactcgtctcccaatgaggaaaccaaagagaaaaatgtggatgtcaaagatggtgagactgattcctcgttccctaaacctcttgtgactgttaacatcgagccggagccgaatgtggtgcagcaggattttgtagacatgtacatgaaaagcatgcagcaattcaccgagtcattggcaaaaatgaagcttcctgtggactttgaaagtggaccaactagttcaggaaactctagctctgaacacaagctacagacaccaaagagcactaactcccgtgtgttttatggcagcagggctttcttctgaactttttgatcaagggaatactttcaggtgacttagatttt

SEQ ID NO: 60512 - protein, 385 aa, Glycine max
  peptide (1)..(385): Ceres Seq. ID no. 12430843
  misc_feature (50)..(137): Pfam Name: C2 domain Pfam Description: C2 domain
  misc_feature (34)..(287): Homolog of NCBI NO: 34901084 NR Description: contains ESTs
  misc_feature (41)..(385): Homolog of NCBI NO: 18416832 NR Description: putative protein; protein id: At5g12300.1
  misc_feature (265)..(385): Homolog of NCBI NO: 24414275 NR Description: Unknown protein [Oryza sativa (japonica
  misc_feature (32)..(289): Homolog of NCBI NO: 24414275 NR Description: Unknown protein [Oryza sativa (japonica
  misc_feature (1)..(385): Homolog of NCBI NO: 21593485 NR Description: unknown [Arabidopsis thaliana]
  misc_feature (1)..(385): Homolog of NCBI NO: 18403117 NR Description: Expressed protein
  misc_feature (1)..(385): Homolog of NCBI NO: 25405379 NR Description: unknown protein [imported] - Arabidopsis thaliana
  misc_feature (1)..(385): Homolog of NCBI NO: 28393796 NR Description: unknown protein [Arabidopsis thaliana]
  misc_feature (1)..(385): Homolog of NCBI NO: 30696612 NR Description: C2 domain-containing protein [Arabidopsis
  misc_feature (1)..(385): Homolog of NCBI NO: 9758185 NR Description: gene_id:MTE17.25~pir||T07080~similar to unknown
MESPQSVVSPFKRSVLGDAEKYRSDVLSKDIEVNGKEGAVCNVEEFIGVVDVYIHQARDIHNICIYHKQDVYAKICLTSNPENTVSTKTINGGGRNPVFNENLSLSVRTVDSVVKCEIWMLSRVKNYLEDQLLGFALVPLSEVLVKKDGKLEKEFSLSSTDLFHSPAGYVQLSLAYTGASPDVMAISSMPTTEKDSESCESLVRDLDKIEFPDPKIVNEDHLMVSEYFGIPCEESQCSDSLTTTDTENLSSEAGVQLVESFSACSVSSVSTNGVSSPSVAASSDSSPNEETKEKNVDVKDGETDSSFPKPLVTVNIEPEPNVVQQDFVDMYMKSMQQFTESLAKMKLPVDFESGPTSSGNSSSEHKLQTPKSTNSRVFYGSRAFF

SEQ ID NO: 60513 - protein, 266 aa, Glycine max
  peptide (1)..(266): Ceres Seq. ID no. 12430844
  misc_feature (1)..(168): Homolog of NCBI NO: 34901084 NR Description: contains ESTs
  misc_feature (1)..(266): Homolog of NCBI NO: 18416832 NR Description: putative protein; protein id: At5g12300.1
  misc_feature (146)..(266): Homolog of NCBI NO: 24414275 NR Description: Unknown protein [Oryza sativa (japonica
  misc_feature (1)..(170): Homolog of NCBI NO: 24414275 NR Description: Unknown protein [Oryza sativa (japonica
  misc_feature (1)..(266): Homolog of NCBI NO: 21593485 NR Description: unknown [Arabidopsis thaliana]
  misc_feature (1)..(266): Homolog of NCBI NO: 18403117 NR Description: Expressed protein
  misc_feature (1)..(266): Homolog of NCBI NO: 25405379 NR Description: unknown protein [imported] - Arabidopsis thaliana
  misc_feature (1)..(266): Homolog of NCBI NO: 28393796 NR Description: unknown protein [Arabidopsis thaliana]
  misc_feature (1)..(266): Homolog of NCBI NO: 30696612 NR Description: C2 domain-containing protein [Arabidopsis
  misc_feature (1)..(266): Homolog of NCBI NO: 9758185 NR Description: gene_id:MTE17.25~pir||T07080~similar to unknown
MLSRVKNYLEDQLLGFALVPLSEVLVKKDGKLEKEFSLSSTDLFHSPAGYVQLSLAYTGASPDVMAISSMPTTEKDSESCESLVRDLDKIEFPDPKIVNEDHLMVSEYFGIPCEESQCSDSLTTTDTENLSSEAGVQLVESFSACSVSSVSTNGVSSPSVAASSDSSPNEETKEKNVDVKDGETDSSFPKPLVTVNIEPEPNVVQQDFVDMYMKSMQQFTESLAKMKLPVDFESGPTSSGNSSSEHKLQTPKSTNSRVFYGSRAFF

SEQ ID NO: 60514 - protein, 202 aa, Glycine max
  peptide (1)..(202): Ceres Seq. ID no. 12430845
  misc_feature (1)..(104): Homolog of NCBI NO: 34901084 NR Description: contains ESTs
  misc_feature (1)..(202): Homolog of NCBI NO: 18416832 NR Description: putative protein; protein id: At5g12300.1
  misc_feature (82)..(202): Homolog of NCBI NO: 24414275 NR Description: Unknown protein [Oryza sativa (japonica
  misc_feature (1)..(106): Homolog of NCBI NO: 24414275 NR Description: Unknown protein [Oryza sativa (japonica
  misc_feature (1)..(202): Homolog of NCBI NO: 21593485 NR Description: unknown [Arabidopsis thaliana]
  misc_feature (1)..(202): Homolog of NCBI NO: 18403117 NR Description: Expressed protein
  misc_feature (1)..(202): Homolog of NCBI NO: 25405379 NR Description: unknown protein [imported] - Arabidopsis thaliana
  misc_feature (1)..(202): Homolog of NCBI NO: 28393796 NR Description: unknown protein [Arabidopsis thaliana]
  misc_feature (1)..(202): Homolog of NCBI NO: 30696612 NR Description: C2 domain-containing protein [Arabidopsis
  misc_feature (1)..(202): Homolog of NCBI NO: 9758185 NR Description: gene_id:MTE17.25~pir||T07080~similar to unknown
MAISSMPTTEKDSESCESLVRDLDKIEFPDPKIVNEDHLMVSEYFGIPCEESQCSDSLTTTDTENLSSEAGVQLVESFSACSVSSVSTNGVSSPSVAASSDSSPNEETKEKNVDVKDGETDSSFPKPLVTVNIEPEPNVVQQDFVDMYMKSMQQFTESLAKMKLPVDFESGPTSSGNSSSEHKLQTPKSTNSRVFYGSRAFF

SEQ ID NO: 60515 - DNA, 837 bp, Glycine max
  misc_feature (1)..(837): Ceres Seq. ID no. 12451835
  misc_feature: Phenotype: FERTILITY Fertility-Reduced
  misc_feature: Phenotype: FERTILITY Fertility-Reduced
  misc_feature: Phenotype: FERTILITY Fertility-Reduced
  misc_feature: Phenotype: FERTILITY Fertility-Reduced
  misc_feature: Phenotype: FERTILITY Fertility-Reduced
  misc_feature: Phenotype: FERTILITY Fertility-Reduced
  misc_feature: Phenotype: FERTILITY Fertility-Reduced
  misc_feature: Phenotype: FERTILITY Fertility-Reduced
gaaagaaaagaactaagaagctgaaaaacaagagagagaaaaagaatagcacactcaaccatagttatctagaaccaaatcatgtctcacatagccgtcgagaggaacaggagaagacagatgaatgaacatctcaaagttttaagatctttgaccccatgtttctatatcaaaaggggagatcaagcatctataatagggggtgttatagaattcatcaaggagctacaccaagttcttcaagctttggagtcccagaaaagaagaaagagtttgagccctagccctggcccgagcccacgaacacttcagccaatgtttcatcaacttgatagcccctccatgattgggaccaattctttcaaggaactaggagcaagctgcaactctcctgttgcggatgttgaagtgaaaatctcgggttcatatgtgatcttgaaagtcatttgccacagaattccaggtcaagttgcaaagatcataactgttttggagagtctttcgtttgaagttcttcatctgaatatcagcagcatggaggagactgtcctttaccaatttgttgtcaagatagagctgggatgccaactaagtctggaggaactagcaatggaagtgcaacaaagcttctgcttagatgctataattgcgctgtgaagatgtagtatttctaaagagacccaatttcgaatcgtttgttaataaaagaatggcatgtgatagacatgcataaaaactatttcttcagtaattacttgctacaaactaggcttattatatcattactgttgtcataaacttgatgacaaggaaaatatgctgttgcttaatatttgg

SEQ ID NO: 60516 - protein, 191 aa, Glycine max
  peptide (1)..(191): Ceres Seq. ID no. 12451836
  misc_feature (1)..(49): Pfam Name: Helix-loop-helix DNA-binding domain Pfam Description: Helix-loop-helix DNA-binding domain
  misc_feature (1)..(80): Homolog of NCBI NO: 37533680 NR Description: putative helix-loop-helix DNA-binding protein
  misc_feature (105)..(163): Homolog of NCBI NO: 38346722 NR Description: OSJNBa0086O06.20 [Oryza sativa (japonica
  misc_feature (1)..(87): Homolog of NCBI NO: 38346722 NR Description: OSJNBa0086O06.20 [Oryza sativa (japonica
  misc_feature (1)..(182): Homolog of NCBI NO: 21593808 NR Description: unknown [Arabidopsis thaliana]
  misc_feature (1)..(182): Homolog of NCBI NO: 18395124 NR Description: expressed protein
  misc_feature (1)..(183): Homolog of NCBI NO: 15234187 NR Description: bHLH protein
  misc_feature (1)..(166): Homolog of NCBI NO: 11994233 NR Description: contains similarity to helix-loop-helix
  misc_feature (1)..(183): Homolog of NCBI NO: 30687365 NR Description: bHLH protein family [Arabidopsis thaliana]
  misc_feature (1)..(184): Homolog of NCBI NO: 15238680 NR Description: bHLH protein; protein id: At5g53210.1
  misc_feature (1)..(189): Homolog of NCBI NO: 15230639 NR Description: putative helix-loop-helix DNA-binding protein
MSHIAVERNRRRQMNEHLKVLRSLTPCFYIKRGDQASIIGGVIEFIKELHQVLQALESQKRRKSLSPSPGPSPRTLQPMFHQLDSPSMIGTNSFKELGASCNSPVADVEVKISGSYVILKVICHRIPGQVAKIITVLESLSFEVLHLNISSMEETVLYQFVVKIELGCQLSLEELAMEVQQSFCLDAIIAL

SEQ ID NO: 60517 - protein, 178 aa, Glycine max
  peptide (1)..(178): Ceres Seq. ID no. 12451837
  misc_feature (1)..(36): Pfam Name: Helix-loop-helix DNA-binding domain Pfam Description: Helix-loop-helix DNA-binding domain
  misc_feature (1)..(67): Homolog of NCBI NO: 37533680 NR Description: putative helix-loop-helix DNA-binding protein
  misc_feature (92)..(150): Homolog of NCBI NO: 38346722 NR Description: OSJNBa0086O06.20 [Oryza sativa (japonica
  misc_feature (1)..(74): Homolog of NCBI NO: 38346722 NR Description: OSJNBa0086O06.20 [Oryza sativa (japonica
  misc_feature (1)..(169): Homolog of NCBI NO: 21593808 NR Description: unknown [Arabidopsis thaliana]
  misc_feature (1)..(169): Homolog of NCBI NO: 18395124 NR Description: expressed protein
  misc_feature (1)..(170): Homolog of NCBI NO: 15234187 NR Description: bHLH protein
  misc_feature (1)..(153): Homolog of NCBI NO: 11994233 NR Description: contains similarity to helix-loop-helix
  misc_feature (1)..(170): Homolog of NCBI NO: 30687365 NR Description: bHLH protein family [Arabidopsis thaliana]
  misc_feature (1)..(171): Homolog of NCBI NO: 15238680 NR Description: bHLH protein; protein id: At5g53210.1
  misc_feature (1)..(176): Homolog of NCBI NO: 15230639 NR Description: putative helix-loop-helix DNA-binding protein
MNEHLKVLRSLTPCFYIKRGDQASIIGGVIEFIKELHQVLQALESQKRRKSLSPSPGPSPRTLQPMFHQLDSPSMIGTNSFKELGASCNSPVADVEVKISGSYVILKVICHRIPGQVAKIITVLESLSFEVLHLNISSMEETVLYQFVVKIELGCQLSLEELAMEVQQSFCLDAIIAL

SEQ ID NO: 60518 - protein, 113 aa, Glycine max
  peptide (1)..(113): Ceres Seq. ID no. 12451838
  misc_feature (1)..(105): Homolog of NCBI NO: 15226442 NR Description: unknown protein; protein id: At2g46810.1
  misc_feature (20)..(103): Homolog of NCBI NO: 37533680 NR Description: putative helix-loop-helix DNA-binding protein
  misc_feature (27)..(85): Homolog of NCBI NO: 38346722 NR Description: OSJNBa0086O06.20 [Oryza sativa (japonica
  misc_feature (1)..(104): Homolog of NCBI NO: 21593808 NR Description: unknown [Arabidopsis thaliana]
  misc_feature (1)..(104): Homolog of NCBI NO: 18395124 NR Description: expressed protein
  misc_feature (1)..(105): Homolog of NCBI NO: 15234187 NR Description: bHLH protein
  misc_feature (1)..(88): Homolog of NCBI NO: 11994233 NR Description: contains similarity to helix-loop-helix
  misc_feature (1)..(105): Homolog of NCBI NO: 30687365 NR Description: bHLH protein family [Arabidopsis thaliana]
  misc_feature (1)..(106): Homolog of NCBI NO: 15238680 NR Description: bHLH protein; protein id: At5g53210.1
  misc_feature (1)..(111): Homolog of NCBI NO: 15230639 NR Description: putative helix-loop-helix DNA-binding protein
MFHQLDSPSMIGTNSFKELGASCNSPVADVEVKISGSYVILKVICHRIPGQVAKIITVLESLSFEVLHLNISSMEETVLYQFVVKIELGCQLSLEELAMEVQQSFCLDAIIAL

SEQ ID NO: 60519 - DNA, 1133 bp, Glycine max
  misc_feature (1)..(1133): Ceres Seq. ID no. 12431307
  misc_feature: Phenotype: INFLORESCENCE Height-Short
  misc_feature: Phenotype: INFLORESCENCE Strength-Strong
  misc_feature: Phenotype: FERTILITY Fertility-Reduced
  misc_feature: Phenotype: INFLORESCENCE Height-Short
  misc_feature: Phenotype: INFLORESCENCE Strength-Strong
  misc_feature: Phenotype: FERTILITY Fertility-Reduced
  misc_feature: Phenotype: INFLORESCENCE Height-Short
  misc_feature: Phenotype: INFLORESCENCE Strength-Strong
  misc_feature: Phenotype: FERTILITY Fertility-Reduced
  misc_feature: Phenotype: INFLORESCENCE Height-Short
  misc_feature: Phenotype: INFLORESCENCE Strength-Strong
  misc_feature: Phenotype: FERTILITY Fertility-Reduced
aaagaaacaattaaaataataaacctaaaagccctaacatatctatccccaacagtaaaagaaagcagattcatactctctccctctctctttagtctttaccaccacctggcctgcttttaaaacttgttcttcctctctcacatgaagacactagtcatggacacaacctcatcaacccctcaagactcatcatcctccaagaggcacttccactggacgaacaaggttggaaatgaagacccccaactcgccacctcagaaacgatgtcaaaaatcatagaagaagaagacacaaacacaaaggaaaaagaacaagaagaagatgacaaggctgttccacttccaggccctgccacaaagagaaagattcaggcagtggcaatctcaaggctccgatctgttctgactgtgttcagcaaaaaccaccgttccaacctccccttcggcctcggctccagagtcgttggcaccctcttcggctaccgccgcggccacgtgcatttcgccttccagagggaccccacttcgcaacccgccttcctcatcgagctcgcgaccccaatcagcggacttgtccgcgaaatggcgtctgggctggtgagaattgctttggagtgtgacaaggacaaagactcagaggagaagaagacgacgaagaagaacaagaccctgaggctgcttcaggagtccgtgtggaggacctactgcaacggtaaaaagtgcggctttgccacgagaagagaatgtggagccaaagactgggacatactgaaggcagtggagccaatttctatgggtgcaggtgttttgcctaacagtgatgggtctgatggtgaagtcatgtacatgagggctaggtttgagagaattgttggttccagagactctgaagctttctacatgatgaatcctgacagcaatggagcacctgagctcagtatttacttgcttagagtctagtactgctgctgccactaccagcccccccccagtcatctgtttagttatttatactttaactttctttcccttttttagtttcttctttgtggatgatgttaaacactaggctattcctatactacttgtttagctccttaatcatgaacaatggtgacctagttttcttc

SEQ ID NO: 60520 - protein, 272 aa, Glycine max
  peptide (1)..(272): Ceres Seq. ID no. 12431308
  misc_feature (106)..(272): Pfam Name: Protein of unknown function, DUF617 Pfam Description: Protein of unknown function, DUF617
  misc_feature (95)..(272): Homolog of NCBI NO: 15227126 NR Description: hypothetical protein; protein id: At2g21990.1
  misc_feature (104)..(272): Homolog of NCBI NO: 15240220 NR Description: putative protein; protein id: At5g06990.1
  misc_feature (105)..(272): Homolog of NCBI NO: 21618123 NR Description: unknown [Arabidopsis thaliana]
  misc_feature (105)..(272): Homolog of NCBI NO: 15235158 NR Description: putative protein
  misc_feature (103)..(272): Homolog of NCBI NO: 18405770 NR Description: expressed protein
  misc_feature (103)..(272): Homolog of NCBI NO: 21593037 NR Description: unknown [Arabidopsis thaliana]
  misc_feature (18)..(231): Homolog of NCBI NO: 15237221 NR Description: putative protein; protein id: At5g23100.1
  misc_feature (12)..(262): Homolog of NCBI NO: 34911646 NR Description: P0039G05.26 [Oryza sativa (japonica
  misc_feature (1)..(272): Homolog of NCBI NO: 15230862 NR Description: hypothetical protein; protein id: At3g25640.1
  misc_feature (1)..(272): Homolog of NCBI NO: 11994755 NR Description: gb|AAB84348.1~gene_id:T5M7.9~similar to unknown
MKTLVMDTTSSTPQDSSSSKRHFHWTNKVGNEDPQLATSETMSKIIEEEDTNTKEKEQEEDDKAVPLPGPATKRKIQAVAISRLRSVLTVFSKNHRSNLPFGLGSRVVGTLFGYRRGHVHFAFQRDPTSQPAFLIELATPISGLVREMASGLVRIALECDKDKDSEEKKTTKKNKTLRLLQESVWRTYCNGKKCGFATRRECGAKDWDILKAVEPISMGAGVLPNSDGSDGEVMYMRARFERIVGSRDSEAFYMMNPDSNGAPELSIYLLRV

SEQ ID NO: 60521 - protein, 267 aa, Glycine max
  peptide (1)..(267): Ceres Seq. ID no. 12431309
  misc_feature (101)..(267): Pfam Name: Protein of unknown function, DUF617 Pfam Description: Protein of unknown function, DUF617
  misc_feature (90)..(267): Homolog of NCBI NO: 15227126 NR Description: hypothetical protein; protein id: At2g21990.1
  misc_feature (99)..(267): Homolog of NCBI NO: 15240220 NR Description: putative protein; protein id: At5g06990.1
  misc_feature (100)..(267): Homolog of NCBI NO: 21618123 NR Description: unknown [Arabidopsis thaliana]
  misc_feature (100)..(267): Homolog of NCBI NO: 15235158 NR Description: putative protein
  misc_feature (98)..(267): Homolog of NCBI NO: 18405770 NR Description: expressed protein
  misc_feature (98)..(267): Homolog of NCBI NO: 21593037 NR Description: unknown [Arabidopsis thaliana]
  misc_feature (13)..(226): Homolog of NCBI NO: 15237221 NR Description: putative protein; protein id: At5g23100.1
  misc_feature (7)..(257): Homolog of NCBI NO: 34911646 NR Description: P0039G05.26 [Oryza sativa (japonica
  misc_feature (1)..(267): Homolog of NCBI NO: 15230862 NR Description: hypothetical protein; protein id: At3g25640.1
  misc_feature (1)..(267): Homolog of NCBI NO: 11994755 NR Description: gb|AAB84348.1~gene_id:T5M7.9~similar to unknown
MDTTSSTPQDSSSSKRHFHWTNKVGNEDPQLATSETMSKIIEEEDTNTKEKEQEEDDKAVPLPGPATKRKIQAVAISRLRSVLTVFSKNHRSNLPFGLGSRVVGTLFGYRRGHVHFAFQRDPTSQPAFLIELATPISGLVREMASGLVRIALECDKDKDSEEKKTTKKNKTLRLLQESVWRTYCNGKKCGFATRRECGAKDWDILKAVEPISMGAGVLPNSDGSDGEVMYMRARFERIVGSRDSEAFYMMNPDSNGAPELSIYLLRV

SEQ ID NO: 60522 - protein, 231 aa, Glycine max
  peptide (1)..(231): Ceres Seq. ID no. 12431310
  misc_feature (65)..(231): Pfam Name: Protein of unknown function, DUF617 Pfam Description: Protein of unknown function, DUF617
  misc_feature (54)..(231): Homolog of NCBI NO: 15227126 NR Description: hypothetical protein; protein id: At2g21990.1
  misc_feature (63)..(231): Homolog of NCBI NO: 15240220 NR Description: putative protein; protein id: At5g06990.1
  misc_feature (64)..(231): Homolog of NCBI NO: 21618123 NR Description: unknown [Arabidopsis thaliana]
  misc_feature (64)..(231): Homolog of NCBI NO: 15235158 NR Description: putative protein
  misc_feature (62)..(231): Homolog of NCBI NO: 18405770 NR Description: expressed protein
  misc_feature (62)..(231): Homolog of NCBI NO: 21593037 NR Description: unknown [Arabidopsis thaliana]
  misc_feature (1)..(190): Homolog of NCBI NO: 15237221 NR Description: putative protein; protein id: At5g23100.1
  misc_feature (1)..(221): Homolog of NCBI NO: 34911646 NR Description: P0039G05.26 [Oryza sativa (japonica
  misc_feature (1)..(231): Homolog of NCBI NO: 15230862 NR Description: hypothetical protein; protein id: At3g25640.1
  misc_feature (1)..(231): Homolog of NCBI NO: 11994755 NR Description: gb|AAB84348.1~gene_id:T5M7.9~similar to unknown
MSKIIEEEDTNTKEKEQEEDDKAVPLPGPATKRKIQAVAISRLRSVLTVFSKNHRSNLPFGLGSRVVGTLFGYRRGHVHFAFQRDPTSQPAFLIELATPISGLVREMASGLVRIALECDKDKDSEEKKTTKKNKTLRLLQESVWRTYCNGKKCGFATRRECGAKDWDILKAVEPISMGAGVLPNSDGSDGEVMYMRARFERIVGSRDSEAFYMMNPDSNGAPELSIYLLRV

SEQ ID NO: 60523 - DNA, 919 bp, Glycine max
  misc_feature (1)..(919): Ceres Seq. ID no. 12438838
  misc_feature: Phenotype: INFLORESCENCE Branching-Reduced Apical Dominance
  misc_feature: Phenotype: INFLORESCENCE Flowering Time-Late Flowering
  misc_feature: Phenotype: INFLORESCENCE Branching-Reduced Apical Dominance
  misc_feature: Phenotype: INFLORESCENCE Flowering Time-Late Flowering
  misc_feature: Phenotype: INFLORESCENCE Branching-Reduced Apical Dominance
  misc_feature: Phenotype: INFLORESCENCE Flowering Time-Late Flowering
  misc_feature: Phenotype: INFLORESCENCE Branching-Reduced Apical Dominance
  misc_feature: Phenotype: INFLORESCENCE Flowering Time-Late Flowering
  misc_feature: Phenotype: SILIQUES Length-Short
  misc_feature: Phenotype: FERTILITY Fertility-Reduced
  misc_feature: Phenotype: SILIQUES Length-Short
  misc_feature: Phenotype: FERTILITY Fertility-Reduced
  misc_feature: Phenotype: SILIQUES Length-Short
  misc_feature: Phenotype: FERTILITY Fertility-Reduced
  misc_feature: Phenotype: SILIQUES Length-Short
  misc_feature: Phenotype: FERTILITY Fertility-Reduced
aaacataagagaaggtttcgtggcagtggcgagtgaagaagctatgcctgatgagtgagtcatttttttctctctggtgggtcccatcctcttctgctctgagaacctttataagtgttatatgagtcattgagaagtgaccccaggaaaaagaaaagaaaagaaaaacttcacttcacttgcatgccaaatgagaacaacctcttcttagaataatttcctcggtgtttaagccttgtcgatttccgaacaccaatccgagttaattaaacaatgagagtttcgacagaaaagttagagacagagccggagagcaaaaagataaaacgcattcgtggcggcggcggcggggactcgagcaataagcaccctttgtaccgcggcgtgcggatgcggaactgggggaaatgggtgtcggaaatccgcgagccgcggaagaagtcgcggatatggctaggcacattcccgacgccggaaatggcggcgagggcgcacgacgtggcggctctcagcatcaaaggctccgccgccattctcaacttccctcactttgccaactcgctccctcgcccggcttctctcgcgccgcgcgacgttcaagccgcggcggccaaagcggcgcacatggacccttcttccctctcctcccttgtctccgcaatggacttgtcctctgcctctgacgagttgagccaaatcatagagcttccttctttggaaagcaccgatgatggctccgtcgtcttagagaaagagtttgtttttgttgactcccttgatgcttggatgtatcagccaccctttggttttgacaccgaacaagacactggtttcgagggtttgatgtggaattactagtttcgatccatgtttctgttctattctatgtcttatgttgtataaattaatattgatcgtc

SEQ ID NO: 60524 - protein, 194 aa, Glycine max
  peptide (1)..(194): Ceres Seq. ID no. 12438839
  misc_feature (32)..(96): Pfam Name: AP2 domain Pfam Description: AP2 domain
  misc_feature (28)..(133): Homolog of NCBI NO: 37536842 NR Description: putative DNA binding protein
  misc_feature (4)..(140): Homolog of NCBI NO: 14140163 NR Description: putative AP2 domain containing protein [Oryza
  misc_feature (33)..(128): Homolog of NCBI NO: 15223860 NR Description: transcription factor TINY, putative; protein id:
  misc_feature (12)..(153): Homolog of NCBI NO: 25992102 NR Description: dehydration responsive element binding protein
  misc_feature (16)..(128): Homolog of NCBI NO: 34903650 NR Description: B1015E06.8 [Oryza sativa (japonica
  misc_feature (29)..(187): Homolog of NCBI NO: 15233928 NR Description: transcription factor TINY, putative
  misc_feature (14)..(194): Homolog of NCBI NO: 9279711 NR Description: transcription factor TINY-like protein
  misc_feature (14)..(194): Homolog of NCBI NO: 15228171 NR Description: transcription factor TINY, putative; protein id:
  misc_feature (5)..(157): Homolog of NCBI NO: 15239113 NR Description: transcription factor TINY, putative; protein id:
  misc_feature (11)..(175): Homolog of NCBI NO: 15239501 NR Description: transcription factor TINY; protein id:
MRVSTEKLETEPESKKIKRIRGGGGGDSSNKHPLYRGVRMRNWGKWVSEIREPRKKSRIWLGTFPTPEMAARAHDVAALSIKGSAAILNFPHFANSLPRPASLAPRDVQAAAAKAAHMDPSSLSSLVSAMDLSSASDELSQIIELPSLESTDDGSVVLEKEFVFVDSLDAWMYQPPFGFDTEQDTGFEGLMWNY

SEQ ID NO: 60525 - protein, 155 aa, Glycine max
  peptide (1)..(155): Ceres Seq. ID no. 12438840
  misc_feature (1)..(57): Pfam Name: AP2 domain Pfam Description: AP2 domain
  misc_feature (1)..(94): Homolog of NCBI NO: 37536842 NR Description: putative DNA binding protein
  misc_feature (1)..(101): Homolog of NCBI NO: 14140163 NR Description: putative AP2 domain containing protein [Oryza
  misc_feature (1)..(89): Homolog of NCBI NO: 15223860 NR Description: transcription factor TINY, putative; protein id:
  misc_feature (1)..(114): Homolog of NCBI NO: 25992102 NR Description: dehydration responsive element binding protein
  misc_feature (1)..(89): Homolog of NCBI NO: 34903650 NR Description: B1015E06.8 [Oryza sativa (japonica
  misc_feature (1)..(148): Homolog of NCBI NO: 15233928 NR Description: transcription factor TINY, putative
  misc_feature (1)..(155): Homolog of NCBI NO: 9279711 NR Description: transcription factor TINY-like protein
  misc_feature (1)..(155): Homolog of NCBI NO: 15228171 NR Description: transcription factor TINY, putative; protein id:
  misc_feature (1)..(118): Homolog of NCBI NO: 15239113 NR Description: transcription factor TINY, putative; protein id:
  misc_feature (1)..(136): Homolog of NCBI NO: 15239501 NR Description: transcription factor TINY; protein id:
MRNWGKWVSEIREPRKKSRIWLGTFPTPEMAARAHDVAALSIKGSAAILNFPHFANSLPRPASLAPRDVQAAAAKAAHMDPSSLSSLVSAMDLSSASDELSQIIELPSLESTDDGSVVLEKEFVFVDSLDAWMYQPPFGFDTEQDTGFEGLMWNY

SEQ ID NO: 60526 - protein, 126 aa, Glycine max
  peptide (1)..(126): Ceres Seq. ID no. 12438841
  misc_feature (1)..(65): Homolog of NCBI NO: 37536842 NR Description: putative DNA binding protein
  misc_feature (1)..(72): Homolog of NCBI NO: 14140163 NR Description: putative AP2 domain containing protein [Oryza
  misc_feature (1)..(60): Homolog of NCBI NO: 15223860 NR Description: transcription factor TINY, putative; protein id:
  misc_feature (1)..(85): Homolog of NCBI NO: 25992102 NR Description: dehydration responsive element binding protein
  misc_feature (1)..(60): Homolog of NCBI NO: 34903650 NR Description: B1015E06.8 [Oryza sativa (japonica
  misc_feature (1)..(119): Homolog of NCBI NO: 15233928 NR Description: transcription factor TINY, putative
  misc_feature (1)..(126): Homolog of NCBI NO: 9279711 NR Description: transcription factor TINY-like protein
  misc_feature (1)..(126): Homolog of NCBI NO: 15228171 NR Description: transcription factor TINY, putative; protein id:
  misc_feature (1)..(89): Homolog of NCBI NO: 15239113 NR Description: transcription factor TINY, putative; protein id:
  misc_feature (1)..(107): Homolog of NCBI NO: 15239501 NR Description: transcription factor TINY; protein id:
MAARAHDVAALSIKGSAAILNFPHFANSLPRPASLAPRDVQAAAAKAAHMDPSSLSSLVSAMDLSSASDELSQIIELPSLESTDDGSVVLEKEFVFVDSLDAWMYQPPFGFDTEQDTGFEGLMWNY

SEQ ID NO: 60527 - DNA, 1121 bp, Glycine max
  misc_feature (1)..(1121): Ceres Seq. ID no. 12442501
  misc_feature: Phenotype: ROSETTE LEAVES Curled-Curled 4
  misc_feature: Phenotype: WHOLE PLANT Size-Small
  misc_feature: Phenotype: WHOLE PLANT Size-Small
  misc_feature: Phenotype: ROSETTE LEAVES Curled-Curled 5
  misc_feature: Phenotype: WHOLE PLANT Size-Small
  misc_feature: Phenotype: WHOLE PLANT Size-Small
cttaacatttccctaaacataactcacacacccctcttctctagggtttcaatttcaccatgtttccctttctcaaattagggttccggcgagcatggccgacggtccggcgagtccaggcggcggtagccacgagagcggcgagcacagccctcgctctaacgtgcgcgagcaggacaggtacctccccatcgctaacataagccgcatcatgaagaaggcactacctgcgaacggtaaaatcgccaaggacgccaaagagaccgttcaggaatgcgtatccgagttcatcagtttcatcaccagcgaggcctctgataagtgtcagagggaaaagagaaagactattaacggtgatgatttgctctgggccatggccactcttggttttgaggattatatcgatcctcttaaaatttacctcactagatacagagagatggagggtgatacgaagggttcagccaagggcggagactcatcttctaagaaagatgttcagccaagtcctaatgctcagcttgctcatcaaggttctttctcacaaggtgttagttacacaatttctcagggtcaacatatgatggttccaatgcaaggcccggagtaggtatcaagtttattaaccctcctgttgtaacgtatgttttccacgccagttaccaagtgctcacggcatattgaatgtctttttatgttatgtgaatactgacataggagatggttcttgtgtcctttttttttaaaaaaaaaagtaaggtttgtatattatctttggagtcgaattattatttgaaagttattatattgtaaatcctanagccctgttgtctgaatccatcaggcggcttggcaaagaccgagattttaggactgattgtaagcataaacccgaatattcttttcctaatttctttgtgcaataatgtatgaaaaaggctcgagcttcttttcaaaaaaaaaaaaaaaaaaaaaaaaaaaaaaaaaaaaaaaaaaaaaaaaaaaaaaaaaaaaaaaaaaaaaaaaaaaaaaaaaaaaaaaaaaaaaaaaaaaaaaaaaaaaaaaaaaaaaaaaaaaaaaaaaaaaaaaaaaaaaaaaaanttttttttnccccccccccc

SEQ ID NO: 60528 - protein, 171 aa, Glycine max
  peptide (1)..(171): Ceres Seq. ID no. 12442502
  misc_feature (1)..(132): Homolog of NCBI NO: 25299604 NR Description: hypothetical protein At2g38880 [imported] -
  misc_feature (3)..(166): Homolog of NCBI NO: 30409459 NR Description: NF-YB [Oryza sativa (japonica cultivar-group)]
  misc_feature (11)..(168): Homolog of NCBI NO: 34908028 NR Description: putative CAAT-box DNA binding protein
  misc_feature (1)..(132): Homolog of NCBI NO: 18404885 NR Description: putative CCAAT-binding transcription factor
  misc_feature (8)..(155): Homolog of NCBI NO: 30409461 NR Description: NF-YB [Oryza sativa (japonica cultivar-group)]
  misc_feature (1)..(155): Homolog of NCBI NO: 115840 NR Description: CCAAT-BINDING TRANSCRIPTION FACTOR SUBUNIT A (NF-Y PROTEIN CHAIN B) (NF-YB) (CAAT-BOX DNA BINDING PROTEIN
  misc_feature (1)..(155): Homolog of NCBI NO: 22380 NR Description: CAAT-box DNA binding protein subunit B (NF-YB)
  misc_feature (1)..(149): Homolog of NCBI NO: 25408527 NR Description: probable CCAAT-box binding trancription factor
  misc_feature (9)..(159): Homolog of NCBI NO: 15231796 NR Description: transcription factor NF-Y, CCAAT-binding - like
  misc_feature (1)..(171): Homolog of NCBI NO: 17979253 NR Description: At2g37060/T2N18.18 [Arabidopsis thaliana]
MADGPASPGGGSHESGEHSPRSNVREQDRYLPIANISRIMKKALPANGKIAKDAKETVQECVSEFISFITSEASDKCQREKRKTINGDDLLWAMATLGFEDYIDPLKIYLTRYREMEGDTKGSAKGGDSSSKKDVQPSPNAQLAHQGSFSQGVSYTISQGQHMMVPMQGPE

SEQ ID NO: 60529 - protein, 132 aa, Glycine max
  peptide (1)..(132): Ceres Seq. ID no. 12442503
  misc_feature (1)..(93): Homolog of NCBI NO: 25299604 NR Description: hypothetical protein At2g38880 [imported] -
  misc_feature (1)..(127): Homolog of NCBI NO: 30409459 NR Description: NF-YB [Oryza sativa (japonica cultivar-group)]
  misc_feature (1)..(129): Homolog of NCBI NO: 34908028 NR Description: putative CAAT-box DNA binding protein
  misc_feature (1)..(93): Homolog of NCBI NO: 18404885 NR Description: putative CCAAT-binding transcription factor
  misc_feature (1)..(116): Homolog of NCBI NO: 30409461 NR Description: NF-YB [Oryza sativa (japonica cultivar-group)]
  misc_feature (1)..(116): Homolog of NCBI NO: 115840 NR Description: CCAAT-BINDING TRANSCRIPTION FACTOR SUBUNIT A (NF-Y PROTEIN CHAIN B) (NF-YB) (CAAT-BOX DNA BINDING PROTEIN
  misc_feature (1)..(116): Homolog of NCBI NO: 22380 NR Description: CAAT-box DNA binding protein subunit B (NF-YB)
  misc_feature (1)..(110): Homolog of NCBI NO: 25408527 NR Description: probable CCAAT-box binding trancription factor
  misc_feature (1)..(120): Homolog of NCBI NO: 15231796 NR Description: transcription factor NF-Y, CCAAT-binding - like
  misc_feature (1)..(132): Homolog of NCBI NO: 17979253 NR Description: At2g37060/T2N18.18 [Arabidopsis thaliana]
MKKALPANGKIAKDAKETVQECVSEFISFITSEASDKCQREKRKTINGDDLLWAMATLGFEDYIDPLKIYLTRYREMEGDTKGSAKGGDSSSKKDVQPSPNAQLAHQGSFSQGVSYTISQGQHMMVPMQGPE

SEQ ID NO: 60530 - DNA, 1524 bp, Glycine max
  misc_feature (1)..(1524): Ceres Seq. ID no. 12453502
  misc_feature: Phenotype: WHOLE PLANT Size-Small
  misc_feature: Phenotype: WHOLE PLANT Size-Small
  misc_feature: Phenotype: WHOLE PLANT Size-Small
  misc_feature: Phenotype: WHOLE PLANT Size-Small
  misc_feature: Phenotype: WHOLE PLANT Size-Small
atggagactggtggtggacgcgattctggcatgagttctgagactatcaattcctccactcaaagaacttcaatgagcaacgagagcgtttgcagcaccagcttcagccgtctctccttcgatctccctcctccttcttcttcccctgagaccctcttcgtcaaaccccaccgctcctccgacttcgcctactccgccatcctccgccgcaagtccgccctcaccttccgcgacttccacctcctccgccgcatcggcgccggcgacatcggcaccgtctacctctgccgtctccgccacgacgccggcgacgaggacgacgacgaggacccctgtttctacgcgatgaaggtggtggacaaggaggcggtggcgctgaagaagaaggcgcagagagcggagatggagaggaagattctgaagatggtggaccatccgttcctccctacgctctacgcggagttcgaggcttcgaatttctcatgcattgtgatggagtattgctccggtggggacttgcactcccttcaacacaaccaccccaataaccgattctctctctcctctgccaggttttacgcggctgaagtactggttgcgttggagtatctccacatgctgggaatcatctacagggatctgaagcccgaaaacgtgttggtcagatcagacggtcacatcatgctttccgacttcgatctctctctatgctccgatgctatcccagccgttgaatcccctgactgttcactggaccccgcattcgcacccgcgttacgctacactcgccagtactccacccccttctcctgcctctcgaaccgcgtattccggtccaggaaggtccagaccctccaacccaaccgcctcttcgtggccgaaccggtcggggcccgctcgtgctccttcgttgggacccacgagtacgtgtcgccggaagtggcctccgggaactcacacggcaatgccgtcgactggtggtccttcgggatattcatctacgagatggtgtacggtcgaacacccttcgcgggatcatcgaacgaggctacgctgcgaagcatcatcaaaaagcccctcgcatttcccacctccacgccctccagtacgcttgaaatgcacgcgcgggacctcatatcagggttgctcaacaaggacccgaaccgcaggctcgggtccaaacgaggctctgcggacgtcaaaaaacaccccttcttcgcggggctcaatctcgcgctcatccggacggtcacgccgccggaggttccatcactcagaaggcataaaacgacgccgttttactaccccgccaacgtaaataacagtagacagcagctaacggcgtttgattacttttgattaaaatccgacgatggtcgccccctgcgccacgccacgtgttcagtcggtgccccccagttttataattggcggatgggtgacttatgtgtatattttttagttgtcctttcttttttgtaacccttttttttaatataaaataacatagtttgatacttacgt

SEQ ID NO: 60531 - protein, 452 aa, Glycine max
  peptide (1)..(452): Ceres Seq. ID no. 12453503
  misc_feature (79)..(406): Pfam Name: Protein kinase domain Pfam Description: Protein kinase domain
  misc_feature (220)..(423): Homolog of NCBI NO: 7446383 NR Description: probable protein kinase PK1 - potato
  misc_feature (9)..(252): Homolog of NCBI NO: 7446383 NR Description: probable protein kinase PK1 - potato
  misc_feature (240)..(452): Homolog of NCBI NO: 15236802 NR Description: putative protein kinase
  misc_feature (8)..(280): Homolog of NCBI NO: 15236802 NR Description: putative protein kinase
  misc_feature (293)..(445): Homolog of NCBI NO: 15225776 NR Description: putative second messenger-dependent protein kinase
  misc_feature (8)..(242): Homolog of NCBI NO: 15225776 NR Description: putative second messenger-dependent protein kinase
  misc_feature (281)..(424): Homolog of NCBI NO: 34910268 NR Description: putative protein kinase [Oryza sativa (japonica
  misc_feature (8)..(259): Homolog of NCBI NO: 34910268 NR Description: putative protein kinase [Oryza sativa (japonica
  misc_feature (8)..(452): Homolog of NCBI NO: 15226800 NR Description: putative protein kinase
  misc_feature (8)..(452): Homolog of NCBI NO: 1935918 NR Description: putative serine/threonine protein kinase
METGGGRDSGMSSETINSSTQRTSMSNESVCSTSFSRLSFDLPPPSSSPETLFVKPHRSSDFAYSAILRRKSALTFRDFHLLRRIGAGDIGTVYLCRLRHDAGDEDDDEDPCFYAMKVVDKEAVALKKKAQRAEMERKILKMVDHPFLPTLYAEFEASNFSCIVMEYCSGGDLHSLQHNHPNNRFSLSSARFYAAEVLVALEYLHMLGIIYRDLKPENVLVRSDGHIMLSDFDLSLCSDAIPAVESPDCSLDPAFAPALRYTRQYSTPFSCLSNRVFRSRKVQTLQPNRLFVAEPVGARSCSFVGTHEYVSPEVASGNSHGNAVDWWSFGIFIYEMVYGRTPFAGSSNEATLRSIIKKPLAFPTSTPSSTLEMHARDLISGLLNKDPNRRLGSKRGSADVKKHPFFAGLNLALIRTVTPPEVPSLRRHKTTPFYYPANVNNSRQQLTAFDYF

SEQ ID NO: 60532 - protein, 442 aa, Glycine max
  peptide (1)..(442): Ceres Seq. ID no. 12453504
  misc_feature (69)..(396): Pfam Name: Protein kinase domain Pfam Description: Protein kinase domain
  misc_feature (210)..(413): Homolog of NCBI NO: 7446383 NR Description: probable protein kinase PK1 - potato
  misc_feature (1)..(242): Homolog of NCBI NO: 7446383 NR Description: probable protein kinase PK1 - potato
  misc_feature (230)..(442): Homolog of NCBI NO: 15236802 NR Description: putative protein kinase
  misc_feature (1)..(270): Homolog of NCBI NO: 15236802 NR Description: putative protein kinase
  misc_feature (283)..(435): Homolog of NCBI NO: 15225776 NR Description: putative second messenger-dependent protein kinase
  misc_feature (1)..(232): Homolog of NCBI NO: 15225776 NR Description: putative second messenger-dependent protein kinase
  misc_feature (271)..(414): Homolog of NCBI NO: 34910268 NR Description: putative protein kinase [Oryza sativa (japonica
  misc_feature (1)..(249): Homolog of NCBI NO: 34910268 NR Description: putative protein kinase [Oryza sativa (japonica
  misc_feature (1)..(442): Homolog of NCBI NO: 15226800 NR Description: putative protein kinase
  misc_feature (1)..(442): Homolog of NCBI NO: 1935918 NR Description: putative serine/threonine protein kinase
MSSETINSSTQRTSMSNESVCSTSFSRLSFDLPPPSSSPETLFVKPHRSSDFAYSAILRRKSALTFRDFHLLRRIGAGDIGTVYLCRLRHDAGDEDDDEDPCFYAMKVVDKEAVALKKKAQRAEMERKILKMVDHPFLPTLYAEFEASNFSCIVMEYCSGGDLHSLQHNHPNNRFSLSSARFYAAEVLVALEYLHMLGIIYRDLKPENVLVRSDGHIMLSDFDLSLCSDAIPAVESPDCSLDPAFAPALRYTRQYSTPFSCLSNRVFRSRKVQTLQPNRLFVAEPVGARSCSFVGTHEYVSPEVASGNSHGNAVDWWSFGIFIYEMVYGRTPFAGSSNEATLRSIIKKPLAFPTSTPSSTLEMHARDLISGLLNKDPNRRLGSKRGSADVKKHPFFAGLNLALIRTVTPPEVPSLRRHKTTPFYYPANVNNSRQQLTAFDYF

SEQ ID NO: 60533 - protein, 428 aa, Glycine max
  peptide (1)..(428): Ceres Seq. ID no. 12453505
  misc_feature (55)..(382): Pfam Name: Protein kinase domain Pfam Description: Protein kinase domain
  misc_feature (196)..(399): Homolog of NCBI NO: 7446383 NR Description: probable protein kinase PK1 - potato
  misc_feature (1)..(228): Homolog of NCBI NO: 7446383 NR Description: probable protein kinase PK1 - potato
  misc_feature (216)..(428): Homolog of NCBI NO: 15236802 NR Description: putative protein kinase
  misc_feature (1)..(256): Homolog of NCBI NO: 15236802 NR Description: putative protein kinase
  misc_feature (269)..(421): Homolog of NCBI NO: 15225776 NR Description: putative second messenger-dependent protein kinase
  misc_feature (1)..(218): Homolog of NCBI NO: 15225776 NR Description: putative second messenger-dependent protein kinase
  misc_feature (257)..(400): Homolog of NCBI NO: 34910268 NR Description: putative protein kinase [Oryza sativa (japonica
  misc_feature (1)..(235): Homolog of NCBI NO: 34910268 NR Description: putative protein kinase [Oryza sativa (japonica
  misc_feature (1)..(428): Homolog of NCBI NO: 15226800 NR Description: putative protein kinase
  misc_feature (1)..(428): Homolog of NCBI NO: 1935918 NR Description: putative serine/threonine protein kinase
MSNESVCSTSFSRLSFDLPPPSSSPETLFVKPHRSSDFAYSAILRRKSALTFRDFHLLRRIGAGDIGTVYLCRLRHDAGDEDDDEDPCFYAMKVVDKEAVALKKKAQRAEMERKILKMVDHPFLPTLYAEFEASNFSCIVMEYCSGGDLHSLQHNHPNNRFSLSSARFYAAEVLVALEYLHMLGIIYRDLKPENVLVRSDGHIMLSDFDLSLCSDAIPAVESPDCSLDPAFAPALRYTRQYSTPFSCLSNRVFRSRKVQTLQPNRLFVAEPVGARSCSFVGTHEYVSPEVASGNSHGNAVDWWSFGIFIYEMVYGRTPFAGSSNEATLRSIIKKPLAFPTSTPSSTLEMHARDLISGLLNKDPNRRLGSKRGSADVKKHPFFAGLNLALIRTVTPPEVPSLRRHKTTPFYYPANVNNSRQQLTAFDYF

SEQ ID NO: 60534 - DNA, 1816 bp, Glycine max
  misc_feature (1)..(1816): Ceres Seq. ID no. 12452690
  misc_feature: Phenotype: INFLORESCENCE Appearance-Corkscrew
  misc_feature: Phenotype: INFLORESCENCE Strength-Strong
  misc_feature: Phenotype: FERTILITY Fertility-Sterile
  misc_feature: Phenotype: INFLORESCENCE Appearance-Corkscrew
  misc_feature: Phenotype: INFLORESCENCE Strength-Strong
  misc_feature: Phenotype: FERTILITY Fertility-Sterile
  misc_feature: Phenotype: INFLORESCENCE Appearance-Corkscrew
  misc_feature: Phenotype: INFLORESCENCE Strength-Strong
  misc_feature: Phenotype: FERTILITY Fertility-Reduced
  misc_feature: Phenotype: INFLORESCENCE Appearance-Corkscrew
  misc_feature: Phenotype: INFLORESCENCE Strength-Strong
  misc_feature: Phenotype: FERTILITY Fertility-Sterile
  misc_feature: Phenotype: FERTILITY Fertility-Reduced
  misc_feature: Phenotype: FERTILITY Fertility-Reduced
  misc_feature: Phenotype: FERTILITY Fertility-Reduced
  misc_feature: Phenotype: FERTILITY Fertility-Reduced
  misc_feature: Phenotype: FERTILITY Fertility-Reduced
  misc_feature: Phenotype: WHOLE PLANT Color-Dark Green
  misc_feature: Phenotype: WHOLE PLANT Size-Small
  misc_feature: Phenotype: WHOLE PLANT Color-Dark Green
  misc_feature: Phenotype: WHOLE PLANT Size-Small
cacagcccttctaaaacgcccttctaaaacgccttacttacttactctgtgccttctttcatcatccaaaaaagaaaaccgttggcattcacacaaagaaaacctttgggtttcccaaaatgtcatcatcggaactctcctctttctttcttctccgtctatcagacatactcagtttcgatgttttgctcggagttatgtttctagttgccgtgttcggctactggctggttcccggcggttttgcttgggctttttccaagttcaagcccgcgattcccgggccttccggttacccggtggtgggtctggtttgggctttcatagggcctcttactcacagggtccttgctaagttggctgaaacctttgatgcaaagcccttgatggcgttctctgtggggttcactcgtttcatcatctcttctcaccccgacaccgccaaagagatcttgaacagttccgctttcgcggatcgtcccgttaaggaatctgcttatgaacttctctttcaccgtgcgatggggtttgcaccctacggtgagtactggaggaacctgaggaggatctccgcaactcacatgttctctccgaggagaatcgcagcccaaggagtgtttcgggcccggattggagcccaaatggtgagagacatcgtgggcctgatggggagggacggtgtggtggaggtgaggaaggtgttgcattttgggtcgttgaataacgtgatgaagagcgtgtttgggaggagttatgtgtttggtgaggggggtgatgggtgtgagctcgaggggttggtgagcgaggggtatcatttgcttggggtgtttaactggagtgaccactttccactcttgggttggttggatttgcaaggtgtgaggaagagctgtaggagtttggttgatagagtgaatgtttatgttgggaaaatcattttggagcatagagtgaagagggttgctcaaggtgaggataataaggccattgatactgatagttctggtgactttgttgatgtgctgctggatttggagaaagagaataggctaaaccactctgatatggttgctgttttgtgggaaatgatatttagagggactgatacggtagctatccttctagagtggattctagcaagaatggttcttcatccagaaatacaagcaaaggcacaatctgaaatagactctgtggttgggtctgggcgtagtgtgagtgatgatgaccttccaaaccttccttacgttcgagccatagtgaaggaaaccttaaggatgcacccaccaggccctcttctttcatgggccagactttctattcatgacacacaaattggcaatcactttgttccagctggcaccactgctatggtaaacatgtgggccataactcacgaccaagaagtgtggtatgagccaaaacagttcaagccggagcgttttttgaaggacgaggacgtgccaatcatgggatctgatcttaggttggcaccttttggctctgggaggagagtgtgccctggaaaagccatgggcttggccactgttgagctttggcttgctatgttcttacaaaaattcaaatggatgccctgtgatgattctggtgttgacttgtctgagtgtttgaagctctccatggagatgaaacactctctcaaaaccaaagttgttgcaaggcctgtagtttctcttgcaatgtaatgggttggagtatcccatccttttactcccattaataataatattcctttccgttgtaaaaaaaaaaaaaaaaaacggcacgagaagccggcacgagaagccggcacgag

SEQ ID NO: 60535 - protein, 528 aa, Glycine max
  peptide (1)..(528): Ceres Seq. ID no. 12452691
  misc_feature (53)..(495): Pfam Name: Cytochrome P450 Pfam Description: Cytochrome P450
  misc_feature (11)..(521): Homolog of NCBI NO: 31126705 NR Description: putative cytochrome P-450 [Oryza sativa (japonica
  misc_feature (1)..(521): Homolog of NCBI NO: 34394563 NR Description: putative cytochrome P-450
  misc_feature (90)..(521): Homolog of NCBI NO: 1173624 NR Description: cytochrome P-450
  misc_feature (16)..(523): Homolog of NCBI NO: 15222937 NR Description: cytochrome p450 family; protein id: At1g13710.1
  misc_feature (19)..(521): Homolog of NCBI NO: 15221132 NR Description: cytochrome p450 family; protein id: At1g74110.1
MSSSELSSFFLLRLSDILSFDVLLGVMFLVAVFGYWLVPGGFAWAFSKFKPAIPGPSGYPVVGLVWAFIGPLTHRVLAKLAETFDAKPLMAFSVGFTRFIISSHPDTAKEILNSSAFADRPVKESAYELLFHRAMGFAPYGEYWRNLRRISATHMFSPRRIAAQGVFRARIGAQMVRDIVGLMGRDGVVEVRKVLHFGSLNNVMKSVFGRSYVFGEGGDGCELEGLVSEGYHLLGVFNWSDHFPLLGWLDLQGVRKSCRSLVDRVNVYVGKIILEHRVKRVAQGEDNKAIDTDSSGDFVDVLLDLEKENRLNHSDMVAVLWEMIFRGTDTVAILLEWILARMVLHPEIQAKAQSEIDSVVGSGRSVSDDDLPNLPYVRAIVKETLRMHPPGPLLSWARLSIHDTQIGNHFVPAGTTAMVNMWAITHDQEVWYEPKQFKPERFLKDEDVPIMGSDLRLAPFGSGRRVCPGKAMGLATVELWLAMFLQKFKWMPCDDSGVDLSECLKLSMEMKHSLKTKVVARPVVSLAM

SEQ ID NO: 60536 - protein, 502 aa, Glycine max
  peptide (1)..(502): Ceres Seq. ID no. 12452692
  misc_feature (27)..(469): Pfam Name: Cytochrome P450 Pfam Description: Cytochrome P450
  misc_feature (1)..(495): Homolog of NCBI NO: 31126705 NR Description: putative cytochrome P-450 [Oryza sativa (japonica
  misc_feature (1)..(495): Homolog of NCBI NO: 34394563 NR Description: putative cytochrome P-450
  misc_feature (64)..(495): Homolog of NCBI NO: 1173624 NR Description: cytochrome P-450
  misc_feature (1)..(497): Homolog of NCBI NO: 15222937 NR Description: cytochrome p450 family; protein id: At1g13710.1
  misc_feature (1)..(495): Homolog of NCBI NO: 15221132 NR Description: cytochrome p450 family; protein id: At1g74110.1
MFLVAVFGYWLVPGGFAWAFSKFKPAIPGPSGYPVVGLVWAFIGPLTHRVLAKLAETFDAKPLMAFSVGFTRFIISSHPDTAKEILNSSAFADRPVKESAYELLFHRAMGFAPYGEYWRNLRRISATHMFSPRRIAAQGVFRARIGAQMVRDIVGLMGRDGVVEVRKVLHFGSLNNVMKSVFGRSYVFGEGGDGCELEGLVSEGYHLLGVFNWSDHFPLLGWLDLQGVRKSCRSLVDRVNVYVGKIILEHRVKRVAQGEDNKAIDTDSSGDFVDVLLDLEKENRLNHSDMVAVLWEMIFRGTDTVAILLEWILARMVLHPEIQAKAQSEIDSVVGSGRSVSDDDLPNLPYVRAIVKETLRMHPPGPLLSWARLSIHDTQIGNHFVPAGTTAMVNMWAITHDQEVWYEPKQFKPERFLKDEDVPIMGSDLRLAPFGSGRRVCPGKAMGLATVELWLAMFLQKFKWMPCDDSGVDLSECLKLSMEMKHSLKTKVVARPVVSLAM

SEQ ID NO: 60537 - protein, 439 aa, Glycine max
  peptide (1)..(439): Ceres Seq. ID no. 12452693
  misc_feature (1)..(406): Pfam Name: Cytochrome P450 Pfam Description: Cytochrome P450
  misc_feature (1)..(432): Homolog of NCBI NO: 31126705 NR Description: putative cytochrome P-450 [Oryza sativa (japonica
  misc_feature (1)..(432): Homolog of NCBI NO: 34394563 NR Description: putative cytochrome P-450
  misc_feature (1)..(432): Homolog of NCBI NO: 1173624 NR Description: cytochrome P-450
  misc_feature (1)..(434): Homolog of NCBI NO: 15222937 NR Description: cytochrome p450 family; protein id: At1g13710.1
  misc_feature (1)..(432): Homolog of NCBI NO: 15221132 NR Description: cytochrome p450 family; protein id: At1g74110.1
MAFSVGFTRFIISSHPDTAKEILNSSAFADRPVKESAYELLFHRAMGFAPYGEYWRNLRRISATHMFSPRRIAAQGVFRARIGAQMVRDIVGLMGRDGVVEVRKVLHFGSLNNVMKSVFGRSYVFGEGGDGCELEGLVSEGYHLLGVFNWSDHFPLLGWLDLQGVRKSCRSLVDRVNVYVGKIILEHRVKRVAQGEDNKAIDTDSSGDFVDVLLDLEKENRLNHSDMVAVLWEMIFRGTDTVAILLEWILARMVLHPEIQAKAQSEIDSVVGSGRSVSDDDLPNLPYVRAIVKETLRMHPPGPLLSWARLSIHDTQIGNHFVPAGTTAMVNMWAITHDQEVWYEPKQFKPERFLKDEDVPIMGSDLRLAPFGSGRRVCPGKAMGLATVELWLAMFLQKFKWMPCDDSGVDLSECLKLSMEMKHSLKTKVVARPVVSLAM

SEQ ID NO: 60538 - DNA, 1338 bp, Glycine max
  misc_feature (1)..(1338): Ceres Seq. ID no. 12456365
  misc_feature: Phenotype: ROSETTE LEAVES Other
  misc_feature: Phenotype: WHOLE PLANT Color-Dark Green
  misc_feature: Phenotype: WHOLE PLANT Size-Large
  misc_feature: Phenotype: INFLORESCENCE Flowering Time-Late Flowering
  misc_feature: Phenotype: ROSETTE LEAVES Other
  misc_feature: Phenotype: WHOLE PLANT Color-Dark Green
  misc_feature: Phenotype: INFLORESCENCE Flowering Time-Late Flowering
  misc_feature: Phenotype: ROSETTE LEAVES Shape-Lanceolate
  misc_feature: Phenotype: ROSETTE LEAVES Other
  misc_feature: Phenotype: WHOLE PLANT Size-Small
  misc_feature: Phenotype: WHOLE PLANT Other
  misc_feature: Phenotype: INFLORESCENCE Flowering Time-Late Flowering
gtcataactttgctagatccatcaaagaagcagtgattcccccagcttccacatcaaatgaagccataatcatcatcatcatcaccacgcctcttctttctctttctccctaccattcacaatgtcatcgatacaccactactcaccggaaacaacactatactggaccagcgaccaccagcaacaacaacaacaacaacaacaacaacaacaacaagctgccacgtggcttagtaattcccacactccccgtttcaacctgaacgaagacgacgacgaggaagacgacgttgtcgtttcggacaaggctactaataatttggcgcaagaacaggagaaagaagcgatgttcgagaagccgttgacgccgagcgacgtcgggaagctgaaccggctcgtgatcccgaaacagcacgcggagaagtacttccctcttgactcgtccggcggtgactcggcggcggcgaaagggctcttgctgagtttcgaggacgagtcggggaagtgctggcgcttccgttactcttattggaacagtagccagagttacgttttgaccaaaggctggagccgttacgtcaaagacaaacgcctccacgcaggcgacgtcgttttgttccacagacaccgcgcccaccctcaacgcttcttcatctcctgcacccgccaccaacccaaccccaaccctcccgcgcacgttagcatcagatcctcctcctactctgcgctcccagcttatcctacgcaccatcatcatcacctccccttcccataccaacctcactctcttcacgcaccaggtggagggtcccaaggacagaacgaaacgacaccaggagggaacagttcaagtggcagggtgctgaggctgtttggggtgaacatggaatgccaacctgataatgataatgattcccaaaactccacacatgaatgctcctacacccacttataccaccatcaaacctcttcttatccttcttcaaaccctcaccatcacatgctacctcaacaaccataatagaaattagatatatatgcccccctctttattagattctcccccgttttttttttttcatttccagcttcagggttgaagtatgcccttaaattaattttagtcaatgaccgtgtcgttaacatgaacccgtgaaaggaacccttcttttattattagtatatttaggttgacgttgaagattatagaggatctttcttgtcttgaattagggagatgcatgcaaatggaaatgccttgtttattcgttttatcggatcttcttgttccctgtcactcgagcatattaattatcgactaagctgtgaatgcatgcc

SEQ ID NO: 60539 - protein, 299 aa, Glycine max
  peptide (1)..(299): Ceres Seq. ID no. 12456366
  misc_feature (76)..(182): Pfam Name: B3 DNA binding domain Pfam Description: B3 DNA binding domain
  misc_feature (46)..(229): Homolog of NCBI NO: 18407193 NR Description: putative RAV-like B3 domain DNA binding protein
  misc_feature (72)..(224): Homolog of NCBI NO: 21618252 NR Description: RAV-like protein [Arabidopsis thaliana]
  misc_feature (61)..(224): Homolog of NCBI NO: 26450371 NR Description: putative RAV [Arabidopsis thaliana]
  misc_feature (61)..(224): Homolog of NCBI NO: 15228649 NR Description: RAV-like protein
  misc_feature (65)..(222): Homolog of NCBI NO: 30681791 NR Description: DNA-binding protein, putative [Arabidopsis
  misc_feature (71)..(207): Homolog of NCBI NO: 30686674 NR Description: DNA-binding protein, putative [Arabidopsis
  misc_feature (71)..(207): Homolog of NCBI NO: 30686669 NR Description: DNA-binding protein, putative [Arabidopsis
  misc_feature (71)..(207): Homolog of NCBI NO: 25408446 NR Description: probable RAV2-like DNA binding protein
  misc_feature (65)..(260): Homolog of NCBI NO: 30681787 NR Description: DNA-binding protein, putative [Arabidopsis
  misc_feature (73)..(295): Homolog of NCBI NO: 15239984 NR Description: putative protein; protein id: At5g06250.1
MSSIHHYSPETTLYWTSDHQQQQQQQQQQQQQAATWLSNSHTPRFNLNEDDDEEDDVVVSDKATNNLAQEQEKEAMFEKPLTPSDVGKLNRLVIPKQHAEKYFPLDSSGGDSAAAKGLLLSFEDESGKCWRFRYSYWNSSQSYVLTKGWSRYVKDKRLHAGDVVLFHRHRAHPQRFFISCTRHQPNPNPPAHVSIRSSSYSALPAYPTHHHHHLPFPYQPHSLHAPGGGSQGQNETTPGGNSSSGRVLRLFGVNMECQPDNDNDSQNSTHECSYTHLYHHQTSSYPSSNPHHHMLPQQP

SEQ ID NO: 60540 - protein, 224 aa, Glycine max
  peptide (1)..(224): Ceres Seq. ID no. 12456367
  misc_feature (1)..(107): Pfam Name: B3 DNA binding domain Pfam Description: B3 DNA binding domain
  misc_feature (1)..(154): Homolog of NCBI NO: 18407193 NR Description: putative RAV-like B3 domain DNA binding protein
  misc_feature (1)..(149): Homolog of NCBI NO: 21618252 NR Description: RAV-like protein [Arabidopsis thaliana]
  misc_feature (1)..(149): Homolog of NCBI NO: 26450371 NR Description: putative RAV [Arabidopsis thaliana]
  misc_feature (1)..(149): Homolog of NCBI NO: 15228649 NR Description: RAV-like protein
  misc_feature (1)..(147): Homolog of NCBI NO: 30681791 NR Description: DNA-binding protein, putative [Arabidopsis
  misc_feature (1)..(132): Homolog of NCBI NO: 30686674 NR Description: DNA-binding protein, putative [Arabidopsis
  misc_feature (1)..(132): Homolog of NCBI NO: 30686669 NR Description: DNA-binding protein, putative [Arabidopsis
  misc_feature (1)..(132): Homolog of NCBI NO: 25408446 NR Description: probable RAV2-like DNA binding protein
  misc_feature (1)..(185): Homolog of NCBI NO: 30681787 NR Description: DNA-binding protein, putative [Arabidopsis
  misc_feature (1)..(220): Homolog of NCBI NO: 15239984 NR Description: putative protein; protein id: At5g06250.1
MFEKPLTPSDVGKLNRLVIPKQHAEKYFPLDSSGGDSAAAKGLLLSFEDESGKCWRFRYSYWNSSQSYVLTKGWSRYVKDKRLHAGDVVLFHRHRAHPQRFFISCTRHQPNPNPPAHVSIRSSSYSALPAYPTHHHHHLPFPYQPHSLHAPGGGSQGQNETTPGGNSSSGRVLRLFGVNMECQPDNDNDSQNSTHECSYTHLYHHQTSSYPSSNPHHHMLPQQP

SEQ ID NO: 60541 - DNA, 1681 bp, Glycine max
  misc_feature (1)..(1681): Ceres Seq. ID no. 12452925
  misc_feature: Phenotype: ROSETTE LEAVES Disorganized Rosette-Disorganized Rosette
  misc_feature: Phenotype: ROSETTE LEAVES Shape-Lanceolate
  misc_feature: Phenotype: ROSETTE LEAVES Other
  misc_feature: Phenotype: WHOLE PLANT Size-Small
  misc_feature: Phenotype: INFLORESCENCE Height-Short
  misc_feature: Phenotype: ROSETTE LEAVES Disorganized Rosette-Disorganized Rosette
  misc_feature: Phenotype: ROSETTE LEAVES Shape-Lanceolate
  misc_feature: Phenotype: ROSETTE LEAVES Other
  misc_feature: Phenotype: WHOLE PLANT Size-Small
  misc_feature: Phenotype: INFLORESCENCE Height-Short
  misc_feature: Phenotype: ROSETTE LEAVES Disorganized Rosette-Disorganized Rosette
  misc_feature: Phenotype: ROSETTE LEAVES Shape-Lanceolate
  misc_feature: Phenotype: ROSETTE LEAVES Other
  misc_feature: Phenotype: WHOLE PLANT Size-Small
  misc_feature: Phenotype: INFLORESCENCE Height-Short
  misc_feature: Phenotype: ROSETTE LEAVES Disorganized Rosette-Disorganized Rosette
  misc_feature: Phenotype: ROSETTE LEAVES Shape-Lanceolate
  misc_feature: Phenotype: ROSETTE LEAVES Other
  misc_feature: Phenotype: WHOLE PLANT Size-Small
  misc_feature: Phenotype: INFLORESCENCE Height-Short
  misc_feature: Phenotype: ROSETTE LEAVES Disorganized Rosette-Disorganized Rosette
  misc_feature: Phenotype: ROSETTE LEAVES Shape-Lanceolate
  misc_feature: Phenotype: ROSETTE LEAVES Other
  misc_feature: Phenotype: WHOLE PLANT Size-Small
  misc_feature: Phenotype: INFLORESCENCE Height-Short
  misc_feature: Phenotype: ROSETTE LEAVES Disorganized Rosette-Disorganized Rosette
  misc_feature: Phenotype: ROSETTE LEAVES Shape-Lanceolate
  misc_feature: Phenotype: ROSETTE LEAVES Other
  misc_feature: Phenotype: WHOLE PLANT Size-Small
  misc_feature: Phenotype: INFLORESCENCE Height-Short
  misc_feature: Phenotype: ROSETTE LEAVES Disorganized Rosette-Disorganized Rosette
  misc_feature: Phenotype: ROSETTE LEAVES Shape-Lanceolate
  misc_feature: Phenotype: ROSETTE LEAVES Other
  misc_feature: Phenotype: WHOLE PLANT Size-Small
  misc_feature: Phenotype: INFLORESCENCE Height-Short
  misc_feature: Phenotype: ROSETTE LEAVES Disorganized Rosette-Disorganized Rosette
  misc_feature: Phenotype: ROSETTE LEAVES Shape-Lanceolate
  misc_feature: Phenotype: ROSETTE LEAVES Other
  misc_feature: Phenotype: WHOLE PLANT Size-Small
  misc_feature: Phenotype: INFLORESCENCE Height-Short
  misc_feature: Phenotype: ROSETTE LEAVES Disorganized Rosette-Disorganized Rosette
  misc_feature: Phenotype: ROSETTE LEAVES Shape-Lanceolate
  misc_feature: Phenotype: ROSETTE LEAVES Other
  misc_feature: Phenotype: WHOLE PLANT Size-Small
  misc_feature: Phenotype: INFLORESCENCE Height-Short
  misc_feature: Phenotype: ROSETTE LEAVES Disorganized Rosette-Disorganized Rosette
  misc_feature: Phenotype: ROSETTE LEAVES Shape-Lanceolate
  misc_feature: Phenotype: ROSETTE LEAVES Other
  misc_feature: Phenotype: WHOLE PLANT Size-Small
  misc_feature: Phenotype: INFLORESCENCE Height-Short
aaaagggtgtccaaagaaggaatcacacaagagaaattttgggtggatcttggtaatttaaatttggtccaaaaatagtaagaaaaaaaaaccatagttcatttaattttcatgtccttgctaacggtggcgcaccaaagggggtcaggtgagtttatccggttcacggaaagtcatggcggtggtggcgatgacgtcagtggtgacggtgaacatggttgtggacatgatgatggaagtggtgctggaggttcactagggttgaattttaaccaagtgatgcaacaaggtgaggtgacaatgcaaggtggttcattggtttcagggtataacaggggtgatccagagttgagagaaatagtttcagctttgacacacgtggtgtcttcagggtctggccagaggagcaccgaattgacccagcaaagtggttttcctatgatgtctgcttcttctctttcacgtttgtctgctttctcttcttcttctccttctccttcttctggagcctcttgggttggccacaaaagaggcagagaagaagaagagaatagtacttcacataacttgatgcaacaacaacaacaaagtgctccaagactcttcagaaacattggtgacttcatggtgccttctcaaggagactcatcatcagtgacagaagaagcccccacctccacaactacaactgtaaccgccgtcactgaaaacccaccaggaggtggggaaaggaggagaaagtacagaggagtgaggcagaggccatggggaaaatgggcagcagaaatccgtgatccacacaaagcagcaagagtttggctaggcacatttgacacagaagaagcagcagcaagagcctatgatgaagctgcattgaggttcagaggcaacagagcaaagcttaacttccctgaaaatgtaagagcagttccacccattcaaccttttcaagccaccactaggctaaccgtttctgattccaccacctctcaattccggccactctccgcggtggcgccacccttcattcagcagccacagattcagggctcctctgacttgatcagagactacttgcaatactctcagcttctacagagtgattttcaacagcaacaaatacaacaacaacagcagcagcagcggcagcagcagcagcggcagcggcagcagcggcagcagcagcagcaacaacaacaacaaccatctagtttgcttcagcagttgtactataatgcacaatttgcttcacttcaatcaccttcaatgctatcatcatctccttcattttcttcttctgtgtctccagcaccattcccattattcacaacctctgcttctttccccttgttttcaagtcaacaaatgggctatttccagccaccggaaagccgcaatcccgctggcggcgtgccggagtttccaacgtccacatggtcggataccagtagccagccaccaccttctggttgatacagtgttttagtttccttcatattttcctttttcttttttctttctttcattcttagcataaaaaaaaaagacttgttatacttatttcttttttcaagggtgaaactatgatatagttttttttaagtatttttggtactattctcgtatcagaattagagtttcagtaatttatgttgatattcaatacaaatctttattatgt

SEQ ID NO: 60542 - protein, 453 aa, Glycine max
  peptide (1)..(453): Ceres Seq. ID no. 12452926
  misc_feature (208)..(271): Pfam Name: AP2 domain Pfam Description: AP2 domain
  misc_feature (180)..(316): Homolog of NCBI NO: 15226153 NR Description: putative AP2 domain transcription factor; protein
  misc_feature (142)..(271): Homolog of NCBI NO: 15240379 NR Description: putative protein; protein id: At5g61890.1
  misc_feature (187)..(270): Homolog of NCBI NO: 15218275 NR Description: AP2 domain protein RAP2.6
  misc_feature (187)..(270): Homolog of NCBI NO: 2281637 NR Description: AP2 domain containing protein RAP2.6 [Arabidopsis
  misc_feature (174)..(329): Homolog of NCBI NO: 38347164 NR Description: OSJNBa0039C07.10 [Oryza sativa (japonica
  misc_feature (207)..(375): Homolog of NCBI NO: 15240604 NR Description: putative protein; protein id: At5g13330.1
  misc_feature (201)..(289): Homolog of NCBI NO: 34221731 NR Description: putative AP2 domain transcription factor
  misc_feature (184)..(289): Homolog of NCBI NO: 15240610 NR Description: putative protein; protein id: At5g50080.1
  misc_feature (125)..(329): Homolog of NCBI NO: 34908616 NR Description: P0677H08.8 [Oryza sativa (japonica
  misc_feature (125)..(343): Homolog of NCBI NO: 15238232 NR Description: putative protein; protein id: At5g64750.1
MSLLTVAHQRGSGEFIRFTESHGGGGDDVSGDGEHGCGHDDGSGAGGSLGLNFNQVMQQGEVTMQGGSLVSGYNRGDPELREIVSALTHVVSSGSGQRSTELTQQSGFPMMSASSLSRLSAFSSSSPSPSSGASWVGHKRGREEEENSTSHNLMQQQQQSAPRLFRNIGDFMVPSQGDSSSVTEEAPTSTTTTVTAVTENPPGGGERRRKYRGVRQRPWGKWAAEIRDPHKAARVWLGTFDTEEAAARAYDEAALRFRGNRAKLNFPENVRAVPPIQPFQATTRLTVSDSTTSQFRPLSAVAPPFIQQPQIQGSSDLIRDYLQYSQLLQSDFQQQQIQQQQQQQRQQQQRQRQQRQQQQQQQQQPSSLLQQLYYNAQFASLQSPSMLSSSPSFSSSVSPAPFPLFTTSASFPLFSSQQMGYFQPPESRNPAGGVPEFPTSTWSDTSSQPPPSG

SEQ ID NO: 60543 - protein, 397 aa, Glycine max
  peptide (1)..(397): Ceres Seq. ID no. 12452927
  misc_feature (152)..(215): Pfam Name: AP2 domain Pfam Description: AP2 domain
  misc_feature (124)..(260): Homolog of NCBI NO: 15226153 NR Description: putative AP2 domain transcription factor; protein
  misc_feature (86)..(215): Homolog of NCBI NO: 15240379 NR Description: putative protein; protein id: At5g61890.1
  misc_feature (131)..(214): Homolog of NCBI NO: 15218275 NR Description: AP2 domain protein RAP2.6
  misc_feature (131)..(214): Homolog of NCBI NO: 2281637 NR Description: AP2 domain containing protein RAP2.6 [Arabidopsis
  misc_feature (118)..(273): Homolog of NCBI NO: 38347164 NR Description: OSJNBa0039C07.10 [Oryza sativa (japonica
  misc_feature (151)..(319): Homolog of NCBI NO: 15240604 NR Description: putative protein; protein id: At5g13330.1
  misc_feature (145)..(233): Homolog of NCBI NO: 34221731 NR Description: putative AP2 domain transcription factor
  misc_feature (128)..(233): Homolog of NCBI NO: 15240610 NR Description: putative protein; protein id: At5g50080.1
  misc_feature (69)..(273): Homolog of NCBI NO: 34908616 NR Description: P0677H08.8 [Oryza sativa (japonica
  misc_feature (69)..(287): Homolog of NCBI NO: 15238232 NR Description: putative protein; protein id: At5g64750.1
MQQGEVTMQGGSLVSGYNRGDPELREIVSALTHVVSSGSGQRSTELTQQSGFPMMSASSLSRLSAFSSSSPSPSSGASWVGHKRGREEEENSTSHNLMQQQQQSAPRLFRNIGDFMVPSQGDSSSVTEEAPTSTTTTVTAVTENPPGGGERRRKYRGVRQRPWGKWAAEIRDPHKAARVWLGTFDTEEAAARAYDEAALRFRGNRAKLNFPENVRAVPPIQPFQATTRLTVSDSTTSQFRPLSAVAPPFIQQPQIQGSSDLIRDYLQYSQLLQSDFQQQQIQQQQQQQRQQQQRQRQQRQQQQQQQQQPSSLLQQLYYNAQFASLQSPSMLSSSPSFSSSVSPAPFPLFTTSASFPLFSSQQMGYFQPPESRNPAGGVPEFPTSTWSDTSSQPPPSG

SEQ ID NO: 60544 - protein, 390 aa, Glycine max
  peptide (1)..(390): Ceres Seq. ID no. 12452928
  misc_feature (145)..(208): Pfam Name: AP2 domain Pfam Description: AP2 domain
  misc_feature (117)..(253): Homolog of NCBI NO: 15226153 NR Description: putative AP2 domain transcription factor; protein
  misc_feature (79)..(208): Homolog of NCBI NO: 15240379 NR Description: putative protein; protein id: At5g61890.1
  misc_feature (124)..(207): Homolog of NCBI NO: 15218275 NR Description: AP2 domain protein RAP2.6
  misc_feature (124)..(207): Homolog of NCBI NO: 2281637 NR Description: AP2 domain containing protein RAP2.6 [Arabidopsis
  misc_feature (111)..(266): Homolog of NCBI NO: 38347164 NR Description: OSJNBa0039C07.10 [Oryza sativa (japonica
  misc_feature (144)..(312): Homolog of NCBI NO: 15240604 NR Description: putative protein; protein id: At5g13330.1
  misc_feature (138)..(226): Homolog of NCBI NO: 34221731 NR Description: putative AP2 domain transcription factor
  misc_feature (121)..(226): Homolog of NCBI NO: 15240610 NR Description: putative protein; protein id: At5g50080.1
  misc_feature (62)..(266): Homolog of NCBI NO: 34908616 NR Description: P0677H08.8 [Oryza sativa (japonica
  misc_feature (62)..(280): Homolog of NCBI NO: 15238232 NR Description: putative protein; protein id: At5g64750.1
MQGGSLVSGYNRGDPELREIVSALTHVVSSGSGQRSTELTQQSGFPMMSASSLSRLSAFSSSSPSPSSGASWVGHKRGREEEENSTSHNLMQQQQQSAPRLFRNIGDFMVPSQGDSSSVTEEAPTSTTTTVTAVTENPPGGGERRRKYRGVRQRPWGKWAAEIRDPHKAARVWLGTFDTEEAAARAYDEAALRFRGNRAKLNFPENVRAVPPIQPFQATTRLTVSDSTTSQFRPLSAVAPPFIQQPQIQGSSDLIRDYLQYSQLLQSDFQQQQIQQQQQQQRQQQQRQRQQRQQQQQQQQQPSSLLQQLYYNAQFASLQSPSMLSSSPSFSSSVSPAPFPLFTTSASFPLFSSQQMGYFQPPESRNPAGGVPEFPTSTWSDTSSQPPPSG

SEQ ID NO: 60545 - DNA, 438 bp, Glycine max
  misc_feature (1)..(438): Ceres Seq. ID no. 4620132
  misc_feature: Phenotype: INFLORESCENCE Flowering Time-Late Flowering
  misc_feature: Phenotype: INFLORESCENCE Flowering Time-Late Flowering
  misc_feature: Phenotype: INFLORESCENCE Flowering Time-Late Flowering
  misc_feature: Phenotype: INFLORESCENCE Flowering Time-Late Flowering
  misc_feature: Phenotype: INFLORESCENCE Flowering Time-Late Flowering
  misc_feature: Phenotype: INFLORESCENCE Flowering Time-Late Flowering
  misc_feature: Phenotype: ROSETTE LEAVES Disorganized Rosette-Disorganized Rosette
  misc_feature: Phenotype: ROSETTE LEAVES Wax-Glossy
  misc_feature: Phenotype: WHOLE PLANT Color-Dark Green
  misc_feature: Phenotype: ROSETTE LEAVES Disorganized Rosette-Disorganized Rosette
  misc_feature: Phenotype: ROSETTE LEAVES Wax-Glossy
  misc_feature: Phenotype: WHOLE PLANT Color-Dark Green
  misc_feature: Phenotype: ROSETTE LEAVES Disorganized Rosette-Disorganized Rosette
  misc_feature: Phenotype: ROSETTE LEAVES Wax-Glossy
  misc_feature: Phenotype: WHOLE PLANT Color-Dark Green
  misc_feature: Phenotype: ROSETTE LEAVES Disorganized Rosette-Disorganized Rosette
  misc_feature: Phenotype: ROSETTE LEAVES Wax-Glossy
  misc_feature: Phenotype: WHOLE PLANT Color-Dark Green
  misc_feature: Phenotype: ROSETTE LEAVES Disorganized Rosette-Disorganized Rosette
  misc_feature: Phenotype: ROSETTE LEAVES Wax-Glossy
  misc_feature: Phenotype: WHOLE PLANT Color-Dark Green
  misc_feature: Phenotype: ROSETTE LEAVES Disorganized Rosette-Disorganized Rosette
  misc_feature: Phenotype: ROSETTE LEAVES Wax-Glossy
  misc_feature: Phenotype: WHOLE PLANT Color-Dark Green
  misc_feature: Phenotype: ROSETTE LEAVES Disorganized Rosette-Disorganized Rosette
  misc_feature: Phenotype: ROSETTE LEAVES Wax-Glossy
  misc_feature: Phenotype: WHOLE PLANT Color-Dark Green
  misc_feature: Phenotype: ROSETTE LEAVES Disorganized Rosette-Disorganized Rosette
  misc_feature: Phenotype: ROSETTE LEAVES Wax-Glossy
  misc_feature: Phenotype: WHOLE PLANT Color-Dark Green
  misc_feature: Phenotype: ROSETTE LEAVES Disorganized Rosette-Disorganized Rosette
  misc_feature: Phenotype: ROSETTE LEAVES Wax-Glossy
  misc_feature: Phenotype: WHOLE PLANT Color-Dark Green
  misc_feature: Phenotype: ROSETTE LEAVES Disorganized Rosette-Disorganized Rosette
  misc_feature: Phenotype: ROSETTE LEAVES Wax-Glossy
  misc_feature: Phenotype: WHOLE PLANT Color-Dark Green
acaaattctatacaccactctatcccccgttctctctcgcccgctttggtaaggcaagatagttctggccaacatggtgcaatcaaggaaattcagaggtgtgaggcaacgcaattggggctcttgggtttctgagattcgtcacccattattgaaaaggagggtgtggcttgggacattcgagacagctgatgaagcagctagagcatatgatgaggccgccattttgatgagtggaagaaatgccaaaacaaacttcccagttggtgaaaaccaaatgggaaatcatagttcaagtacttcatcttcctccaccactacattgtctgcagttctgagtgcaaaacttaggaagygttgcaagyccccttcaccttccctcacttgcctgaggcttgacactgagaattcccatattggtgtgtggcagaagcgagc

SEQ ID NO: 60546 - protein, 121 aa, Glycine max
  peptide (1)..(121): Ceres Seq. ID no. 4620133
  misc_feature (4)..(67): Pfam Name: AP2 domain Pfam Description: AP2 domain
  misc_feature (1)..(83): Homolog of NCBI NO: 8809573 NR Description: ethylene-responsive element binding factor
  misc_feature (5)..(104): Homolog of NCBI NO: 131754 NR Description: PPLZ02 PROTEIN
  misc_feature (6)..(96): Homolog of NCBI NO: 38343976 NR Description: OSJNBb0022F16.15 [Oryza sativa (japonica
  misc_feature (5)..(104): Homolog of NCBI NO: 18650662 NR Description: ethylene response factor 1 [Lycopersicon
  misc_feature (5)..(104): Homolog of NCBI NO: 15238727 NR Description: ethylene-responsive element - like protein
  misc_feature (1)..(120): Homolog of NCBI NO: 30689846 NR Description: AP2 domain transcription factor, putative
  misc_feature (1)..(120): Homolog of NCBI NO: 15239413 NR Description: AP2 domain containing protein; protein id:
  misc_feature (1)..(120): Homolog of NCBI NO: 15238976 NR Description: putative protein; protein id: At5g11190.1
  misc_feature (1)..(120): Homolog of NCBI NO: 21553845 NR Description: putative ethylene responsive element [Arabidopsis
  misc_feature (1)..(120): Homolog of NCBI NO: 15218134 NR Description: putative ethylene responsive element
  misc_feature (95)..(95): Xaa is any aa, unknown or other
  misc_feature (98)..(98): Xaa is any aa, unknown or other
MVQSRKFRGVRQRNWGSWVSEIRHPLLKRRVWLGTFETADEAARAYDEAAILMSGRNAKTNFPVGENQMGNHSSSTSSSSTTTLSAVLSAKLRKXCKXPSPSLTCLRLDTENSHIGVWQKR

SEQ ID NO: 60547 - protein, 69 aa, Glycine max
  peptide (1)..(69): Ceres Seq. ID no. 4620134
  misc_feature (1)..(31): Homolog of NCBI NO: 8809573 NR Description: ethylene-responsive element binding factor
  misc_feature (1)..(52): Homolog of NCBI NO: 131754 NR Description: PPLZ02 PROTEIN
  misc_feature (1)..(44): Homolog of NCBI NO: 38343976 NR Description: OSJNBb0022F16.15 [Oryza sativa (japonica
  misc_feature (1)..(52): Homolog of NCBI NO: 18650662 NR Description: ethylene response factor 1 [Lycopersicon
  misc_feature (1)..(52): Homolog of NCBI NO: 15238727 NR Description: ethylene-responsive element - like protein
  misc_feature (1)..(68): Homolog of NCBI NO: 30689846 NR Description: AP2 domain transcription factor, putative
  misc_feature (1)..(68): Homolog of NCBI NO: 15239413 NR Description: AP2 domain containing protein; protein id:
  misc_feature (1)..(68): Homolog of NCBI NO: 15238976 NR Description: putative protein; protein id: At5g11190.1
  misc_feature (1)..(68): Homolog of NCBI NO: 21553845 NR Description: putative ethylene responsive element [Arabidopsis
  misc_feature (1)..(68): Homolog of NCBI NO: 15218134 NR Description: putative ethylene responsive element
  misc_feature (43)..(43): Xaa is any aa, unknown or other
  misc_feature (46)..(46): Xaa is any aa, unknown or other
MSGRNAKTNFPVGENQMGNHSSSTSSSSTTTLSAVLSAKLRKXCKXPSPSLTCLRLDTENSHIGVWQKR

SEQ ID NO: 60548 - DNA, 467 bp, Glycine max
  misc_feature (1)..(467): Ceres Seq. ID no. 4865327
  misc_feature: Phenotype: ROSETTE LEAVES Shape-Oval
  misc_feature: Phenotype: WHOLE PLANT Color-Dark Green
  misc_feature: Phenotype: WHOLE PLANT Size-Small
  misc_feature: Phenotype: INFLORESCENCE Flowering Time-Late Flowering
  misc_feature: Phenotype: ROSETTE LEAVES Shape-Oval
  misc_feature: Phenotype: INFLORESCENCE Flowering Time-Late Flowering
  misc_feature: Phenotype: INFLORESCENCE Other
  misc_feature: Phenotype: ROSETTE LEAVES Shape-Oval
  misc_feature: Phenotype: INFLORESCENCE Flowering Time-Late Flowering
  misc_feature: Phenotype: INFLORESCENCE Other
  misc_feature: Phenotype: INFLORESCENCE Flowering Time-Late Flowering
  misc_feature: Phenotype: WHOLE PLANT Color-Dark Green
  misc_feature: Phenotype: WHOLE PLANT Size-Small
  misc_feature: Phenotype: WHOLE PLANT Color-Dark Green
  misc_feature: Phenotype: WHOLE PLANT Size-Small
  misc_feature: Phenotype: WHOLE PLANT Color-Dark Green
  misc_feature: Phenotype: WHOLE PLANT Size-Small
  misc_feature: Phenotype: WHOLE PLANT Color-Dark Green
  misc_feature: Phenotype: WHOLE PLANT Size-Small
  misc_feature: Phenotype: WHOLE PLANT Color-Dark Green
  misc_feature: Phenotype: WHOLE PLANT Size-Small
  misc_feature: Phenotype: WHOLE PLANT Color-Dark Green
  misc_feature: Phenotype: WHOLE PLANT Size-Small
  misc_feature: Phenotype: WHOLE PLANT Color-Dark Green
  misc_feature: Phenotype: WHOLE PLANT Size-Small
  misc_feature: Phenotype: WHOLE PLANT Color-Dark Green
  misc_feature: Phenotype: WHOLE PLANT Size-Small
  misc_feature: Phenotype: WHOLE PLANT Color-Dark Green
  misc_feature: Phenotype: WHOLE PLANT Size-Small
  misc_feature: Phenotype: WHOLE PLANT Color-Dark Green
  misc_feature: Phenotype: WHOLE PLANT Size-Small
aaaaacaaaatagtctctcttctctcaaacgattacaaaaaaatgacgtcatccaaccgttcttcatcaccaacatcatcgtcttcggaccaatctgatgtaactacaacaacaagcacccacttgtccgaaacttcaccgagaaacaacaaaagaaagagaagcaaggattcttcttcttcttcttcttcctcttcttcaaagcttaagcatcctgtttacagaggtgtacggatgagaagctggggcaaatgggtctccgagatccgacagcctcgcaaaaagactcgaatctggctcggtacattcgccaccgcagacatggcggcgcgtgctcacgacgtcgctgctctcgccatcaaaggctcctccgccgtcatcaacttyyccggagcttgcctctatcctccctcgtccggcgtcatcctcgccgcatgatatccaagcagcagctgcggaagccgccg

SEQ ID NO: 60549 - protein, 145 aa, Glycine max
  peptide (1)..(145): Ceres Seq. ID no. 4865328
  misc_feature (71)..(129): Pfam Name: AP2 domain Pfam Description: AP2 domain
  misc_feature (51)..(129): Homolog of NCBI NO: 15227471 NR Description: putative AP2 domain transcription factor; protein
  misc_feature (56)..(129): Homolog of NCBI NO: 37536842 NR Description: putative DNA binding protein
  misc_feature (15)..(129): Homolog of NCBI NO: 15232340 NR Description: transcription factor - like protein; protein id:
  misc_feature (43)..(129): Homolog of NCBI NO: 38605848 NR Description: OSJNBb0034G17.6 [Oryza sativa (japonica
  misc_feature (15)..(129): Homolog of NCBI NO: 14140163 NR Description: putative AP2 domain containing protein [Oryza
  misc_feature (5)..(129): Homolog of NCBI NO: 21592664 NR Description: putative AP2 domain transcription factor
  misc_feature (5)..(129): Homolog of NCBI NO: 15225381 NR Description: putative AP2 domain transcription factor
  misc_feature (13)..(129): Homolog of NCBI NO: 38605845 NR Description: OSJNBb0034G17.3 [Oryza sativa (japonica
  misc_feature (15)..(139): Homolog of NCBI NO: 15228171 NR Description: transcription factor TINY, putative; protein id:
  misc_feature (13)..(139): Homolog of NCBI NO: 9279711 NR Description: transcription factor TINY-like protein
  misc_feature (129)..(129): Xaa is any aa, unknown or other
  misc_feature (130)..(130): Xaa is any aa, unknown or other
KNKIVSLLSNDYKKMTSSNRSSSPTSSSSDQSDVTTTTSTHLSETSPRNNKRKRSKDSSSSSSSSSSKLKHPVYRGVRMRSWGKWVSEIRQPRKKTRIWLGTFATADMAARAHDVAALAIKGSSAVINXXGACLYPPSSGVILAA

SEQ ID NO: 60550 - protein, 131 aa, Glycine max
  peptide (1)..(131): Ceres Seq. ID no. 4865329
  misc_feature (57)..(115): Pfam Name: AP2 domain Pfam Description: AP2 domain
  misc_feature (37)..(115): Homolog of NCBI NO: 15227471 NR Description: putative AP2 domain transcription factor; protein
  misc_feature (42)..(115): Homolog of NCBI NO: 37536842 NR Description: putative DNA binding protein
  misc_feature (1)..(115): Homolog of NCBI NO: 15232340 NR Description: transcription factor - like protein; protein id:
  misc_feature (29)..(115): Homolog of NCBI NO: 38605848 NR Description: OSJNBb0034G17.6 [Oryza sativa (japonica
  misc_feature (1)..(115): Homolog of NCBI NO: 14140163 NR Description: putative AP2 domain containing protein [Oryza
  misc_feature (1)..(115): Homolog of NCBI NO: 21592664 NR Description: putative AP2 domain transcription factor
  misc_feature (1)..(115): Homolog of NCBI NO: 15225381 NR Description: putative AP2 domain transcription factor
  misc_feature (1)..(115): Homolog of NCBI NO: 38605845 NR Description: OSJNBb0034G17.3 [Oryza sativa (japonica
  misc_feature (1)..(125): Homolog of NCBI NO: 15228171 NR Description: transcription factor TINY, putative; protein id:
  misc_feature (1)..(125): Homolog of NCBI NO: 9279711 NR Description: transcription factor TINY-like protein
  misc_feature (115)..(115): Xaa is any aa, unknown or other
  misc_feature (116)..(116): Xaa is any aa, unknown or other
MTSSNRSSSPTSSSSDQSDVTTTTSTHLSETSPRNNKRKRSKDSSSSSSSSSSKLKHPVYRGVRMRSWGKWVSEIRQPRKKTRIWLGTFATADMAARAHDVAALAIKGSSAVINXXGACLYPPSSGVILAA

SEQ ID NO: 60551 - DNA, 1002 bp, Triticum aestivum
  misc_feature (1)..(1002): Ceres Seq. ID no. 13661565
gaaactaaaaacattaatcttcaatacttgtctaaacaagaaaggagtgaactacaaaaacctcacatgctgctcacacaaccatcttaagataactaatgaaagtttaaaatttacaatgcaccatcaggataaagagttgaatccatttcattgagattaaaccaaagaaatattttaacatatctagtagtcatccaaaatctcatcttcctcttctttaccttcagcctctttcttctcaacttcattctcctcagcctcatcatcatcagcttgcttctcctcagcctcatcatcagcttgcttctcttcagcatcatcagcttccttctcctgctcattctcttcctcatcatcatcgttgctgctctccagtgacttgttgtattcagcctttagttcagcagctttctccaaataaactttcttctcttcctcatccaaagacttccacttttcaccaccctgctttgcaacatccttaacgccagcgtcaggattctcttctttgaaagttttgcggaaatcagccatgaagatgaagaaggctgtaagaggtcgcttgggcttgttggaggaagagctcttcttcttattctcatccttggacttcctgagtctctttgccttaggttcatcagatgttgacttcttcctctcagcaggtttcttcttagcctcggtttgtgtctcaacaacttgtgcttcgagattgactcgaattttagcgtcgaggctgcaattgtgcatactgataagcgcaacagctacgttcttgttgcatccttcacatttagcaaaggcgctgccatctttagcgcgaagcaaggtgttgatgttgttgttggtggttgtttcgggtttggattcagcttcaaccctcttcctcggtttgggtgcagttgatttcgacgatccacgaccaccggccatctctttcttttttttctagatctgaaggagagaatataatcttttttgttgagattgaggatcgat

SEQ ID NO: 60552 - protein, 139 aa, Triticum aestivum
  peptide (1)..(139): Ceres Seq. ID no. 13661566
MKMKKAVRGRLGLLEEELFFLFSSLDFLSLFALGSSDVDFFLSAGFFLASVCVSTTCASRLTRILASRLQLCILISATATFLLHPSHLAKALPSLARSKVLMLLLVVVSGLDSASTLFLGLGAVDFDDPRPPAISFFFF

SEQ ID NO: 60553 - protein, 137 aa, Triticum aestivum
  peptide (1)..(137): Ceres Seq. ID no. 13661567
MKKAVRGRLGLLEEELFFLFSSLDFLSLFALGSSDVDFFLSAGFFLASVCVSTTCASRLTRILASRLQLCILISATATFLLHPSHLAKALPSLARSKVLMLLLVVVSGLDSASTLFLGLGAVDFDDPRPPAISFFFF

SEQ ID NO: 60554 - DNA, 818 bp, Triticum aestivum
  misc_feature (1)..(818): Ceres Seq. ID no. 13598143
ataccaagctagcaaagccaacctagctcagccacaagccagtacactttagctagctactagcttcgtagcaatggcgcctccaagctcaccctcttcctcgccctgagcctggtcctcgtgggaacctcgcacggttgcggatcgtgcggcaacacgccgtccgtgccagtcccaacgccgccgatcgccgtaccaccgccacccgtcccagtgccaaccccgccgatcgccgtgcccccgccggccgtcccagtaccaaccccgccaatcgccgtgcccccgccggccgtccgagtaccaacccctggcgggggcggcacttgtttgatcaacacgttgaagctgagcgcgtgcaccaacgtactgaacctgctgaagctcaacctcggcgtgccggcgagcgagcagtgcttccccctgctgagcggcctcgccgacctcgacgcagccgtgtgcctttgcccagccatcaaggccaacgtttttggcatcaagctcaacgtccccgtcgacctcgtgctgcttttcaaccagtgcggcaagacctgttccgccgacttcacctgccccaactaaatccaaggatacgtcgatcgatttacatatgacaaaccatgcattttgtacatgcatgcgtacttgtcgccccgtgcatgcatgcaagcttacgttttttttgttcccctgagtatgtataagctagtcatcgatcattgtatcccgtacgttatggtatttagatgatttgcatatttgtaaaagtatatacatacttgtccccgtacgtggaataaaaagtttgttcaagttgtgtt

SEQ ID NO: 60555 - protein, 38 aa, Triticum aestivum
  peptide (1)..(38): Ceres Seq. ID no. 13598144
MHAYLSPRACMQAYVFFVPLSMYKLVIDHCIPYVMVFR

SEQ ID NO: 60556 - DNA, 1451 bp, Triticum aestivum
  misc_feature (1)..(1451): Ceres Seq. ID no. 13661842
aaaggttccttttgggattgatctctttgaggcattgtgatgtactaataacagttcagtttccaggattcgtgtgattcagttgaacccctattctcatcgccaggataacgaaagaagatctgggaataatgaatcgccgttttgtgaatctgctggtcagtaaatcgggcgactgccgcccggccttcaacctgcatcgcatcaatccggcgagcttattctgccctactagatctctaaaaccagcagatccagcagcaacaaagaagaagactctgtctcggctgcctcctgcggccatatccttcgaattgccctgcccgtggaagaagttcgggtggatggatttcatggcccgcaagaacgacatcattgctgtcgaccatgagggccacaccctcctctacaacggcacggttggcgccctctgcgccatgaacaggatggtagacccctgtcacagctcaatctccgtcgttgttggggacgagctgtatgccatggccatcaaccgtggcctgctcccaaggtggactattttaaggctcttacctatggccgctcgttcggccactgccagccagaggactggcactggcgccctctccagccgcctccccttgaatacgaccacgagaaggatcaacgctacaaccccactgcggcgcctgtgacacacccctgtgctattggcgcatacacggttgttcgtgattcacagatctggatatctacaacgggcgctggcacgtactcctttgacacaactagcggcgtgtggagaaagattggcgagtgggctctgccgttcaaaggtcacgccaagtatgttcctgagcacggtctctggtttggcttctcagacagtgatggtcagctctgtgcttctgacctcgagcagatgccgccggtgcagcagaatgcgtgtgaagacctagtccttcctgtgctggaaggttggaatccaacggggtcgcacctcttggcgttgggatctggtaagttatgcatcgtgagcttcttccagagaattaagcgggtgaggccgcgtccgtcgacgtgctattggagcttcaaaattgagaacgctgctgttcttgctggtgtggaagttgttgccgcaggtccaggaatcctccgtatggtcaagcacaagtccaaatgttatcacttcggagatgataacgtgaagctgctgtgatattgcaggcatgccatctttagatttgaagaccctggtcttaaaaaaaagagaatcttccgggcgagtctctgtattgtgatcctactttgtctgtggatgtggtctgtttgttgcgagttacttactctttatttctatatatgtgtatttagctgtgtgcgcccgcagcagcgctggaatctgggttaaaccttgactgattgtaacattacctctgtgtcgcccttaacagtgctggtaggtt

SEQ ID NO: 60557 - protein, 181 aa, Triticum aestivum
  peptide (1)..(181): Ceres Seq. ID no. 13661843
MNRRFVNLLVSKSGDCRPAFNLHRINPASLFCPTRSLKPADPAATKKKTLSRLPPAAISFELPCPWKKFGWMDFMARKNDIIAVDHEGHTLLYNGTVGALCAMNRMVDPCHSSISVVVGDELYAMAINRGLLPRWTILRLLPMAARSATASQRTGTGALSSRLPLNTTTRRINATTPLRRL

SEQ ID NO: 60558 - protein, 110 aa, Triticum aestivum
  peptide (1)..(110): Ceres Seq. ID no. 13661844
MDFMARKNDIIAVDHEGHTLLYNGTVGALCAMNRMVDPCHSSISVVVGDELYAMAINRGLLPRWTILRLLPMAARSATASQRTGTGALSSRLPLNTTTRRINATTPLRRL

SEQ ID NO: 60559 - protein, 107 aa, Triticum aestivum
  peptide (1)..(107): Ceres Seq. ID no. 13661845
MARKNDIIAVDHEGHTLLYNGTVGALCAMNRMVDPCHSSISVVVGDELYAMAINRGLLPRWTILRLLPMAARSATASQRTGTGALSSRLPLNTTTRRINATTPLRRL

SEQ ID NO: 60560 - DNA, 1083 bp, Triticum aestivum
  misc_feature (1)..(1083): Ceres Seq. ID no. 13662117
agtcattctcctcctcacccacgtctccctcctctctgtcagagaggaagacgctccaggagagattaggccgcaggagtagcggtgaccgacaggctcatggaggagcagcagcggccaatggcggcagaccagatcagcgcgccgcgggaggggatggggcagctctcatgggccaagcagagcagagtcggcgggccatgccaggaccagcgtgataggtcgcgggcgaagaggggccagggcggcgaagacaccccaggaaaggtgccgccggccacgacctttttcctccttgcccttgttttctccttcccgtctagggttatcgccgccgccgccgccatcgtccccatccttgctcgcggcctcggtctctgcgtctctaatcgtcccaagatcccaaacccgtcgtcgtcttctacttccctctcttattcccctatggccccggcaaggtgtgccaatccggcgccacacggcaaagtacatcagcatccagtataccccttgacacggccaaggtcaggctacaactgcagaagagggtcgtcgccagggatctcgctgggcccaagtaccgtggcctgctcggcaccgccgccaccatcgccaaggaggaaggcgccgccgcactctggaagggcatcggccctggcctccatcgccggtgcatctacgacggtcgctatgagcccgtcaaatccttctatgttggtgccatgttggggatgtacctttgtccaagaagatagccgttggcttcaccactggtaccctcatcgctgtattctcaaacaattttccgttccatgtgaaatgaaatatgcagcaacataagatggtttggctgacctgcattaggtgcccttataatctctgtggccaaccccattgaccttgtcaaagtcaggcttcagtccgaggggaagatggcacctggtgtgtcgcgctgttatactggggcaatgtatgcgccaagactgttaggcaggtctattgtttctgctcttgttctgcaaactaattgtggattgttacatttcccgaattgcttgcttcaaatatgtcggtatcatcttt

SEQ ID NO: 60561 - protein, 246 aa, Triticum aestivum
  peptide (1)..(246): Ceres Seq. ID no. 13662118
MEEQQRPMAADQISAPREGMGQLSWAKQSRVGGPCQDQRDRSRAKRGQGGEDTPGKVPPATTFFLLALVFSFPSRVIAAAAAIVPILARGLGLCVSNRPKIPNPSSSSTSLSYSPMAPARCANPAPHGKVHQHPVYPLTRPRSGYNCRRGSSPGISLGPSTVACSAPPPPSPRRKAPPHSGRASALASIAGASTTVAMSPSNPSMLVPCWGCTFVQEDSRWLHHWYPHRCILKQFSVPCEMKYAAT

SEQ ID NO: 60562 - protein, 239 aa, Triticum aestivum
  peptide (1)..(239): Ceres Seq. ID no. 13662119
MAADQISAPREGMGQLSWAKQSRVGGPCQDQRDRSRAKRGQGGEDTPGKVPPATTFFLLALVFSFPSRVIAAAAAIVPILARGLGLCVSNRPKIPNPSSSSTSLSYSPMAPARCANPAPHGKVHQHPVYPLTRPRSGYNCRRGSSPGISLGPSTVACSAPPPPSPRRKAPPHSGRASALASIAGASTTVAMSPSNPSMLVPCWGCTFVQEDSRWLHHWYPHRCILKQFSVPCEMKYAAT

SEQ ID NO: 60563 - protein, 227 aa, Triticum aestivum
  peptide (1)..(227): Ceres Seq. ID no. 13662120
MGQLSWAKQSRVGGPCQDQRDRSRAKRGQGGEDTPGKVPPATTFFLLALVFSFPSRVIAAAAAIVPILARGLGLCVSNRPKIPNPSSSSTSLSYSPMAPARCANPAPHGKVHQHPVYPLTRPRSGYNCRRGSSPGISLGPSTVACSAPPPPSPRRKAPPHSGRASALASIAGASTTVAMSPSNPSMLVPCWGCTFVQEDSRWLHHWYPHRCILKQFSVPCEMKYAAT

SEQ ID NO: 60564 - DNA, 781 bp, Triticum aestivum
  misc_feature (1)..(781): Ceres Seq. ID no. 13664389
agctccaycgcggtggcggccsctctagagactagtggatccyccgggmtgcaggaattcgcrcgagaccattacctagaacatcctaatcgaaaaaacgatcaatctgattcctctctcgaatctcatcaatccacctcctctctcgaatctcattaatctgcctcctctctcgaatctctttctttgactcgacggggcagctgcggaaggagcagacgctcgccgggaagcctgctggattcttcttgagtacgaggactcagggaggtggacaagagaccattgcatggacaacaatcacacggctggtgcatcacgggatgctaatcgtccccatggtctacacatttggagcaggaatgttctaaatggactcgatccgtggaggctcgtgtgttcgctggtgatggctcaagagaagctagggagacagagttggctcttgctgaacatcaaggaaactacatggcttcaattgttaagagacttgcacaaccttgagaagaaatacaaaagacaaccttggtggcttctttattttctttctcgttttattcaattctatccatttttttctgagtgtttttgagttttgccattatcggaagaacattgaaccatcataaggttcttacggtaatggtcgtgtgtacaagcttcttcttattactattctctctttgattgttctcctccacaaatgtgaattcctgtcgaataaaaaaaggtttattgtgtgttaaaaaaaaaaaaaaaaaagcttatcgataccgtcgac

SEQ ID NO: 60565 - protein, 100 aa, Triticum aestivum
  peptide (1)..(100): Ceres Seq. ID no. 15220318
MDNNHTAGASRDANRPHGLHIWSRNVLNGLDPWRLVCSLVMAQEKLGRQSWLLLNIKETTWLQLLRDLHNLEKKYKRQPWWLLYFLSRFIQFYPFFSECF

SEQ ID NO: 60566 - protein, 60 aa, Triticum aestivum
  peptide (1)..(60): Ceres Seq. ID no. 15220319
MAQEKLGRQSWLLLNIKETTWLQLLRDLHNLEKKYKRQPWWLLYFLSRFIQFYPFFSECF

SEQ ID NO: 60567 - protein, 52 aa, Triticum aestivum
  peptide (1)..(52): Ceres Seq. ID no. 15220320
  misc_feature (3)..(3): Xaa is any aa, unknown or other
  misc_feature (8)..(8): Xaa is any aa, unknown or other
  misc_feature (15)..(15): Xaa is any aa, unknown or other
  misc_feature (17)..(17): Xaa is any aa, unknown or other
  misc_feature (21)..(21): Xaa is any aa, unknown or other
SSXAVAAXLETSGSXGXQEFXRDHYLEHPNRKNDQSDSSLESHQSTSSLESH

SEQ ID NO: 60568 - DNA, 1063 bp, Triticum aestivum
  misc_feature (1)..(1063): Ceres Seq. ID no. 13661994
acggtatcgataagcttttttttttttttttttggaagatcaaatgatgttactctgactgaggctctgagcaattcctctggtagctaaaaagagacttccttgaaagaacttatgctcagcagtgtcattcagtacaacagagctaacatatagcaaatccatattgtgctcgatctgattcaaaggcagcatggtatgttatatgtagactggatacaataatctccatcctgagcgtctaaaaatgtcactcccaacaacatacacgacaacaagcatgatgtaacattttaattaccttgcaagcagttcagtacataggactcaaggcgctaacgggcaattagctggcatcacaactggatgcagcgactttagtctgcagtccagctttgctccacgacctcacgtactttacggttgtactcccgcttgttctcgctgaataggcgggccgcttctgagttggcaggtgaatttgggtttgggtcgcaaagcagtgactgaatggatgtcaatatagcagctacatcatatatcgggctccactggttttggagaatatctaaacatatgcttccatctgcataaatattgggatgaaacattcgagaaacaaaccgcactgtaggtggcttattaggataatcttcagtaaactgaagtgtcagcttgaacgtaccaccatcccagggagtatcatcaggaccaaaaattacagcattccacagcattatattgttatcctgaggtgtgccacttatgcccgcaggaggatcctgcatcagtcgtttgaaatccctcatcagcctcttccttgcaggggttgacatcgtcgccttctccggctccgggcgccccggcagatcccgcgggaatctactgccgtacaaccaacgccccaggctccacgggctatagcatattgcagtggagtcgatcgggtggagacgccagcgaactaaaccgaaccggatcggggtgcagaaggtttgttcggcaacggaaagggggcggaggggaatggatttggggcgaagcgaggaagatgacaggagtg

SEQ ID NO: 60569 - protein, 76 aa, Triticum aestivum
  peptide (1)..(76): Ceres Seq. ID no. 13661995
MKHSRNKPHCRWLIRIIFSKLKCQLERTTIPGSIIRTKNYSIPQHYIVILRCATYARRRILHQSFEIPHQPLPCRG

SEQ ID NO: 60570 - protein, 52 aa, Triticum aestivum
  peptide (1)..(52): Ceres Seq. ID no. 13661996
MPAGGSCISRLKSLISLFLAGVDIVAFSGSGRPGRSRGNLLPYNQRPRLHGL

SEQ ID NO: 60571 - DNA, 711 bp, Triticum aestivum
  misc_feature (1)..(711): Ceres Seq. ID no. 15227029
tagaacatcctaatcgaaaaaatgacttttccttctccttatcgttctgtacacatctctataagtttatgggtctagactttgcactgtgagtcatctcctttagtcaacgtcgtttcttgttcttgacctacacgtttcgcaggagatcagaaacctagaaaagaaacaacaatgactcagtacaatcaacctcccgttggtgtccctcctcctcaaggcttcttcccaactcctttatcttcatgctgaacttttgggttcgttaaactgctttgatcttgtgataacaggttatccaccagaggggtatccaccgcaaggttacccaccgcagagctacccacagcaaagctatcctcctccgtatgcgccgcaatatcctccaccacagcagaatcagcagccgcatcaacagagcagtactactgggtgtctacaaggatgtcttgctgctctatgctgttgctggctattcgaatgttgtgcagagctggcactttaattgcaagagagtgtttgcaacacaagaaccttggttggaattaaaataattgctggatacaatctctggtctattatatttctttatgtttttatgttcttaggctcataaaaaaaactatggtctatccacgttctagctcgatttggatttgagaataatgggaatgtaaactggtgtagtgacattattcctttgcctccctc

SEQ ID NO: 60572 - protein, 61 aa, Triticum aestivum
  peptide (1)..(61): Ceres Seq. ID no. 15227030
MRRNILHHSRISSRINRAVLLGVYKDVLLLYAVAGYSNVVQSWHFNCKRVFATQEPWLELK

SEQ ID NO: 60573 - protein, 34 aa, Triticum aestivum
  peptide (1)..(34): Ceres Seq. ID no. 15227031
MSCCSMLLLAIRMLCRAGTLIARECLQHKNLGWN

SEQ ID NO: 60574 - DNA, 1206 bp, Triticum aestivum
  misc_feature (1)..(1206): Ceres Seq. ID no. 13661693
accccacgcaccaccagcctcccatgccccaccttctaatcccatgcaccaccgacacatagggccatggccaccccccgatctcccaccttcttccccgcccggggccccagacccctaccttcttcctcgccggagccccacaacccaccaccttctccatggcctcctcccccaccggtggccgcgctcgtcaggcccgacctcgtcggaaccccgcggcgagcccctaccccgacgggggcctatcctcctccagtggctcggaccaccatggctccgccacaaatctgaaacaagactccggcgggggactgccccccgcgctggccagggtcgtcctctctgtccatggccagacgaagactagtcgtgcgcccnntcaccgccatcgacgcgacttggtcaacagccaaagccatggccaccaagcgcgtccgcaacagcaacataattgaagtgcgccggggcacgcgatgcggttcggtgacgcgtggtcgtgtagttcgcggccaccacaggccccctcacctctacctccatggccacgtcctcaactagcggcgccctgccctcgtcgccggccatggcgccgcagccaccaggctcgagcgtctgctcttctcccttgaccctttgctagccggcgtcaccccgggccgatccaggcagttgggcgggggtgtggatgtgcagggtagtgctccccgaggtgcagtgcggcgtgcgtgcgtgcagtccaaaaatcggaggcgtgcagtgtagtagagcaccagatggcagtggccaacagcccctcgatcccgtctctctgccgacggcaactactcacatggcgctgctccttggacccgctccatcaccggcatcccgccgatacgacgagcagcaatggaggacccctgcagatcccgtgctcctcgtcaacggcagccgccacctgttgtctagatgaagaagaagcggtttgcagtccacgcgatgccggcgtgcagtctgtgtgtgcagctcccagcccaacgacggcctgatcctctccatttttggagttaatttatttcccccaatgtcacctcactccttgtagaaaggttatatatagcaactgaacctcttagttagcaatttggtgttgtcactatggaattcgaatttggtgtttggtgcttcccattgatccattttttatcctaaaatcctcaatgc

SEQ ID NO: 60575 - protein, 122 aa, Triticum aestivum
  peptide (1)..(122): Ceres Seq. ID no. 13661694
PHAPPASHAPPSNPMHHRHIGPWPPPDLPPSSPPGAPDPYLLPRRSPTTHHLLHGLLPHRWPRSSGPTSSEPRGEPLPRRGPILLQWLGPPWLRHKSETRLRRGTAPRAGQGRPLCPWPDED

SEQ ID NO: 60576 - protein, 108 aa, Triticum aestivum
  peptide (1)..(108): Ceres Seq. ID no. 13661695
MHHRHIGPWPPPDLPPSSPPGAPDPYLLPRRSPTTHHLLHGLLPHRWPRSSGPTSSEPRGEPLPRRGPILLQWLGPPWLRHKSETRLRRGTAPRAGQGRPLCPWPDED

SEQ ID NO: 60577 - protein, 98 aa, Triticum aestivum
  peptide (1)..(98): Ceres Seq. ID no. 13661696
  misc_feature (74)..(74): Xaa is any aa, unknown or other
MASSPTGGRARQARPRRNPAASPYPDGGLSSSSGSDHHGSATNLKQDSGGGLPPALARVVLSVHGQTKTSRAPXHRHRRDLVNSQSHGHQARPQQQHN

SEQ ID NO: 60578 - DNA, 1022 bp, Triticum aestivum
  misc_feature (1)..(1022): Ceres Seq. ID no. 13661747
aataataataatatcattattgcaaatgagtctgttatcatcacaggtacacaagtgaagcttcctaggtagcatcatctagataattctcaaaagctcagtttcattttcccttttttttacaaagagacaaatgaagaaagaaaggcagaggattgttctgttgtgttttcttaagcaacactgaaagaagtggctgctttctcgacgaatttattggctcccttgaaccacctcttgtctccagcttgtgctttgcagatatatagcttccctccattcacagtggctgtgatcagctgatgcttaccgccttcgtctccatctgctgttcttgtcaacaccgacaagtaatagtatggtttcccaccaacgtcctgaatgtttgtgtccaaaatgtttgctgtcgccactgcattgttgtcaaaacctatctcagaggcagtttcaccaaagtaagcttgtttacctaggagatagttgacctgagagaggaactcttcaggggaaccatagtcagtgatggatttcttgtcagtaggagtgaccatgacattgagattactagtggcgtcaaagttgtcttcatacctaaggacttgtcctggatactctacctctctgcttgggttccatttagctggcacctgcacaatgaacccatccccactgtatgcagtgaagtctgtgttcttctttggcttcccaaacacatttgcagcttcaccgtaggcggcatcagcgggtgatactttggagccaacggcggcggcgccgaccaagagtgtgagagcgagacggcgagagacggcggagttatcgtcttcatggtgttgttgtgctttacacactatctgaacgggtttggagagtgacaagtggcgctgggatgagttggaagatgatgatcgcgcggcggaggaggctagtgcgctctggtgtaggaaacacgcgctgtacgccatattctctctctctctctctctcctttactttttctctctctggtttatgatggaagt

SEQ ID NO: 60579 - protein, 69 aa, Triticum aestivum
  peptide (1)..(69): Ceres Seq. ID no. 13661748
MDFLSVGVTMTLRLLVASKLSSYLRTCPGYSTSLLGFHLAGTCTMNPSPLYAVKSVFFFGFPNTFAASP

SEQ ID NO: 60580 - protein, 60 aa, Triticum aestivum
  peptide (1)..(60): Ceres Seq. ID no. 13661749
MTLRLLVASKLSSYLRTCPGYSTSLLGFHLAGTCTMNPSPLYAVKSVFFFGFPNTFAASP

SEQ ID NO: 60581 - protein, 56 aa, Triticum aestivum
  peptide (1)..(56): Ceres Seq. ID no. 13661750
MLTAFVSICCSCQHRQVIVWFPTNVLNVCVQNVCCRHCIVVKTYLRGSFTKVSLFT

SEQ ID NO: 60582 - DNA, 788 bp, Triticum aestivum
  misc_feature (1)..(788): Ceres Seq. ID no. 13598139
aattcgcacgagatccwttmccccctccagtwmcawcytwatygtgtttaaamaccattgtcgcgcgcagcagctcgatcgtagacaagtgcagtgtatacttgtgtggcaggcggcgagcgacagaagagaggcggagcttggaggtggatcataggctgatagcgcgcacggtgctcccctctcctcctcatcgttttcgttgtggccttgtgtggtagagggcgatggagtgcaggaagatgaagcccgtccttgctctcgtgctgctgctgtcgtgccatcttcttcttccgctggtctcctctgtgcccgtgtcgagaagcgtgtccttggcaaatcatcaagcctcagcttctagtctgactccggaggcggtgcctgttcagggcgtcgtgacgacgggcgccgaggagcaaagcgtcgtcggcgaagtggtggcgcggatggacatcgagatcaacgactaccctggatccagcgccaacggccgccatgagccgcctaggagccctgggagggggtgaagtcgatccgcagaacctccgtgtatagggagattagtaatgggttagtctagtctagatagcacttgttggtgatgactcatgagttcaacgggttaaacatgtccgagcaaggaaagaagcattctaactactttctaatagtgtcaaaattggtcttacaaaaaaaaaaaaaaaaaaaaaaaaaaaaaaaaaaaaaaaaaaaaaaaaaaaaaaaaaaaaaaawtaaaaaaaaaaaaaaaaargyttatcgatmccgyc

SEQ ID NO: 60583 - protein, 99 aa, Triticum aestivum
  peptide (1)..(99): Ceres Seq. ID no. 15222258
MECRKMKPVLALVLLLSCHLLLPLVSSVPVSRSVSLANHQASASSLTPEAVPVQGVVTTGAEEQSVVGEVVARMDIEINDYPGSSANGRHEPPRSPGRG

SEQ ID NO: 60584 - protein, 94 aa, Triticum aestivum
  peptide (1)..(94): Ceres Seq. ID no. 15222259
MKPVLALVLLLSCHLLLPLVSSVPVSRSVSLANHQASASSLTPEAVPVQGVVTTGAEEQSVVGEVVARMDIEINDYPGSSANGRHEPPRSPGRG

SEQ ID NO: 60585 - protein, 72 aa, Triticum aestivum
  peptide (1)..(72): Ceres Seq. ID no. 15222260
  misc_feature (5)..(5): Xaa is any aa, unknown or other
  misc_feature (6)..(6): Xaa is any aa, unknown or other
  misc_feature (10)..(10): Xaa is any aa, unknown or other
  misc_feature (11)..(11): Xaa is any aa, unknown or other
  misc_feature (12)..(12): Xaa is any aa, unknown or other
  misc_feature (13)..(13): Xaa is any aa, unknown or other
  misc_feature (14)..(14): Xaa is any aa, unknown or other
  misc_feature (17)..(17): Xaa is any aa, unknown or other
FARDXXPPPXXXXXCLXTIVARSSSIVDKCSVYLCGRRRATEERRSLEVDHRLIARTVLPSPPHRFRCGLVW

SEQ ID NO: 60586 - DNA, 804 bp, Triticum aestivum
  misc_feature (1)..(804): Ceres Seq. ID no. 13661547
aagagccacctcccacgaacccagaacgctgaacgctgaacctgagggttggacgggagctagggttttagccgccggccatggccctctcctcgtctgcctccacactgctccgccgcctcctcggatccacccccatctcatcctcccgctcctctgtacttcgcgccgccttctgctcctcctcctcctcgggcccctcccccaccttgccaccctccgtcgaccatctccggcgatgacaccgaggtcgccaacgtaccgccgctcaccacccccaagctcttcgtcagcggcctttcaaggctaacgacagatgagaagctcaagagcgcgtttgctcccttcggacagcttcttgaagtgaaagtcataacagatagagtttctgggagatcaaagggctttggttttgtaaggtacgcgagtttacaagaagctgagaccgcatggcaggaaatgaatgccaagtttctggatggatgggtcatttttgtcgaccctgcaaaacaaagggagcagaagcctgctcctcagccggatactgcttcctcccacaccggcttcacgataaataaaactgtaggatggtgtggttagttgcttaggctcttgagtcctacagatcacctagcaagggcatggatatgctgttctcgtgtgtttagggttattaatctgctgtaagatgcttctgattgttgttctagccatagaaagttaatggcattactacctgtattaatacataaaatgataacgctgttccttttttgagataataatgttgcaacgggagggggg

SEQ ID NO: 60587 - protein, 102 aa, Triticum aestivum
  peptide (1)..(102): Ceres Seq. ID no. 15220113
RATSHEPRTLNAEPEGWTGARVLAAGHGPLLVCLHTAPPPPRIHPHLILPLLCTSRRLLLLLLLGPLPHLATLRRPSPAMTPRSPTYRRSPPPSSSSAAFQG

SEQ ID NO: 60588 - protein, 53 aa, Triticum aestivum
  peptide (1)..(53): Ceres Seq. ID no. 15220114
MALSSSASTLLRRLLGSTPISSSRSSVLRAAFCSSSSSGPSPTLPPSVDHLRR

SEQ ID NO: 60589 - DNA, 484 bp, Triticum aestivum
  misc_feature (1)..(484): Ceres Seq. ID no. 14302474
acacatcgaaaacacacaagcgaatctcaatttaaaactttccgagaaaagaaaaatgtctgggcgaggaaaaggagggaaagggattgggaaagggaggagccaagaggcacaggaaggtcctccgtgacaacatccagggcatcacgaagcctgcgattcgtcgtttagctagaagaggtggcgtgaagcgtatcagcggtttgatctacgaggagactcgcggggttctcaagatctttctcgagaatgtgattcgtgatgccgttacttacactgagcacgctaggaggaagacggtgacggcgatggatgttgtctacgcgttgaagaggcagggacgaactttatatggattcggcggttgatgggatgattttgtaaatcgcgtttgtctttagggtttgtttaatctattaaagctgttttagagtttcgtttagaatgtttcagcgttttgaattgaatgaaaacactttttctc

SEQ ID NO: 60590 - protein, 56 aa, Triticum aestivum
  peptide (1)..(56): Ceres Seq. ID no. 14302475
THRKHTSESQFKTFREKKNVWARKRRERDWEREEPRGTGRSSVTTSRASRSLRFVV

SEQ ID NO: 60591 - protein, 42 aa, Triticum aestivum
  peptide (1)..(42): Ceres Seq. ID no. 14302476
HIENTQANLNLKLSEKRKMSGRGKGGKGIGKGRSQEAQEGPP

SEQ ID NO: 60592 - DNA, 894 bp, Triticum aestivum
  misc_feature (1)..(894): Ceres Seq. ID no. 13664169
cggccggccgcatcatcggcggcgagtaaaactcccgccgcgctcgtcctcacatgaagaaccaccggggagatgggagcccggctccgcgtgccggagcggccggaatggccgttcgacggcaagcacgccagtgggacgccgagggccaagaggcggcggcgaacttccacgcgcggcgaaggcgggtgggtggccggagtcggggacagcaggcacggcggcgcggcagcgtcgcccgggacgcgcgcaaccgtcggcaacctctgaagcggtgcgtcgccgacagtctcaacaaccgctggagtcggatgctgcagcggcgcggccccgacggttccaacctcctgaggcgctgctaccaccgggtcaaactacccatccatgcgctgagcaccaaaacggcggcggcggagccgccagtgccggatcgatgcccccatgggcctcgagccttggtgcagccggaccggcgagaagccgggcgggcacatcgggctgcacgggctggttcgagggccccgcgccgtgccggtggttgcgacggaggttctggcggcgctggttccaacctccacgccggaagcggcggaggtcgcgcacatgacgctggaagcggcgatgtccgccaacaccatggcggcggtggcgagcgacgaagcggtggccacggccattggcgcgaaggaggcgaagaaacagggacattggaactcgaggcatggttccgtttctcaccttttctctgttcttctcgtcggaatcgctctcgccggagtgcgtgctgataacgtgttagtgtcgattgagagccaaagcgaacgagagacaaatgaatcaattgtatctttattgatggttacagatgccttatatacaggggaaacagacgcc

SEQ ID NO: 60593 - protein, 244 aa, Triticum aestivum
  peptide (1)..(244): Ceres Seq. ID no. 13664170
MKNHRGDGSPAPRAGAAGMAVRRQARQWDAEGQEAAANFHARRRRVGGRSRGQQARRRGSVARDARNRRQPLKRCVADSLNNRWSRMLQRRGPDGSNLLRRCYHRVKLPIHALSTKTAAAEPPVPDRCPHGPRALVQPDRREAGRAHRAARAGSRAPRRAGGCDGGSGGAGSNLHAGSGGGRAHDAGSGDVRQHHGGGGERRSGGHGHWREGGEETGTLELEAWFRFSPFLCSSRRNRSRRSAC

SEQ ID NO: 60594 - protein, 226 aa, Triticum aestivum
  peptide (1)..(226): Ceres Seq. ID no. 13664171
MAVRRQARQWDAEGQEAAANFHARRRRVGGRSRGQQARRRGSVARDARNRRQPLKRCVADSLNNRWSRMLQRRGPDGSNLLRRCYHRVKLPIHALSTKTAAAEPPVPDRCPHGPRALVQPDRREAGRAHRAARAGSRAPRRAGGCDGGSGGAGSNLHAGSGGGRAHDAGSGDVRQHHGGGGERRSGGHGHWREGGEETGTLELEAWFRFSPFLCSSRRNRSRRSAC

SEQ ID NO: 60595 - protein, 201 aa, Triticum aestivum
  peptide (1)..(201): Ceres Seq. ID no. 13664172
GRPHHRRRVKLPPRSSSHEEPPGRWEPGSACRSGRNGRSTASTPVGRRGPRGGGELPRAAKAGGWPESGTAGTAARQRRPGRAQPSATSEAVRRRQSQQPLESDAAAARPRRFQPPEALLPPGQTTHPCAEHQNGGGGAASAGSMPPWASSLGAAGPARSRAGTSGCTGWFEGPAPCRWLRRRFWRRWFQPPRRKRRRSRT

SEQ ID NO: 60596 - DNA, 1225 bp, Triticum aestivum
  misc_feature (1)..(1225): Ceres Seq. ID no. 13664309
gtcgacggtatcgataagcttttttttttttttttttgtgtagtgctaacaaagtacactattcgcaatagattatagttttgtttctcgagctgtaaactgaagttggtctagaatatcagttcatgggtagcatgaaagaggtggaatggaagcaccggccaccgggtgattcctcgagctgcagcgacatctatgcgagctggacaaatcctctggcgatggtgccgttggcgccctggggcaggaacccgccggggacctgctcgttgcgagagccgtagaggatgcgcagcgcctccgccggggtgcgctggtacccaagcgagtccacgccggcgccgaggatgttgctgatggtgcgccgctcggcgccctggtgccggtccagcaccttgactccctcgtccttggcgccgcagccggacaggtcgttgcgccagtcggagatccggcgcgtgaactcggccaccgtgcggcccttgtagggcgccaccgtctcgtcggcgcgctggtacagcagcatcctgatcaccgcgtcctgcccggcctccaccgccaggacgctggcgtggaggcgcttggaggcgtagcccatgaggttggggctgatgccgacggcggcggcggcggtgacgtgaggcaggatgtaggaggcgaggaggaagttgacggtgccgttgtaggcgtcgaagggcgggtcgaggcgcgcgcccatggcgtcgtccatgatggcggcgaagcggtcggcgctgaggtcgatgggcgggcgcgggaacccgccgttggcctgcgtgatggccctgatgtggcccacctcctggtacccgagctcggcggcgatctcggtggtgcgaaagtcgaggttggccttgcgcgcgccgacgggcgccgggccgcccgccgagaggttgcggtcgaggtagtcgatgccccgccccagcgcggcgtggaggaaccactcagcctccacgaacttggggttgagcaggaactgcagctgctccatgtcgctcgggtacaccgcgatggcgccccgccgcggcaggctcggccggcaccgcgggtcgtccgtctgtgtgactgtgacggtcgccgcgagcgcgacgacctgcaggcccgcggccagcagctgtagcaggaaggcgccgtgcgcgcgagccatggccagggaggacggagcgcctgtcgtgccgtgctagtgagagctcgcgtgcttggctct

SEQ ID NO: 60597 - protein, 90 aa, Triticum aestivum
  peptide (1)..(90): Ceres Seq. ID no. 13664310
MPRPSAAWRNHSASTNLGLSRNCSCSMSLGYTAMAPRRGRLGRHRGSSVCVTVTVAASATTCRPAASSCSRKAPCARAMAREDGAPVVPC

SEQ ID NO: 60598 - protein, 69 aa, Triticum aestivum
  peptide (1)..(69): Ceres Seq. ID no. 13664311
MASSMMAAKRSALRSMGGRGNPPLACVMALMWPTSWYPSSAAISVVRKSRLALRAPTGAGPPAERLRSR

SEQ ID NO: 60599 - protein, 66 aa, Triticum aestivum
  peptide (1)..(66): Ceres Seq. ID no. 13664312
MRSASAGVRWYPSESTPAPRMLLMVRRSAPWCRSSTLTPSSLAPQPDRSLRQSEIRRVNSATVRPL

SEQ ID NO: 60600 - protein, 64 aa, Triticum aestivum
  peptide (1)..(64): Ceres Seq. ID no. 13664313
MSLGYTAMAPRRGRLGRHRGSSVCVTVTVAASATTCRPAASSCSRKAPCARAMAREDGAPVVPC
